United States Patent Application Publication US 2006/0123505 A1 - sequence listing, part 4

SEQ ID NO: 7072 - DNA, 1479 bp, Oryza sativa
  ref <308>: DATABASE ACCESSION NUMBER: AK064201
  ref <309>: DATABASE ENTRY DATE: 2001-12-06
ggacttatcagcagcggcggccgcttggttagtttggaagcgagatcgatttgcaggggaggaggagcacgatgcggcggtacgacgagatgccgccggcgatggtgctggtgccgccgcccttcacatttcccgccgccgccgcccgcaccaggatggcggtgccggcgtacgaggtcatgttcgggaagctccagcggcggagcctgtttgacgattacttcgatcaagttgggagcataacctcagggatgattatgttgaggccactggttgattctcatgttgatttgaccgccaaaatgactacaacgggtggtgaggctctgtttcgctggcagagatatttggatgatccaaatacctttatggaccttcatttgtcaacaccaaaacccatggtgcagctgaggtcgtgtgcttactatcctaagtatcgaattggtgcatttggaacattccctttacttaaggcaaacagggactgttcagaaggagattatggtattatgggtttaagatatggttcagagaatctgtctattggggcatcctttctgccgtttgctttatctggtcaagtaccctacggtgcatggttagttggcaggaaagggaatataagcgcagggatacaatacaagccactctcaggtgaaagcatgcatcctgtgcctttgacagacttgaagaactggaattgtgcaattagttatggtatgggctcaactagcccactcagcccttcattcaatttttctctagagcttgtcagaaatacacagctagttgcatcgttctatcagcacttcgttgttcagagaagggtaatgaatccccgtgaagaagaacacattatcggaaccacgaactttgttgactttgggcttgagttagccacaagcttggataaagacaaggcgaaagaaaatgctagcaatccctcattccaggtagctgcaagttggcaggctagtaagaactttctagtaaagggaaagttaggtccctccaaatcttccatggctttggcaatgaaatcttggtggagaccattctttacatttagcttcacagctatgtatgatcatttgaaggggacaggatcatatggatttgggatttccattgaggatcttaaagagcccagttatcaaatggcttattcgaactatgtgattgtcacacaaaacaaagaggatgtggaaccccggtttttaaagaagctagggaagaagtacatatttcagccggacattgattcaggcaattatgacaatttgcctacagggttgaagccaatagacaagatattgtaactatattccaatagacaagatattgtaatcatataatttccattctttggtgtaggaacttcaatatagcttaatgtctcgttttactttttttttaaaaaaaatacctgcatttttttctcatagtgaatattgtggcatttttctaaaaaaaaaaaag

SEQ ID NO: 7073 - DNA, 1049 bp, Oryza sativa
  ref <308>: DATABASE ACCESSION NUMBER: AK064202
  ref <309>: DATABASE ENTRY DATE: 2001-12-06
atttgccaagccaatcgggagatcgagcagagctgcagagagcagagggagatcggagatcgagagcgcgcggggggagctagagctaggtagcgagggaggctgctgcagcagcgagaagcccaagcccctagggcgatggcggcggaggccgggagcggcggcgtggtgaagcacagtaagctgaagtacctcgtcgccagctccgtctccgaggcctgcaacagctccgtcctgctcctcggcccctgcggctgtgaggggtcgacatggttctagacgatctgaagaaggagcatcctaatgcaatatcctgactttacttgttgctagaaatgtatccatgtatttgcgtaatacacgaccaatgatttacctacgttggccgtgaaataaacacaggttacgagaaaatagtttgtttcagggcgctttagggcggaaggggacaaggctaaatgtagaaattcctttcatatttttatattctcaaatgcatggcctagccaaaaggacaatatatcataatgcacaattagttagactttgttaacttgtagtccagttggatcattgtgcaaacttttttcagatcaggctgaatgggatgctacatagtgatgacaactgtgccacgaaggaaattgcgaggcaactttgtttggaacatcagttatcattttccaaaatggcttcttcagatgacaacacggaattcatgattgacatgttacggtcagtgaagtgttaacatgatgagcatctgtacatcatagagacatcctttttcctgggtgaatttcacctaatctgagccatccttttacttctatgactgagatcacctttttctaattaacaacccttatactcagtttagatgtggagggaatatacatacttttctcttcatgtagcgatgatgaggaagatcggtactgaggaccggcaccagtggcatcttatgtatggtttcagatttactagggatgtatgtatggtttcagatcgtggtttgggatgaataaattgagtttaggttttagtgc

SEQ ID NO: 7074 - DNA, 1600 bp, Oryza sativa
  ref <308>: DATABASE ACCESSION NUMBER: AK064203
  ref <309>: DATABASE ENTRY DATE: 2001-12-06
gatgcagctcttttattattcttgaaatatgctaatgaagaaagatctttgagaggagggacaaagttggctgttcatgtcttgcgtctatgccaagccaatattgaatctcatgataataatcaaatacaattgccaactctagttggcctcctttgcctgcttgctggcaaaaaggcctacaacaatgtatatcttcgacataatgtgttctgcatattgcaaattgctgctggaaggtctccaacactgcatggagttccgaaggttgtcactccacctcaagttgtcctggagatatctagtgatcagcacactaaagctgattcctcagttcctcaacaatcaaggcctcaagaaccttccactagcactcctagtgtccgtgaagtcttacctacctctggacccttaaaagatgcggataatatatctaactgcagtgagagaaggaatgttatttttatacccacaaaagatgcggataatatatctaactgcagtgagagaaggaatgttatttctatacccacaaaagatgcggataatatatctaactgcagtgagagaaggaatgttgtcaaaataagggttaaacgtgcttcatcatccagtaaagcagatgatgctgatcacagagatcattcacatggtagaaatgaaaatgaagcaggtccatgtagctctatgtcagtggatgcacctatgactgaagcaccagaaccagtaaatgtaagtaatcataacatcgaggagcaaaactcatgccatgatagggaacaaaactcttgccacgatagggaatcaaggatgtcagcaagcattggcaatgtcaaactaatggacaagtatgaagtatccaaggagctacagtgcacagccgattccaggctagatgctctccccaaggatcacttctctcccgttgttaatggacaggaagtcctagacaagccacggagtcagctagaagtagtctccacaagctatgatggaaatcaagccccagactccatgaatggattggaaacgaaggagaagaagaaggacaagaaagacaaaaagcggcatcgagataagaaagatgatcctgagtatctggagaaaaaacggcttaagaaagagaagaaaaggatggagaaagaaaaaggcaaaaagcagaaggaaggtgaaggggtttcttcttccgaacagaagaacacagcgaaaccttcagactcgcaaggaacctcatcggcaaggccaccagctccaatgcgaattcctgaacccaagatatcaaatgtgggtacgccagtagatactacacggacattgacaactactaagattaggatcaaagtcaagcctctgcaaagataatttgaagagagttggcagagaatcatattgtgcctgggtcaccttttgtaagaaatactgtacagtagagaaaattcgcgatctgtagggtgtacgatgagtagccaatttttaattgaatggctgatgtatcctgtagagagatcatactggcccagtaaatttctggggtaattggtgccaatttcgagcattattgcttgtggtgaaatcatgaggcctcatgctagcttgattt

SEQ ID NO: 7075 - DNA, 2282 bp, Oryza sativa
  ref <308>: DATABASE ACCESSION NUMBER: AK064204
  ref <309>: DATABASE ENTRY DATE: 2001-12-06
agtaaaaaattcagtcaaacttcaaattagtttttagaagtttgcaactgatttttttttctcccaaaagttcaaaatcgaactatccccgagagagaccgaggctgaaagaagccaatctgcccaaaagccgaaacatccccttgtctcaactccgttcctggatgaaacccagcccgcttgtccggcaatgcctcgccgtcaccatcttccactcgaagaacacggctccgcttgctcccgccgccgccgctcaactccacgcgctcctcctcacgtccggccaccttctccgctatcacggcctccatccgctcttcatggtgtattgcgcatgtggccgtccctccagcgcccacaacctgctcgcgcaaatgccccaaccaccaccggtttctttctccaactcactgctccgttcgtacaccggcctcggctgccaccgggaggccctcgcggtttactcggcgatgcgcgccttcgaccacctcaccttccccttcgccgcgaaggcctgcgccggccttcgtctcggccgccatgggcgtgccgtgcactgccgcgcgctcgccgctggtttcggcggcgacacgtacgtgcagaacgccctcatttccatgtacatgagctgcggcgacgtgggcgcagcggaggcggtgttcggggcgatgcggaaccggacagtcgtgtcctggaatgcggtcatcgccgggtgcgtcaagaacggctacgcggagagggcgctggaagtgttcggcgagatggccgctgatggtgtcgggatcgaccgtgccacggctgtgtcagtgctgccagcttgtgcgcaagccaaggacttgaacactgggagagccgtgcaccggcttgttgaggacaaaggcttgggggattatgttgcagtgaagaacgcattgatcgacatgtacgggaagtgtaggagcttggaggatgcacgaagggtgtttgatcactgcaaacatgataaagatgttgtttcttggacagcgatgattggcgcttatgtgctgaacgaccgtgcttttgaggccatttctcttggttgtcagatgctgatgtctggggcagcatggcccaatggagtgacaatggtgtatctgctctcagcatgcgccagcatgccgtcagggaagcatgccaagtgcacacatgcactctgcattagacttggccttaaatcagacattgctgttgaaactgcgcttatcgacgcttatgcgaggtgcggtaagatgaagctgatgagattaacacttgagaggggctcatggcgtgcagaaacatggaatgcagccttgtctggttataccgtcagtggacgggagaagaaagctatagaattgttcaagcggatgattgctgaatcggtgcgcccagactctgcaacaatggcaagcatcctgccggcctatgcagaatctgcagacctgaaagaagggaagaacattcactgtttcttactgactctcggattcctcagaagcacagagatcgccactggtttgattgatgtctattctagggctggtgacttggatgctgcgtgggctctcttccagtggctacctgagaaggacgttgttgcctggacaacgatcatcgccgggtacggtatacatggtcacgcccgaactgccatcctgctctacgacaggatggtggagtcaggagggaagccgaatactgtgaccatcgccactttgctgtatgcatgcagccacgccggcatgatagacgaaggcattaaggtgttcaaggacatgcgcaacgtccatggtttgatgccaaatggcgagcactactcgtgcctggttgacatgcttggccgtgctgggaggattgaggaggctcatcgtctcatccaagatatgccattcgagccgagcacctcggtatggggtgctctgcttggtgcctgtgttctacacaagaatgtcgagtttggggaggttgcggcaaagcgattatttcagcttgatccggagaacactgggagttacgtgctgcttggtaacatatatgctgcagctgacagatggagggatgttcaggatgtccggagaatgatggtggaaaggggcctcctaaaagaaccaggatctagtttggttgaggcaagatctgtacaatgccgaacagcaatgccatagaatgtaagttttgtacttatatgagatagatcaaagcacttcatcttttatgcagattctatcagttggaaaattgactaaaattttaagaaaaaaaactaattgttgccctgg

SEQ ID NO: 7076 - DNA, 1473 bp, Oryza sativa
  ref <308>: DATABASE ACCESSION NUMBER: AK064205
  ref <309>: DATABASE ENTRY DATE: 2001-12-06
atcatccagttgcacaccgaaaatggcggcggcggcggagagcaaggcggggaaatcgccggaggagctcctctgcgcggcggcggagtccggtccgcggaggccatcaccgggctcctcgccgaaggcgccgacccgacccacttcgatgcctccgggttgaccccgctgatgcacgcggccaccggtggccacgccgccgtcgtgcagcttctcctcgacgccggcgcgccatggaacgcgctctcccccacggggatctccgcgggagacctcgcctccgattccgccaccttcgacctcctcctcgaccacgccctccgctccgagctcgtcctcggcaccgtcgctcgccgccaagcggggcccgcggactcccccgccgagagctacctcgaatccagggtttcattcagcgaggagagggtgatggacgcggatagcaaggccgtgatgatggagtgggagcggccgctgatggaggcgcacgcgcgggcggtgtgctccggcggcaaggtgctcaacgtgggattcgggatggggctcgtggacacggcgatccagaggtacgagcccgaggagcacaccatcgtcgaggcccacccggaggtgtacgcccggatgctcaagctcggctggggcgagaagaagaatgtcaaggtcgtgttcggacggtggcaggacgtgctcccgcagctcggctcttatgatggtatattcttcgacacctatggagaatactacgaggatgagagagttccaccaacatcttcctaagctattgaagcctggagggatctactcgtatttcaatggcctctgtggcgataatgccttcttccacgttgtgtattgccagctcgtagcgttagagttggcaaatcttggctactcgacacagttcatcccgctcccagtcaaagattgtctttcagaggaaatatggaatggggtgaagcagaaatactggcaattggatacttaccacctcccagtttgccaagcagaatcagaaccggagcaataatccaatggattgtcagcaaattgtgctaagcgtcaatggccagcaaattgtgctaagcgtcaatggctggctgctttggctgctgctacgtttgttcaagcgtgtttctgaattccatacaccatctccggagctggaacttccatcgggcatgtgacgtttccactgcaatcgactactaatctactcctgtagatgcttatcggctgtggcctgtagccaatgaaagagaactttcaccgaaactttgttttcttggcagtgatgttacaattttgttaggtctgcgaatgctgctgtttttttttctttttttcgttccaagccgcccgtgtcgttgttctggaaaggcgggaacaacacctagctttcccagttttttttctcaatgttctggacgcggttctcttcttttctgcagcaaacaaggatagttcgaactcgtt

SEQ ID NO: 7077 - DNA, 1536 bp, Oryza sativa
  ref <308>: DATABASE ACCESSION NUMBER: AK064206
  ref <309>: DATABASE ENTRY DATE: 2001-12-06
tattgtaatcctcgtaggctgattggtttgaatacttgaatggtcaagagaatgcaaaattctttatgaatggaaccgtgcagggtaacgtacttttcttgagcacatccagcagtagcatcttggtatcagtgaagaactgtgtatccgtttcatacctcagtgtgcaccacaccccaagaatggccgctcccatctgggtagtgctaatcttgctctgcctgcctgagatgataccatccaggcagttcatgcattgctccgatggcatgccctgcatgcactgcactagcccatacaccgtctgtcctgtctcctcaaacctctgtttgcctactgcatacctctctggtcgactcactgcagcatcagtaagtgcacgcagcaccttggtgacaagatcctcaaattgcttagccacagaagctgtcacagcattcaggttagtattcacagtgcactccggcacatttgtgaagctggagataaaatcctggttggagaagtgtatcctggcctggtcttggttgtaatagtaggtcaccttcttggtcatggccttgggagagtaagagttgctgtttttgctgttgatggctgcatcaagggcctcagttaggtgcttgcgacaatcggagccatcagaatcgcctcgacaagaaactgcaccatagactttgtccaggcctgtgccggccatgccagtagctgagtgcagctctgtggcattagcaatgagcgttgcggcaagggagataaggttggatttgtaggtactgtttggcatgtaaatggcgccattatagtcactgcagagttcctggccgacagatggtgctgggcaggagatgaagagaactaggagagacaatagcagcatactgcagtaactagagagcaatggaaaagctttgcttgtggatcgtcatggatgagttccaaataccatcttggttttgtctaccaagagagttgtagttagacttttccttgaaataggatttggcagatggtgatgtttcaaggagggatagctccagaaacagcgattattcgatctgggaacctgacattcactttcctccatcatcggctgtggacttcctctatacaggggatgtcatcgctgctaagcatagcaacaacatcagacatggtggggcgctccgctgatttctcttgaacacacattagtgccaccacaagacatttcatcatttctccaggaaacagaaaaacaggcgtgtgcagatgatggaaagagagtaaacagtagcaatgatcaagattgcatgtcccttcttttgccctgaattttgaaacatagaatggtttacatgtagtgaatgaatcagttctacaatatcaaagacttagctcctgaattttgctaagatagtgtgccttacggttggattcaagtgttcgtttctttctttttggccaaattgatcagctaaattgaatcttaatttgtaccataccgaaaggattcatcttaaactttcagtcaatatatacatgtaaaatatacat

SEQ ID NO: 7078 - DNA, 1951 bp, Oryza sativa
  ref <308>: DATABASE ACCESSION NUMBER: AK064207
  ref <309>: DATABASE ENTRY DATE: 2001-12-06
cgataagatcaaaaatcgaaagaaaagcgaaattaaatatggcacacgagggtgacagccgtgcactgtccaggcgcgtacacgtcgctcgcgtacgtactttgtgtgcagtagcagttggtactcctgcacagtgtacgcgcgcgcgacatctgtacactacgtacacgtttacgtatacgtgtatatgcttgtcgtccacgtaggcaacctccgctactcggtctctaagagcttacaatagcagtctataaaccagctataaacatattttaaagagataaaaagaagagagaaaagcagcgggctataaatctgtagccagctgtaacacggactccaagacgtaatatgtgtatgacatgtgagatcaggcattaatagtattgtaagcaactattgtatgaattggctattatattggctatagatgatttgaagctaacagttggctatactattaaacttgctctaacgcagagctgatcaccgatcagagtgtagtacagcgaaataagcgtcgccagactttaccctaaattcaggactatatgtttctgttttctcgcgcacgcttaacaaactgctaaacaataatttttaaaaaaattataagaaagttgttttaggaaaatgtattaatccatttttcaatttttttataactaatagttaagtatgcattaatctctgttttatgtgtgaagggagcggttccccaactgctccagaagaagaacatagcttaattaaatttcctacggtgaaatcagtctatacagatttaagttctaaaattgatacaaatattaatatttactactaattgttttttcagtattagacaacgagatgtctatggagacatcatagtagtatccagcagcctatgtggcgttgcattgggaagcctagcgcggtgagtcaccctccaccgtggcatggccccacctgtcagtttgtaactgccaaccaagtcactgaaaaattagatggacgattttgtctccgtaaaacagagtgaaattaggaggaccactggatccgctatgccagggatgtactcatgatctgggccatccacgtgtctgattaaatacttgaccctgacatgacatacacgcatacttaatgcattagcttaattagctagcaacaattggtttgggatcatggcaatgcaaagcttctactactagctagctaggcatgatcatgcaagaggcagcctgatgactctgatgtatgttaacaactgcaagcaagaggggttatttcactagtcttgtcttcacatgttaactgcatgagtagctgcttagtttggagaggcagtgtcctaatccagcaaagggcagggcagggtcagaccagaaatgctgcctcatggtaagtgggaacattagctttctcactggaatatgatgccattgcttgaaacaactgtgctcactgtagtgtaacaaaatcttgttcctgctatctttgataatggtacccgtgtttatcggaaaaatgcttactgtaccagcctaatgaagacgaagttgaagaagaagatgatgaacaagaagaggaaaagatctttccaaagcagccagcaaaaaaaggatttataaaaaagaaaagaaaagaaaagaaaggtagccaaaggagaaagcaggggagaagagaagaagatgagatgagctgagatgctgcagccacatgaggaatgctaccttctgtctccacttgatcatggaggagaccaagaccagccaaccaaatcaccaattagttaactgcatttgctactaattgctagtgctaaacaaaggtttggttaaacggtagccaccagtaaacaaatcagtatgcaaaagaggaatggggttttaatattaccaaagtcagcaggagcgagccagtaacatcctagctggaccagcttcctgggaatttttatttc

SEQ ID NO: 7079 - DNA, 1382 bp, Oryza sativa
  ref <308>: DATABASE ACCESSION NUMBER: AK064208
  ref <309>: DATABASE ENTRY DATE: 2001-12-06
aaaataaagaaggggactcagggcgatgcttcagctctgaagccaacacttatgactgcagtacctgctatacttgatcgtgttcgtgatggtgttagaaaaaatgttgatgcaaagggtggtgcagcaaagaaactatttgatattgcctatagccgtcggttagctgctatcaatggaagttggttaggtgcatggggattagagaagcatttgtgggatatgcttgtctttcagaaggtgcgtgcgatcttgggaggaaggattcgatttatactttcaggtggagcacctctgtctggagatactcagagatttatcaatatatgccttggggctccaatagggcaaggatatggtcttactgaaacatgtgctggcgggacattttccgagtatgatgacaattctgttggccgtgttggtgctccattgccttgctcatacattaagttgatagattgggctgaaggtggatatttaactaatgattcaccaatgcctcggggtgaaatagttattggaggtccaaacgtgacaaaaggctactttaagaatgaggcaaaaacaaatgaagtctacaaggatgatgaaagaggcatgcggtggttctattctggtgacattggacgtttgcatccagatggttgccttgaaattattgaccgtaagaaggacatagtcaagcttcaacatggtgaatatgtatctttaggaaaggtggaggctgctttgagtgtgtgcccatatgttgacaacatcatgatccatgctgaccccttccacaactactgcgttgcacttgttgtagttgcacacagtgaactgaaaagctgggcctcacaacaaggcatcacgtattcggatgtttcagattcgtgtgagaagcaagagactgtcaaagaagtccttcaatgtttagcaaaggctgccaagcaagcgcggctggagaagtttgagatcccagccaaagtcaagctggtgccggagccatggaccccagagtcaggactcgtcacggctgccctcaagctcaagagggaggccatcaagaaggcgtacgaggatgaccttgcggcgttatacagctaaagttgccgctgcattctgtttttctgatactgaagaaaaatcaacagcacgagttctgtctcgtggcaataacaaaattttctttcctagtttcgaaacatccaaaaaccactgtttttgcaatggcatcagtgggtagcgatgaaacagatgcaggtcaatgcatttggaagaagcattcctgaaatggggaacaggtagatttggaattctgtggtattggccttgtttcttgtaaattacctgagattttcttagctctttgagaggttatctgagattttcggtac

SEQ ID NO: 7080 - DNA, 2132 bp, Oryza sativa
  ref <308>: DATABASE ACCESSION NUMBER: AK064209
  ref <309>: DATABASE ENTRY DATE: 2001-12-06
tgttggagccacaggacattgtggattgtgctgcaagcaaattgatggggtctaacaacaccactgaatatcctcttcttattcaactccgcctgttctacaatggatctgctgtaaagggaacagtcctagttgacaagcggcttcctcctaggactatacatatccgaccatcaatgttaaaaataaaaacttatccagaattatctggtgtccaatctgtcaactcattggacatagtctctgcacgaaatgccaagaaaagtctatctggggttcagtccgtgaattcttttgaaatagtctctacaagcaatcgatcaggaaggacattcacatcaaataatttaattgcattacttcactatggaggagttccagaagaattctttatggagcttctgcagactgcgattgaagaggctgacaatgctcgttttgattatgctggcgcactgaacattgcattcaactatgctgacatggaagattcaatgccagcacggatgattctttccggaatcccactagaagagtcgtacttgcaatctaggctggatttcttgtctctactggaaagaaaaggaatcaagaatggaaagataccaattgatgactgctattatttgatgggtactgcagaccctacaggaaaacttggacctaatgaagtctgcgtgatacttgattatggccaagtttctggagatgttcttgtgtataaatatcctggcttacatcctggtgatatacatgtcttgaaggcaacatatagtagcgacatagagaaggttgtgggaaattctaaacatgcgatactcttccctactactggacaacggtctttggctgatgagatggccaatagtgattttgatggtgacatctactgggtctcattaaacccaaagctgttagaacattttaaaccttcgaaaccatgggttccagctattacaccaaatgggaccaagcaaaagggacccgaggattttaatgaatccgagcttgaaagagtgctatttcatgagttcttgaaaacaagatttgcacctagttatgcgcgtgctacggcagctactaactggttagtatatatggatcggctattaactgtttcacttgacgaaagtgaaaagaaactaattgagaaaaagatgctcaagttagttgacctttattatttggctttggatgctccaaagatggggaacaaggtcaatattccacgtgatctaatggtaaaacaatacccccacttcatggaccgcagtccttcgtaccattcgtcgtccatacttggaaaaatctatgataaagcaggtgatccaaaaccgctgcgatctgataatgttcaaccaaccagtatatcatcgctcccatgtttcgcggagagagacgtgcctccagcaatcaagcaactctggcaacaccgctataacgagtacttggctgatagttcacttctctatgccgaagaggcggatgaagaagaaaagaagataaagtttcaggaactctatgaaaagtacaagcatttgctctacggtgcatctgaatttgaagagacaccgagggacctcgacgacgtgttctccgaggcctgtgcaatctaccagatcgcgtatgagaaagcacggtctgccaacaacgtcgccagatgtggcttcgcttggaaagttgccggccgtgcattgtgccatttctacacggtcaagaatgagggtaacgctgtggtttgctcgctccaacttctccgcaacttcagatttaccaagaagtaccgcaagtgaagtagcatcgcatttagggatagttaatttgtatgaagtttggcgtatgtagtattgtaacagcaatataggagcaggagcggactaataaggacttcttaagctgatggtttagtaggaagatgtcaggacagactttataactaagctgatgggcctattaacatggctgcttgaagtgaacacaagcagtcaagctaaagattgctacgttagctctggaatcatttcagcatgcatgcatgcatcatgtatcactgaacaaatgcacattcagagcttgcatgactgacatgtgaagtctaaatgaaatatcaagagcttgcatattcagagtgg

SEQ ID NO: 7081 - DNA, 2521 bp, Oryza sativa
  ref <308>: DATABASE ACCESSION NUMBER: AK064210
  ref <309>: DATABASE ENTRY DATE: 2001-12-06
tgatgtttgacgtgacttctagaaaataaaaaatgaattgcaacgatagttgtgcttaatttttagaatcacaatgataataaagaaagagtaggcggcggacgggccataaaggagcatagtggcattgtttgacgagacttctaaaaattataaaaaataaaacccaacaagacaataaactctaaaaactacaaggttcaatttttaaaggttccgaacttcgaaaaggtaaaaaaaaacaatgataatcatgttcgattttaaaatctcaatgacaataaagaagggactcagcgggcgagccgtagagaagtacaatggaaaagccgctgatggtttggcgggatttctagaaagtaaaaatgaaccgaaacgataattatgttcgatttttaaaatctcaatgacaataaagaaaagaggcagtagacgggccatagaggagtataatggcaacgtttgacgggacgtctagaaattataaaaacgaaacccaacttgacaataaactctaaaaactataagatctaatttttaaaggtttcaaggagaatgaatagaaatagtggtatatcgagcaagcaaataaagaaggagatgtcataaggggtagcaactggtgtgacttttaaaaaatatatataattagaaacacggggatgataaggtttaatctttcaaactcttaagacatgagatagctatttaataaattttaagtaaaatcatactaaaaaattatatgattttatttaggtgctagccgcgcaattgcgcgggctacccagctagtttcataataacacaccaaatgtaggaattaagatgcagcactttgatactattgaatactgtctctaccagagcctcgtacaggtggttaatagtagcaactaaagcagtccacgagttttctaaaacaaaattgtgatgcaggcatgcagctgctctccattctcaactattattatcaggaaagtgcttccaaaatatcaaaatattaccgtcttagtcaatgtgtaaacacttgtgtacaaatacaacaccacgtgacagtgtaactaaccatcataagtagaacatatagttcttatacactgaaaaataatataaatcgttgttgcagttgcagtatattatcttttagacatatatttattggttaacatttgtgctacaattcatgcaacgatagaagaaaacaagctttactcacctggcaattacaacaggtattccttttgatgaagcagtaaaagcagctgctactttagcttgcattccacctcttcccacacgagatttctccccaaagctaattaacttcccatgttgttcatggacgtatgtgtggataatcttcgattgtggatcgctaggtggaccgctatagagcccctccacatcactgagcatgataaggagatcagctttaagttcttgcgctaacagtctggccaaactatcgttatcccagaatatgccagatgaatcctacacacggttgatcattacaatcagtaaagtgtaaaaggttagtgtttgttgttaatggaatttggaatacgtatatatcagtgaagctcccagtgcacacaaatcacattaggaaacacacctcgtatggttgcctcctggtactgatggcgtcattctcattaaatactggtataaccttgagatctaacagagaattaacagtctcgcggagctggttcccaaaacttggatccataaaatcacgatccgtaacaagaagctgagatgatgttacgtcaagctgcagcgaaggaagtttaacgtgtcaaaatatatgcaaaaaaatcatattttttacacaaaaatccatcaggaatggcacgccaacctggctaaataacgtgtcatagatcgccatcagcacactctgaccgacggcagcgcaggccttcccgtccatgtccatctgtgggttctgcagatcagcgaaactgcaagcaagagagagatcagaaatgaatgctacagcagaacactgtttactgttcagagccaattaactctctgcaacctgctgttgacgagcttccggtacttgagcctctgcctcccaacaccaacagcaccaggtgaccagaatcacctcgtacccctcaaaatttagctgcttcacctgggaaatttatcacaccggttaactgacactgattagcacaagctcggttggtcagagcattaacctctggtaaaaaaatttggggggaaagtttacctgttcacacagagcaccgagcctgcccatagccaaccggccattcggcccagtcacaacagcggtgccgacctgtcgaattaagccagccaacagaacatatatttagagggaaaaaaaataatatccttcattagagaatggtactaattaatgagtggtaaatagttaaacctaaaaacatatttatggtaaatagttaaacctaaaaaacgtatgaatggtaaagagttaaacataaaaatatagccatagtgattttaaatt

SEQ ID NO: 7082 - DNA, 1331 bp, Oryza sativa
  ref <308>: DATABASE ACCESSION NUMBER: AK064211
  ref <309>: DATABASE ENTRY DATE: 2001-12-06
ggagagagcagaggaagccaacatcggcgaaggctcaggctcgtcggagtgggagctgggcgtccggcagctgtgcgacagcggcgtcaccaccctgcccgcccgctacgtcctcccgcccgccgaccgccccgcccgctacgtcacaccacctgctctgctccccgtcgtcgaccttgccgccctccgtgctcgagacccctgtcagctcgccgcgctccacgccgcctgccgggactacggcttcttccagcttctcaaccacggcgtgccccccgacgccatgctgtacgccgctcgccgcttcttcttcgaccttcccctgcccgcccgtaagcgctacatgtccgccgacatccgcgccgccgtccgctacggcaccagcttcaaccagctcaacgacgccgtcctctcctggcgcgacttcctcaagctactcatccgcgacacgcgccgcctcgccgacgtcctcccctcctggcccgacgcccccgacgacctcaggccggccgccgcggcgtacgccacggcgtgccagaggctgttccgggagctcatggaggcggcgctggatgcgctgggcatcgtgcggtgccgccgccagctgctggaggagtgcgacgccgggtcgcagatgatgatggtcaactgcttcccggcgtgcccggagccggagctgacgctgggcatgccgccgcactccgactacggcctgctaaccatcctcctgcaggacgaggtgagagggctggaggcgagctacggcgacggcggcgggtgggcggtggtggagccgcttcccggcgcggtggtggtgaacgtgggcgaccacctggagatactgagcaacgggctgtaccggagcgtgctgcaccgtgtgcgcgtgaacggtcggcgggcgcgcgtgtcggtggcgtcgctgcacagcctggcggcggagcgtgtgatcgggccggcggcggagctggtggacgagcagcggggcaggccgcggcggtacatggacaccgacatggccgcgttccttgcctacctcgcctccgcagagggcaaccgcaagtccttcctccactcccgcaggatcaacaccatttcttcttccggactgacccaacccagcaactaaattaattagctggacgtacggactctctatctaattactagtcgccaaattaagagtacgtcgtcccttctagctagttcctatacaaacatatccaccctggttgcaactgtagtgttaagctagcacggaatccatcactgtacaagcatgtgtgtacgtgcagtgatttaattaattaatttgctgaaaaataatccaaatt

SEQ ID NO: 7083 - DNA, 1842 bp, Oryza sativa
  ref <308>: DATABASE ACCESSION NUMBER: AK064212
  ref <309>: DATABASE ENTRY DATE: 2001-12-06
atataaggacttcaagcaacggtctgttgaaccttccagatgcaaaaaagtgcccagtgcagtctccctctgacgttatcaatttgatgcttctgggtgagaagcaccgggcttccagtccaacagcaatgaaccatagaagcagtcgttcccatagtatcttgactgtccatgttaatgggaaggacatgtctggtaatgtaacccgtagcagtttgcatttggtagatcttgcaggaagtgaaagagttgataggtcggaagccacaggagacaggttgaaggaggctcagcacattaacaagtcactttcctgcctgggagatgttatcacggccttagctcagaagaattctcacattccctacagaaatagcaaactcacccaattgctgcagagttcattagggggaaacgcgaagacgctaatgtttgcccacataagtccggaggcagattcatatgtagaaactcttagcacattgaaatttgctcaaagggcttcttgcgttgaacttggaactgcacatgcaaacaaagaaagcaatgaaataagggagcttaaagagcaggtagaaaatctcaagagggcacttgcagccaaagagctggaaaaatcatcatttaaactaaaggaaaatacagtggtgagggagagagcaaaacaagtaccggagcgcaccccaccaaggccacgtaggttaagcctagagaatactggtattggcaaaggtagcatacctgacagaaagggaccaaagtcccctctttcagtgacaaagttgaacagagatcatgctacaattcatgacagcattgatggcttcaatcaccacatcatgcaccaaggatcagtaatgcagatgtctgcaacatcctctgaagatccagttagagaggagaccgagaaaataattactacagtggacacagttcccttttgtggactacaccctgatgcttatatttcgtccaagcaatcaggattggatactctcctgagaacaccttgtagatcaaggaacttgaacttggaagttggtcagaccgatgaaccttcttcttctgccaaattggagaaaatgacctcgagtaatgcaacgaagaaaggatcacatctaagaaaatccattcaaagcagcataggaaaattgatccatggctctgaaagaaggaatgttcaacatttaggacaagcaactcctgctaaaattgctaatagcacaaacaatgatgtcccatcttcaattacacctgatttaaggttaaggagaagacaatcactaacaggtctcccaccaccaccatcgaccatgtcacgtagatcatctctaggagggaagtcagatataggtagcgataaaagaggtgccaagacaccacccccggtgaattcagctgcaaaggcgaagagatggctgtgagtctgaagagaaatactaagaaagtttcacttcaagctgagggggtacaagcctttgccaaggctgaaacattcttccaagtcaccggtgaactttagctcctgtttatgctgaaaagtctcatcttcataggaaaccccatttttcagacttcagagtagggcaacatctaggttacattctttgtaacgattgggactttttaggaggttacaaagattgaaccttggaagatgggaaggcgaaacagcggctatgtacttgtcttgcgttctgatatgctgcagacttaacgaaatgcaatgcaagtgattcgggcggttgtgtgtacttgtgttgcattctgatatgctgtaaacttcttaacgaaatgaatgcaagtgatccgggcctggatgagttgtgatcgggagtaggg

SEQ ID NO: 7084 - DNA, 617 bp, Oryza sativa
  ref <308>: DATABASE ACCESSION NUMBER: AK064213
  ref <309>: DATABASE ENTRY DATE: 2001-12-06
gggggcaagtgttcttcggaatgactaggcgtaaagtgcaccacggccgcttcctcctcgcgcagttcccgctcttcagcaccctgctcagcccgctcgcgccggccgcgcgcctcttccgctcctccccgctcacgcccttcctcctcttcctcaccctctacttcgccgtcgtgcgcaaccagcaggccttctcccgcttcgtccgcttcaacgccatgcaggccgtcgcgctcgacgtgctgctcatcttccccgacctcctcgtgcagtccttcgcgccctccaccggtggcgggatcggcttcgagctcttccagagtatggagagcaccgtgttcctcttcctgctcgtctgcctagtctacggcgggggcgcgtgcctgctagggaagacgccgcggctgccaatcgtcgcagatgcagccgagcgccaggtgatgtgatgagcttttgtcaaatcttgctggtgaaaaggaacaaaggaaaatgatatacacatccatctcgatgcctcattgatgttagtagatcgcaaattcacaagttcagtttagtacagtgattatttacagctgtagtaaccaatttaatgaatggagttacggaaggttggt

SEQ ID NO: 7085 - DNA, 1098 bp, Oryza sativa
  ref <308>: DATABASE ACCESSION NUMBER: AK064214
  ref <309>: DATABASE ENTRY DATE: 2001-12-06
atgatttggcaactcggtggcggtggcggcggaaggctcaatcctgttgggttggagcagatcaatccaaactagttgcctgaatccttgtgtgttcttgtttctcttgttaatttcttgagatcctgacaatctggtatcagagcctctcttgcttctcaaattctcttgattctgcggtgaaattgttccttggggtggattggagctgatcttcggatcggcaccgcgaaaaggaaacttgccccctaaggttcgcggaattcggggcgagagcggtaggtacctgatccagatccgaggccatggagactgataagaagttggacctccttctgcaacttgtggaagggaatgagaagaaacgagttgaggctgatgagcgcaccagggcggagtaccaagatctcaagcgtacggtggagtcacggattcctgccgtggagaagagggtggatgaactgggagccgcgttccaggagttgaatctcaaggtggacaagctcgagagtaagatgatgcaagctgccaaggtggagatcgggacaggaagtcagctcaaagaggaacaaactaatggtatgggtgggagcacacaaacccacccctctgcatgaacaagccatatgggaggatctggaagatttgaagatgcgtttccctggagccttggcttggggacaagccaaatttcatggggaggggattgtcaggaacctgcctgtcactatgggtactgaagaaggagaacctgatgaagcagaagctgaacagggagagaaggaacctgaagaaggagaacctgatgaagcagaagctgaagtccaggaggaggagatacagactactactccaggaagagcaagacccacaagagggccaaagcccaatcctcgttaccatgggtccgagtgggttgcgtagcccagctatctgttgtacagctggctactgtgtgtgtcgtgtgagtagggagatgctactgtataaataagatgaactcgaggaagacaactatgatttggcatctcggtggcggtggcggcggaaggctcaatcctgttgggttggagcagatctatccaaactagttgcctg

SEQ ID NO: 7086 - DNA, 1529 bp, Oryza sativa
  ref <308>: DATABASE ACCESSION NUMBER: AK064215
  ref <309>: DATABASE ENTRY DATE: 2001-12-06
atagaaaattagaaaccgagctatgcacaaaagaatttcgatcgagacgcggagaactcgccggcgggcggcgccgtcatcagaagtcgacgctgccgtcgccggctgccctgcacatgcacccgggcgtcctcggctgccggtacacgctccgcccccgcggccgcgcgctgacccgcttgtactcctccaccatgttcctcaccctcctctcgaatccgccccacccgatcccctcctcctcgcccaggatctgcgcgtatcgcttccggttcgggtgcagcgtcggcgccctccccctgccgtggtacacccggtacccggacaccagcgacgacagctggctgccggagtccgtcaccgcgaacacgtccgccgaggcgcacgcgatgaagtccagcgccgcgagctgcattttgttttttttttttctttcggatgtcagaataacggaggagatggcgttgcttgcaggggaggtgtttgatgttttaccgacccgggaggagaagttcctgaatggggctagctcggcggaggagaggacgtcctccttggtgaccaggttggggaagaggcgcgtcagtgggcggagccgcgcggcgccgccgtatatctgtgacccggcgacgtagatgaacgtcccgcggtcgtagccgagcgcggtgagcacgagcccggcttcctccggcgtcagcgggcaccgccccaggctgcgctgctcctccggcgacaccgacctgcacacacacaaacgcacgcgatggcggcggcgccaccgtgtcagacaagacaccacgccggcgatcgggttcttccgcaagagatcgagacggagacgtacgtgttccggaggcgcatggcgagcgtcgggaagtgggtctccctgtacgcctgcagctcctccctctccgcgtcgccgccgccgaagtcgcagagcgagtacgccaccatgtcctcctcgaacctcatgtgcagcgccaggtacctgctcggctcgccgccggcgaggagggcggggacgtcgagcatgttgctcccgaacagctgcttgtccatctccgtccgcatcgcgccggcgcggcgcagccgctggaccagcagggagcccgcccgctggatctccgggacgaacttgagcgcgtggaagttgcacctgcatcgcagcctctgcaagaaccgacgccgacgccatgagcaaagcagaggatggatggcaatggtgcttctctcatctcgacaagtgcgacgatcgaggaagatgaactgtgtgcgtgacctgcagatgaacgggcaccgaatcgaagccgagccggttgccgaatccgaggaaatggacaacgccattctgctggagaattgggagcacagctttgatgaattcagatggcgcagcttctttcgagatgtccatgtctgtgatctgtcatgaaacagagagatttcgcatctgtttagactttagagggcatgaattctacagaaatttctcaagatttagtgaaaaaattatgatcttcaaactgatc

SEQ ID NO: 7087 - DNA, 1399 bp, Oryza sativa
  ref <308>: DATABASE ACCESSION NUMBER: AK064216
  ref <309>: DATABASE ENTRY DATE: 2001-12-06
agttcatcagcatctaaagctggagaggaaataaaagttgcctcacagttgcgcaagtttgcattcaatgatctaaaatgtgccacccggaacttcaggcctgagagtatccttggagaggggggttttggatgtgtttttaaagggtggattgaagagaatggaactgcacctatgaaacctggtacaggccttacagttgctgtcaaaacactcaatcatgatgggcttcaagggcacaaagaatgggtggcagaggttgatttcctaggtaaccttcaccatcccaatttggtgaggctgattggatattgtgttgaagatgaccaaagattgctggtttatgaattcatgcctcgtggaagtttagataaccatctattcagaaggtctcttcctctcccttggtccatcagaatgaaggttgctcttggagcagcaaagggtcttgctttccttcatgaagaagcagaaagaccagttatttaccgtgattttaaaacatctaatatactgctagatgctgattacaatgcaaaactctcagattttgggcttgccaaagatggccctgtaggtgacaaaactcacgtgtctactcgagtaatgggaacatatggttatgcagctccggagtatgttacgacaggccatttgacatcaaagagtgatgtctatagttttggtgtggtgctacttgagatgatgtcagggcgcaggtcaatggacaagaaccgcccaaatggtgagcacaaccttgttgagtgggcacgccccctcctaggagaaaggcagcgcttctacaagctaattgaccctcgtttggagggtaacttctcggtcaaaggtgcccagaaggcagcacagttagcacgtgcttgtctcaaccgggacccgaaagcccggccactgatgagccaagtggtagaggttctcaagccactgctcaacctcaaggacatggctagctcctcgtacttctatcagacaatgcaagctgagagaatggcgcactcaagcagcatgaatggtaggagccatgccctcaaggtgcagggttcatttgctcggaacgggcagcaaccgatgaggagcctgtccgatggcccccgtgcttccccgttccgctactcacccaagccgaacgtgaaataactagagaatcctggtctagttggtggaacttggttggggggctgagtggcttggctgaacattgttgtgcaatctgaattgatctttcctgtagattgacatgtgaaaatggatataggtgaaaaggagctgtaggtaccagatttcccttgtggatgtttgcactgaggttttaactggatgctgatagacccttttctatatatttttcctccaaagtaagctagctttggttaatttaatt

SEQ ID NO: 7088 - DNA, 1556 bp, Oryza sativa
  ref <308>: DATABASE ACCESSION NUMBER: AK064217
  ref <309>: DATABASE ENTRY DATE: 2001-12-06
gcttcggcttctctctctctctctctctctctctcctcgaaaaccccaacacacacaacgcgaaccccactccgcgatggcgtccgccggcgatcgccgcggcggcggggggcctcccggctccggcgacgactccgggggtggttgggagactgttgagaagagggtaaagaaaccagcgcaacaagttgggaaggggcaatggggacaatggaattctccaaatgctgcacctgcacctactgcaccacggagtggctctggagcttttcatcattctggaaacactttggttcgacattctgatcgtaggccagcaagaggcactcctgggccaccaccacaaaacaggtctatagaggcagaactgcaagcaccgcacggagttgtgactgcacctctggcaaatggttggcagtggggagccaggtcttgcccacctggtactgaaagcaaggagggtggtcttcctttgtctggttgtgatcctgaaacagacaatgctgaaggttatgacacatcggacgatgataatgatgatgatatgagtgacgatttgagtgatgactatgattctgatgcaagtgagaaaagttttgagactcggaaaaatcacaagttgttcaaaggtttcttcgaagtcctggaggcgttaagtgtagaacagttaaatgaaccaactaggcaatggcattgcccagcatgcaaaaatggacctggtgcaattgactggtacaaagggctacaacctttgatgactcatgccaaaacaaagggttctataaaggtcaagcgtcacagagaattggctagtttattggaagaagagctatctcgcaggggaacttcagtggtaccatctggcggacaatttaggaaatggaaaggattgcgggaaagcactgatcgtgagattgtttggccaccaatggtggttgttatgaacactgtattggaacaagatgaggatgataagtggaaaggtatggggaaccaagagctaattgattatttcagtgaatatgctgcaagcaaagcacgccatgcctatggtccaaatgggcaccgtggcatgagtgtgctaatctttgacagctcggctgtgggctatatggaagcagaacgtttgcatgatcactttgttcgtcaaagaacagacaggaatacatggaacagtgctcacaaggttacattcttacccggtgggaaaaggcagctgtatggtttcttagctacaaaagatgacatggagacattcaatagacattgccacggaaaatcccgtttgaaatatgagatgagatcttataatgagatggtggttacccaaatgaagcagatgagcgaagacaaccagcaactgaattacctgaagaacaaaatggttaagaaagagcagcactctaaattagtagaggatacattgagtgttgttacccagaaacttagggagacaatggaagagaatactattgtacgaaataaagccaaagaaaagcacttggagtatgagaaagagatgaagtaccaggaggaatttttccatgatcaaatcg

SEQ ID NO: 7089 - DNA, 1752 bp, Oryza sativa
  ref <308>: DATABASE ACCESSION NUMBER: AK064218
  ref <309>: DATABASE ENTRY DATE: 2001-12-06
tatgatgacactcatggggtggtacaagtgggatcagactctcgccgcgtctctgtgctccaatgcaacagtgaaattcgatcaactgtagatccatccaggctacgtaccttcctagcatttgacactagcatggcattatcttcagcttcttatttctttttctcagaatccaagtaccttgctgtgttagaattatccggcttgcctatcgagaccattccatattcagttggggagctatttaaccttcggtatttatgcctcaatgataccaatgtgaaagaattcccaaaatctattacaaagcttctcaatttacaaacattgagtcttgaacgtacacaattgctgaattttccgagagggttttcaaatctgaaaaaattgcgtcatttacttgtttggaaattagttgatgctacatacaaaagtctgaataattgggaatctttggagccatttgagggcttgtggaacttgaaggaattgcaatctttatgtgaagttcgtgcaactagaaactttgtttccaaattaggaaatctatcccagctgaggagcctttgcattacttatgtaaggagtagccactgtgcacaactgtgcaactctttatcaaagatgcaacatctcacaagattacatataagagcaatgaatgaagatgaagtgctcctgctggatgatttgatgttgccgaaccctcttgagaagctcgatttgctaggacaattgtcaaaaggaactttagaatctccttttttcactactcatggaaatgaacttctgcaattggaactatcgaggtgtcagcttacagtgaatcttgtagcatggctctctaagttgtcaaatttaacagagttacgtcttacaagggtgtacactggacaacagctaagctttcatgcaaattgcttcccaaatttgaagaaagcactcctgtgggatttgcagcaagtcaatcaaatatatatacaggagggagctttgtccagcctgcagtatctccacattgatagcctcatggaacttcgggatgtgcccaccggcattgaatttctaagatcagtcaaagaggcatattttactatgatgcattctgatttcgtaaggaaccttcgaacaggaaaggtaaatcatatcccgaaggtctactggtcaacacaaggggtgtctgcggaacctgctaacctgcctggagaatccagcaccaacccacaatggcgcatgttaggagggtcaggttgggttttcatctaacccagtttgcagaggatcctggttggttcactgtgacaaaaacttcagaatctactcccgttactgaaacggtgttcatctttggctcactgaattggagattgtgaatcgatagtgtacattccctccggtttctttgcgaatggagcttttggcaaggtacttggtcaccatcttttgtttctggtgccacaacaaaatactggcaagtggcaacttctctacattatttcactgggaaggtaactataatgtcaattgggatttatcacggtaaacttcatgaggaacaattttcctccatgggcatcttgaccagaagcagctcccctcagtccccttttgtcagaactctcagaaacaatgttccagcgttcactggatttgcagctgctacctgactagaagtctagaacctgaagatcatactacctccatatggatctagaggaggatgactaagcaatatatattctgaaaaatgtc

SEQ ID NO: 7090 - DNA, 846 bp, Oryza sativa
  ref <308>: DATABASE ACCESSION NUMBER: AK064219
  ref <309>: DATABASE ENTRY DATE: 2001-12-06
ggagaggagaggggaggcgatggggagcgggagcaagaagaagagcggaggaggggatgaccagaggccgctcctctggaggctcccggaggtcacctccaccgagctcggcaagatcggccccgccttcggcctcggcgtcggctgcggcgtcggcgccggcgtcggcttcttcggcggtgcaggattaggttatggatttcccggactcacattaggctttggagttggagctggatgtggtgtaggatttggctttggttatggattggggaaaggatttgcttatgatcaaaacaaaagatactctaatgttggcacgatgttccaagaagctccaagtcttccgatggacaccgttgctggtttggttgatgagctggttgtgaacaccaaaaagcttgtgagagcaacttcaaaagagattgaaaaatggcgttgagcttataattgcctccatcagctgtgtcagcctatgaaaactgggttatcattgaaggttataagcaagtatgctgttgtcttagatgaaggtttaggagctagccatgggatgaagcctattgcatgcagtatgctatcttagatggaatttaggagttagtcgtgggatgcagactattgcactgcaatgttctttcttattcttgtgtacatcagtaattatgtctatatttaattagggtaatgaaatgctattgcagtctctgcatgttagaaatccccctgtgatgaacagtgtcagttagaattcaggaacaaaatatgagactggtgatctcatttggctgcttgttattactctgttaatggttgtgctcatctcaggctgtgctttcttggatg

SEQ ID NO: 7091 - DNA, 1542 bp, Oryza sativa
  ref <308>: DATABASE ACCESSION NUMBER: AK064220
  ref <309>: DATABASE ENTRY DATE: 2001-12-06
tcgccggcgacgccgcgcgggccgaccttggggccctcgtcgacggcctcgccgccgacggcaacaccaacatcagggcgggcctcgagatcggcctcgccgtcgccgccggccgccgcctcaccgccggccgcgcggtgaacgtcatgctcatgtccgacgggcagcagaaccggggcgacgcgacgcggctggaccccggcggcgtgcccgtccacaccttcggcctcggcgccgaccacgaccccgccgtgctccaggcgatcgccgggaagagccgggaggggatgttccactacgtcgccgacggcgtcaacctcaccgcgcccttctcgcagctcctcggcggcctcctcaccatcatcgcgcaggacctggagctgacggtgacgcgggtcgatggcgaggccgccatcaagaaggtggacgccggcacgtacccgcaggcggccgccgccgacgggtcgtccgtgaccgtccagttcgggacgctgtacagcgcggaggtgcgcagggtgctcgtctacctcgcgctggaggacagcaccgccttcccgccgtacgacgcggaggtggtggaggcccagttcaggtacagcctccagggcgcgacggtggcgtccaaccctgacccggtgagcatccgccgcagcgggagcgcgccggagccgagcgaggaggcgccggcgaggaagccggaggtggagacggagatggcgcggcggcggcacgcggagtcgatccgggaggcgcggagcatggcggacgggaaggagctggagcgcgcgaggacgaggctggtggaggcgcagaacgcgctggaggacgtactggaccaggcgaacccgatggtggacatgctccgggaggagctcctgcagcttctgcggctgatggagacgcaggaggcgtacgagcgggcggggcgggcgtacgccgtgtcgtcgctagcgtcccacgaccggcagcggttcgccgcccgcggcgacgcggagggcgtgcggctcttcgcgacgccgcggatggacgcgtacctggagcaggcgtggcggttcgacgaggaccccggcggcgcggcgctgccgtcggcggaggaggacgtgaggcaggaggtcgccgccaacccgctggcgcccgtcgccgggcagatcgcgttctacgtcaggtcggccatccaggcgctgcaggccatcgacaagatcttcgccagcgtcgccgccgccacctccacctccacctccacctccacctagctagcttagcttgctcgtcttcatctcggataataagcgctagctacgtacgcggccatgccatgcttacgagcatgcattattgcatctgattgcaaatgtgtgtagctcatactcgcggtcttaggctcttggctacgttagttgcgtcctcttcatcctaatattaattttccagttgtatcggttaattctctagttaattgaataagaattcatatcgtattgtaccttaatcgctactactcccttcgtcccttaatctaagaaattttgatattttgctggt

SEQ ID NO: 7092 - DNA, 2598 bp, Oryza sativa
  ref <308>: DATABASE ACCESSION NUMBER: AK064221
  ref <309>: DATABASE ENTRY DATE: 2001-12-06
aaagatgcatcagaggaagaaatcaggagagcaattgtccttgccaatgctgcgaagttcatcgataagctaccaaatggactagatacaatggttggtgagcatggcacacagctatctggtggacagaaacaaagaattgcaattgcaagagcaattttgaaggaccctaggatactacttcttgatgaagctacaagcgcccttgatgctgaatctgagcatgtagttcaggatgcactcaataatatcatggttaacaggaccaccataattgtagcccatcgcctgagcacagtgagaaatgctgatacaatatctgtgctacatcgtggacaacttgtggaacaaggacctcatgctgagttgataaaatattccaatggagcatactatcaacttttacagcttcaagaggtaaacgcgagaaggaatggaacttatgaacttgaccccaataggctatctgatgttgcaaacagactatctgatgttgcaaacagactatctgatgctgcgaacagactatctgatgctggaaattttgtaagtcgacatagcattagaaagctatcctttgagagatctatgagcagacattcgtcactgggtggaagcagaaggaattcacagacatatgcattgactgaagatgaaatcgaagggtgtgatgacacgaagtctggcaagaatgtacttaggcgcttactacaccttcataagcctgaaactgcaatccttctgttaggatgcattgccgcctccgccaatggagctatacttccagtgtttggcctgttgctttcaagtgccatcaacgcattctatgaaccaccacacaaactgcgaaaagattcagtgttctgggcagaaatatacgtgatcttgggtgttgtatccatctttatcataccagtgcaacacactttgttcaacatggcaggtgggaagcttatcgagcgtatacgtgccttatcatttagtcgggttgtttaccaggatattggatggtttgatgaccctctgaacagcagtggcgcaataggtgctaggctatccgcagatgccgcatccgtcaaaagcattgctggagatgttttatcattgatcgttcaaagtataagcactgctcttgtcggcattgtaatagctatgattgcaaactggaagctagcattcatagtcttgtgcttcgttccctgtgtatttgcgcagagttatgctcaatcaaggttaatgaggggatttggtgctgatgcaaaggatgtatgaacaagcgagcacaattgctagtgatgccatcagtaacattagaactgtcacttcattctgtgtaggagagaagataattgaaagctaccgaaataaatgcaaaggtcctgtgaagaaaggagtccgtcagggagctataagtggtgtgggttatggattctcatttgccttgctcctctgcttttatgctgtatcgttttatgtcggagcacgctttgtacacaatggaacagctgacgttggggaagtttttaaggtcttctttgctttaacaatgatggctgttggagtttcacaatcgagttctcttgctcgggattttagcaaagtgcaagatgcggcagcctccatttttaagattatagataggaaatccaagatagatgcaagctcagatgatggaatggctccagagaaaattgaggggaatatagagtttcagcatgtgagcttcaagtatccagctcgaactgacgtgcagatcttcacaaatttgtgcttgaggatcccatctggcaaggtacatgtggttctcatgactgttgcgcttgttggtgaaagcggaagcggtaaatcaacagtggtagccttgctagagaggttctatgaccctgactctggcgccatctttctagacggcatggaccttaagaccctcaagctcacctggctcaggcagcagatagggctagtgggccaagaaccggttctcttcaacggcaccatcagagcaaacatcgcctacggcaagcaggatcaggtgtccgaggaggagatcgtcgctgtcgccgaggccgccaacgcccaccgcttcatctcctcgctcccgcacgggtacgacaccagcgtcggcgagcgtggcgtgcagctctccggcgggcagaagcagcggatcgccatcgcgcgggcgatcctcaaggaccccaaggtgttgctcctggacgaggcgacgagcgcgctggactctgagtcggagcgcatcgtgcaggaggctctggacagggtgatggtcgggcggacaacggtgatcgtggcgcaccggctgtcgaccatcaccggcgccgacaagatcgccgtcatcaagaacggcgtcgttgccgaggaaggccggcacgggcggctgctgcgcttgcccggtggagcttatgcgtcccttgttgccttgcagtctagcagttcgtgattcgtgaactgatatgcatactgctagctattgcttcctaggacgagttttctttccgaaattttattgacattccacgccgtagtttaatccaaaaacaaaatgaccacgttgttcttttagttataaagagggtcttcagc

SEQ ID NO: 7093 - DNA, 2188 bp, Oryza sativa
  ref <308>: DATABASE ACCESSION NUMBER: AK064222
  ref <309>: DATABASE ENTRY DATE: 2001-12-06
gtgctgtccagtcccccacttcgcagagggattgcctgcggcgctcacctctcgccgtctccgcctctccggagacggcggccaccgcgcgcccgcctctcgtcggcgccgtgcctccctcaacggccaccacctttgcgggcgctcccatcgtactgcgtggctgctgccagatccaggccgtcaggatctaccccccgcccttctcgtcggagggttagggtttgtgcgacccggcgacggcgagcgaggtctctcacccgcgaaagggggggggggggtggcgcgtacctacagagccctccgagtttcgcgagcacagttccccgcagggagagcgcaagcccgaggctgttatagctacatagaaggacaactgatacggtgttaggtcatggaggagattcatggcatgcaagaatcaaagactgcatctgtcatcaaagttgccagagagcctgccgtcattatcaatggagttccagacttgcctcctgatgtagcatccgaatcacaacctgagccacgtaatgctgcagaacctcctgttgatcatcgttttggtgaatttctagaagggcggaaagtaaggaaaccttttggggacaagcattttgtagggaaagtggacaagtatgatagtgaaagtaactggtacagtgttgtctatcaagatggagaccaggaggatctcgagtggaaggaagtggaggagatcatgctgccattggacataactatcccgctgaaaacacttatttcggataaattcgcacttcaaaatacagctcctgtcttcaaacctaaggtgggtagaccaagaaaagtctatgctataacggatggcaacacaaacaatgctatggaagatcagatgatgactggagcggcaaatgaacatcaatccaataacttactagcgttggttccagcatctacatccaacgatgcatatgttaacgctagtagtcaacctagaagaaggggcaggcctcgaaaggatgcaactatgtatcctcgaaaggatgcaactattcctgccaatactcagcctaaaagaagaggcaggcctccaaaaaacaggaacttgtctggaaatgctcagagtgctgaatgcacaccacaaaatagtgttcttatacgcaatgcacagacagtcagggcagaaaaactggcgaaggcagaaagactgaagagagaaaatatgcatgctcaaggcgcaccacctggaactcaatttttctaacatgcattcccactgttccaatacatatatctgtaaacattccagaatctatgcacgatggtgacactagctttcaacatatattttgtacaatccatcgtagagcaaaacttgtaagactatatttgctatcccaatgctatcgtatttctttcctatacaagtatatgcagtctgtttagacgtcctttggtacggtcttaaaagttttccttgtggaagtggaatctagttgtggttgtctggctgaattcttttgaaagatccttgagttgtttcgtgagtgtaggggatccacaatagaaaacacctgcatatttatggatttgttaacaaccgttactgcaaagctcaaaattgttgcatcgacgatgttcgctgaaaaaagaggctcacctatgcgtgagtttttgtgggcattcgccaagtcagagaacacctttctccagttaggcctcgcaaaatgtgtgcgaatctgcaacagatcaatcagaaataagaggaatacactggaaataaataagtatttcagatagaagagggggaagatgtcgaataccctgctgccggagacgatatccacaccatttttggcatgttgaagtgactgaaccatggcaatcaaagctgaccttgcgtcgccttcttcatacacgctggtcagcgaagaattgagagtgagacagtacattgtgatcactttcagcgacatcgttcatgactcctttaaaccactcgaaggacccttgctctctggtcacccagtagaagtaagctcttcctggcccattgttcttgaagctgcctatctcagaaccatgtatgctttccacctcctgttgccatcaactcattttagttatctatttcctccagttatacaacattgtaggaaataaggaaacactatttatcagggaagaattttacttcgttggattt

SEQ ID NO: 7094 - DNA, 1433 bp, Oryza sativa
  ref <308>: DATABASE ACCESSION NUMBER: AK064223
  ref <309>: DATABASE ENTRY DATE: 2001-12-06
ctagcgcctagcgatgctgcgcgcggcggccacggcggcgctccggcgcctcccacagtcacaggccccgaggagacaagcgcgcggtctccagtacgcgagcccggagcggcgaccgctggatggtgcgaggtgggcgctctacgcgaggctgtcggcgcacctgccgtcgggtggaatggtggaggagctcggccggtggctccgcgagaggcgcccgctctcggaggagcaggtcctcttctgcgtccgcaggttccgcaagttcaagcagaacaagcacgccctccaggtgagccccctcacccccacacacacccacccccagaccccagtcccctcccgcgaaaactctggcttaatttggattggggatgtaatggtaaggtttcagtcgattggatccggttgaaactccaattgtttcgtcctatctacactgtattttagggtaattttgtgttaacaactccgtttgtaatattatagcatttgccaatatcttagggaactataatgtactagtagtaatctagcagcataatgtgttttccccgttatttcgagaatttgttaagggaaacgcaggccagaactgagaacctatatttgttgattctttaacgattgtgactgaactgaatatttgcttctggtattccaagaactgtcatactggattaagcttaatcctacgcttgattaatgtattgtagaagaggggagaactcagaaggtccttgtcttgtttaaagttagtctgttttttgttggtcatatggatcaaaatatattttactgtggatttttcttcatgatcttcagactacctaaactgcctctgtataatttgatggataatacggaatggttgatgtataccaagaccaagatgttaaccatcaggtttccatttttatgtggaactttgcttgcttgtataattccttttttcaaaaaaaaaaatccatatccatatccatattgaagcagttcaagtgtgttttgatgtgcagtgaggacagtacaggaaagaaactacctttactcagcaatacacccagtaatgggctaacggcagaggaaatattgccgatggagaagagctgaactggctctcccaagtgggcaagcagatgaagaatgtccaactcgcacatgcctgcttcctttgtttctgtagtgcaaccaaatggggagccctgcttctcttggctaagcccaaatgagctagttcgatccagtttaacgatgcaagataaaccaggggtagtcgtgttagtcatgtacctgtgttttcctaggagctgtgtgtccttgatctctatgtatcaccccatcaggttacattagctctgtactactagttgttttcctcataaatctgacatgttatcatgcctatatcctgaaatggactacattagcaatgc

SEQ ID NO: 7095 - DNA, 649 bp, Oryza sativa
  ref <308>: DATABASE ACCESSION NUMBER: AK064224
  ref <309>: DATABASE ENTRY DATE: 2001-12-06
atacatcgatcgaagagagagagagagagagggtaattaacatggcgacgagcaagaaggaggtgaggcacggcacggcccaggcgaaggtgaacggtgacgacgagatgctacggactggcttcatcaacggcaccccgctcgaggccggcaaggtcgctgactcccagcccgtcgatctcttcgaccaggctcgccgcgtctgtccggaggaggaagaagatgaggccggctgcaggaagatcgcagagtcggagcccgtggacctcttctccgacgccggccgcgtcgcgcatcagcagcagcacaaggtggtgggccgccaagcgtaatcgcgccctgccccgccttcaagcatatgcacatgcgtgctagaaccgtctcctctcctctcctctcctgctaattaggccaggccgtatacgtatgtgtgtatgtaatactagtacgaataatgcatagtactactatgcgacaagctgctagctagtagctagcctttttttttcaaatagaactatataatccatgatcatcgcctcggtcgatatataattactctctccttctcttctcttcctctttctaaattaatcatcgtataattatataaaatttcttaaattgatcaacatataactgaaattgg

SEQ ID NO: 7096 - DNA, 1552 bp, Oryza sativa
  ref <308>: DATABASE ACCESSION NUMBER: AK064225
  ref <309>: DATABASE ENTRY DATE: 2001-12-06
ggtggtggtgggaacaagaaggggaggagagactcgccgtcgccgccgctcgagacccccccgcgcggcgagttgccgtcgacgtcgtcgtcctcctcctcgcgcgccaccaagcgtcaccgcgtggcgggcatggcggaccgctacttccccaacgacctcccggacttcgtcgccgaggcccccgacggcggccgcggcttgctgtcgctcccttactccagcctctccgaaaggctcctccgcgccgcgctccggatcaaggacaaggtcatggaggagacgtggaccagggcgcggcgacaggtgacggactacacgctctacacgggcgcgctcggcacggcgctcctgctgttcaagtccttccaggtcaccggcaaccgcgccgacctcgccctcgccggcgacatcgtcaaggagtgcgacgccgcgtcgcgtggcctgccgttcttgacattcatctgtgggagggctggggtttgcgctcttggtgcagtgattgcaaaacattgcaatgaccagctgctactcacacactacctgagctcatttgatgagataatagtcactgagaaagttcccaatgagttgttatatggaagagcagggtatttgtgggcttgcttgttcttgaatacgcatctcggcgagaagacaattccccatgagcacattacttctgtggcaaaggacatcatcgatgagggaagaaagctggctaaaaaggggaactgccccctgatgtatgaatggcatggaaagaagtactggggtgctgctcatgggcttgctggcattatgcatgtcctcatgcacactgaactcaagctagatgagaaggatgatgttaagaacactctgctatacatgatcaggaacaggtatcctactggcaactatccatcgagtgaaggcagtgaatctgaccgcttggtgcattggtgccatggtgcccctggtgttgctcttacactcgctaaagcttatcaggtcttccatgatgaacatttcaagcagacggctgcagaggctgcagaagttgtctggaaccggggacttctcaagagagttggaatatgccatggtgtaagtgggaacgcctatgtatttctctcactctaccggctaactggcaatgttgagtacctgtaccgggctaaggcttttgcttgctttctgcttgagaaagctgatcagttgattgctgatggggtcatgcatgggggtgatcacccattttcattgtttgaagggagggctgggatggcttacctccttctagacatggttagcccatcagaatcaaagttcccggcctatgagctttgaagggcatcataaatatatgtatcctgttaggatcaaatgctcagtgatccatccatccaaagtagctgtattgtgttttcttgcgtacccagtaatgtgtgcattgtaatttgttgtctttgtaaagttcagtatccagatggtgcaagcttgaacctttgtaaaatacatgtttgagggagttccttgaaatatgataatatttatgttggttgttgcc

SEQ ID NO: 7097 - DNA, 629 bp, Oryza sativa
  ref <308>: DATABASE ACCESSION NUMBER: AK064226
  ref <309>: DATABASE ENTRY DATE: 2001-12-06
gcgtttcccagcgagttcgaatcgaaaagcgagcactcgattcgacggagagggcaccccactctccccaatccccaaccccggcggcggttgcggcggcggcacgcggcggagatgctgcagttcccggcgctgatgcggcagtggccgtcgccgccgctgatcccggcgtccacgctgctccccgtccccgccaccacccaggaggacgagctcctcctcgccatggccgagtccgacctcgaggacaagctgaacgagatccgcaagaccaacagtaacctggtgatcataggcaagccaaccggcgacgtcaaggaggagtacgacgccgaggccgaggacgacgacgccgacaacgtcgaggagtccgacggagacgacttcgaccaggagaccggctgagccggcccccgactccgactcctcccttcgggtttgcaccgcctgccctggtgccattgccctttcttctctgctcccatatttattgcgtgcgtgctacagcttgctatccccaatctgatctatctctatgtgttcagtttacctagtagtttttttcttggaaaaatcttaatgcttcccttattgcttgaataacatgtatcggaatagcttgttggtgc

SEQ ID NO: 7098 - DNA, 1751 bp, Oryza sativa
  ref <308>: DATABASE ACCESSION NUMBER: AK064227
  ref <309>: DATABASE ENTRY DATE: 2001-12-06
ggaagcaaacatgttcagccttctgatccagtccgtcgacttcaccgacgacgcggccgcggccgcggccaccgccgtcgccgccggcgaaaccagcggcacctctcaccccctctccccgcgctccggcgaccctctccccaccaccacctccgcctccgtaacggcgcctctcgagctgcccggcgcgacctccgcctcgcccgcccgaaaccctaagatcaactacacccgcggcatcctacacctctaccgctcctcctcctcctcctcgtcgaccgcctcctacgcttccgccgtcgccgccactccatcctcctcctcctccggacccgccgccccgcagctcgcctccgactgcctactcccgccatggcgcggcacacggctcctggtgctcgccgtcccaacccacgtctcaccagacgacttcgtccgcttctgcggcccttacatcgagcacgcctccgatatccatgtcgtcagggatgatggggtggaggaccggtatagcgtgctcgtggagtttgaggatcagaagagtgccgatgggttctacttggacctcaacggttggaggttctcgtcatccgaggtagaggtttgccatgttctgtttatagttgctgtccaatatacaccatcaaccaagcctgcggtgactccaccagttggatccactgagctcccaacatgtcctgtctgtattgaaagattggatcaagacatcagcggaattatggcaacgacttgtgatcattcgttccagtgttcatgtgtttcaatgtgggtcaattcatcttgtccggtttgccagttttgtcagaagcagtctgagaatcctacatgttctgtttgtcaaacctctggaaacctatggatctgtataatatgtggttttgttggatgtgggaggtatgaagaaggccatgcaattaggcactggaaagaaactcagcactgctattcacttgatttggaaactcaacgtgtttgggattatgttggtgacagttacgtccaccgacttaatcactccaaaagtgatgtgaagcattccaagttcaagtcaaagtgtaaatattctggtgacaaatgtgcaaactgctcctgcaatgatgaggaagatatcggtggtgctattttcagcagcaaagcagaaacaattgtggatgaatacaaccgtcttcttgctagccaacttgaaactcagagagagtattatgaggctcggctgtcagaagctaagaaagaaaaggaacaacacatttctgatgcagtggataaagctgtaaatgataagagtaaagaaatccaacaaaagattgagagtgcaatgttggagaaaaagaaacttgcagatatgaatgaaaaactcacgaagaaccaggatatatggcgtcgaacactaaaagaaattgaggaaagggagagggctcaactgaagttgaaagatgatacaattcgtgatctagaagaacagataaaagatttcaaattttccatcaagttacagaaatcgatcgagaagaataaaaatgctgatgatctcaaaggaggtttgctggtgccactcccaatggtgccagattctggaaccaaaggtaaaagatcgtcaagaacaagcaagaggaggaaccagtagctgcatctgttgtacatgtaacaagcaattgcttggctaatctgtgccaaccaggataatatgatacattctgaaaaaaagagagagtgcaatattattctactac

SEQ ID NO: 7099 - DNA, 1587 bp, Oryza sativa
  ref <308>: DATABASE ACCESSION NUMBER: AK064228
  ref <309>: DATABASE ENTRY DATE: 2001-12-06
atgcatttcatcgaacaccttgctatcactctctcaccacccctagagatcaccattgtgaggctccccggccagagctggaggttggagggagtgggggaggttccgtgctgccgccatcgccattgggggagcagaggaccgctggacaccgggaaccacgcgtcgaacactttcgggcgtcaccaacagctagccgcctctgcttcgtccgcaccgcaccacgcgtcaccgcccttcgccgtctctccatcccgggaaactgtatatcggttagtcgtgagggagcgtatacagcttccaggaggtgaaggttgatcaagattatatcaagaataagaactaccctgagcaggaggagagaccacttcttcaggtcaaccactggctgctgctcaatcgagctttcccctagctctcgcctctccatgttccggggtcgccaatctgcgagctcggttgcagatttggagccggtttccatggccggagctatagctgagctgaccgtgcgtgccctgcagccgttacgtgtgcagacatttcaggtcagtgcagtgccctttctctggtctctggatttcagtgctcctttcgctctgcatctcctgctcgttttctagtacttctacggttctacctgtgttaagatttgccttgccttcctggctttctgccatgcgacacgattcagctggggaaatggagagtagttgccttttagatccggccaattgctctgataaaaacgtcaagtactcgtacatggtgcatagccctgatttaaaacgaggaatttgttgctgccgtatgtcttctgcggcagtgaaatggaagaatctctcaatccaggcgctcctttctcacgcgaatcatgtagatgcaattgatgtgtacggtgtaccgtgtcatgcgcctttctgcgaaagaacagtgaccggttcatggagtaaaaatccgtcagaacaaagccaaaattgacgagttgatattagtggatcacaatcactttaagttagttatttacacccatctctagtggtcatacgggtagtattatctcagttaatatggatgaaagataaaagcttctcgaaacgaacccctaaatgtagtgaggccaattacccaacatataaaggggagcgtcaatgtattgggaagaaataacaactttatgtactgttgtattgctgtggagtcatttctcggagcatcaattgatttttccacacgtggagaaaaaaacaagccacaaccaaagtaaaaagagcctgtatactctatatatataaaaaaaaaacaggtgtgcctatatatatatatatgtgtaaaaagagcacattccatcttctaggactctgcctctgtgtactctcaggatttgttttttttttttaacgaagggtgtacatctgagtaataagcttatgttctacagtagaaaaagactcaattaaatctccaaaattaactgttactgtcaaattttgcttaaatctaataagtggatggatactacaaaagtgttggtcaaagatagcataaccttatcatggttgccatgcaataatagtagtattccat

SEQ ID NO: 7100 - DNA, 1470 bp, Oryza sativa
  ref <308>: DATABASE ACCESSION NUMBER: AK064229
  ref <309>: DATABASE ENTRY DATE: 2001-12-06
attttttgagctctgactcaaatcaaatcctcttcctgtttcctagctctatatataaaccctaccattctcctgtctctcttcatctcgttcttcccacacacgcgcgcacacacacatcttgtgtgagacttgtatgatcgattgctagagctatttcgattcgtcacgttatacgcatacgcgttattagcttagttcattagctcaaggttaattaattaacgacatggctgctcggtcgtcgtcgtcgccggcgaagacgacgacgacgctggctttgctgttggtggtcgtggcggcggccgctgctgtggcggcggaggcggcggccgtggcggcggacgcggcgcggggcgtccggcaagtgaaccggcggggcccgtacctgggcgtggtggtgcccaacgggttcgagatggagccgctcctccgctcgccggccttctcgccggccaagaagctgccatacctcgacgtcgcaggaaggagatttcgcttcggatcgataggagagaagaaggtgatcatcgtcatgacaggcctcggcatgctcaactccggcgtgaccacccagctcctcctcaccctcttcgacgtcgagggcatcgtccacttcggcatcgccggcaacgccgaccccgacctccacatcggcgacgtcaccgtcccccgctactgggcgcacaccggactctggaactggcagcggtacggcgatgggccggagaaggagctcgcgctggagtccaatggcgactacacgaggaagtacggggcgctcaacttctccgactacggcgtcgccggcggcggcggcggcaacctgctgaacggcgtgtggtaccagccggaggaggtgttcccggcggacggcacgccggagtctcgccgccacgagttctgggtccccgtcgacggccggtactaccagctcgcccagaagctggaggcgatgccgctggagcgctgcgtcaaccgcaccgggacggcgacgtcgccggcgacgtgcctggcgcgggcgccggcggtggcgcgcgtggagcgcgggtgcagcgccagcgtgttcgtggacaacgcggcgtacaggcagttcctgcggtccaggctgggcgtgacgccgatcgacatggagtcggccgccgtcgcgctggtggcggcgcagcagggggcgccgttcatcgccatacggtcgctctccgacctcgccggcggcggctccgcggagtccaacgaggccggcgtgttcgcggcgctggcggcgcagaacgcggtggccgtcgccgtcaagttcatatcgctcttaagctaagaagctgtcttaaccatcgtcgatgaaggttgagaatgataaccctataatggtaattaattagaagtgttacctcgtgtgttgttcacgatagacgttattgttctgattaaactttatattattgacacattttttaaaaaagaaacagttaaatc

SEQ ID NO: 7101 - DNA, 586 bp, Oryza sativa
  ref <308>: DATABASE ACCESSION NUMBER: AK064230
  ref <309>: DATABASE ENTRY DATE: 2001-12-06
attagggacgattgaatcgggaggaaggccacttgcttcagcttaccttgctgctgctgcttgccttccgcctcccacatcgctcctgctgcctgctggctcgccgcccgccacgcgcgtgtccctgccgcgtagccgcgccgctgcacaccagctctcgtgcccagtcgccgcttgttgatctcatgcggggagctggatgcggatgcctcccgcagttccaagcggccgcgccgtcgtcgcctcatcgtccgccgcggcggcggagatatggggaatttctgggctagggttaagtctagtgaatcacccacatatgcccacattaacacaaaacgagcccaatgggcctacgattcagtggagagtggcccagcagcgagtgctctgtctttgcccatcgcctgacgccgcacttcgcctctgcgcctgactgccgtcagcggcctgccggagttggaggttgggggtgttggtacgagcgggcggcgcgaggtatggcctcgccataccgagtcctccgtcactgcttggatgttgtgtgaaaactatgtcttatataagacatgtttttttctcttttctc

SEQ ID NO: 7102 - DNA, 1390 bp, Oryza sativa
  ref <308>: DATABASE ACCESSION NUMBER: AK064231
  ref <309>: DATABASE ENTRY DATE: 2001-12-06
aaaaacacaaccactatctctgccaaaaccaaaccagaaacacacaccaaacacacaagacaaggtagcaacaacaatggcgagacatggccctcaaagccatgaccaaccactccaagaagaggactacatagacatggacctgagctcacctgcagcggcagaggcggtgactgccagtgccagagcaagcttgctctgctacagcacagccatggcagcctccccacaaaactcaagggagttcgagttccacatgtcggctccggttgacaagtgggagcccgcggcatcaccagccgatgagctcttctacaagggcaagctactgccgctccaccttccaccacgcatccagatggtcgagaagctcctcgagagtgcagctgagaagggcctcctctccgcgagcactgccccagcaacgccataccagtcgtgcaatgcatcaccggcaaattcatgttatgtcagtggagagctcaatgctgagcattacttccacgagtgcacatcagctggtattggtgctgctgaggaggccgccgcctgcgaaaagaagccatggtccaagaagctcaagttcatcaggcatctcaaccttggcctcaagctcaaggcatcaaaagcttatatcaagacaatatttgccactaaagcaggcaatccagatggcaagactggtacacctagtgcaaatgagctctccaatgcgcagttcaagtcttggaggaagaacccatttggccagatcagaagcaacaggtacatagcctcgcctatcagcaacagtgtcacacttggagggaggcttaaagaagatgagtgcggccacaggaggtccttctccagcgtcattattcgatactcatcatcaaacaagacatcctcagcgtcatcatcgtcatgctcttcatcaaattcatcctcctccatactaagctccactgactctggtgtggggccagtgctcaggaggagcagcagtgcaagctcagagatggacaatccaatccagggagcaatagcatactgcaaaaggtcacagcaactggcctcggtgagaaagagtgcaagcgatgcaggtttccgtttcatgtcatcatcagcgtcaaggatagctgcagagtctgaagatccagatgatataattgagatttgtggacgatgaagtgtttatgtacaaatttaaacacttttgctaattctgtacacttttgatcttcagatacctgcagacatgatcttataatgtccttcagaaaaattcaagtagcttgtgtaatttgtgtaagaacaaatagtttcaaatttctaattctaatctttaacaccaaatagtgtaagcacttggaatgactgtctaataccagagtgcagatttcccatc

SEQ ID NO: 7103 - DNA, 1440 bp, Oryza sativa
  ref <308>: DATABASE ACCESSION NUMBER: AK064232
  ref <309>: DATABASE ENTRY DATE: 2001-12-06
aatctgagtttgatcctggctcagaaggaacgctagctatatgcttaacacatgcaagtcgaacgttgttttcggggagctgggcagaaggaaaagaggctcctagctaaagtagtctcgccctgcttcaaaactacagggcgcgcgctacggctttgacctaacggcctccgtttgctggaatcggaatagttgagaacaaagtggcgaacgggtgcgtaacgcgtgggaatctgccgaacagttcgggccaaatcctgaagaaagctcaaaagcgctgtttgatgagcctgcgtagtattaggtagttggtcgggtaaaggctgaccaagccaatgatgcttagctggtcttttcggatgatcagccacactgggactgagacacggcccggactcccacggggggcagcagtggggaatcttggacaatgggcgaaagcccgatccagcaatatcgcgtgagtgaagaagggcaatgccgcttgtaaagctctttcgtcgagtgcgcgatcatgacaggactcgaggaagaagccccggctaactccgtgccagcagccgcggtaagacggggggggcaagtgttcttcggaatgactaggcgtaaagagcacgtaggcggtgaatcgggttgaaagtgaaagtcgccaaaaagtggcggaatgctctcgaaaccaattcacttgagtgagacagaggagagtggaatttcgtgtgtaggggtgaaatccgtagatctacgaaggaacgccaaaagcgaaggcagctctctgggtccctaccgacgctggggtgcgaaagcatggggagcgaacaggattagataccctggtagtccatgccgtaaacgatgagtgttcgcccttggtctacgcggatcaggggcccagctaacgcgtgaaacactccgcctggggagtacggtcgcaagaccgaaactcaaaggaattgacgggggcctgcacaagcggtggagcatgtggtttaattcgatacaacgcgcaaaaccttaccagcccttgacatatgaacaacaaaacctgtccttaacgggatggtactgactttcatacaggtgctgcatggctgtcgtcagctcgtgtcgtgagatgtttggtcaagtcctataacgagcgaaaccctcgttttgtgttgctgagacatgcgcctaaggagaaattgtggtacgtagtggtaatagtacgcgccccgctccgaaacaaagaaaaaggtgcgtgccgcactcacgagggactgccagtgagatactggaggaaggtggggatgacgtcaagtccgcatggcccttatgggctgggccacacacgtgctacaatggcaatgacaatgggaagcaaggctgtaaggcggagcgaatccggaaagattgcctcagttcggattgttctctgcaactcgggaacatgaagttgaaatc

SEQ ID NO: 7104 - DNA, 1449 bp, Oryza sativa
  ref <308>: DATABASE ACCESSION NUMBER: AK064233
  ref <309>: DATABASE ENTRY DATE: 2001-12-06
catgagagatgcaaatggattgtcgagatgctttgggtttgtaaactttgagaaatcagaatgtgctagaaatgcagttaaaaatctcaatgggaagtccattggtaatatggtgttatatgttgcaagggctcagaaaaaatcagaaagacaagctgagttaaaagcgaaatttgagcatgacaaaaatcagaaatttgagaagcttcaaacagtcaatctatacttgaagaatttggatgatgacatcaatgatgagcatcttaggaagttgtttgaatgttttggtgaggtagcatcatgcaaggtcatgcttgattcgcatggaaggagcaagggttgtggatttgtatcttttgcaactgttgaagacgctaacaatgctattttaaaaatgaacgggaaaatggttgggaaaaagccattatatgttgccgtagctcaacggaaggaggagagaaaggcatttttagcggcacattttgctcgtgttagagccctagcaacaatggcacctacattagggccaaacattgctccccatcagttcaattttggccatggtgtgcctgccttgttcccaccaccaccacctgcaggctttgggttccaaccaaattttgttccaaacatgatgatgccatataacatgcaaaggcagcctggccagaggagtggtcctccgcatggaggaatgcctagacatctgcataatcctcaccagatgtttcaccaaaatgccaaccagggcttcagacacatgccaaatcgtaggaatggtgtggccaacccagcaatgttgcatcagcaccatcgcttctctagcccaatgcagccaatgcaacaagctgtcaagcatgtggtgcccgtgggggaattgcaagctccaagcaataaccttcagacttccttggcttctgcgaacccggaacaacaacgagagattcttggcgacatgttgttcccgctcgtcgaacagctggtgaacgagaaagcttataaggtgactgggatgctgcttgagctggacaagactgaagttctgaacctcgtagagtctccagatactctccgggacaaggttgctgaggccatgaaggtgctggagttggaggctaccgccaccgccgccgccgccgccgccgcttcaggctccggcgacggcgacgccgccgcgccgtcctcctccagcgccgcctgagcggtgttggtggccggatgaattatcataataagatgaacttttgaagtcgtgtgttttggacttgggaactgtttagatgactgttcagtttatgactttagcagcttgcgtttgcagattatttggagtattggttatggttgtgtactctttatgtttattttttttctttttcatgtgatggtacactgtgtgtggatggttaattaggattttttgttgaaatggatccttatttcagactc

SEQ ID NO: 7105 - DNA, 1315 bp, Oryza sativa
  ref <308>: DATABASE ACCESSION NUMBER: AK064234
  ref <309>: DATABASE ENTRY DATE: 2001-12-06
attgctcggtccagatttacgccaggttaggcttgtagaatctgcgaggcgtctcctgcctggcgctagccgctaggctccccactccccgcgagcttcagccatgtccgcccgagccgccgccggcggcggtgacggcgatggcgggggccgccgcaagacccttgccaaggtgtccctctcctcgctctccgccgccgcggcggaggcggccacgttccccatcgacgccgtcaagacgcgcctcgagctccaccgcggtacagggggcagcggcgggggaggcgggggcgtcatgcgcgtcgctggcgagctcgtacgcgacgggggaatctaccggggcctctcccccgccgtactccggcacctcttctacaccccgctccgcatcgtggggtacgagcacctccggtccaccttcgccagcggtggacgagacgcgggcctcctcgagaaggcgcttgctgggggtgtctccggcgttgtcgcacaggtggtggcaagccctgctgatctcatcaaggtaaggatgcaagcagacagcagactgttgagccaaggtatccaaccacggtatacaggaatctttgatgcctttacaaaaattgtacgggccgaaggatttcgaggactttggaagggtgttgttcctaatgcccaacgagcctttcttgtcaatatgggtgaattgacatgctatgatcaggcaaagcatttcatcatccggaagcaaatctgtggcgataacctgtatgctcacacacttgcctctgtcgcatctggactgtctgcgacaaccttaagctgcccagcagatgtaatcaaaactaggatgatgaaccagggcaaggatgcaaaagttctatacaggaattcttatgattgtttggtcaagactgtcaaacatgaggggttgacagcattgtggaagggattcttacctacatgggccaggcttggtccatggcagtttgtgttctgggtttcctatgaaaaattgcgccaagcatcaggtatttcgtcattctgatggtgctggcttagttttatcttacatgattacagggagcatccagaataagattttgttaattgtttagctcggcttgtggcattatcatataccatgcttgtcctcatttactcttgaccatgtctgagtattgtacccatcgctgaggatgcagtagttacaaatcaccaccatgtaactttataattataattgacaactagctgagtggcccgcgcaattgcgcggctagcacccatacagaattatctatttttaatatgattttacttaatttttatt

SEQ ID NO: 7106 - DNA, 1361 bp, Oryza sativa
  ref <308>: DATABASE ACCESSION NUMBER: AK064235
  ref <309>: DATABASE ENTRY DATE: 2001-12-06
ccactccactcgtcgagaaaaatggggaggcttccactcctcctcctcctcgccgccgccgccgtctccaccgccggcggcgcgccggtgtaccgggctgactacctggtggacggcaaccagctggtggacatgcagtaccacatgggccccgtcgtgtcggggtcgccgacgaacctctacctcatctggtacggccggtgggaggccgcggcgcaggcggtgctccgagacttcctcgcctcgctctcggccccggcggcgccgtccccggcggtgtccgactggtgggcgcgcgcgccgcggctgtacgcggaccagacgggcgccaacgtgacgggcgcgttcgccgtcgccggcgagcgctccgacgccgggtactcgcacggcgcgtcgctgcggcggatcgacatgcagtccgtcatccgctccgccgtgtacgcctacccggacccgctcccgctcgacccctacagcggcgtctacctggtgctcacctcgccggacgtccaggtggaggagttctgccgcgccgtctgcggcttccactacttcaccttcgcctccgtcgtcggcgtcaccgtgccgtacgcgtgggtcgggaacagcgccacgcagtgcccgggcaagtgcgcgtacccgttcgccgcgccggactacggcggcggcgccggtgggcagcaggtgctgcggccgccgaacggcgacgtcggggtggacgggatggtgatcgtgctcgggcacgagctggcggagctggcgacgaacccgctggtgaacgcgtggtacgccggagacacgcccacggcgccgacggagatcgccgacctctgcctcggcgtgtacggcgacggcggcggcgcgggcgggctcgtcgggaacgtgtcgcgcgccgccgacggcgcctcctacaacgtcaacggcgtcaacggccggcggttcatggtgcagtggctctggaaccccgtccgcggcgcgtgctacggccccaactccagcagctgaccgccgccgccatggccgccgggattcttgcgaggatggatcactcgatgccattgcgctcaatggctagtagaaacggaagactccatgggcagattcagagctcgacacctgaaaacgtcgcaccaatttgatctgatccctttcttgatcagagattcggggtgggttttgttcagatcgggagaaattctttgggttctgaattctgatcgatctgtaggagtgagaagcatgcaatttttttcatttcaatttattttatttgcagcataaattatgatcgatttaggggaatagaattgcattagtagaattccagcttgtttcaagcttcctcttgcttgctcaagcac

SEQ ID NO: 7107 - DNA, 1538 bp, Oryza sativa
  ref <308>: DATABASE ACCESSION NUMBER: AK064236
  ref <309>: DATABASE ENTRY DATE: 2001-12-06
tcacgccgccgccaccaatcctcccggcgccccagccggtgcagccgcagcagcagcttgtctcgcctgtggcggcgcctacctcgtcgtcgtcttcctcctccgaccgttcgtccgggtccagcaagcctgcgagggctacgtcgacgcaggcgatgtccgtgacgacggccatggacctgctctcgccgctcgccgcggcgtgccaccagcagatgctctatcaaggccagccactggagtcgccgccggcgcctgctcccaaagtgcacggcatcgtgccacacgacgagccggtcttcctgcagtggccgcagagcccctgcctgtcggccgtcgacctcggcgccgccattcttggcggccagtacatgcacctgccggtgcccgctccgcagccaccgtcgtcgccgggcgcggcgggcatgttctgggggctctgcaacgacgtgcaagcgccaaacaacaccggccacaagagctgcgcctggagcgccgggctcggccagcactggtgcggctccgccgatcagctcggcctcggcaagagcagcgcggcgtcgatcgccaccgtgtctaggccggaggaggcgcacgacgtcgacgccacgaagcacggtctgctacagtacggctttggcatcaccacgccgcaagtgcacgtggacgttacctcctcggctgctggcgttctgcctcctgttccgtcctcgccgtcgccgccgaacgccgccgtcaccgtcgcgagcgtggccgccaccgctagcctgactgattttgctgcaagtgctatatctgctggcgccgtcgctaacaatcagtttcaaggtactctttttgttctttgatatgaagaatttaattaactggtcaaatcatgaatcaccaccatttagctagattatctgttggcattttttcccctttgttcagtatcacatgcatgcatcatattcatacgctcatgtttaaatggattaattagaagtgtcacttcaggggagtctaacttctcttgtagtgttgtcctcaatttcagtttcgtttggatttaactacaaaatgacaaattttttactgaaagaagaattgtatatgcatgaaattgtactgtactagtttcctttagggcccaatccaaaccagccgttctcaaacaagggccctgtgcccaggcatggcaatgataataagacaagtttaggccatgtaaaatccttttcttttgtgtgtctgtacaatcttatcacttcaatgcagatagactttccagtaaagatgaagaaatttgtcattttgtaagcatgtagatttagacaagaccaaaatttgtgagctgttctccatcaggtcaaattgagtaggtttcttgatgggatgttacaaatatgcgaactactagtactactgctatttcatggtgatggggaacatcatgtcatcgcatgtagatgcattcagctcccacatgctccctccatccaaaaaaaagacaaaccctggtttgcatgtgcaacgtttgaccgtccgtcgtattt

SEQ ID NO: 7108 - DNA, 1529 bp, Oryza sativa
  ref <308>: DATABASE ACCESSION NUMBER: AK064237
  ref <309>: DATABASE ENTRY DATE: 2001-12-06
tcagagcgcagcgcggcgccatggggaggcacaagttcaggctgtccgacatgatcccgaacgcgtggttcttcaagctccgcgacatgcgcgccgcccggggaggtgcgggcgctggcggcggcggggccagccacggtggggtggtcacgcagtcttcggtggccgtgtcgcgggcggggagggcgtgccggccgctgccgaacacgcccaggcacggcgcgttgtcgctcccgcacagggcgtcctactactacacgccgcgggccggcgacctgctcgtggggtcgccgctccatcccaagtgctccgacacgcaattccctcctcttcagctgtcgccgccgaggaagtccaggcgcaggcacaggcggcggtccgtcaagctggcgccgtccgtcagcggcagcagcgtcctgtcctcgccggtgtccaccggctgccggtgcgggcgcaagccggagctcgtcgtggtcgaggcgcccgacaccccaccgtgccgccgcgacaagttcgtcggctacaatgacgacgacgatgacgaggaagaggaagaggtggaattcaagaagccgacggtcgccgtcgccgcgtgtgacgagctcgacggcaaggtgatcacctccgccacggacatcatcatcgacctgcggaccgagaagaggcccgacaaggtgctcccgcctatcgtgaccaagccggcgaggagagagctcgacggctgcgatctggaggagaaacacatcgacgtcgtgagacgcgcgtcggctaaaaaacccactaccctcctcgaacagagcaagccgaggcggtcggtgtcatccgcgcgccgcctcaagacgcgcgccaacaccccgcgtatcgtggccaagaagtcaaagccaccaccaccaccaccacccgcggcggcgcgctcgccggcgccgacgacgaagccgcccctggcggagagcttcgcggtggtgaagtcgtcgcgggacccgaggagggacttccgggagtccatggaggagatgatcgccgagaacggcatccgcaccgccgccgacctggaggacctcctggcgtgctacctgtcgctcaacgccgccgagtaccacgacctcatcgtcgacgtgttcgagcatatctgggccaacctcgcggacatcaagatgtagcggaagagctcagtctcaagctcactcgtgctagtgcaatgcaatgcaactcttgtcttgcatggtgaatccaatgagtcccatcgtgccaagagctgtcgtcttgagaatcttggtttgctctagcctgttaatgatcctaaaattgggtatgataaatagtgttatccagacctgggatactatgctgttcttctgtctctttacatttatggtactatactacagtagctagtatgaaatgtgagaggctaatccaggcaaaacagggtactactagtactgtagaaatcaactatggtaaagactaaatagtggtgttgataaatgataatattaatgacaaatctaatggagtcaaacagtagt

SEQ ID NO: 7109 - DNA, 1443 bp, Oryza sativa
  ref <308>: DATABASE ACCESSION NUMBER: AK064238
  ref <309>: DATABASE ENTRY DATE: 2001-12-06
acacacacactctctctctcatagtaacagggctcaagggccaacaagattagcactcactggttcttcttccttgtttatttggtaattactctgtccctgattcttctccggctccggcgagatcatgtatcttgtgaaggatatcggcggcgccattgcgctgatgggcgtgtcactggtgctcctgggcacatggccggtggtcctcgccgtgctggagcgccgcggccgcctcccgcagcacacctacctggactactccatcaccaacttcctcgccgccctcctcgtcgccttcaccttcggccagatcggcgccgacacgccggagacgcctaatttcctcacacagctcacccagatgcaggacaactggccttcaatcttgttcgcgatgtcgggtggcatctttaacggcctagggacactggccacgcagtacgggtgggcgttcgtcgggctttcggtcaccgaggtcatggcgtcaagcctgaaggttgtcatagggacaacactgaactattttctcgatggccggatcaacaaggcggagattcttttccccggtgtcggatgctttctgattgcagcctgccttggatctcttgttcactcttccaatgctgctgacaaccaggagaagctgtctagtgccatggtgaaccacagcaacaccaatggggacactgaaaatgaagaactcaccaagcacctccttgagataggtactaatcagatttagtctgaaaataatagtatatcatagagctatgtgtactaatctttcaattgacagaacaacccaaggattgtgaagaacaagagcctgaagtggcaccggctgcccaggctgtggaaaaactagaggcaggaacagctgatttcctggttgaccttgaggggaagagatctattaaagtacgtacttataatactaaccgtaccaatatattagttaaaatgtcatgactaaactgcagaaattcaggtggagcaattgcaaagcagagttgctagcaaaatttccacaaatgaaaatccatgtatctctaaggaactttttttaaaaatctgacacaaccttccatgtatttccaacatactccctccgtttcatattataagtcgtttgactttttccccagttatacttcattaagtttgatcaagtttatagaaaagtataatagtattttcaataaaaggcaaatgtattatcaaaatatattcaatattagatttaataatctaattcgatattttatatgttactaagttttcctatatatttagtcaaacttaacaaagtttgactgaaaaaaatcgaactgacttatgatataaaacgggggggaagcagtaaaattcacactttcacaacagaaacaccaactcaacaacattaatttgtttcttctccatgacacaaaagaccttctg

SEQ ID NO: 7110 - DNA, 1408 bp, Oryza sativa
  ref <308>: DATABASE ACCESSION NUMBER: AK064239
  ref <309>: DATABASE ENTRY DATE: 2001-12-06
gtactaaacactgattagtagcacaactactactcatagcaacatacgaggtgagctggtgaggtgtagctagcaaccaacctttgtactgccatacgcgtctcattgcatggcgagaatgcgcgtctcggcggcggcggcggcggcgctgttcgtggcggtggtggtggcctcgccgctgctggcgtcatcgcagcagccggcgatggcgccggcggcggcggcggcgccgacgaacaactcgcggctggagaaggcgtacgtggcgctgcaggcgctgaagcgcgccatcaccgacgaccccaagaacctgacgcacagctggtgcgggccggaggtgtgcggctacttcggcgtgtactgcgcggcggcgcccgacgacccgtgcgcgcgcacggtggccggcgtggacctcaaccacggcgacctcgccggcaccctcccggaggagctcggcctcctcaccgacctcgccgtcttccacctcaactccaaccgcttctgcggctccctccccgactccctccgcaacctccaccgcctccacgagatcgacgtcagcaacaaccacctctccggctccttcccctcccaactcctctgcctccctgacctcaaatacgtcgacctcaggtttaacaacttgtgcggagaggtgccggcggcgatattcgagaagaagatagacgcgctgttcatcaacaacaacaacttcgacttcaagctgacggagagcttcagcaactcgacggcgtcggtgatcgtgctggcgaacctgccgaagctggggggctgcctgccgagcagcatcggcgacatggccgagacgctcaacgagctggtcctcctcaacagcggcatctcgtcgtgcatcccgccggagatcggcaagctggacaagctcaccgtgctcgacctcagcttcaacgacttcgccggcgcgctgccggagaccatcggccacatgcgggcgctggagcagctcaacgtcgcgcacaacggcctcgccggcgagatcccggactccatctgcgccctcccgcacctcaagaacttcacctactcccacaacttcttctgcggcgagccgcaccgctgcctcgaggtgccgcacgttgacgaccgccagaactgcatcgccggccgccccgaccagcgctccggcgaggagtgcatcgcgttcctgcaccgcccgccggtgcactgcgacgcgcacggctgcatcgcgccgctgtcgccgccgccgccgccgccgccggtgcactacgcgcctccgccgccggtatattgatctgcggtaaaactgtaattgctgtaactgttttctgcctttgagctgtgagaaagggtaaaaattcagcaagtgtatacataaggtatatacagtaaatctttatttttcagaaag

SEQ ID NO: 7111 - DNA, 1582 bp, Oryza sativa
  ref <308>: DATABASE ACCESSION NUMBER: AK064240
  ref <309>: DATABASE ENTRY DATE: 2001-12-06
tacatcataccagaagaaaaaccaattcgattttgccaaattacctagctatagcatataggtaggtagctaggtagcttggttttccctaatagctctagcttgatctctttctagctctaccggcggcgtggcggcggcggcggcggccgcaccactctacatcatcacgtacacctgaccagcttagcgggaagccccacaagaagagtttgtaggtcaccaatcagatcatcagttcatctttgtggttgtgtgggtgtgtgtgtatatatatgccatggcgtgagagtagccatggatgtcaccggagacggcggaggaggagggcaacggcccaatttccccctgcagctcctcgggaagaaggaggagcagacgtgctcgacgtcgcagactgccggggcgggcggcggcggcgtcgtgggcgcgaatgggtcggcggcggcggcgccgccgaagcggacgtcgacgaaggaccggcacacgaaggtggacgggcgggggcggcgcatccggatgccggcgatctgcgccgcgcgggtgttccagctgacgcgggagctcgggcacaagaccgacggcgagaccatcgagtggctgctgcagcaggcggagccggcggtgatcgcggcgaccgggacgggcaccatcccggccaacttcacctccctcaacatctccctccgctcctccggctcgtcgctctccatcccttctcacctccgccttgccggcttggctggccctcgcttcggcggcggcgcgcgggcggcggacgcgtgggaccgcgtcgtcggcctcgggttcggcggtgcggccgacgccccgtcctccgccacctcctcctcctcgtcgccgcttctgctgagcttccactccggtagcgtcggccttgacgtgtcgccgccgtcggcgtcgacctccccggccgccgccgacctctcccggaagcggcggtgggagcaagaaatgcagcagcagcagcagtaccagcagcagatggccgggtacacgcagagccaaattcctgcgggcacggtgtggatggtgccgagcagcaacgcgcaggccgccggtggcggcgctccgccgggaggcggcggcgagtcgatttggacgttcccgcagtcagggagcggcggcggcggcggcgcggcgacagtgtaccgtggcgtgccaagcggactacatttcatgaacttcccggcgacaccaatggcgctgctccccggcgggcagcagctcggcctcgccggcgccggcgggggtggcgaggggcacccggggatcctcgccgcgctcaatgcctaccgcgcacaggccgcgcagccggacgccggcgcggcggcgcagaatggagcgcaaggctcaagtcagcatcgtcagcatcagcatcacggcggcggcggcggcggcggcgacgagcggcatgagagcatgagcgccagcgactcgtagggcttccgttccgtccggtgtgtgccccgcattttctctggttttgatctgttcttctttaattttctccgtttttgtttgagttgttgtctactaatgtctatggctttcttcctcgacc

SEQ ID NO: 7112 - DNA, 1055 bp, Oryza sativa
  ref <308>: DATABASE ACCESSION NUMBER: AK064241
  ref <309>: DATABASE ENTRY DATE: 2001-12-06
cactggtcgcagccacaattcaaggggctggatcttgagtttgatgtccctcttagagagcttggattccatggtgttccatataaagcttcagctttcatcattccaacttcgacttgtttggttgaactaatagagacaccctctcccccccccccctctgcgaggatcctccgtcgagcatctctcggcgcacgagctgaagctggtgaccaccggcggcgcgccgttctgctgcgacggctgcatgcagcccggcgacgacggcgccggctaccggtgcggcggtgcgacgtctgccacttcgacctgcgcacgtgctgcgcgctcccgccggccaccctggagaacgacatgttcgaggtcagcgcgttcgcgttcctcgccgagccgccggcggcgcccgccgccgcgggcggcaggatctgcgacgcctgcggcgacggcgtgcgcggcttcgtctaccactccgacgacccccgacctcgacctccacccatgctgcgcgttcctgcgcaggcgcgtcgtggtgcaggacggccgccacttcgagctccgcaagcgcgcgcagccgcgccggcctgtgcggcgagaggagcggccgccgccgcaacttctgggcgtaccggacctacgacgacgacggcgaacccgtgtacctgcacatcgcgtgcgtcaaggacggacaccgcgggcggtgcgcggcggcggtgtggcggcgagatcgtgctggtgagctcgtcgccggcgatggacggcgtgctgcagagcgtgccccggaggaggacgccgcggagcggcgggttcgagaggttttgcaagattgttaacgtcgtcgtgagcgtcatcatcgcggccatattcgggagtcccatggcgatgataagcgcggttgcagggcccgatggtctcctccgtgggtagggagatagtgcgaaaataatcaaaatgatatccgttgtgaattagtgcaaaacacattcatattcaactcaaattgggacgatccgacgatgagaaatttgaaaaataaatagcaatggatatgtgacgcg

SEQ ID NO: 7113 - DNA, 2516 bp, Oryza sativa
  ref <308>: DATABASE ACCESSION NUMBER: AK064242
  ref <309>: DATABASE ENTRY DATE: 2001-12-06
aacacaccgcgaacacccgttcccctcgcgccgccttcctacctcgccgccggcgacgccaacgactacccgcgccgccgctacgtctcctactcctcctcctcctcctcgacggagcagcgcggggaggccgaccaatacccaaaacctagcagcagcagcagcgagagagacagctttttcccccttctcactccccacccatatatgaacacgcgcggcgccgcagcgagaacctaaaaccctaaaccccctcctgaataaaagcaagcatggcggcgcccctccccgcaagccctagcaacgcccatggcgcggcatcctaggccccaccccgtcaccgccgcgcgcgagctccgacaccgacgccgccttcgaccccgtcgtggagtggctcctcgacctcgaccaggcgcccatggcggacgaggtggccaagggcctcggtatcgccgaggagcccgcgagcttcgatgctggtaaggtttcgggtggttcggtgtccgagagccgcggggtcgaggagaaggggaacgccttgccagagcaatcgggcgcctcttttgacggcgaattggatgtcgagatggagcctaagacggggagcggaggattggttccgcaacttgtgcaggatcagcatccggcttcggatattggtgatttggctgtaagagaggatggttcagagataatggtggatgttgagaggagtactgtacctgttgatgctgacatgaacaatgtgtccttggccttggtgaaagaggaagcggaagggggaggagatagggaggacaagagcgacgaggaagagtccgagagtagcaaggaggagtcgtctgaggcttcgtcgagcagtgatgaggaggaagataagagggagtcaagcgaagcctcttcgagcagtgacgaggaagagcagatggccaagaaaactggcggtgctggtgacacggattccctctttgaagagggtgaattgatgcttgcaagtgatgacgatgatgaggaagcaccaaagggtcctatcaaatccaaacatgaagtagaggtccttcctccagtgccaaagattgatgtacagctggaaccacatcatcagaccctaccagtaggaacaatttcagctatcatgggtgagagagtgattgttgaagggtcagtgcaacacaatcccctgaatgagggttcgatactctggataacagaaagcaggatcccacttggtattgttgatgaattgtttggacctgtcaagaacccatactatcttgtacggtacaactctgcagaagaggtgcctgctgatatcagtgcaggaactgctgtctcttttgttgcagagtttgcagaccacatcctaaatatgaaggaactgtatgccaaaggctatgatggatctggagaaaatgacgaggaccagacagaccctgaattctctgatgatgagaaagaggctgagtacaaaagatcattacggctggcaaaaaggcagactgataggcagcatgagggtaagaaaacttcaggtgataagaagagagcacaacctaggggctctggatttcggaaagacatgccacccaggagccatgatggacctgcaccaggtcgccaatcgcaacctcattttcatcgccctgataaggctcctgtagttgatgcaatccgcccattgggttctcaagatggtcctatgagtgcaccaacaaagctgccaccaggcccagttcatcctgttatgcctgcagctaatcagcttacaaatcagatgggtggtcgcttcatgaatccgtctcagcagttcttaccacagcagcctaacgttgtctggccaggtggtctaacacctacaccacatccaaatatggggattgaaggagctgcttttgcagctaatatcatgcagaaccttctcattggagccaatcaataccagcaacagtttcagaaccataactttggtggcttcctgaaccaaatgcctgtacctccacctcagtttatgtcgcaaggtggaatgccttctaatccaatggcatttggtggaccaacgatggcacagatgaatcctccatttggtccacctcaattgcctatggatcaaggtaattttgggcaggctccacacatggctgggcatacagtgcaacaagggcctcctgcaggatttcccaatggccaaggatttgggcagtcagcatcgccgcagggagatggagagcagccacctatgcaattcagttctgggcagtttaatcaagggaactcatccttccatggcagaaggcagcaacaacggggaggccggcactcttctgggagaggcggtgaccgtcaccgcagataaaagataggtaacgctggtggttttacaccagcgaaattttgactcgctgagtgaactcctcttgaatggttcagtctttgctttgatgtattcgtaaacggagacatgatcagttgcatgtaatattcaatttgtttcgtttacggtgaacttcactttggac

SEQ ID NO: 7114 - DNA, 1895 bp, Oryza sativa
  ref <308>: DATABASE ACCESSION NUMBER: AK064243
  ref <309>: DATABASE ENTRY DATE: 2001-12-06
atttttgagtcattcttctttagaaagatcatatcaccgctctttccatgctccatcttctccttttcaagtctggagacatgcttaactaagatctgatctaaactatcagatgctatgttagtgttactgtgcctttcctgatggttctgttcactggttctttctcccaatgtattcctctttgcatattcaactttctccctttccaaacgactgacatgcttaactaggacttgatccaaactctccgatgctgtagcattgttatcatgctttcgctgatcatgtgccacattggtcagtacttcctccagtgcattcctcttttcataatcaattttctccctttctagccttgacacatgcttcactaagacttgatccaaactctcagatgctgtagcattgttaccatgctttcgctgatcatgtggcacattggtcagtccttcccccagtgcattcctcctttcataatcgattttctccctttctagccttgacacatgcttcactaagatctcatctaaactccctgtcacaattgtgcggtcaacattcttctgtggatctttctgcacattggtttgtccatgttcgagtgctttcttcttttccctctccaatctatggattggcctgattaagatcttatcaaggccaacatcaaatgcattgccatctttagtacagcatttaagccagaagtggcaacaataactgccagagaagcaagttcatcttcatgaagagcttttagcctttccagcataatgttcacaagatcattggattgctgaacgttagtattgtcaaagtcagatggaaagatgcctgttcccaaggtttctttattgaatttcaaattccttttgtcttcactgttacagtccccctgatgctgctcatcttcagaatttgcatcaatctcagttacatcaggattttggctaattttccataaaagctccttaaactcttctttgtttgatgaaatagaagaattcgcaagttgaataaatgccttcttaactgcagcggcaacctccatatcaacctcaaaaccagtctgaaaggaagcagtgaccttatgagttgatcgtcccccagtctgtgacgatgattccacctcatactgctgacttgaacaatctggtctgtcgtacatcattacgcctattactctagcttcttcaaatgcttcagttgcccgaaacttggccttttccataacttcttcagcgtccttcttttggatcctgttgaaaagtagaataaaaatcagaacaaatgagtgtatcaaggaaaatacacacaaggctggacatgatggaataagataaccatgattttcaccttgctgcatgaagaattctgcaccacgatgcttcaaccatggcagctttgcgagcttccattgcctttctggctgcttctctagctgcaattttctcccttgccattcgcgtgtagtgaggattggcacttcccaaagtctcatcaagagatgcagtcatgccattgctctcctaaaatacacaaaaagaaacaacttcaattctgatgctacaataattttcaatggtaatttccctcttcttatcaagagaacaaaatcgaggcagcaataaatttgatactgaaagttcagatctattcaatgctcagagggcacgatcattatttaaaaattccatgctgaaatagttcttggaagagtgttggcacatttgttacaattcatgaagtacctgaagacgctttatctttctcttcaagtatggttcagtcttcttccgagggaaccaatctataggggaaccacttttacgattaattgacttcttgaattgggatgctgatttatttacagaattcaaaattgaacttcc

SEQ ID NO: 7115 - DNA, 1328 bp, Oryza sativa
  ref <308>: DATABASE ACCESSION NUMBER: AK064244
  ref <309>: DATABASE ENTRY DATE: 2001-12-06
agcgcttcgaaatcccaggcatgttccccacagccggcggccgccggctcctcgtcctcatccgccgcgcctccgccgccgccgcggccggcgcaaaccctaaccaccaccaccaccacgccacgcttttcacccatcgctactcttcgtcccccctagcaagaacccctgaggcggaatccgccgccgcggcctcctacctcgtcgcctccgtcggcctctccccggccgccgccgccaggatctcccgcaaggcacgcttccgttccaacgccgacgccgaagccgtcgtctccctcctccgcggccacggcttctccgacgccaacatcgcgcaggtgctcccaaaaatcccgggcctcctcatcctcaacccggacaagatcctccggccaaagctcgagtacttcgcctccctcggggtggtcccctcggcactgtcccgcgcacccctcctcgcgcgcagccaggagaagcacctcgtcccgtgcgtcgagttcatccgcggcgtcgttggcaccgacgccaacctctgcgcggccatctcccggaacccctgggcactctggtgcgacattaacagcagcatgcgccccgccgtggaatcccttcgccgccacggcctcgctgaggcgaacatctccaggctcgtcgtcatcaatctcagcgctctcacgatgtcacccgaccgcattgacgggatctttggggacctggaggcgctcgagctgcccatctcgcattcgcgcttcgtgtacggcttctgggcactgtccagactcaagaggggggcatgggaggaacggatgtccgtgttcatgagatttggggtttccaggagcgagttgctcaaggcattcagggagcagcccggtatactagtgttcacagctaaaactatccagcggaagctcagtttctaccaggaaaagctgaaggttgcaccggcagatgtgattgcacatcctcttctcttgacgttcagcttggagaagaacatcatacctaaatgtgccgtgctgaatgtgctattgagggaggggaagattaagagatatgggagagagatggacttgttgagacccttgcagcgtagcaatataagtttctttgagagatttgtgaggaagtatgaggaagatgtgccagatgttgtaaaagcgtacgaggggaagattaagttcacgggattcatggattaggatgtcaatgtttgattatgctgaggccaaggcgccagctttctagggtgtattctctgtagcctgtaggtaaggctaaaattgtcgtcaaattaatgcatattgcttcctccttttttttgaact

SEQ ID NO: 7116 - DNA, 1897 bp, Oryza sativa
  ref <308>: DATABASE ACCESSION NUMBER: AK064245
  ref <309>: DATABASE ENTRY DATE: 2001-12-06
agtacaagcctctccatgtctcccatgcccactgaggtatagctccctggatttggttatgtgaaaggtcaagagtggtgatctcatggagatgcttcaagatgttgggaaaggttgatatactgcaagatgctaaccttaagagttttatttttgggaagggcacaaacgatgaactattttctccatgtagcacaagtagtttattgtttgagagattcaggacagataggtttttcagttttgtgaatgatgtgagttctaccgtgccggccaaattgttcgaatggagctgcagagattgcaactgagtcaaattaaagatctgtggaggcaccttccctgaaaagttgcagttgtacaatgctaatttagtcaatttccttaagtttcctattgaagaaggtactgtccagacaatccacagttagagaactggagagctgtaagagaagttaggtttgagatccatgaaggtatggatcctactagctgtaatccagacacttctagcaaatccaaatatttgaggctacctaacgaagaaggaagcgttccagagaagccacttgcaccaaggtctaacttcttcaaagatttgagattgctgatggatcttgtaatcgtacctgtgaagtttgtgctactgacaaacagattctccaagctactttcctgtgagaaattcggcagattaccagatatgccaggattcttagaaagatcaatcattctcaacttcttgtgctggaagatgatgggaggaaaccatccttgaaagtcgtttttggatagctgaagaacagagaggttggagaagctagcgaagaactctggtattgaacctgacaagtgattgcggtgaagctcaatagtattcagtgattgcatggccgacaacgatgcgcagatgggacctgacagtgagcaccaaggcaaacttaaaacctgaagcttaggtgtggacttggctatgtggtcacaccaccgttcaccttccctggacatgtccatcattcccatatggagctgctctgggttggtgaggtttgtgagaaaggtctccatgtttggcgctttgagctgccaaaatgaatccaaggtgaacttcatgatgttgttttcgtcatcgtaaacgagagcatagaatttggtggagaggtcaagatacacgaggttcataatgctcccgatgcctgccggcacctcaccagcgatattggtgttggagaggtcaaggtgcatgagctcagtgagctcctggaacccagtgaacgggagcttggacatgctgaagttgttaccagagagatcaaggtgtttgagtgaggttaacctgaacaatgcagggtggacgctgtcagcttgcaggtggtggccgcccaagtcgagtgaggttacacgaccatcggcaccatcgcagtggacgccctcccagtggcagcagtctgcaccggcgacccatgatcgaaagacggtggagtagtcaccggccgtcacgttgaacgagccctttagctggagcagtgccgaggcctgttccggaaggcagagaaccggtgtcgttacgatggaggtcgtagttctgtcagcaagcgtgggggtggcctgaacttgcaggaggatgtgcatcacagttagcagtgatgtgagatgatgagctactctcttggagaaggacgacatggtgaaggtattttcacaagctctattctttcttcactacaatgacttgagtttgttgcaattgaggtagttcgatattaatatatgcatgcatgtggttaaagggttggtgttgtgtaaacatcgattgtagtgcaataggaaaacctgactgcaattggtgtcagtcaatattgatgtcccctactatatatccatttacggtgagaac

SEQ ID NO: 7117 - DNA, 1021 bp, Oryza sativa
  ref <308>: DATABASE ACCESSION NUMBER: AK064246
  ref <309>: DATABASE ENTRY DATE: 2001-12-06
cgctcatccgcgacgtaccggagatgcacgacgagttcgccgcacccacgaacgaagccaaagatctgttcaaggcgcccgacgccggcaagttcctcgccaccttcaccctgtccagagagcacctccagggcgtcaaggacgccgtcgccgccgaggccgcacgtcgcggcgttccgccgcctcggtgcacgtccctcgtggcgatgtacggcctcatgtggcactgctaccgccgctccagacgggaaagcgacaacggcggcagcggccgtgccgccgccgccgcccacttcatcttctccgtcgaccaccggtcgcggctggtgccccgcgtccccgacaagtacctcggcaactgcgtcggcccgggcttcgtctcggcgcccgaggaggagctcgccggcgccgccgtggcgggcggcgtcttcacggcctgcgcggcggtggccgccgccatcgacgaggcggtgcgcggcgagcccgcgtactgggaggggtggaaggagcgcatcgtggaggcgtgcagggacgacgcgccgttctcggtggccgggtcgacgaggttccgcgtgtacgacgtcgacttcgggttcgggaggccggcgaaggtggagatcgtgtccgtggcgaagaccggcgcggtgtcggcggcggaggatcgttctggcgccggcggcatcgaggtgggcatagctctgctgccggagcgcatggacacgttccggaggtgcctcgccgacgccatggcttggttttcctcgtcttcccaatgcaactagcgtgggaactgcaacacgtacgtcgagtagatttctttagagagattcggttttcatgtctttttgctggcttatactctctctgtgaaaaaagaaatcaaaacctgggatgaatccacacatgtatgttaatattcatcccttgggtttgattctttttagaactttataatttaattttggtgattgtatttttatgcctactacttttaaaattctagtaataattatttacctat

SEQ ID NO: 7118 - DNA, 1760 bp, Oryza sativa
  ref <308>: DATABASE ACCESSION NUMBER: AK064247
  ref <309>: DATABASE ENTRY DATE: 2001-12-06
agtacactacaggctactactactactactactacaccaaatcaccgcgacctccacctccacgcctccgcgcgcgatgctccgcctccgccgcctcaccggcgccgtctccggcggcctcgcccgctacctctccacgcgcgccgcgtcgccggcgcggcccccgtgggcgctgctccagctgtcgaagatggaccggtccggggcgtcgtcgcagccgggcgcgtcgctccacgccgactacccgccgtgcgtctcctacctcaccttcgccgccagcttcgtcgacccccgcctccgccacgacgccgagtccgagatgttcggcacggtctccacggacgtctgcgccacgagcggcgacggcctcgtccccgtccgcttctacgactcccgcaaccacctccccaccgtcggcagccgcggcggcgagccgatgcgcgagtgggccctcgacggcgtcgaccgcgacccggaggtgacgcggttcatctgcaacccgctcagcggcgagatgtaccgcctccccgacctcaacggcacgaagaagacctcgaggtacctccacttcgggctcctcacccagtccgatgccggtcaggggccgcctgctcggtacgcggtggcggagctcgacggcaaccgcgaggaagacggccaggggtggctcgtgcggcgatttctctcggattccggggagtgggacaagctggtgggcatgccgtccccattgccagccaggaggacggtcgacatcgaccaggaggtggtggccttcggcgaccggctatggtgggtcgatgcgagctggggcgccgtcaccatcgaccccttcagcgaccggccggagctccggttcgtcgagctgcccaaggagagcgtgctgcctgaccttgacgacgtggtgatgctaagggagcttggcaagtacaggcgcatgggggtcagcgagggcaagctccgctatgtcgaggtgtctttggggaagcagttcttgatcaggtcgttctcgctcgccgacgacgacgagggcggcgactcctggacgctggagcacgaggtggccttcggcccgatctggaaggatgagcaccacgcgtcggttcccttgggtggcatgccaaggattggggccattgatccactgaacgccaacatcgtgcacctcatagttggtgatcagatgctcagcatagacatgattaaggagagggcgattgacagttctcgtttgggttgtgctgactttcccctcctgccttgtgtactcccaccgtggcttgaatcaagccagattcctgaagggatccattggagcaagaaggccaagatgaaaagcaatactccgtcatactcagacatgtcggttcatgtagacatagaactgaagaagtgaattttatcagcttttgatctcatgggtttctcaaaattgacagacgaggtttttctggagaattaggaggcgaatggtgatggtttctgacacaccttgtgggaatgctgtgaaaagtttgggttttggggctttcctgatgaactttgtggcccctcattttgacaaattctgggaaacattttgcaacttctcttagctatgcacgagccatgtttattattatttcagtgaaatgacttgattccatcgccagttgagctttgaaccgcagtctagaacaacacatacaacgattacatttttgcatcatgcatatgctccttatatctaagttttcttcgatgttatgtgttcatcattc

SEQ ID NO: 7119 - DNA, 1315 bp, Oryza sativa
  ref <308>: DATABASE ACCESSION NUMBER: AK064248
  ref <309>: DATABASE ENTRY DATE: 2001-12-06
gtgaatgcatttcatcgagcaccttgtgtgcgtgcctccatagccattgcttgaagccggagccggtgctgacgaccgcgggagctgtggcttcgggatgcctctgctgctgctgctaccttggatcaactccgggtgccgttgtgacctgaggacctgcggtcgtacacctgcgcgctcgccgccgtcgtccacctctgcttccctgccgtctccccaccacggcatcgaacatcgccgtttcgctgcctctcggtaataactcgcgcctaaagcctctcctagttccatagaagcttagtatctcaccaattttggcgattagcacccaaagccgtgccggaccggccactttttcgcccccggcgagctcgccgtggacaagccatcccaggggctccccttcctatctagctaacaaaatggaacccccatatgccgtagatgctcacgcgctcataaatttggtcgaaaacccttcctgtcatcctagccacttgcagccgagctcggctatggcgcagctatggcggccatgcgcctcgtccctccaagcgccgccgcagccggtgggtagtctccggagcttctccgcgcctcccctagccgccgccggttcgccctcggccggccttccgtgcgtgccgtgttcccctgctgcttccgctcggtcgggaggaagaagacgaaggttgaagacgaccttcagccgagccactgacaagccgtccccactcctcctatttcctttagaaacttaatcctgtgaaaaataaaatcaaagctttgaccccacatgtcagcagctgttagggacaatgatatattttggattaaaattaaatgaattatgcacagtcgcttttcacaatttctcggattaattcgaaattgaatctttaaactagtataacttgctcattttaacttggatttgagtgaaacttgaaccttatttcatctaaattcataatctttccaatggtatatagctcattgtttaataaaatatatttataattattacataattaatatcaaatgattagattatggtcaacttaaaaatatgctaataaataaaattgattttgtacagtagagtggatgtaataatatttgtttctagcatgtttttttttctcagtagcaatcatgaaaattaagtatatgtgatgtctcaaatgaacggatgtataggaaaatactagtacttatttaatattcgatggccatataattaaacccatgacttataaattgtttatataaagtttagcctcgtattttgtaactaaaatattaatacaaaatt

SEQ ID NO: 7120 - DNA, 1553 bp, Oryza sativa
  ref <308>: DATABASE ACCESSION NUMBER: AK064249
  ref <309>: DATABASE ENTRY DATE: 2001-12-06
acattgctgagtgatttatcaaggagtgaacaaagccaatcaattaattgccagctgaatggagaaaggcagcatacaactaatgctctatcacctgctcatcttcaggcggttcttaaattggataccaagaatggtattccagtttttgagttctgtgtcaagggccctgaagaatccatttctgctaggagttggaaaacagggaatgacttgaactggatttacactttccacagtggtggaaaacgagcaagtgctactggaagggcctccaaagatggacgttggtgttcaccgccgattgtaggccagatgcaagcttcttcgtacttgtgctctgaagttggaaaagatggtgttctgactaactctgtcatcactgagtttgttttgtatgatatcgctcatgcaagacagagcttttctgctgaggagaaaactcaatgtacagagactactcaatcgacattgtcaagtgccgtcgagaaatcagcctctggtgactgtccccagaggattaatctgatggaccagcaaaacagtgcaagaaataactctgatgtatcaacatcttgtccgtggtctgaagaagatctttatcctcatttggagattgcagcaacggtcatccaagttccatttaatagaagcaagtccaaagaacttaagagtggtttgtcacctggtactgtaaaagtgattacaccgagtgggctgcatgggttaccaaacgatgatgaaaccagtccatcacctttgctggatagatggaggtacggtggaggctgcgactgcggtggatgggacatggcttgtcccattgctgtccttggcaatgcatatgataataactgggccaattctgtcacaaaggaaggcgagaatcctatggaactctttgttctgggtggcaaagaagagctccctgccctttccattaagggcaacgagaaaggacagttattggtgcattttcacgcgcggttatcagcaatgcaagccttctcaacctgcatttctctgctgcactgttcggaagcttcgacagccgtaagtattgagaagggcaagcacaagctctactccagttcacttaagatgctgctcgaggaggaagtgagccagctgatcgaggcagtcacggcagaagagaagaggaaaacaaagaagagaagtgagaagccacccagaccagttgtgctcgacccacccttctctcccatgggaagagtgtaggtattgtgaacaactgtgttctcatggtcatggtgtgcaacattatgagtcatatttgggtttcatgtccatattttttgttgtgataaaagaagcacttttatgctgttcataaagatggaaggtgcgtgtagggttttttcttatctctttgtagcttttagcagatcagtagcaaggcaatatatcattgttgaattgccagatagaaggaaggaattctgtagttagtagtagagggcaatggcaggttccatgagagaggacataaataaagggaaacagctggccacttgaaaattttagcctgcttt

SEQ ID NO: 7121 - DNA, 2114 bp, Oryza sativa
  ref <308>: DATABASE ACCESSION NUMBER: AK064250
  ref <309>: DATABASE ENTRY DATE: 2001-12-06
aaacaagccagctcaatcaatcatcgagctagctgagctagctaagtgccatattgcacgtactcgttgtctgtccgatcatccttttttttttttcttgtgggggtctgtccgatcatccttgcgtggctaggcaggtagagtagctacctgctcggctgctcgcgttccagccagggtccgggcttcggatatcctcggagtccgacaccaaatcaatggcgtaccagggcatcgaccttctctcgacgaaagccgcaggcgatgaccacggcgagaattcatcgtacttcgacgggtggaaggcctacgacacgaacccgttcgacctgcggcacaatcgcgggggtgtcatccagatgggtctcgccgagaaccagctttctctggacctgatcgaggaatggagcaagaaccaccccgaggcatccatttgcacaccggagggcgtctcgcagttcaagaggatcgccaatttccaggattaccacggcctcccggagttcagaaaggcgatggcccagtttatggggcaggtgaggggaggcaaggcaacgtttgaccccgaccgtgtcgtcatgagcggcggcgccaccggcgcccaggagacgctcgccttctgcctcgccaaccccggcgaggccttcctcgtgcccacgccatactacccagctttcgaccgcgactgttgctggaggtcaggaataaagctgctgccgatcgagtgccacagcttcaacgacttcaggctcaccaaggaggccctcgtgtcggcgtacgacggcgcacggaggcagggcatctccgtcaaggggatcctcatcaccaacccgtccaacccgctcggcaccatcaccgaccgcgacacgctggccatgctcgccaccttcgccaccgagcaccgcgtccacctcgtctgcgacgagatctacgcggggtcggtgttcgccacgccggagtacgtgagcatcgccgaggtcatcgagcgcgacgtgccgtggtgcaacagggacctgatccacgtcgtgtacagcctctccaaggacttcggcctccccggcttccgcgtcggcatcatctactcgtacaacgacgccgtcgtggcggccgcgcgcaggatgtccagcttcgggctcgtctcgtcgcagacgcagtacttcctcgccaggatgctctcggacgaggagttcatcggccgcttcctccaggagagcaagtgtcggctggtggcgcggcacgagcggttcacctctggcctccgcgaggtcgggatcggctgcctgcgcggcaacgccgggctgttctcgtggatggacctgcgccgcatgctccgggagaagacggccgaggcggagctggagctgtggcgggtgatcgtacaccaggtaaagctgaacgtgtcgcccggcacgtcgttccactgccgcgagcccgggtggttccgcgtctgccacgccaacatggacgacgagaccatggaggtcgcgctcggccggatccacgacttcgtgcgccagcaccagcagcgcagggtcaaggccgagcgctgggccgccaataggcagctccgcctcagcctgccgcaccaccaccacctcagcccagcccatctctccagtccattggcgctcctgtcgccgcagtccccgatggttcgcgccaccagctgattaagccagcagtgcacttgctctgctaatgctgcgccttactacgtcgactacattttcataaccatttttttctcgatcgcatcgtcgcacggcggcacggggccgtatggtgttctttccgatgcaggtacgtgtgatcgtttgtggaaactaggctacacgtgcacggcaccgtacatgtagcttggcttttttgtagagacgtgcgttagtgcgtacaggcgtcgccgcgtcgggtgtacataggtaattttagtagcgtgtgtaacaggggtatcggagattcggagtcctcgattcttttgtgtatggtttggttaattcagatggcaaggaataatgatcggattaaggcgttaagccccccgatcggctcttgtaaactgtaaagtgtaaacatgttacacttacaataaggcttaggattgaatcgatccggat

SEQ ID NO: 7122 - DNA, 1350 bp, Oryza sativa
  ref <308>: DATABASE ACCESSION NUMBER: AK064251
  ref <309>: DATABASE ENTRY DATE: 2001-12-06
ttgattctgcattctaaaattttggttctagctaagatatgctagactagtgatgaatcattcctagagactactggttatcttacttaagacattcccatgttatgtttgttttgtgatgcagtttattcatggtaacaaattttagttgtcaaatatgttttgctttccccatgaccatggaaaagctatagatagcacattctcaccagtcttattattcaatggcaattgtcaagtcatgtgatttcttggtttagctctgaaatttgtctgtgtttgtcttctggcaactaacatgttagtttagaatgactgatatcgtggcctgttacttgcttactcatgtcttgcttatctagcaagtactccatctttcctaggttcttatattttgggacagaggaagtagctactactggtctattttttgttagctaatgaaaaaacaaatatttgtcctgtaggatgatgaagatattctgatattgggttgcattggactactggaacatgttgctgtcttgctggacatagtaggcaatgaactgctactgagcatggatacagaatttggtggctcattttgaactatgggtttacaactttccatgctgtttctgcatataatttggtaatgggacgacaaactgaaacagcctttactttcagttgtagattctggaatgagtttattggtgatgggtgatggttacaaatttggttgcagccagtacacacgaagtcatctcaggtgcatcatggtttctgacatcattctcccctgaagaagcaaatgaggtgccacctcttcatggctctccccagctgcaacttcaccggcaggcatccatctagctccggctccttcccgcgcttcctcccccgccggccgctgccgccatcgcctcggctggtgagccgagcgctctgcatcgccggcgacgggcaaagcagcggtggtgccgcgtcgagcggcggcgggctcttgggcttccccggctcgtcctcccactcgaagggcaccctcccgctcgccgggcggtacaccctcgacgagtgccccagctcgtcgctgccgcctgcgccgtgcaggagaccggccggcgacgtggcggcggcggcggcgctctccattgctttcctcccttctgttctcctctgttccatccacttcactttttttctggctagcttttcctctggagttttgagttaggacagcattagaggggtgtcttatataggctcaattgtcatttgcccagtttatgtgcttgctaagaatgcccttttgcaagtcaaaatgcattggtttaagggatgttttgttcgccctggtttgatgtc

SEQ ID NO: 7123 - DNA, 1323 bp, Oryza sativa
  ref <308>: DATABASE ACCESSION NUMBER: AK064252
  ref <309>: DATABASE ENTRY DATE: 2001-12-06
atatcagttactcctcttaccagtgcagctctgcatcgtcagcgatcaagggtaccagggtggatcgcctacgagaagctagtgacacagggcatcatcgtggtcggcacaagagggcccgctcctctcctccacgccatgacgacgagccgccaccgccgccgccgctgtctccggcggtgacaggaggagcacacggcggcgccgcgtggcactcaacggtgctcgcggaggacgtcgaaagtgccgtcatcgtcgcggcgctgacgcacgtcatcagctccacggcggcggaggtgaccacggccgttcctccggtgacggttgcgccgcagcgagctgccacggctaccatgttcggacagcaagccgccgcgcggctttcctcctctgccgtcgtcgagcggatcagcagcgacggcgccggagcagcagcagccacggcggcgctaccgcggcgtgcggcagcggccgtgggggaagtgggcggcggagatccgcgacccggtgaaggcggcgcgggtgtggctcggcaccttcgacaccgccgaggacgccgcccgcgcctacgacgccgccgccgtccgcttcaagggctccaaggccaaggtcaacttccccgacgaagtcgccggcgccagcatcgccgccgtccagctgccacgccatcatcaacaccaccccccaacgtcactgccgccgctgccggtgccggcgcatctgaggccacacttcagcctcgccggcggccagagcaccacaccggcgcccgcagccgccgccgtcgccgctccgccgcgggaagagttccccgacctcagcagctacgcgcacatactgcagagcggcgacctggagtacgacttccacgccgcggtttctgccggactaacgacgacagctgggcgatcgtcgtcgtcgtcgtcattgtcgatgccgccgccatccgaggatcttgactataagcctccctttggaccatctaattaatctactgattattcaaattagcatagatagataaccctttacaaaatcagggggaaattctgaaattctgcattttaggagtacaacttaatttgtaataatggaaatggttcacgaattttagtataatcagaaaatagatagtatcatcttgtagcaaagatgaatagatagaacagtgcagtgtgtacatttcattatgtcaacttaacagtgcttggattgaaatgtagattaagtaggagaattaattgtttgtactttgtagtagtaagtggctccatcgatccacttgattcttagagacaaagatgcctttgatggcttgatgcc

SEQ ID NO: 7124 - DNA, 1538 bp, Oryza sativa
  ref <308>: DATABASE ACCESSION NUMBER: AK064253
  ref <309>: DATABASE ENTRY DATE: 2001-12-06
gatgatttgatttgatttgattcaatctccaaatcgatcgatttctcctcctccataggagaaggagatacacgtgatgtccaaccggcgtcgcaagcgcggcgaatccaagccccaagcccacgacgccggcgacaccacgcccatcgacaacatactcacctccctcgacgacgccccgccaccgccacctccaccgcgccacgagctccccctcctccagctcaacgaccaccaagaggcagatgacgctgacgcctcgtcgtcgtcgtcgccgcaccagcagcggcggctgtgggtgaaggaccggtcgcgcgcgtggtgggagctgtgcagcagcgccgactacccggaggccgacttccgccgcgccttccgcatgtcccgccccaccttccacttcctctgcgacgcgctcgccgccgccgtcgccaaggaggacaccgccctccgcgccgccatccccgtccgccagcgcgtcgccgtctgcgtctggcgcctcgccacgggggagccactccgcgtcgtctccaagcgcttcggcctcggcatctccacctgccacaagctcatcctcgaggtctgcgccgccatccgcaacctcctcatgccgcgcttcctccactggcccgaccaccccacctccaccacctacaagacgcgcttcgaggccacctcgggtgtcccgggggtggtgggcgccatgtacaccacgcacatccccatcatcgcccccaaggtctccgtcgccgcctacttgaaccgccgccacacggagcgcaaccacaagacctcctactccatcaccctccagggcgtcgtcggccccgacggcaccttcaccgacgcctgcatcgggtggccggggtccatgagcgacgagcaggtgctccgcaagtcggcgctgcaccagcgggcgtcggcggcggctgggtcgatgtcgtgggtggtgggcggcgcgagctacccgctgacggagtggatgctggtcccctacgcgcagcgcaacctgacgtggacgcagcacgccttcaacgagaaggtgggcgaggtccggcgcgtggccacggaggcgttcgtccgcctcaaggggcggtgggcgtgcctgcagaagcgcacggaggtgaagctgcaggacctccccgcggtgctcgccgcctgctgcgtcctccacaacatctgcgagaccaggggggaggacatggaccccgacctccgctgcgacctcccccccgacgaggaggaggacgacaccgtgcttgtgcagtcggagtccgccaacaaggtgagggacgacatcgcgcacaacctcctccaccgcggattggccggcaccgccttcttctgatcatttcgatttccgtcccaatctgcactacaaacactgtattgaggtttccctcctcccctcctgtttgttcttgttattgctatagattagtttaggtgctccactcaacaacaacaataacacaagattgaaatgtgatgctttgccctcctcgttaataaatcactggaatacatcgcttcgtttc

SEQ ID NO: 7125 - DNA, 1327 bp, Oryza sativa
  ref <308>: DATABASE ACCESSION NUMBER: AK064254
  ref <309>: DATABASE ENTRY DATE: 2001-12-06
ttagagttgcagcttgcagtctacaagtgacatcctcatcaccgccgcccacgtcaccctctacgacttcaacatcgacctcaaccagtgggtgagcgatccccccctccactcctcgcggatccgatccggttggttgcttgcttggtgatcctgtgagctcactcatgcgctgtgttttttttccttttttgtttcagagtcggaaagatgtggaggggtcgctgttcgttgtgaagaggtgagtgttttagggttttggttggggttttgataccgtctgagcctgcgatttagggatctgattgtttcgggggtggttttgtctcgttgtaggaatactcagccgaggttccagttcatcgttatgaacaggcgtaacacgggtatgtgaatctgtgatctaaccctcaactaattcatcatcgaatggatatgtttaggcattgaaccgattgatatgtagggtcgatcgcgtgctttcagtctagctgaaaaactcccaagtttgtcactagatcctatgattaacaaatgctcttctgaatctgaagttgtactttagctctgcgtatggagttactcgattcatttgctgggtttctcctgaaatgatcgatgttaccttcttgttttacttgcaagataatctggtggaggatctattgagtgattttgaatatgaacttcaacctccgtatttgttgtaccgcaatgctgcccaagaagtaaatggtatctggttctacaatcaacatgactgcgaagctgttgcaagactttttggaaggtaatgctctccccatggtcctgttctcatggcatattctgttgtggctatgatgtatacaggaatcacatagtacaaggtagtgagattgttaatctacttggtgtgtatgcccgcaaaaaagaaaaatctagttaagtagttagtgtgtagattataaacatgtaggagtggataacgtcaacaaacgagattgatagcaggctggatcacattctgtcgacttggtagaaggaacaatacttatgtgatggatatcttttattactttctaactgaattatgatgaacacactcgatgttctctccaaggcaatctactaattttcctgcgattaaaagtgtgaaggctattgggttccattctgttgctgtatacattcaccaaattataaattagagtaccagttgcaatagtggggtctgatccgacattttgggagacactgctgcatgatattcagacagccatttttttcctcctttttggctggcaatatgaagcaactcaacacaaacttatgcgctgtaaaaagt

SEQ ID NO: 7126 - DNA, 1590 bp, Oryza sativa
  ref <308>: DATABASE ACCESSION NUMBER: AK064255
  ref <309>: DATABASE ENTRY DATE: 2001-12-06
aagcaagcagagcgagatctggaaggcggccatggcgcgcctcgcgctcctcgccgtccccgtcgcgctcctcctctccctctccttcctcctcctgcgccccgcctccccgccgctccccttctcgcggcagcaagcggcgtccggccccgaccgccgccgcctcctcagggtctacgttgcggagctcccccgcgcgctcaaccacggcctcctcgacctctactggtcgctccccgccgccgactcccgcatcccggcctcctccgaccccgaccacccgccgccgcggcctccgcgcgcgcactcgccgtacccggatagcccactgattaagcagtacagcgccgagtactggctcctcgcctccctccagccggactggagggacgcggatgtggtgttcgtccccttcttcgcgacgctgtccgcggagatggagctcgggtggggcgccaagggcgcgttccgcaggaaggaggggaacgaggactaccgccgccagcgggaggtcgtcgaccgcgtcaccgcccacccagcgtggcggcgctccggtggccgtgaccacgtcttcgtcttgacagaccctgtggcgatgtggcatgtccgtaaagagattgctcctgcaattcttttggtggttgattttggcggatggtacaaacttgattcaaactctgcaagcagcaatgtttctcatatgatacagcatacgcaagtgtcattgctcaaagatgtcattgtaccttacactcatttgctccctacaatgcacttatcagagaataaggaccgccccactcttctgtacttcaagggagccaaacacaggcatcggggtggtttggtacgggagaaactatgggacttgatggttaatgagcctgatgttgtcatggaagaaggttatcctaatgccacaggacgtgaacaatcaataaaagggatgcggacatcagagttttgcttgcacccagctggtgacaccccaacttcatgtcgtctctttgatgctgttgctagtctgtgcatacctgtcattgtcagcgatgagattgagctgccctttgaagggatgatagattacacagaattcgccatttttgtctcagtcaataattctatgagaccaaaatggctcacaaactacttaagaaatgtccccaggcagcagaaagatgaattccgaagaaacatggctcacgtccagcctatatttgagtatgatagtatttacccaggtaggatggcctctgctgcacaagatggtgctgtgaaccacatctggaaaaagattcaccagaagttgccgatgattcaagaagcggttacccgagagaagcgaaaacctgatggaacatcgatccctcttcggtgccattgtacatgactcgcgagacatgattgttagtattagcaatcaatcccccatgggaggagttagttagcattccctgccaatttatggattgtttgtagtgcaaatatgagagaaatttcaacagtaggtttatgctcttgttgtcaattgtatttcgtctggagtgattccccgcattgctccatgtgtgaggtttgttggttcactgc

SEQ ID NO: 7127 - DNA, 1350 bp, Oryza sativa
  ref <308>: DATABASE ACCESSION NUMBER: AK064256
  ref <309>: DATABASE ENTRY DATE: 2001-12-06
aagaaacagaaaggcttactatttcctcggcagtcggccccgaccaaccaacaaccaacaaacatcggagagccggagagtagtcaagccagccgcgtcgtcgcgtggtcgtcgatcgatcgagtgaggagtgatcggcgcctctcttctgtcgtcatggggagggaggcgtcctcgccaccgtgggcggcggcgacggcggcgaatggagtggccggctcatcgtcgtccggacagaagaggaaggccgccgtggacgacgacggccgcggggaggacgacaactggctgaaactgtcgcttgctccggtggactacggggatcccacgggcgacgtcgtcgacaacaactcctcctcttgcgctccggcagtgatgacgtcgacggaggagcggtcggggacggccgccggtgtggcctccggatcggcgcgcgccggtttgatccccaacggtgcagtcccgatattcccatgcttcaatttccttggaacttcaacgtcatcatcaagcctatcgcacctccatcaacaatcttcctcgactcgacgtcaaagcaacgcgtccacatcaagctctagcggcggcatcggcggtggtgacgacgatgaggcaccgaacgtcatgaacggcggcgacaagaacgatggtaatgctcttccggatccaccgtatccttgggctaccaatggagtggccaaacaccactccctcgtcgagctcgctcgtcgcgacatcatcaacatcaatggcgaagctcggtgcaggcgctgcgacactcgcaagatgattgtctacaacattgccaccaagtttcgagaggtgtccgactacttccgccagaactaccagcatatgaatgaccgtgcgcaggcgcggtggatgaatcccgtcgtgccgaactgcgatagttgtggccatgagagatgcatgcgtccggtgattgccgctgagaaggaacgtatcaactggttgttcctactgctcggagagacactgggtttgtgcacgcttgatcagctcaagtacttctgtgcgcacaccaaccggcatcgcaccggcgccaaggataggtgctcttctcaacctacgaagagctatgcaaccaacttgctcctgggctaatcacggggcatgatcagttggggatgcgttagctattaattttttcggttgttaatttagactttaaagatgcaaccatgccgtggttgttatattaggttcatctagagtctctatcttttagtctcgtctctataagtatttcacgatatattatttctctatattatttgtaagttgtgcaactgaatttgaattttgaatgtaggtgtgtactgttttctg

SEQ ID NO: 7128 - DNA, 2126 bp, Oryza sativa
  ref <308>: DATABASE ACCESSION NUMBER: AK064257
  ref <309>: DATABASE ENTRY DATE: 2001-12-06
aacgctggaatcgtgctacaggcggcagagtggaaggcggagatggagggaaccatggcaggcatggtggccttgtggaacgagtgggaaatccgcgtgcttgtgctctccagcctcgcgctgcaggtgttcctcctcttctccgccgtcatccgcaagcgcaacgtctccgccgtgctcggcctgctcctctggctcgcctacctgctcgcggactccatcgccatctacgcgctcggctacctctcccagacgcgcgtccccagaggcgtcgacgtgcggtccttccgcaacacccaccgcatccaagccttctgggcgccgttcctcctcctccacctcggcggccaggacaccatcacggccttctccatcgaggacaacgagctctggaagcgccacctgctcagcttgctctcccaggttgccctcgctatgtacgtcttcgcgaagtcgcgcccaggcgccgatatccttgcccccgccgtgttcatgttcttgagtggtattctcaagtacggcgagaggacatgggcgctgaagtgcgcgagcatggacaacctgcggagcggcatggtgacgacgcctgacccgggtcccaactacgccaagttcatggaggagtaccgcttcacgcgcgaggcgggactccaggcggagatcgtcattgagccggagcgacggggcggctgggtcaccgccgcggccatcgccgaggagagcgtgccgtacacgacgatcatcaccgacgcgcgccgcttcttcgtcaccttcaagcgcctcttcgtcaacctcatcctcagcttccaggaccgaacgcggagccaggccacgttcctgcggctcacgccggagcaagcgtacaagatcatcgagatcgagctgtcgctcatgtacgacaccctgcactccaaggcggcggtcatccacacttggtacggccgcctgttccgctgtgtcacgctcctctcgacgtcggcggcgtgcctcctcttcaatctgcttgacaaggatcggtacgagtcgcacgacacccgcgtcgacatcttcatcaccaacctgttgttcggtggagcactctgcttggaggtttacgccattggtatgatgctcatatcctactggacgtacgccgctctgcaaggttgcaactgccgcacgctgagccatcttctgttcaaaagcatcaagtatttccggccggaaagccggccgaagtggtccaatctgatggcccaacacaaccttatcagctattgcctccatgacagagcaacgttgctcaccaaggtcatcaccatggtcgggctcaaaggacattgggatagttggatgcacatccagcacatagacgtgttacccgagctgaaaaccttggtgttcagggagctcaaggacaaggcggtcagcatcgtcgacaatgccgagagctaccgcaagttcagcaaccacaggggccagtgggcgctgcagtgcaagggctactacaaggagcttggctggagcgtcgaggtagagttcgacgagagcattctcctctggcacatcgccacggacctctgcttctactacgacatcgacggcagtgacggcgacgccaagctcaccgagtacgttggcatcagcagagcggtgtcaaactacatgcttttcctgctcgtcgcgcggccgttcatgctgacggccggcatcgggcagatccggttcggcgacacctgcgcggaggccaagatcttcttcgagcgggaaatggcgctgccggacgagcgagcggcggcggcgatggtgctcgaggtgaacgcggagatcgcgccgagggacgtgaagggagacaggagcaagtcggtcctgttcgacgcgtgccggctagccaagtcgctgctggagctgcagcccggcaagaggtggcggctgatccgcgtggtgtgggtggagatcctctgctacgccgcgagcaagtgccggagcaacttccatgccaagcagctgagcaacggcggcgagctgctcactgtcgtctggttcttgatggcgcatctggggatgggggagcagtacaggatagaggctgggcatgcaagagctaaactaattgtagagaagaactgagataatcacctttcacc

SEQ ID NO: 7129 - DNA, 1598 bp, Oryza sativa
  ref <308>: DATABASE ACCESSION NUMBER: AK064258
  ref <309>: DATABASE ENTRY DATE: 2001-12-06
gcggatcgcgccgcgccgcactcctgtctgtctctgcactctcggactcgtctcccatccctggggcgtgggatccccttccgaccaaggcaaggcgaggcgaccacctgtcgccgccgccgccgccgccatgaagcctccgcggcgccgctatggtttactcgcggtggtcgtcactctcatcgtcctcgcctccctccagatccagttccaccacctcaaggaggaccgtctcaccggggaccgcaccttcgccaccaccaccaccgaccccgttcactggcggaccggcgccgagggcctgccacgcggcattgttcactccaactccgacatgtacctccgccctctctgggactctggcgccaaccccaagaataaaaacgataatcacaatgctcttttggcgatggcagtcggcatttcacaaatgcagaatgtagacattatggcccgtaagtttcttaaccaaaactacacagtcatgctcttccattatgacgggaatgtagatggatggcacaatcttgagtggagtgataaggccatacacatacttgctcgtaaccaaacaaagtggtggtttgctaagcgctttctacatcctgatgttgtggctatctacggttttatctttttatgggatgaagaccttggagtggacaactttgacccgagaagatatcttgatataatggtttctgaaggattggaaattacacaacctgctctggaccctgatctatcgactgatattcaccatcggatcacaatccgcaacaagatgatgaaagtgcataggagaatatatgataaccgtgcaagtatgaattgttctgatggaagtaaaggacctccatgcacagggtgggttgagggcatggcacctgttttttctcgggctgcttggagatgtgtatggcatttgattcagaatgacctgatccatggatggggccttgacatgaagcttggttattgtgctcagggtgatcgagctgagaaggttggcgtaatcgacagtgagtatgttgttcatcaaggaataccatcgttaggaggaccatcactaagcagtaagacccctcggagatctctggatttacggacccacattagaagacaatcgtctgctgagctggagaagtttaaagagcgctggaacagagctgtaagggaagatgaagaatggacagatccttttgatacttgattactttgaaagaagaatccgatacaaatatacaagcccacctgatacaaatatacaagcccacctcacattagagttgcaggacagtccacatcgattacaataattggactcgagatcatctcacatggcaatctgtgggcttcatagtaaacggtttgttacagacatttatctgactagcgttcaccattatgtcctcaagaggtgaagagccactggatacggtaccatcaacacaaggatcaaggtgcaactgaacggcaacccaaactaaccagagacttaacacagtgtcttgtaatttaatttaattcctcatttcactacgggtgtatagtgacatgatatacacacttgtgcagttatcttaatagcaagtttc

SEQ ID NO: 7130 - DNA, 2138 bp, Oryza sativa
  ref <308>: DATABASE ACCESSION NUMBER: AK064259
  ref <309>: DATABASE ENTRY DATE: 2001-12-06
aacaaacgatctcggttaggcacggcgagcccaccaccatcttcccccttctccttcccctccccgcgtcgcctcgccgtgtgcgtgcgcctccacttctccgagagacaaaccagggcgccgatctcgcagcctccacctcctcacccacgcggcctcgcgcttgcgtgcgacgccggagaagaagcttcggcaccggccccggctccacccgcagctccgccatctcctccggccgcggccccggcggcgaggcgaggcgaggcgaagcggagggcggcgagatgtgggtgttctacctgatatcgctgcccctgacgctgggcatggtcaccgtcacgctccgctacttcgccggcccaggcgtgccgcgctacgtcatcgccaccgtcggctacgcctggttctgctccctctccttcatcatcctcgtccccgccgacatctggacgacattaactggccgtgagaaaggtggcatcggcttcttttggagttggtcgtattggagcacatttatcctaacatgggctgtagtacctactattcaaggctatgaagatgctggagatttcactgttaaagaaaggctgaagactagtattcatatgaacctgctcttttattctattgtgggggccattggcctctttggactcatattgcttctagtgatgcatagagcatgggatggtggtattgtgggctttgcaatggcatgttcaaatacttttgggctggtcactggtgcattccttcttggttttggtttgagtgaaatccctcgaaacatttggaaaaatgcagactggactcaccgacaaaaagtactttctcatagagtagcaaagatggctgtcaagcttgataatgctcatcaagaatattcaaatgcaattgttgttgctcaagccacttctaatcaaatgtcaaagcgtgaccttttgaggccttatatggatattattgacaaaatgttggctcagatgctgcgggaggatccatcttttaagccttctggtggaagattaggtgaaaatgatatggactatgatacagatgataaaacaatggccacacttcgacgtcaacttaggagggctcacgaggagtactacaggtgtaaaagtgaatatatgacttatgtcatggaagcccttgaactagaagacaccattaaaaattatgaacgacgtgacgcaaatggatggaaatttgtgtcaagttttagggaaagtcgaccgggcacactgggttcccttttggacacaatggagttcatttggcgctgtgttctgaggaagcagcttcagaaaggatttgctattgttcttggctgtatgtcagctgctatactgctggctgaagccactctgctgccaagtggtgttgatttgtcccttttctccattcttgtcaagtccgtagggaaacaggaggttttggttcaggttgctgcatttgtccctttgatgtatatgtgcatttgcacttactactcactgtttcagattgggctgttaatgttttattctctgactccgagacaaaccagttctgtcagcttgcttatgatctgctcaatggttgcaagatatgcacctcctatttcttataacttcctgaatctcattcgacttggtggtgatgccaaaactacttgagaagagaatgggaaacatcgatgatgccgttcctttctttggaagaggcttcaacaggatatatccattatttatggttgtttatacactattggttgcaagtaatttctttgggcgtttgattaactttttcggaagctggaaaaggttcaaattccagcgtgaggaagaaaatatggatggttttgatccgtctggaatgatcattctgcagaaagagaggtcttggattgaacaaggatgtaaagtaggcgagcaggttatcccattggcaagaaatttcaataatgtcaacacagatgttgaatctggaaaggtgccattggttgaaaatacactggagatgaaatcaggagctacttcctctagagctgacggaagagtaggtcaatccaaatatgctaacaacagagaaactattgctaccaagtattcagctatcagagaacagagcagacaggcagtgaagccagc

SEQ ID NO: 7131 - DNA, 1709 bp, Oryza sativa
  ref <308>: DATABASE ACCESSION NUMBER: AK064260
  ref <309>: DATABASE ENTRY DATE: 2001-12-06
aggatgaatcaagatctgcaggattaagcaaagaagcgcaagagcgcagcagacaaaacgaccctttgaggagagatcaaggagcagaagaaaataacatgcaaaatagaggccgttctgatgtacatccacgtgatgaaaatccaaataacagtgagaggaacaccaggcaagaaaaaccaaataatactcatgacggtaaccgtctatcgagcaattctggtgctcgccaagtgagtagagatagataccgggaaagcacaagaaagggcagaagttctgatattaatgaacatgatcttcccaaatcgagcaagaggagacgtgaagaccatgaaagtcatcgtggtgggaaggtcgatgtgaaaggagtgagcgagcaagaaaatagtagggatcatactgtgtcctccaaaaagggccagaatccacaacgtgaatcatttgtgaaacaagcggaagaagatcccatgtcagatgatgaaaaccatgaggattcaagaaggggtcgctctaagttggagcggtggacgagccacaaagagatagactatagtagtatcgataatgaaaatgcaccaacattttcttccatcaaatcagatgttcaagctcctactgctgatgagttaggtaaatctgaagcagctgcagctggcaattcagaactcaagagcggtggcgataatggccaaacatctgagaagaacgccgaagagcgtgatcgacatctagacactgttgagaggctcaagagacggagtgagcgtttcaaacttcccatgcctggtgagaaggatgcaccgcaaagcaaaaaggtggatactgaagtgcaacctccgcaaatcgaatctgcttctgctgatttggaagtcaagccagagcggccagcccgcaagaggaggtggactgggactgggggctagctttgagctgacggttactcgaaggaattacctgcggaatatcatgacggattgcacacttcacaccatgtttgttctgttacaactggaagtggaatccatgtatgattttgctgtttaatttatacatgtatgtgttaacttacagaaatgtttgatttttggttggggaactggatactgtattttttttacccattcatttcccctaatgattccggtggtccaaatgtggcgccggtgccagtgtgccaccaaaatcagatggctccaagccttttatggaaagcagctgattggagttccctgacttggtaggactggtgcttcgacaacaatttcgtgggttccaggagctgcatttgaagaagcaggggtgccccatgcaagcaatctttttcttgtgatgaactgctggtgatctggaggcacttgattattgtatgattcctgttgccatctgatgttgcagaagctataccaagttaccgcttcttgtgcatggaagcatggcatctgactgcgaggtagatctttacgacctgggatgactacctactgtgtgccatagtatgttcttgtacattttgatgaacctacattgacgtgcataaagttagttcatagtatgcagcaagactgcaagagctagtgtagagcagcatggtatactgaacatttggacggatcaataatgtatacatcttaggtagtggacagtagggttgcttgtctagtggaattttgcttatgacgataacccagattgatttgacttcgatc

SEQ ID NO: 7132 - DNA, 769 bp, Oryza sativa
  ref <308>: DATABASE ACCESSION NUMBER: AK064261
  ref <309>: DATABASE ENTRY DATE: 2001-12-06
acacactccccacatcgcgttccaagtacaagaaaacacaccccacgcacagaatgcccagagctcggccgtcttacccggctccggcgacttagccgttgtcgccgtgcatccccggaccaatctgtcgagcacgtggtgggcgtcaccgtcctcgccgccggccacccgaactgccgacgccgctccggccgccgttcctcaccaccgaagcaacaccaagctccgctgcagttcgcgccttgagtcgacccggcgacgttgacgccggagttttgccgtcgttggccaacaaccaccacctccgccgctccctggacctcgctgcctccgtttctctgcttgaggaagagtacgtcgaagaagaagagggtgagtttgttgatgaccaggttcaggagtttgcagatgaagggccaagcaatacctcggttcgtccaggcatgataggccttccagacaacaactctgcaaggatacaaccggcactccaaagatcaacggcagcaccataattggtagcaccaagcaatagctcaggaggacggtaccacagtgttaccacacgacttgtcaaatgctgcttttgatttgggttaaaaaacgtagccagaccaaaatctgctattttgagggtgccattgttgtcaagaagaagatttgcaccctttatatcccgatgtaataccccatggctatggcagtggtccagtccagaaagtaattgttgcatgtaacactttacctgaaagaaacagcttaagtggat

SEQ ID NO: 7133 - DNA, 1453 bp, Oryza sativa
  ref <308>: DATABASE ACCESSION NUMBER: AK064262
  ref <309>: DATABASE ENTRY DATE: 2001-12-06
gatgaaataaattgcaacaaagtggataaaccagtgggtgatgagacttcagacttttcttctatggaagatttagaagcatttcttgatagtgtccctcagaagattgagcaaagtctttgttctgaagatgcagatttggggaatttagctggacgcttggttggcttatctgttcatgcactgatgattaagcacggaaagatctcagtgaggtactctaatcgtggggaagtagaagatgtttctgatggaaaaattgcctgtgaagcttccggtattctgttggtgaaacctaaagagctggttgcaaagtacaaagacagaaatacagcatgtgctacatctcaggaaatcccaaaatatagcacaacttacaaaatccgagaacatgaactgcagattttgcttagaatggagataatgaagtctgaacttggacctggtatcgaggaaggttccaaacagaagatgataaaagaaatctgttcccttctgcagtttattgatatcaacctccaaggggattcatttcagtccaatagtattcttgagtttgccgaaaagactattaagatcaggtacatcgaatccatggaagatgtgatcaagaagatctacaccgagatggagttcgatctgttcgacgacgaggtggaatgctccgagtccctccccagcagcagcaaccacgacgtcgacgggagcaacagccgccgtcaccggagcaactccgcacctcacctgctgcgacgcgatcacggcggcggcagcagtcacgaggagcggctggcgagggcggaggagaggaggaacagggaccgcaggctctcctcgttcaccagctgggtccccgacctccgccgcgtctgggcgctcaagcaccccgggaaggaacccgccgccgccgcgccgccgcagtcgcggcagggggcgtccaagcggaggaagcgccgccgcgctgcgtgcaccgacatggtctgcgagacgccgatgacggtggccgcctcggggaagaggaagccgggcgacgccgccgggtcactcgcgacggtgtccaaggccctcttccacgacgacgaggcggcgggcattagctcgagcagcgtctgaaaccgccattgttgtttcggccaggacatgacacgacacgacgatgtgcctcatgagggcatgcatgccgggccagatggcgtctgctgcacgacgtgagagaggcggggtaccaggaaacacttgtccgtgcttggacgtaacgtgtcatgtacaagtcccgggaatccggattcagagattcttggcttcgagtgtgcgttacgccaaggtaaacaccatgacaggtcaatgttgccatctttttttatgctaccgtgttcttttattatttttaccaaagaaaaatacgctactgtatatattaccttgtcacatgcgtgtttactttgtatgcctc

SEQ ID NO: 7134 - DNA, 1453 bp, Oryza sativa
  ref <308>: DATABASE ACCESSION NUMBER: AK064263
  ref <309>: DATABASE ENTRY DATE: 2001-12-06
ccatcgcttccgccaccaccgcagcggcggcggcggcgattccggcgagcccctctcctcccgcctccggccagtacgctcccaccgcggcggccacggggaacggcacgagctcccgcggcagggcgatggctgccgcccgcttcgccggtgtccctcgccgcgcggcgcagtcgtcgtcgtcgtcgtcccaggcgcccctcgacgagccgcctccgccggcgctgacgcccgagcaggtcggtctatgcagggaggcgctcgagtacttcgaggggatgtgtggccggccggaagccatgtccgacgagttcaggagactccaggacacgagacacgagctgatgagaagttctaatgaagctcgtaatgctgcaaatagggagaaaaaccgctatattgatgtcgtaccatttgatactaccagggtaaggctaaaacgatcaaccaccagtcagacttcaagcaatgattatatcaatgcaagctttataaaggtcactgaggacaacagagttgcaaaatttatttccactcaaggtccactagccaagacatttgatgatttctgggaaatggtctatgaatatcaatgtcctgttattgttatgctcacacaattcgacagtcttaagtgtgatgaatatcttccattacgcaagcaacgtgaagcgtatggaaagtacaatgttaagattacaaatgccaaaagagatagccatcagttatggttgcgtgatgtgatggtgcaatgcaacgagtcaagcagggttcattctgtacgccatatagaatatcctgattggcctgatcatggagttccaactaatactgatgctgtaagacaaattcgaaaatggttacaaaatactccgatggagcatcctatagttgtacactgcagtgcgggcattggaagaaccggtgcttacataactatccatagtacaattgagagacttctccttggtgataaaagctcatatcatcttgatgaaactgtcaaaactttgagaacccaacgagttggaatggtccaaactgagaaacaatacatgttctgctatcgtgcaattgctgatgagctgaaagatcttttggagtctaaccgctgaggtatccctaaggcaggaattatggacatgtctgtttatctcacccttaaattcctataatctggatgaatgcctgattggagcacaccatttctgcattgactgaaccgtttgaagcttagcacttttattttgggtgcacgattacttctgaatagatttgactgcatcagtaccgccatgtcactttcatttcattacctctaaattgttgttattgctgctctcacggaattaaagagagttagtaggtttagaactattggtggcattgtgcctgtacttattgtgcagcgaagaatggttcattgcttggattttaacggaatcacgtacct

SEQ ID NO: 7135 - DNA, 659 bp, Oryza sativa
  ref <308>: DATABASE ACCESSION NUMBER: AK064264
  ref <309>: DATABASE ENTRY DATE: 2001-12-06
aaacatagagccattgagtgtgcccactgcgcagtctacacactgcacagcaacacacatggcctccatcaaactctccctcgcatgtgtcctcctaatctcaggcctcgtgatgctggagaggatcgagcacactgaagcggtctgcacactgttctgcgctaaagggacgtacatcacctgcagcaaccatccatacgagcagctctacgggtgcgcctgcagatgcgcgccgccggatggcgtcgactgcgtcgtccatctcgccgacggctccacgcagcagtgctgatcggaaaacgcagggaaaggatggtgtcgtcgtcgctcttccacttgcacgttcttgtgtgtgtcactgtatgtgaattacttcatctgtcctaaaatataaagacttttaattggatgcgatatatttcagtactacgaatctgaatatactcgtagtattaggacgtgttccatctagctaaaaactcttatattctaggacggggggagtaagtggctgcacgaaacctgtgtgagtcgtgtggccatacgtgtgcctcctttgtgtcactccttaaggtgtgttcggaactccaaattcccaaatgctgtaataaaacgatcaagaggaatcctgcatggctgcctcttgcttcctttgtgtc

SEQ ID NO: 7136 - DNA, 1301 bp, Oryza sativa
  ref <308>: DATABASE ACCESSION NUMBER: AK064265
  ref <309>: DATABASE ENTRY DATE: 2001-12-06
gtagtttcctactttctcatgtcaatgtgtgcatgtcaagttcaacagacactactagctaatcctcttcaacacgcagccaccgtgtcgacgcctcaccaccggccggccatcgaagaagcatctcgacctctggcgtgctccagattcatccacatgggtgggctggagaggaagagggtcagagagaagatgaatcccctctccccgcactagtccatccagtgtggccatcttgcgatggcaaatcgccgccgcaagaggaccaacacctagagaggagcttgtcgcagtcctcaacgcccctcttatgatgctaccgttgttgccgccatctcgaccaggctgcccgtgtctcctacgggccgcctggtcgcatcaccttcgcctccgtcctcccactgtgacagtctcgtcaccgcaccacctcaccttgccgtgctccaccatagcaggctcgccaccacgccggccatgttccactaatcgtgctccttcatgccaaggccatcatcatggtcttccctctggagccccacaacaggtgtcgcactctccacgcgcttcgccggccacacgtcgtcgtgtcggccggcgccgtgcgcttcctcctgtcacagcgccactgtcgaactggatctgggagctctagatccggcaccaccgccactgccgccaccaccttctctccagctgccaacctccaccgccgtctgcgcccctgcattgggaatgccaaatccacttccgagagcgtcggatccattgcgcccttgccgatcgactctagccgctgtggacctgcaacgccatgcgccgctccgtcctctcgtgccaagggcgagcttcgctgggtcacgactcacgatgtcctcaccaccgccttcccagttggccgctcgcctttgcagcagcgagctccggcgacggcgaggcgttgagggtggatggaaggtggcgacgcaggcggctagggtttcgcccccgagaaatctgtgcaagagcgacgcggggagcggttagtcttagttttattattagcctgaaactctgaatgagctctaagtggtccaatgaacactgatcatacgtcagaattcatttttactgcatggtagatatgcatgcaaataagtgctttgatcattattcagagtagtgagtgcactgggttaaggcccagttgtctctgttcattcaatcatcattcatcagcctgtgtttttcgacaggcctgagttttagtacttatagcctcctgtaaactcgtttctgtattataaatacctatttgccttctc

SEQ ID NO: 7137 - DNA, 1933 bp, Oryza sativa
  ref <308>: DATABASE ACCESSION NUMBER: AK064266
  ref <309>: DATABASE ENTRY DATE: 2001-12-06
actcacgcagctcacaggctcacagctgcagctacttactactggtacgggctcagggccagcagccagagtgaaggggaggcgaggcgaggcgagccgtgtcaatgtccaagaaatgtgatggcgcgctccggtgaggcgactggttaggttagccgaggagggggaggaggcgaggcgaggcgagggcgagatgacactgcagatggagccgccgccgccgccgccgaggcggtcggtgtcgacgagctgcgacctgcacccgggggagacgttcacgggcttctgcgccgcgtgcctccgcgagcgcctcgcggggctcgaggcgtccaccgccgccgcggccgccgcgccgggccgcaggtccacctccgccatccgctcgctcttctccaggccattcgccgccgccgccgtgcgttcctgaggtgttcctggaggaggagatagctatggctgaggagtctgagagattactccagtggtggagccaatcttggtggtggacacctccggggagatggaaacggaagccaatggtggacgggaggccaaggccatgaaggaccacatagatctagagtgttcgcaggccaagaagccgcagcccaaggacctgaaggaaatcgccgggagcttctggctcgccgcctcggtgttcagcaagaagtggcagaagtggagacgaaagcagaagctcaagaagcaggacgccgctggcagcaaggcagcagccgcagcaatgccgccgccggagaagccctccaagccctcgttcctccggcggagtcgcctccgtggagaagcctgctcggagttcgccggaggtcggcgttcgtgcgacactgacccaaggttctccctcgatgccggccgaatgtccgtcgacgatgtaggcttctcctgggacgagccccgcgcgtcgtgggacggctacctgttcggcgccggcaccggcattggcctcggccgcgcgcccccgccgctctcccgcctgccgcccattctctccgcgatggaggactccccagccggcatcgtcgagcgttccgacggccaaatcccggtggaggacgactcccagccggagcccgatcccgacgccgacaccccgggcggctcggtgcagacccgagactattacgacacgtcgtcgtcaagccggaggcggcggagcctggagcggaccagctcggtgcggaggccgtcattcgaagtcaccgacgcaaagccagtgctgccggcggcggccgccataacaagcgtcaaagattcgccgctaattgggagctcagagttctaccacttccagcatgccgaggacctgctcgaacaccaccggttcagcaccagctccctcatcgaagacttccccatgagcctggacgccgcgttcccgggccccgacaagaagccccggaggtggcgcaaggcgtggagcctctggggcctgatacaccgccgcgccgccggccgcaggggcggcgcgtccgacgtcgcggacagggccttctcggagccgtggccggagctgcgcgtccgcgggtgcaacgccaggatgcagcggtgcaacagcaacgccagcgcgcggagctctttcagcagcaacagcggcggcctcggcagctcgaggcgcagctacgtcgacggcaacggcaacgtcgtcaagcggcggcgggaggagtgcgccctggagcgcaaccgcagcgcgcgctactcgccggggcacgctgacaacggcatgctgcggttctacctcacgccgatgcggagcgccagcggccggcgcgccccggggctaccggccaaaggcggccggcaactgaggtcgcaatcgttcgcgcgtagcatgctccggctgtactgagttgtgtttttcgttgcagcagtagtggaggctcaatggcaatggtataaccataaatcttttttt

SEQ ID NO: 7138 - DNA, 1345 bp, Oryza sativa
  ref <308>: DATABASE ACCESSION NUMBER: AK064267
  ref <309>: DATABASE ENTRY DATE: 2001-12-06
agtattaatcagcaacaaatggcttcagatcactagaccagagtgaagagagaagcgcgtgtgtgttgattgtcgtaatgtcgatggttgtggcctcttacgctccggcgagccggtcgccggtgacgcgggcgtcctccggcgcacggcgggttagccatacacagtcatggaggccgccgccgccgccgttcttcccggcttccgccgccgtcaagtgcaggcggcctactcttccggtggcacgttctgttggcccgccggagaaacatcgccctgtgctcaacattcctcccaccgctctactgtaccaagtcccgccaccggaggggaaagaacggtgggaaatcaaggatgacgagggcaacgtccagctgtggttgcaggtgcccggcctgacggaggacgacctggagatcaccaccaccgacgaattgctcgagatcaagcgtaaggccggtcgcggcgacccgcggcggctcgacgacgtccaaggcgttggctccttccatctccggttgctcctgaccaaggagtttgtcagcagccaggtgacagccgagctgaaggccggcatgctggaggtgaccatccccaagaacacaaacctgcgtcgcaccgtagtcaggatagggcagcaatcacagtctccagctgcagttagaactgcgcagccgaaggtcgtcgatcctcctcctgccaattcgccaccgaagaataataatcttgtgagaaacacaagtgtgcagtcgaggattgatcctcctgcgagagagtcgccgaagaatgatcttggagtaggtatcagtgttcaaccgaatgattctcctgcgagagagccacccaagaacaatcttgccggaggtagaaatgtgccaacgaaggatgatcctcctgcaagggagctaccgaagaataatttggccggaggtagaaatgtgccaccgaaggatgatcctcctgcgagagaaccaccaaagaataatcttgccggaggtagaaatgtggcacccaaggatgatcctcctgccaatgaggcaccaaggaataatcttgcaggaggtacaggtgtgccgacgaaggatcctcctagaaatgccaatgagccgccaaagaatcctcctggtacccgtgaagccaacctaggatgagcaaattaaccgtggtgggcatgtgagaataaagattagaatagattaaaccccatgagaggagagaagatatgtttatgtacatggttgtcatgctcagaggggcaattttcactgcacgcagttggttcactttaatttttatgaaataaagttatttgatcgatatgatttgctaaaaaaaaaaaaaaaag

SEQ ID NO: 7139 - DNA, 1951 bp, Oryza sativa
  ref <308>: DATABASE ACCESSION NUMBER: AK064268
  ref <309>: DATABASE ENTRY DATE: 2001-12-06
agacgcgacgattctgaactcccccatcacatctccggcaatggcggcggcggcggcggcggcgcccccctcctcctcgtcgctcgcgccccccgaggtgcccatggagctgcacgccggcaaccgcgatcgcctcgtcgccgcgctccgcgcccacctctccgcctccggccgccccctccgcggcctcgtcctcctccagggaggggaggagcagacgcggtactgcaccgatcacctcgagctcttcaggcaggagagctactttgcttatctcttcggagtgagggaaccggggttctatggcgcaatcgacattgtctctggacagtcaattttgttctctccaaggttgccagctgattatgctgtgtggatgggtgaaattaagccattgtcttattttaaggataggtacaaggtcgacatggtgttctatgttgatgagatcacacaagttctgcaggaccgtttcagcgatcacggaaagcctcttctgtttgtgttatatggaaaaaatacagacagcggaaattattcaaagcctgctagttttgaggggatggagaagttcgattccgatctaagtacacttcaccctattttaactgaatgccgtgttatcaaatctgacatggagcttgcccttattcagtatgctaatgatgtgagctctgaagctcacattgaggtcatgagacgagcaaaaccaggcatgaaggaataccagttagaaagcatctttcttcatcatgtttatatgtatgggggctgtcgacattgctcttatacatgtatatgcgctactggagaaaatagttctgttcttcattatggacatgctgcagcaccaaatgacaggaccctgaatgatggagacatggcactaatggacatgggaggtgaataccattgctatggatccgatataacatgctcataccctataaatgggaaattcaacagcaatcagacaatagtatacaatgctgtccttaaggctcataatgctgtcatagcacacatgcggcctggagtaaattggttggatatgcacaaacttgcggagcagactatacttgaatctctcaagaacgaaagaattctccatggggatgtcactgatatgatggctcaaaggttgggtgctgttttcatgcctcatggtcttggacacttgcttggtattgacacccatgatcctgggggctatcctgagggcttagagaggccaaaggagccaggactgagctccttgcggaccataagagaacttaaagaaggcatggttatcacagttgagccaggttgctatttcattgatgctttgctgataccagccagggatgatccagtttcctcgaagttcttcaactgggaagagattgaaaaatacaaaagctttggtggtgttcggattgagagtgacgtgtatgtgacggcgcatggatgcaagaacctgacaaactgccccagggagacctgggaaatcgaagctgtaatggctggtgcgccatggcctgtgcgtgcgacaaataatagcctgtccaaagcgtcctgaccaccttacctcagtttttcagtgctcctgaaccctgtccaagcagatacatatggagataaaaataggtgaacctcctggggttgttggtctgatgttcatcggtcatttcatatgttaaattgtaggatctgttgaagacggtcccctcgagtatcgtcctttgaaaactgaaaggtacaaataaaagatcaagaaaactgaaaagtacaataaaaagatcagcttgagaggaaaagatgccgttcaatttccttgcgattagttcaaacgtctctgttcataaccatcaactctattggcatgagaacagcatgaggtgcataatcatgcaacacttgttttgtgcaatcacaggactaatgtggtatcattaaaatgtcttgcttc

SEQ ID NO: 7140 - DNA, 1496 bp, Oryza sativa
  ref <308>: DATABASE ACCESSION NUMBER: AK064269
  ref <309>: DATABASE ENTRY DATE: 2001-12-06
aacaaagtaatttggcatatgggcacccccaggcctcatgcctggaacaagctgttgctggaaaccaaatccaggctgtgggggcatgatagcaggtggagcttgtccgtagaagagttgctgcccaagaggagccataggagggtacatgggaagacgtggagccatggaaggtgtcatcggtacagggcgcacctgagaaaattgtgcctgcaacatcgccttcctgtcttctttacgttgtgcaaatgcgacatacaatggctttccagatatcattttgccattcatttcagttaaagcttgagatgcttcctcacgagttgaaaatgcaacaaatccagaccctttgctaacaccatttgcatcacgcattatcttgcatgaagtaattttgccatagttagagaacaattcacaaagctggtcatccccaatgctatcatccaaattcttcatgtataagttcagtccttgatatttgtcagcagcatctttcatgctttgctcaaatcttctcttcaattcaatctctctttctgacttcttctgagctcttccaacataccattctttgtcattaattttctttccattaagttcctcaacagcacgagcagcatcatctgggctcttaaaattgatgaaaccaaagcaccttgatttaccatccatgccaaccatgataacagcacttgtgatgttcccataggcaccaaaaattttgactagatcctcctttgtggtggactcagacaaatttttcacaaaaacattgttaaactttgtcttgtcaacagaattctctctctcttgcttgcggagaaaaggtccaacataaacaggcttatcattgatcagcatcccatttagactttttattgcagattgggcagcctctcccttgtcatactgaacaaaaccaaagcctttggattggcccatttcatctgtggcaaccttacaggagagaatgttaccaaatgcagaaaaggtatcatggagagttttgtggtctattgctttgtcaaggttcttgatgaaaatgttagcagatccacttctgcgactgcttgggtcacggtttgagtacattacccgaatgggtttgccattcagaggagcaaagttgagcagctccagtgctcttgcagcatccacggggttgttgaagttgacgtaggcgtagccgagcgagcggcgcgagctgatgtccctgcagacgcgcaccgacatcacctgccccgcctggctgaagagctcgtacagctgcgagtccgtgaccgacgcctccaggtcgcccacgtacagcaactgcgccccgccgcccccgaggcccacggcgacgccgacccctcccgccgccgccgccgcggtgacagcccccggagagcccccgttcaccgccaccgccgccatttgcgccgccatcgcccaccgatccctcgacctcgctccctcacccttctctctttttcaatttttttccgcgaaac

SEQ ID NO: 7141 - DNA, 1586 bp, Oryza sativa
  ref <308>: DATABASE ACCESSION NUMBER: AK064270
  ref <309>: DATABASE ENTRY DATE: 2001-12-06
aaaaacttctcacacacacgctgacgcctgagtgctgaccggtgcgcgccggccgaaaatggacgacgcccattcctcgcagtcgccgctgcacgtcgtcatcttcccgtggctcgccttcggccacctgctcccctgccttgacctcgccgagcgcctcgccgcgcgcggccaccgcgtgtccttcgtctccaccccgcgcaacctcgcccgcctcccgccggttcgccccgagctggcagagctcgtcgacctcgtggcgctcccactgccgcgcgtcgacgggctccccgacggcgccgaggccaccagcgacgtcccgttcgacaagttcgagcttcacaggaaggcgttcgacgggctcgccgcgccgttctccgcgttcctcgacaccgcgtgcgccggcggcaagaggccggattgggttctcgccgatctcatgcatcactgggtcgctctggcatctcaggagcgcggggtgccgtgcgccatgatcctcccctgctccgcagccgtcgtggcctcgtctgctccgccaaccgagtcgagcgcggaccagcgcgaggcgatagtccggtccatgggcacggcggcgccgagcttcgaggcgaagcgcgccacggaggagttcgcgacggaaggcgcctcgggggtgtccatcatgacccgctacagcctgacgctgcagaggtccaagctcgtcgcaatgcggagctgccccgagctggagcccggcgcgttcacgatcctgacgaggttctacggcaagccggtcgtcccgttcggcctgctcccgccacggccggacggcgcccgcggcgtcagcaagaacggcaagcacgacgcaatcatgcagtggctcgacgctcagccggccaagtcggtcgtctacgtcgcgctgggaagcgaggcgccgatgagcgcggacctgctgcgcgagctggctcacgggctggacctcgccgggacgcgcttcctctgggccatgaggaagcccgccggcgtcgacgcggacagcgtcctaccagcggggttcctgggccgcaccggcgagcgcgggctggtcacgacgcggtgggctcctcaggtgagcatactggcgcacgccgccgtgtgcgcgttcctgacgcactgcgggtggggctccgtcgtcgaggggctccagttcgggcacccgctgatcatgctgccgatcttaggcgaccaaggcccgaacgcgcggattctcgaggggaggaagctcggagtggcggtgccgaggaacgacgaggacgggtcgttcgaccgaggcggcgtcgccggagccgtccgcgccgtcgtggtggaggaagaggggaagacgttcttcgccaatgcccggaagctgcaggagatcgtggcggacagggagcgcgaagagaggtgcatcgatgaatttgtccagcatttgacgtcttggaatgagctgaagaacaattcagacggccaatatccgtagtagggtatatactgtactcggtgaaagctagccaacttggctacacatgttttgaggttttggttatgtgcttgtttggttcagatcgaaaaatactcctactatccag

SEQ ID NO: 7142 - DNA, 1527 bp, Oryza sativa
  ref <308>: DATABASE ACCESSION NUMBER: AK064271
  ref <309>: DATABASE ENTRY DATE: 2001-12-06
aatgcttaaaccccaaacacctcgcgctcgccgcgccgcgcatcccaattcccacatggcgtcctcctcctcctcctcctccctctgccgactactcatccccaggccgaccacccgccgcttctccggaggaggaggggaggggggaatggcggcggcggcgccggtgaagcgggaggtgaagcccgaggcgggggaggggtggggcgggggtgatctgggggtggtgccgccgccgccgcggccgatggaggggctcggggaggcggggccggcgccgttcgtggcgaagacgtacgagatggtggcggacgcggccaccgacgcggtggtgtcgtgggggcccggcggctcgggggcctccttcgtggtgtgggacccgcacgcgctcgccgccggcgtgctcccgcgcttcttcaagcacgccaacttctcctccttcgttcgccagctcaacacctacgggttccgaaaggtcactccagatcggtgggagtttgcaaatgaagccttcttagctggtcagaagcatttgctgaaaaacatcaagaggaggcgtgtttccaagcctctcgtggattcacaactaagaaataaagcaagtgttgtttttggacagcctgaggctcctggtgaggttgtgagcttgaagagagaccgtgcagccctcagagctgaggtcatcatgcttaagcagcagtacaacgcctgtaaatctcagctcattgccatggaggagatggtccgcaacatcgagagaaggcaacagcggaccatcggcttctttgccaaggtactcaccaacccggctttcgtgcagcaggttctactcaactatgtgaataagaatggcctaagaggcgccgcgaaaagacaacggctgatggaaaacgaagaacagcatgctgattcgccattgaacaaaggtatggaagctgcatctgtgatggaagctgatgtttctccagggagcactggctgtggcacagttgggaaagtggagaccactccaatgtgcaatttccagaatattgagaatatgtgtgatgatgtctgggaagagctggacgccttacctgaaactggaatggagcaggaagaaaaggctgggattggctccttcgatgtcgaggagttcgtcggaaggccttgtggttgggttgatgactgcccataccttgtggagccgatgcagttcgtggaacactagaggcatgagaagaatacaatctgtccttagaatagtggaacgtgtttataacgtctgaatatctgtatatcaattacccacttcgatagaagtctgtactatgaatagcataagctcctggaacagagcttaaatataggaaacgaacactctcaggtaatgcaagccaggagtttgtaggattgaagatttgttactgtaaattctgctgggcgcagcaaaaaaatcgtgatgttagatatacaatactgtctctgcaatgtagccgaggaaaaatacgaatgccagtcttatcaatgtgaatactttatactgtt

SEQ ID NO: 7143 - DNA, 1695 bp, Oryza sativa
  ref <308>: DATABASE ACCESSION NUMBER: AK064272
  ref <309>: DATABASE ENTRY DATE: 2001-12-06
ggtgttctaattgtcgtttggacttcatgctatttaaaacatgtcaaatcagttagacaattaccattctttgtatctgcattgccattttatccattggtgcacttgttagcaaatgttttgatgaggacatcaacaccatcgatacatccacgtctccccatgtacagcatgatggtcctattacccgcgctcgtgcacgtcaactaaattatcaggtgagttctttcttgagttcatattcctcgtctttataccccggagacgcgtgcactcgtgttttactcaggaacgatggagaggatccaatgggaagaggattcgcgcggggtggattcggactgcagggcagcgccaacttctgacggccgccacgacttcatgcgaactccgatttgggcgtgcaagtacttcatggaaagcttatcaagtctactttcaaatggatccagtcacatgtccatatctgttctggagcggccgcaattgtcattttactcccgactattttctgtccatggtgttgcgtcacctcttttggcccaatggactgtgtatccaagttgggcccattaggggcgcgtcctagggttggagcacaaccctatggtcgttcttcccctcttcttatacctctagtcgccgccaagaacatgcgggttcttcccctcttcttcccctcttcttgctaccggctcgcagcgcgcgtgttggctaaaccgcccgtctgcctgtaatcggaaccccaccatatcgtgtttgatagtgaaactttcatctttatctagcaatttcagtgcttgtcctacatgttcttgcttgttcttcgattgcttgcaggacgagtgccctcgtggccgggttgacgcgcaccacaagttcgcggcgaccattggagacggtgtatcggttgctaaggcgcagcgtctttggacagttgtagtcgggccgtgaacgtcgtcttcatctaatcgagttatcccttacctctcatcaaaagatcgggccacaaaccctagcgggttcgcatcaggtggtatcagagcgtggttcatcggtgagagaatttacccttcccttcgtcattaatttttttttcctatagtccagaaaagaccaacaaaaaaaaatagtagattagttttcccgtgatcctatagaccattgtgcttttttactagtactgcttagttaaggcttgttgagttttcgattgcatcggttgtgttaatttgctggtcttagtgttaggcgattagagtttcgagttcttgccaccaccgtcaccaccgtcgcagtcacccaccaaatcactttctatttgtgtttgatctgttgccgatagcttttgtgagttgccttgtatcctgccgccactagaaaggaaatagaaccctgattcgagtgaccttccttaaaacagtcatatctttttcatacggactcgaaattaggcttataatatatccacggacatctacaaaaaaagttacatccgattctcccctgctttgccgggttcggcaaatttaaaatcgccaaattcctcttgcaaaattctgtttttgtagcgagaagcttcgggacctattcgcatagaactttgaaaaaattctacaagcttcatactttgtccgtttgagataagattttctgtgttggttctagtgtgcttctggttgtgaaaaaaataac

SEQ ID NO: 7144 - DNA, 699 bp, Oryza sativa
  ref <308>: DATABASE ACCESSION NUMBER: AK064273
  ref <309>: DATABASE ENTRY DATE: 2001-12-06
ggaagcaaaaaccgcaaaaaatccaatccaccacaaggacacgcacgcaccgcacggaaacacaacagcacagccacatcatcatccatggcggagggaggagaagaggagggttaacgagacgggggaatcacgaggggtcggggtcgggtttgatccgtaccggttcgccgctgcttgccgtcgtcgtcgacgtcctcgccgccggcgccgccgtgcgggtgggtggcgtagtagccgccgccgccgccgccgtctccgttccgcaccgccatctccacgtccttcgccatctcgccgctcgcgagtcgcaagtcgcaacccttccctctctctcgctcgctaggccgggtggggattgtgtggggagaggatgcgatgcggggggaacgagtgaatggtggcagtatatatacactacaagtgaatggtactcgacgcgtatggcggcagggtccctcgttcaccttttattttttctgttttggtttcggttttttgtttttgggcaatttatcgaagcgatttgaatggacgcggcttccgttttaacctgttgattgcaaatgcatggaggtcaaatatgggctctgaaatcggaaatcaatggtggttggagagattcagttttttttgtttttcattgcaggattcctgtggaatgtggaaccgaagtattaatgaagtggaatctctggc

SEQ ID NO: 7145 - DNA, 1406 bp, Oryza sativa
  ref <308>: DATABASE ACCESSION NUMBER: AK064274
  ref <309>: DATABASE ENTRY DATE: 2001-12-06
ttctccccgccgccgccttcccggccggccgcgcggtttccggcggctggctccggcggcggcaaggcggctagaggccggcgaggtggcggcgcgggcggctagggttttctccccctagtcgcccgcgtgagggcgacgcgagggtcacgcaacggagggggaaaaaaggacagtaaacagcgcaaaactctgtatatcttcaggagctacaaactgaaaattgttggtgcaaggccacaggtggcactccacagcttgaatcttggcaagacatcactacagagctcaggaacgccctctcaacatcctccgatgcatttctcctcagcaagcacatgacatactccatcacggccgcatcacagggcagtgtgatcctcccatcaccggcgaacccgaattcctcttgtgacatcctcaggagctcgccgaagaccgttgttccgaggtacggcaatggcaccttgaaccgcctcccgtctgccgtgtacatggtgcaacggcccttgtctgcaaccggagaagtcgtgcagcaggcgtcgtcttccctggcggccgtcgtcttgaccctctgcagcctcctcgccagctgagcaagcctcttggaatgtatcatggctggttctggttgttctttggttctcagaatctaaggggacaaggccattggcttgatgcgtgcaatggtgtccccaacgggaggcagcgagattcagattagaattttgctggggccatcacttggtgcactggggaagcaatggtagtggattagtagctgttctatcagatacatgctacagtctctgctgctgaactgggcagaggttttatgcaaccatccaaggtccagcctttatggatgtgctaaattcactaactattcagctcaccttcctgtatcaagatatttggagataagcaagctgacatctgaagacgaaggttcgtcgaatcttcctgagcagatcgattcagggttcgttttcctgccttttgctgtgtagtcactgcacttgaaattgcaatcgcatatgggccgtggtttggagtgcctttattcttgcacgcaacacagcttgctcgacagacagtttccatatctcagtttgtagcagtttgtttgtatcttgatttgtgtagcatcgcacgtgtgacatctattgtcgttggttgggtatattccgtacgttttccaattggtctacatccagttggtggtattcgtcaagccgtcggttttagcatgaaagttcagtctagtcaggttgttgtccctagttttattgaagtgacctgtgtgcaacttttttcaaggctgtattttgctattgcctgacaatttgcttggtcatccaggacagggtatcacaataccagatgcaagatgcactcatgtatcc

SEQ ID NO: 7146 - DNA, 2172 bp, Oryza sativa
  ref <308>: DATABASE ACCESSION NUMBER: AK064275
  ref <309>: DATABASE ENTRY DATE: 2001-12-06
acagtgctccttcttctacctctggacagagccgagctctccagcccgtgcacagttgccgccgcctcctccttccaaatctggcctccccgttgctcctctttccaaattagttgcgggaatggaatcctatcaatctcctcttccttttccccaagaaatccccaaaagtttctataggaaatcctttccaatttcgcggatcaatatttccttttgccggcaaggatcctaaactttcccggagtttcttccgtcgatttgggcccggacccgagctcccgtgcctatataaagcatcccctcgtcgtcctctacctaacccctcaagtcccgtcttccgccgtcgccggaatcgctctccccgggctctccttctctctccaagcgccggcgccgctccagccgcatctcgccgtcgcctcggccgtcgccggtagcgccgccacctccctcggctccgaaaagtcgatctctaccccggccgcttgttattttgcgccaaatcccaccggaggtagcccgtcgtcgtgaaccggagcgccgccgtcgtcgctgtgcctccagccgcgccgttcgtcgtcgtccgtcgtcgccttcggtcgccgtcgtcttcattggattcgcagctgcaagcagaagaccgtccaccacctcttcttcgccaaatattaccggaacgccgtcgccgtctttgaccagtacctcgccgcctttccaagctcactgccggccgtctgctgtctcatccatcgtcgcgccacccctcgcgtcgtcatcgtctctgtgtggtgtcgtcggaccatcgctggcttcttctccggtcgccgccgtttcctgcttgtcgtttccgttgtttcgaaggttcgtgagtgcgttgtaagtatccaagaagattaattgaagaccctttattgcaagttgaagaaaagttgcaaaggagaagacgtttgggttataccccagttgagctgcctgtgggagtggagctggatcttcgctagacctttgtgtacctcggttgattcctggacgaggattttaatacacaaattagttcggaaattactagtgaatttctgggcgtgacatgtgtaccagctttgcaaccgggtgataaggcagttcgggaggcggcaaacaatcccgcaaagattctctacaagcatcgatctccataaggtggacagaaggaaaaacaagaagaccaccgattggactgcttatcatcagacacacatcgatcgatgggaccagttcaaagccaaccgcatgccggataacgcaatgcacaataggcaagagttcaacgcatacttagcctggctcgcgaggaactaccgcctcgccctacgtccggcttggacgctagccgatatagcggacaacctgactgaggtggaggagtagaacgagtacgatacaagtactcgtagaggtagcacggtcgagacgggtccggttcgagatagagtggcacaagagctagtcagggcagtgaatgatttgggcgtggcacttggcacgccccctagctcgcaacaagagagcagtgttcttcagaatgccttacagactctacgacagcgttgcaagaagttggcggcacggctgggatgcagggccgacgatgccgtcgaaccacctcgacgggccgagcaggggacaagtcgaggagtggctcaagagggtgaacaagagggagaggaggaggaagagggagaggaggaggaggaggaggaagaaggagaggaggaggaggagggagaggaggaggaagaggaggagcaagtggagctcggtccctcctagctacaggatgctccacagtcatcataggggccatctcgaccacagcgcaagagagctcctatttccgactggaggtacactcccaatcagcctcgtgctccaaggggtaggaagaagtaagttttttttggtggtttagttcggtaacttgtgtactttatgaaactcacaactatactatgacttgcaatcctatattttgatgaacccacaactatggttgtgtttaggcttaagtctgtggatggatgtggttgtgatggagctggatgtgtatggattttggatggatgaatggttatgtttatggatagatggaagtatatgtctgtgaatggatggatgtatttgtgttgatgg

SEQ ID NO: 7147 - DNA, 1760 bp, Oryza sativa
  ref <308>: DATABASE ACCESSION NUMBER: AK064276
  ref <309>: DATABASE ENTRY DATE: 2001-12-06
aaaaaaactctcctctcatttcagaggaataaatcctcgttgatcgattgcttgccttctatgcgatcttgttcgttgcttgcggctttaattcatccatcaatcgattgatctctgaactttctgagaagcagagaggaggtagcttgacagcagctgcttctcgcatgtacaagaagaagaagctgaggttcttagccaccgtcgtcatcgctgctgcatcacatgggcggcgtgatcggagcgttattccgcggtggtggtcaccgtcgtgagatgcacagagcgccgatgaaccagccgggatacggcggcggcggcgagaaccaccggagggcgatgctgaccaagaagtactcgtacatacctgacaactaccagtctctcgatcaggtgacagcggctctgcgagatcaagggctcgagtcgtcgaacctgatacttggcatagacttcaccaagagcaacgaatggacagggaagcgttcgttcagtgggcagagcctgcacaagataggcagcacaccaaatccatatgagcaagccatcagcatcatcggcaagacattggcacctttcgacgatgataatctcatcccatgctttggcttcggcgacgcaaccacacatgactacaatgtgttcagcttccatcctgacaactcaccctgccatggattcgaggaggtcctatcatgctataaggagattgtgccacacctcaggctatctgggcctacctctttcgcgccgatcgtcgaggcggccgtcgacattgttgacaggagtggaggacagtatcatgttcttgtcatcgttgctgatggacaggtgactaggagtgttgatacaagcgataatgatctgagcccccaggagaggaggacagtggactccgttgtcatggcaagctcctaccctctatccattgttcttgttggagttggagatggcccatgggaagacatgcagaagttcgacgacaagatcccggctcgccagttcgacaactttcagtttgtgaacttcacgtcgatcatgtcggggagcacgacgcagcagcagaaagagtcggcgttcgccttggcggctctcatggaggtgcccatccaatacaaggccaccatggagctcggcatcctaggccggtcgacggggaaggctaagaggatcatgcctgctccgccgccgctgccgtcggcggcggggaggcagccatcgctgaggagggaagacagcgccgccgccaccgctgccgccgccccaccgtcaccaagagaggatcaagtgtgcccaatctgcctgaccaatgccaaggacttggcatttgggtgtggcacatgtgctgcagggaatgtggggagagcctgaccaaatgcccaatttgtcgacagacgattcggtccaagctgaggctgtactcaggatgatcaaatgcttatggactgatggaatggagcttaaatctgttcttaatgtacagaatgcatgaacatatcgtttgtgagaaatactcaaatcaaatgcatgcattggatttgtgctgcgagataggggaccaaacgaatgattagatttgtttttggttttgttcatgttgatttgtaacaaaagaatcaagaatgtggtgtggggtaaagctagctccatgtgcataagttttcttctgtcttagctccttgtatagttactgcgaaatagaacgaatgacatacaatgatacaacggggaaataaataaataaataacttgaggagagg

SEQ ID NO: 7148 - DNA, 1596 bp, Oryza sativa
  ref <308>: DATABASE ACCESSION NUMBER: AK064277
  ref <309>: DATABASE ENTRY DATE: 2001-12-06
atcttgtcaaatagtatttgggcgtgttgatgatgagcgtgcaaatggcggcgtcgctacgtgtgatcgttgtgttggtgtgtgtgacggcgggcgccgccctcgccgacgcggcggccggcggcgtccgcgtcgggctgacgcgcatccactccgagcccggggtcaccgcgtcccagttcgtgcgcgacgccctgcgccgcgacatgcaccggcgcgcgcggttcgggcgggagctcgcgtcgtcgtcgtcgtcgtcttctccggcgggcacggtgtccgcgccgacgaggaaggacctgcccaacggcggggagtacatcatgacgctggccatcggcacgccgccgcagtcgtacccggccatcgccgacaccggcagcgaccccgtctggacgcagtgcgcgccgtgcggggagcggtgcttcaagcagccgagcccgctgtacaacccgtcgagctcgccgacgttccgcgtgctcccgtgcagcagcgcgctgaacctgtgcgccgccgaggcgaggctggccggcgcgaccccgccgccggggtgcgcgtgcaggtacaaccagacgtacggcaccgggtggacgtccggcctgcagggctcggagacgttcacgttcggctcgtcgccggccgaccaggtgcgcgtccccggcattgccttcgggtgcagcaacgccagcagcgacgactggaacggctcggcggggctcgtcggcctgggcaggggcggcctgtcgctcgtctcccagctcgccgccggcatgttctcctactgcctgacgccgttccaggacaccaagagcaagagcacgctcctcctcggtccggcggcggcggcggcggcgctcaacggcaccggcgtccggtcgacgccgttcgtcccgagcccgtccaagccaccgatgagcacgtactactacctcaacctcaccggcatatccgtcggcccggcggcgctgcccatccctcccggcgcgttcacgctccgggcagacggcaccggcgggctcatcatcgactccggcacgacgatcacgtcgctggtcgacgcggcgtacaagagagtccgcgccgcggtgcgctccctggtgaagctgccggtgacggacgggtcgaacgccacgggtctcgacctgtgcttcgcgctgccgtcgtcgtcggcgccgccggcgacgctgccgagcatgacgctccactttggcggcggcgcggacatggtgctcccggtggagaactacatgatcctcgacggcggcatgtggtgcctggcgatgcggagccagaccgacggcgagctcagcacactcgggaactaccagcagcaaaacctgcacatactctacgacgtccagaaggagacgctgtcgtttgctccggccaagtgcagcacgctctgatcagacgagagctgtacagatcgattcatgtgacacgtgtacatttttctggttattagtagtatatgtttctggttatttttgtatagtttctacctcgtttcttgagggtcttgatcggtagaaatttctgtaaaaagcttcttaaaaaaatgttgtatgagactaaaacaggaaagattcagcttag

SEQ ID NO: 7149 - DNA, 2572 bp, Oryza sativa
  ref <308>: DATABASE ACCESSION NUMBER: AK064278
  ref <309>: DATABASE ENTRY DATE: 2001-12-06
gaggatgaggccgcgccgttgctgtcgctctgcctatataaaccggcatgatcgcgagaggagcacacaaggcgtaagcgctgcgcacctaggcagcaatatgccctagcgacgcatacacatgtacccacataggagtatttacatagagagagagacgaagtgagatcgaaagagataaaaaatgaagataatgcataattagatgatgcgtatcccgcagatgggcgatctgtacctgtagcagcaggcgctgatggcatctctatcggtgagtcctaaacaacaagctgatcttgttctccgtcaagctgtttatcctatataacacaacaacgccgtagtgctgtgcagatatatgcatagcccgtcattatctcctagagggagcaaatatacaccgtagcattgtgcagttttgcagcccggacggtaaaacaataaagtgaagcacagacgaatatgttgtggatgtattgtgaacttagccatagatataagtatccctagtggcacatacacacgcacacgtcatctttgtcaagcgattaatatgggctgcaaacaaatatgaggtgaacctaatccttctgggggttgggccgtctaaattatcaaaatatcaaatattggatgtagatatttatttgtatatacttgggatgagtttgagtcttattggcatcggaccaaccatgatttatacatatctaaagtcttcaaacctgcccgagaatgtagcgcccacggtgttttgccctggtgtggcccttgccgggtcgcgacacgtcagcgtgcgctggagggcgggtggatttcgcggcttctcgtgtgtctgcgttggccctcgtatttttgcacaaaagcccttctttttattgataatttgttttaggtacatgctctttagtttgtacggtgttctgtgttcttatgtacagggcctctacaaactgtaatattgtatgaaaagaagagaaaatttggaaaagaggagcgcgctctgaataacataaagtgagttcatattcattctggaagagttacatatttgcctcgtgcatgcctcgtgcatgtcatgtacgggagtaattccttctctctccaaattctaccagatggatggtcttaatctatctcaatgattaaagtcagattgatgagagccgaaacacggctatgatcaaactgcatttatataatcaatggtattaggctggtccggccctcattggcgattggatcatctgagtgccatttgatattttctatgattaaaactagacgcctggtcttcattggagatcggatcgtctatcggttactatgataccaataacaatggtactagatatgtccagcccccattggtgatcggactgtctaggcgttgttttcataattaaaatatattttgcccccatgcatatgcacaggagctgttcttgactcatgcatacgccaactacggaggcgttgcgtccgagaccgacgaggttgggcgacgtattggcttaagctaacaaggctacagccattcatttgtttcattgtgtatgaccgacgaggcttgacgaaaccatggccgagtgctgacaaggccaggtcattattatattaacacgtctaaaatggatggaaaccggatacgccgttgctggacactaacgaggcaaaagcaaccataaaatccatgtttgatgaaagccaagatacatgagtgggcgctgacgaggcaaaggtcacccgctccaccagattccctccacacaccgacgtgacagtagtgtactgtgactgggttttggcgaaacaaagccatccattctacattcactatattcaccgttaaatctgcaccaacctcaatcttcggcgagcaaataaatttgaagacgacgatcacaaagcgcagcttaatcggaggtgttccataggctcatcctttggatgtaattaatcggtagttttctattaagcattcctcgcgaaggcaaaaggctaactcctgcgggagccctcatgtttttgtaaacattcatgttaatgaatcatgattaataaaatacaaggtttccctattttctgtgtgttcattgttttgttttcgtcaaacacagaataccaaattaacttaaattgatttgcatgggttgatttgatttgtgaatcagcttggttcttgccgatgggggtgcacaggttggagaggcaagtggtgccacatttcttctccagaggaagtttaataatatagccaactattgcttcaaaaattaaaacacatctctatctctactactacttaaaaagttagaggtgctttcgtcgtccgtaaaaataaaataaagggcgaaaaaattgaatctttatatacgatgcggtaaaaaaaacagtcatcagtgtccatgaaaaaaaagatccgattagtccgtccgttaaaataaaaagatgagatgcgtccgtgaaaagaaaagatccgattagtcagtccgttaaaataaaaggaaagggcgacaaaaagatccgattctatgcgtgcgggaaaaaaaaacggtccgtaacatctgtc

SEQ ID NO: 7150 - DNA, 2281 bp, Oryza sativa
  ref <308>: DATABASE ACCESSION NUMBER: AK064279
  ref <309>: DATABASE ENTRY DATE: 2001-12-06
aataagcacggcggcggcgcccactccgccggcgtctcccccctcgccgacgaaaaaaaaataatgccccgccgcctcgcgaccacctactccggccgcatcgccgccgcgcggccatccccggcgggcccctccctcaccgtcaccgtcgccccgacccctcccccgacgccgctcgacccgcgcggctacccgctcccgcgccgccacctcgtctgcgccgccgcgcgcatcctccgctcccacgcctccccgtccccgctcctagacctcgccgactacctccgcgggctccgcctcaccctcaccgccgccgaggcctccgaggtcgtcaaggcgctctatggggacccgcccctcgcgctcgccttcttccgcttcgccgccgcctcgctcccgggcttccgccacgacgccttctcctacaaccgcatcctggcactcctcttccgcaccagggccggcccgtccgaggcgctgcgcctcgtcgccgacatggagcgggacggcgtcgccggcaacatctccacgatcaacctgctggttgggatgggcggcggcggcgtggagatggagaggtgccttgagctggccagcaagtgggggctcaggctcagtgggtacacctacaagtgcatcgtgcaggcgcatctgaggagcagggaggtgtccaaggggttccaggtgtatgaggaaatgcggaggaagggctacaagcaggatatctttgcgtataacatgcttctcgacgcgcttgccaaggctggaatggttgaccaagctttccaagtctttgaagatatgaaacaaaaacactgtgtaccggatgcatacacatatactatacttatcagaatgtctggaaaggctgggaggacctcaaaatttctctcattttttgatgaaatggtatcaaaaggatgtgttcttaacctgattgcgtttaatactattattgaggctcttggcaagaacaaaatggtggacaaggtaatttttgtactctccaaaatggtcgagaatgactgccaacccaatcaattcacatacagcattacactggatatcttggcaacagaagggcagctgcacagactgaatgaggttctagatatctgtagtagatttatgaacagatcaatatattcgtatttggtgaagtcactctgcaaatctggtcatgcaagtgaggcacataatgtattctgtcgcatgtggaactcccatgagaaaggggacagggatgcttttgtatcaatgcttgaggtgttatgtaatgcagagaaaacattagaggcgatcgacctgctacatatgatgcctgaaaaagggattgttacagatgttggcatgtacaatatggtcttttcagctcttggaaagctcaagcaggtctctttcattagcaatctctttgacaagatgaaaacaaatggaattattcctgatgtttttacctacaatattatgatttcaagttatggtagagttggcttagttgataaagcgtctgaactttttgaagtgatggaggctagcagttgtaagcctgatgttgtcacatacaattctttgataaactgtctaggaaaacatggtgatcttgatgaagcccatatgcttttcaaagagatgcaagagaaaggatatgatcctgatgtgtttacttatagcatattaatcgagtgctttggaaaatccaataaggttgagatggcatgcagcttattcgatgagatgatatcagagggatgcacccctaatattgtaacttacaacattttacttgattgtctggagagacgtggaaagacagaagaagctcataaactttatgaaactatgaagcaacaagggttaatccccgactcaataacttactcaatacttgagcgactggaaagtagatctcaacgaacagtaagaatacgtaagccaactcggatttcaggttgggttgtcagcccattgagatgaggatggcttggtaaatttccagggagctccctagttcttcaggtccataccttctgtgatgtgtatctggggactgtgcataatttccagattggcatcaaaccatcaactgaaaattttggttcactttctcctccagaatgatagctaaggatcactggatcaggcatactgcgcagctacctacaccctgattctaagcatttaatgtgccatcgactttcaaaatgttaaagtgtcctcatttcaagttcaaagggcatgcagattcatgtagttacaatgctttggaaatggcagatgt

SEQ ID NO: 7151 - DNA, 1846 bp, Oryza sativa
  ref <308>: DATABASE ACCESSION NUMBER: AK064280
  ref <309>: DATABASE ENTRY DATE: 2001-12-06
gaagcagctttcccggcggggatcggccatggcgagcggcctgtggggcgcgctcgggcaggcgtcgagcgtggcgcagctggtcggcgtggacgcgtgccggcggctggggcagcacgtggacctcgtcggcggcctgctgcgggagctagagctcgccgagctgatgcggcgggaggccaccaggcggcccctcgagcggctccaaggcgcgctgcggcggtgctacgcactcgtcagggcgtgccaggatgactgcggctacctccaccgcctgctcctcggcgctcggatggccgacgagctccgcgccgcgcagcacgagattgacatgtacatacgcctcatccctctcatctctctagtcgacagcagcaacaataatcgtcgtgtcacggcaaccgagggggtgcccagtgtagtcccaagttattcagatcatcacacaaggtttccaagaagaatattggcgttcactgaaatacatgttcaaggagccaccaaacctagggaaatcagggggaaatcattagaagtaacagtggacctgcaagaacagaaaataatggacatggaggcaataatgagactttgtatccaaactgaagagaactatccaggatttaggaagtttggtttctttcagcttgtggatgctacagatggtttttcagagaacagaaatgtcggaattggtggattcggtactgtttacaagggccagctacttgatggacatacagttgctatcaaaagatttgttgtggatgcagcaatatttgatttcaaaagtgaattgcagcttgtaaggcttcagcataccaacctaattaggttattgggatggtgcattcatgaaaaagaaaagattcttgtgtatgagttcatgcagaaaggcagtttagacaatattatcttccacaaaaggaagggcgcattgctaaattggtctaagcgacttcagataattaaagggctagctgaggggcttctttacctgcacaagcactgtttgattgtacatagggatttgaaaccaaataatatcctcttagaccatgacatgaacccaaagattgctgattttggatctgcagtaacactggtttcagatgtagcagaagagtgtacaaggagagtcgtgggaaccagtggttacatagctccggagtatgcatcggaaggccgttattcgcttaagacagacgtgtttagctttggcgtcgtggttctagaaatcattagtggacgaaagaatttcataatggagaaacaaggggataccgttggcaatctcattcgagacgcatggcatatgtggagagatggaaggttgcatgagcttgtagacccagcattgtgtgatgaatatgaaagccctgtgataatgcgatgcactcaggtggcgcttctttgtgctcaagaagatccaacagaacggcccacaatgacagatgttactagagttctgaactctcaaagcatactattatcagatccaaagaagccaactgagctaactgatggaggtgctagtactgacaggccatcgacatatattggccagtcgagcaagacgatagacataaccatcacaagttcagctccggtgtccaccagagttcgcatcattgttgacccagaaatttgatttgaggtggaaaaacacctgctgtagatagagatcgtggtacaaaagagttgttttgttgagtcgtccatattggcgtgccttggtgatgcaatactgcaagtaatgtagattgtgctcctgagagtgatcagagctatccactatgtatggtgtgtgacgctgccattcaacacaaagctgattattttactc

SEQ ID NO: 7152 - DNA, 1161 bp, Oryza sativa
  ref <308>: DATABASE ACCESSION NUMBER: AK064281
  ref <309>: DATABASE ENTRY DATE: 2001-12-06
aaaatcgttcacaacaataagaaagatcaaagaatatcaaccaaattcaaatccaattctaattccattaatttccaaatggcgtcgtcgtcacaacggcgccgtgcattgccgctctcatttgttgttatagtgctcctcatcctcgccggccccgggccggtcgccggcgacaagaccggcgagctcaccgtcttctggggccggaacaaggacgagggctctctccgggaggcctgcgacaccggcatctacaacaccgtcatcatctccttcctcaccgtcttcggccacggccgctactgggccgacctctccggccaccccgtcgccggcgtcggcgccgacatcaagcactgccagcacgccaagaacgtcaccgtgctcctctccatcggcggcgacggcgaccagtactccctcccgacgcccaggtcggccaaggacgtcgccgaccacctctggcacgcctacctcggcggcggccgccatggcgtgttccgccccttcggcgacgccgtggtcgacggcatcgacctctacatcgaccacggcgggtcggccaactacgacgagctggccaagcgcctcggcgaacacggcggcgtgctgctgacggcgacggtgcggtgcatggacgggcaggagacgagcggcgaggcggcggtggcgacgggtctgatcgggcggatccacgtgcggttctacgacgacaggaggtgctcgtacgactcgtcggagcggcggccgttctacggggcgtggctggggtggacggcgaggtacgcgaacgcgagcgtccacgtcgggctgccggcggcgtgggacgcggcgagcgacgggtggatcaacccggcggcgctggtgttcgacgcgctgcctctggtgcgggggacgcccaactacggcggcgtcgtgctctggaaccgacacttcgacaggaggagccgctacggtcagaccatcaaaggcatgctctgactctgatcgatccgtttcatttcggatcagctgcactgcttttgttatgtggtttcatacaccaagttaaatttgcgtttccagatgtttaatccttgcaaaaactttggcgtacaccaacatgttagtatgtcacacatatcacgtgaagaaataaaatctatgagtgataatttatac

SEQ ID NO: 7153 - DNA, 1756 bp, Oryza sativa
  ref <308>: DATABASE ACCESSION NUMBER: AK064282
  ref <309>: DATABASE ENTRY DATE: 2001-12-06
acacggtacttctcaattggttatcatactggttgttaaaacttatctcgactagctagtttgtttgtttacgatacggttttcgttgccgactcggacagagactcatgtgtcccttttgtatatccatgtgagatttctgcaccattgctgcattctgttcgatctcgatcttccaagaaggaacttggagcgatggccaccggcgggaactcgctgccgtcgccgtcgtgcgccgatgacaagaagcggcgggtgtgctactactacgaccccggcatcgcccacatcaaattcagcgacgaccatgtcatggtgcccgcccgcgtcgccatggcgcacagcctcgtcggcgtctacggcatgctcggcgacatgcgccgcctccgcacgagacccgccacggaggcggagatccgccgcttccactcgccggagtacgtcgacctcctccgcgacctcaccccggagagctacttcaacgacgccgcgcttcggcagaaggcggaggatgaccacggcatcggcggcgacgacgattgccccgccttcgaccgcctctggaagtactgccgcggctacgccggcgggtcgttcgccgcggcgcgcgcgcttgtcgacggcgcctccgacatcgccatcaactggtccggcggcatgcaccacgcgtccgcctgcaaggccaccggcttctgctacgtcaacgacatcgtgctcgccatcaacgagctcctcggcaccttcaggcgagtcatctacgtcggcatcgacgcgcaccacggcgacggcgtgcagaacgccttcttggactccaaccgggtcatgacgctgtcgttccaccggtacggcaaaatcacgccccacaaggacttcttcccgggctccggcgccatcaacgaaatcggcgacggcgccggcgagcactacagcgtgaacgtgcccctggacgccggcgtccgcgacgacgtgtaccacacgctgttcaagccgatcgtgggcaaggccatggaggtgttccagccggaggccatcgtgctgcagtgcggcgccgactcgctctccggcgaccgcctcggcggcatggagctgtcggtgcggggccacgcggagtgcgtcagcttcctccgcgggttcaacctgccgctgctcctcgtcggcggcggcggctacaccatcaaccacgtcgcctccgcgtggtgctacgagacggcggtcgccgtcggcaaggagaggaagctccccgacgacatagagatacccagccacggctacgagctcatgtacaagaaccaggggaacaagctccattacaagacgtcgacagcgacggcggcgagaaagaggtcgagcagcacggaggtcaccaaggggaaggtgctcgagcacctgtcgcaggtcaagcgcgcgccgagcgtgcagttccaggagcgacgcggcggcgacaatgccgccggagttgggctctactacgagcgccctccgagcctggaagacgacgaacccgcgcagaggctgcaccgcctctgcttccctggcctgacgaagcgtatcaggctcaatgactgacgccggcgtccacgcagattaacccgaattcgccggagtgcagctgctctgctgctgtcggttggagttaagccagtcggatagacacgtggcagagatcctgttgggactgcagcctgttgactagtcaatttttttttgttagtgctttcctctcctctgaataaccgatgatacggagtatttgact

SEQ ID NO: 7154 - DNA, 1685 bp, Oryza sativa
  ref <308>: DATABASE ACCESSION NUMBER: AK064283
  ref <309>: DATABASE ENTRY DATE: 2001-12-06
aaaaacttgttcattcctcctcgcctcgcctcgcatctcggctcgccgcgccgtcagatccctcgcctccgatggcgcaccgccgcctctgaccaaccaccgcccccaccgccgcccacatgccgccgcccatgctcgcggatgcggcggcggcggcgccctgctcctcctcatcatgctcatccaactccagctcttcctcctcctcctccgcgatctggtcgcgccgccgcgacgagatcaccttcgaccgcctcgacaagttctggagtgccttgtcgcctcaagcacggcatgagctcctcaggatcgataagcagactctcattgagcatgcacgcaggaatttgtactgttcaaggtgcaatgggctgcttttagaaagtttcacacaaatggtcatgcatgggaagttactgcaacaaaaaggtccaggtgttgtacaagatgattcttggggaggcctttcgacaacaaaggatggcctcctgactcttcttgactgcttcataaatacaaattcccttcatgtactccagaatatatttgacaatgcacgggcgagggagcgtgaacgggaaatgctttatcctgatgcatgtggtggaggagaaagagggtggattagcccagtaatagctaattatggcagggggcatggaacacgagacacatgtgctttgcacactgcacgcctttcttgtgatgctctggtgggttactggtttgacctgtgtgaagaaactagatcatctcttctgcggatgagggaagaagatttcattgaaagacttatgcataggttcgacagcaaaagattttgcagagattgccgaaggaatgtcattcgtgaatttaaggaactgaaagaattaaagcgtctgcgacgggaacatcactgcactagctggttctgcattactgatacagctttccggtgtgaggtgtttgaggatgctgtcttagttgattgccgccaatctttcttggatcaagataagtcctataatcgttttgagtttgctgttggaacagaaaaagggaaatctgatatactaggatttgaagctgtggggatgaatgggcaagtgcacaggaagggccttgatcttgaccagtttgaagattattttgttactctgagagcgcattatgcggataacaagaacacagatttctatgtgaaggcccatgccttgaagggccaatcatgtgttcaccgcaggctgatcgtgggggatgggtttgtgacaattactaagggagaaagcattcaaagtttctttgagcatgctgaagaagctgaggaagaggatgaagatgatgctatggacagggatggaaatgatactgatgtcgatggtgttcatccacagaagcatgctaagagtcctgaacttgccagagagtttcttttggatgctgctgcagtgatattcaaagaacaggttgaaaaatctttgagggaagccacggcacaacaaaatgcacatagcgtatttgtgtcccttgcattaaaattgttggaagagcgggttcatgttgcctgcaaagaaataattacattggaaaaacagaccaagcttcttgaggaagaagagaaagaaaagcgtgaagaagaagagcgcagggagaggaggagaacaaaggagagagaaaagaagcttagaagaaaagaacgtttg

SEQ ID NO: 7155 - DNA, 1772 bp, Oryza sativa
  ref <308>: DATABASE ACCESSION NUMBER: AK064284
  ref <309>: DATABASE ENTRY DATE: 2001-12-06
atgagctgagctccctcctcatttccccctcgccaaatcttcataaaagtgcaagaatcaagccctgcatgtcacgccactagatccccacgattctaagctttccatccatccaaatagcttgcacatgcatagattgctgagggagatcgagaagaaaagagaagaagcttgctgcttggtgcagtggcagtaagactttgttttcctccacttgagattccggagagcgctgaagcagaaccagagcctgagtgtggctaccctcagcaggaaggcgagcacctaagcatctagcacccatgttttacttaaactccattggttgcgaatctatttatatatatatatatatatatattcatttgcttagttaatagttttgggtgacatggtagataattaattggtgcatttacttagttatatatagctgccatatacctattactctcctggttgggaatagttgggatgttttattcattatgcttagttttgcttagtggggatacaactatatggctggacagttttgttaattatgggatatggactacttggctaatgggataaaactggagcacttacattaaataatggttgatgaaatatgattgacttggatgggtggtagggcgatgatgggaggtatgtttcccctgatgcagtagctccgtctaggtcgttaaggaccgaacattttgacgtctattcaagcaccctacgtacttaccacacgccgtatcatgggaccggcttgtttgattactaaacctactgtgatcatttacgcccatcgaaaaaacgtgaggatttgggatccgcagagtgcccggttggccgagttacggcagggggtatctctcgcgtggtgagcccgccttagtcacatcacacgcacgtgactgagtcggtggggcccccggtgtggtttaaatggttgaggtggggcttggaaaggacatgtgatgagcttgaatcacttgtaggtcgcacctgtgtggtgggcggcatttgatccttgttcatctcgtgtgggtacagttatacacctctgatcagagtataatatattcgaatagccgtgtctacacttatggacaatgcttgatgtgtgcctcagttatgttagtatcaaacttgggttattctggtgggtttatgtttgatggtgatgttggcaggctgtgccatgatgatatagactttggtagttccatggtggatgttgtgaatgccgtttgggctcatttactcatacctttcagattaatttgcttgctatccagaattttatattgttgctaatcagtttattgtgttatcgctttcacttatatctgctcaataaaattggctctatgcaaatgttgaacttaggttgctctaggttaaggtaaacatgcatacttctctctccccttacatatatttttatgggtaagactcgcgagtacaatcttgtacttaacccggctccgctgcttttcaggtgaggactccgacgtagaattatgcttcctgtgtggtcactgttctgtcaggggcagcgaaggcagtgattgatcttctgctaccttcagctcggctcttgcccggttggtttacccttgtggggttgtggcaccaccggtttttgttttgtgcttctggtttttgtttgaatcttctgctgctacttgtgtgctgttagatgggaccttggaccctattatgtaccagatacttgttgtacttaacccctttttatgcacttgtgatgatgttcc

SEQ ID NO: 7156 - DNA, 2011 bp, Oryza sativa
  ref <308>: DATABASE ACCESSION NUMBER: AK064285
  ref <309>: DATABASE ENTRY DATE: 2001-12-06
atttgttgtggattggatgatggaaaaaccagcaagcagcaagcgtaggctgtgttgccgtagcgcgccctacggagttgtacaaagtcagcaaccgttttggggcgcaagcataggcaacacaggactgatgacggggtggggcgcgcagtgaactggttttctaaaaagattggaagatccggccaaagaaggtgatagccctgttcattcgttcccatggttcgatccttcccagtaaaacgcggcgtgttcgaatgatgatcgcttttatgcgagaaagggggaccaccctctaagcctaagtattcctcaatgaccgatagcgtacaagtaccgtgagggaaaggtgaaaagaaccccaatcggggagtgcaatagagaacctgagatccgatgcgaacaatcagtcgaaggagcggagcgcgggcgcactcactctaacggcgtacctttcgcatgatgggtcagcgaggaaatgggaacagcggcttaagccattaggtgtaggcgctttccagaggtggaagatttacgttcttcctatttgacccgaaaccgatcgatctagccatgagcaggttgaagagagctctaacaggccttggaggaccgaacccacgtatgtggcaaaatacggggatgacttgtggctaggggtgaaaggccaaccaagatcggatatagctggttttccgcgaaatctatttcagtagagcgtatgatgtcgatggcccgaggtagagcactcaatgggctagggtggcccccatttcgctttaccaaccccagggaaactccgaatacaggccgtcatccttagtacagacagactgattgggtgctaagatccaaagtcgagagggaaacagcccagatcgtacgctaaggtccctaagcaatcacttagtggaaaaggaagtgatcgagcgatgacaaccaggaggtgggcttggaagcagccatcctttgaagaaagcgtaatagctcactggtctagctccatggcaccgaaaatgtctcagggctcaagtgattcaccgaagcgacgagaccttgaaagctgctttttcaagtgtcagtagcgggacgttctgtcaatcggggaaggtttttggtgacaagacctggagatatcagaagtgagaatgctgacatgagtaacgagaaatcctgtgaaaaacacgatcgcctgccagtggaaggctttctgcgttcagtcaatctacgcagagtgaatcggtccctaaggaacccccgaaagggctgccgtccgatgggtacacgaaagtgacgaagttgctttgactactgaaccatgcctggatcgtcggagcgaattggatgatcgggccgagggctgccccctcttcccctcgctctcctttccttaatattcaccgtcgagtcatcaaagccgtcaactaattcagaggggctcggctggcccggtcgccctacgctactggcgcttccaaaggcgaagctctcgtctttggcgaccagcaaactctgggctaaaacctgtagttttgaagcaagggatgagcgcgaaagccgttgcgcttccgtacacgcgcatacgttttcttgctccgtcgcgcgttagtacaataacgcgcagccgttttcttgctggggcggacacggatttctctctaaaggcgaagactcagaagtgggcgaacactcggcccagcgggcgaacatgccggctccggctccgcgcacctgctgacacctttcgaagcactttcacgtgaaccgaagtcgtcttgccgaactccttcctttctcatttcagtcctcgcctttttcatcttccgtaggggcctttagtcttttgattagagtagaggtcgcgagagagcagagcgtaccgccctgccatagtcgcgaggatcttaatagtcggtcgcgactgttgtcatagtcaacgacggttgaaacttccaggaaaaaacttcgaattgggagggcgatcctcccggtgagctgaccgagtgagctg

SEQ ID NO: 7157 - DNA, 1362 bp, Oryza sativa
  ref <308>: DATABASE ACCESSION NUMBER: AK064286
  ref <309>: DATABASE ENTRY DATE: 2001-12-06
gggttccggagagggagcctgagaaacggctaccacatccaaggaaggcagcaggcgcgcaaattacccaatcctgacacggggaggtagtgacaatgcgccgcgttgaatccatggacctgccatcttcggccctgatagaaacaagcatgacacagaggtacatagatacttacctccatgtctcctggtcccctctgctgagttgcctgttcattgaaaacccttctattagtcttggaaagacaagagccggcaaacctttcggctttcgaagatacttgtcacttgataggtttgagtcagaattccaaagaacctacacaaatcacaagttttggaaggttccaaaccctgaccttcggcagagactgcgtcaagccatcgtccagaaagtcgtcacacactatagcatgtatctagaggagcgagcagcaaggggaatgcacaatcaaccgcccaagtccacgcccgagcagttgaaggagttgttggatgaattatttgaaggatgatgatgagttcaatgcaattgctatggaaaattcacctcaataacttaggcatttcagttgactctttctcaccattggttacgcgcttaaagaaaagacgtgttgtcggagtcgtccgtcaagcctgagtggaagagctagccctagaaggaattggaggagatggctgaccgcgatgaggaacagatattgtacgatacaatcgcggagggaagcagccagtactggaatgaagaagaggggaacaaggatccaaaccagtacttgaacgaggaagggaacgtggagagggatgcggaggggaaccagcaggggcacgtggaaagggatgtggaggggaaccaggaggaggaggctagtggtagtcaaccctccgttggacagaagagggcacgcgggcaacgaggtgcagcgaagaagcttgagggtcggcacatcataacggaagtggaagaagatggacgtcctagtgccccggccgaagccgccaagaactatgtacgtcacagcggttgggttgtgcgggataacgtgcctgtcagtacggtgtactggcgaagaacaagggcacgcggagatcatgagagctttgtcccagattcggagaaagagatgctgtggaccacaatgctcgagacattcacccttcctgcgggtacagaggacaaagtgaaaaggtggactctgaagaaaatggcagaacagtttcagagcttgaagggagatctgtaccagaagtatatactgaaggggcagacaccgaacttcgacacattcccaaagctaagggatcactgggacgagttcgttgcatataagacaggtgaacaagggcaggcgatgatgg

SEQ ID NO: 7158 - DNA, 1772 bp, Oryza sativa
  ref <308>: DATABASE ACCESSION NUMBER: AK064287
  ref <309>: DATABASE ENTRY DATE: 2001-12-06
acaagctccacattttcctcctctcttcttcttcttcctccgatcgacgattcgctctctcgctctcgctcgatttccgtttctttgattattgttgtcgagtgtaactgatccgccatggaggtggagttgccatggggcgcgcggtgcgcggcggcggcgttcttcgtgtcctcgctgtgcgtggcggcgctcggcgtcgtgctcctgctcctcaggcggtggccgtggtgcggctgccatgtctgccgcgcctacctggccgggtcgtggaggagggagttcgccaacctcggcgactggtacgccgacctgctccgccgctcgccgacgggcaccgtccacgtccacgtcctcggctgcaccgtcacggcgaacccggcgaacgtggagtacatgctcaagacgcgcttcgacaacttccccaaggggaggccgttcgccgcgctcctcggcgacctcctcggcgacggcatcttcaacgtcgacggcgacgcgtggcgccaccagcggaagatggccagcctcgagctggggagcgtcgccgtgagatcctacgcgtacaagatcgtcgcccaggaggtggaggcccgcctcatgccggtgctcgccaacgccgccgacagcggcgccgtggtcgacctgcaggacgtgttccgccgcttcgccttcgacaccatctgcaagatctccttcggcctcgacccgggctgcctcgaccgggagatgcccgtgtcggagctcgccgacgcgttcgacgccgcgtcgcggctgtccgccatgcgtggcgcggcggcgtcgccgttgctgtggaagatgaagcggtttctcaacgtcgggtcggagagggagctcaagaaggccatcaagctcatcgacgggctcgcggcggcgatgatccgggagcgccggaagcttggcgtcgcgaacagccacgacctcctgtcccggttcatggcctcctccggcgacgacgcgcgcggcgccgccgacgacaagttcctccgcgacatcgtcgtcagcttcctcctcgccggccgggacacggtgtcctccgcgctcaccactctgttcatgatcctgtccaagaaccccgacgtggcggccgccatgcgcgcggaggccggcgccgccgccggcgagagcgccgccgtcagctacgagcacctgaagcggctgaactacacccacgccgtgctgtacgagaacatgcggctgttcccgccggtgcagttcgactccaagttctgcgccgccgccgacgtgctccccgacggcacctacgtcgacggcggcgcgcgcgtcatgtaccacccctacgccatgggccgcatgccgcgcatctggggcgccgactgcgacgcgttccggccggagcggtggctcaccggcgccggcggcgcgttcgtgccggagagcctcttcaagtacccggtgttccaggccggcctccgcgtgtgcctcggcaaggagctcgccatcaccgagatgaaggcggtcagcgtcgccgtcgtgagggcattcgacgtcgaggtcgtcggcgagaatggccggtgcggcggcggcgccgccgccgcgccaagattcgtgccggggctcaccgcgtccatcagcggtgggctcccagtgaagatcagacgcgtttagacttgcacacagcatagtagacagacttctttttcattcactgtatcaacaaattggataagaaattaaataggcatgtacatagaacaaaaaagggagaaatcaatataccaaatttttcatct

SEQ ID NO: 7159 - DNA, 1403 bp, Oryza sativa
  ref <308>: DATABASE ACCESSION NUMBER: AK064288
  ref <309>: DATABASE ENTRY DATE: 2001-12-06
atgcaattttctccctcgcctggtatcgctgctgctctggttgtctctcgtcctgagtctccgactgagcgcctccaatctcaacagccacctcccacctgttccggctccggctagacctcgccgccggcgatccccagcctcagcgcatccaaccgacggaagaacacaaggcgccgcaccgcaccgcagcgatgacgctgatcaccctcatccgcgactacatcgatcgcatgctccacgacatccccgggatgaaggtcctcgtcctcgaccccgataccgtggggatggtaagcgtggtgtacagccagtcagatctcctccggaaggaggtgttcctcgtggagacggtcgacaacgcctccagctccagggagtccatggcgcacctcaaggccgtctacttcctccgcccctcctccgataacgtccagaagctccgccggcatctcgccgccccgcgtttcgccgagtaccacctcttcttctccaatgtattgaagattccacagattcaggtgctcgcagattccgatgagcaggaggttgtgcagcaagttcaggagttctatgctgatttttgtgccatcgacccttaccatttcacgctgaacatacgcaataaccacgtctacatgcttccaatggtggtggatcctcctggtatgcagagtttctgtgatcgggctgttgatggcattgcttctgtcttcctggctctcaagcgccgtcctgttattagataccaaaggacatctgatgttgcaaaaaggattgcacaagaaactgcgagattgatgtatgagcaggaaagtggcttgtttgattttagacgaactgagaactcttccttgttgctggtgattgacagaagggatgatcctgttaccccgttacttaaccaatggacatatcaggcaatggttcatgaacttattggaattgagaacaataaagttgatctaagggaatatcctaatgtccctaaagaccagaaggaggtggttctatcatcagttcaggatgaattttttagggctaacatgttcgagaattttggtgatcttggtatgaatatcaaaagaatggtagatgactttcaacatctttcgaagaccagccagaatattcagagcataagtaagaaacttttgcctttcttgtttcctacgaaagaaaggaaaaaacaattatgtcactggaaagtaggcagtgcagatttgcctttgctgtcactgacatgtagtcccaggactcatgtgagtcacacatacaatggagaataagtgaatccccctgaaagtaatgtttaagctagccacccttctttatattgttacatttggcaacctcatgcttccaatttttacttttcactagcattcgtaatacatacttac

SEQ ID NO: 7160 - DNA, 1817 bp, Oryza sativa
  ref <308>: DATABASE ACCESSION NUMBER: AK064289
  ref <309>: DATABASE ENTRY DATE: 2001-12-06
attcgccgccgccgccgccgtgttctttttcctcgccaccgccgccgtgttcctcttccaccgccggacttgttcctcttccgccgccggacttgtttcctctcccgcgccgccgccgttccgttttttctctctcgcgccgccgccagactttatcctctcccacgtcgccagcgttcccttgttgctctgcgccgccgccgggaacgacaacgacttggacgccgctgccgccgggaacgatgactcgaaacaggtgagctggtggggttcttcgggggagccaacatcctgatggagtacgtgctgtcgaacgcggcggtggcgaggagcttcacggactacctggcctcgacgtgcgggatcacggagccggacgcgtggaggatccaggtcgacggcatcgccaagggctacaacgcgctcgacttcccggccgtcgcgctcatccttgtcctaactctctgcttgtgctacagcaccaaggagagcgcgatgctgaacatggtgatcacggtgttccacctgctcttcttcgtgttcatcatcctggccggcctgtggaacggcagcgcgcggaacctggtgtcgccgcacggcctggcgccctacggcgtccgcggcgtcctcgacggcgccgccatcgtctacttcagctacatcggctacgactcggcgtccaccatggccgaggaaatccgcgaccccgcccgcgccctccccgtcggcatcgccggctcagtcctcgtcgtctccgcgctctactgcctcatgtccctcgccctctgcgccatgcttccctacaccgagatagcggagagcgcgccgttctcggcggtgttcagggagaaggcggggtgggagtgggcggggagcgtcgtcggggccggggcgagcctggggatcgtggcgtcgctgctggtggcgatgctggggcaggcgaggtacctgtgcgtcatcgccagagcgcggctggtgccggcgtggctggccaaggtgcacccttccaccggcactcctatgaacgccaccatctttctaggattgtgcacagcatcaatcgcactcttcacagagctgcaggtagtgttcgagatgatatcaatcggaacactcctggtcttctacctggtcgccaacgcgctcatctaccaccgatacgcgaagctgggtgccgaccgatctctgcatgtcctcctcttcctgctcatccttacactgagctcccttggcttctccctctcgaggaggatccatgggcaatgccgatggggaatggctttgttcggcgccacctccgtgacgattaccgccatgttccactgcgcggtacggcgagacatgccagagccaccatcagagtggatggtccctctgatgccatggccggcggctgcatccgtcttcctgaatgtgttcctgatgaccactctcaaggtgatgtcatttcagaggtttggcctctggagctttgtgatcatagtcttctatgtctgctatggggtgcactccacatactctgcagaagaaattgaggctgtcaatgctatgattcatcatgccaatatggacatatcttagcaatagcagcacataatacattgatctaggagttactttggagctaactagcttggcaattaggctgtctccagaacggtcccgaatctaaagaggatggagggcaaaagagaagctgcttttgcattaggttagactcttcttttcctgcttttgtgcttgcaaattggcttgtaacttttttttttctcaaagtgtacatgcaggactgtgaatggcatgttttccttttgatc

SEQ ID NO: 7161 - DNA, 1185 bp, Oryza sativa
  ref <308>: DATABASE ACCESSION NUMBER: AK064290
  ref <309>: DATABASE ENTRY DATE: 2001-12-06
aagagaagagaaagccaagcacacacaccaccagctttgctcccgctagttcccgctgatcgatcttttttcgggagggcgttgcttgctcggatcggcggccatggctgagcccgctggggaggcggccccgcaggcggacggcgtctcggaggaggcggcggcgaggccgagggggtttaggcttcttgggggggacaagtccgtgcaccaggctctcggcggtggtaaaggtaagtgtgaaattcgtgcgttttctttgtctcggggtgtagattgctcgtttagggcaggaattgtgtccggattgtgtgctgttcctctctgtgttaatcagtagggttcttgaggtggatataataattgcgtggctttgcctttgattatcgagctcttgagtagcgggtaggtaggtatacttcagttgagttgttggcgtttaggcctgattaaccaaattgatttggatgattatctaagaagcaaaattggctttgattctgaagaattctaagctgaattagcttctttcccatcctagaattaatggttatagttgtttgttcttcttgaaaagcacaagggccatgtgaactcctcaaacttttcttctgtgttggtggaaattaatcttcgttttgtttatgttgttatttaattccatgtacctgatcaatcatatactgctggttgaaacggagctagttatggtgttttaatcaaacggcgggattttcctcgcctgcagacagtatttgttcacaaaatcatcggagagggagtatattttgtggcttggttatccggtacagagttataccaataaccatctgaaagcttctagaaaacattaaaattaggcaaaccataataaattagggaaaccataagtgtatgaatatttaatcggcgtcatacggacaatttgtcttgtgttcataaacataagaatgttaagttaccaatcgttagctccttccaaactccagaagttctgttactttcataaaccaaatcatgaatcactagaaaatacaaatgaaaatggttttagcaatttggaatttttgagcaaagagttcaaaggggagaaattcattgtcctgttagatgtgtttcatgaggaggataggatgacaattgtgaattgtaggaaaggttagagagcatatcatgactctcttg

SEQ ID NO: 7162 - DNA, 1928 bp, Oryza sativa
  ref <308>: DATABASE ACCESSION NUMBER: AK064291
  ref <309>: DATABASE ENTRY DATE: 2001-12-06
gagaaacacacatccatccattgacgagcaacccttcatccgcattcattcatagcaatattcacacacattcctcacacattcaacgacacagccatcgagcaattcactcaccatcaacacacacatatgcagagatcgatatcaaaagcagctcttctattcctcatctgatcgatttgcacaagcggcgcagacgcagcctcatcggagtagccaggcgggaccagctcgacgggaggagacctcaccgacaacaagaggcagcatcagatcatgggcatcaacaacctctgtaccatgggaggcaagccgccgtttttctacgtcgtcatgaccggccgaatgacctcgtcgcgctacctcgccggagcatgttgtcacggcatcgtgaatgtcgtcgagtcgtgcccgactgaggaggtctcgtcggagtcgtcggaaacgtcgccaagtctcccgcgtctacatcaaccaaacacatcattgggcgatggagattgtcgcactgccctcggagccatggtgctgccctcgtcggagtcgccgtgccaatcatctgatcgacatcatccagtcgagtcgctggtgatgacactactcgttgctgtgatctcatcgccgacgtccgccggccatcttcggtggtgttaccatcttcctcacactcgtcgttgagccgcgtgacgagaatgccaatcgaagcgccgctagctgctcggtgcccgcatcgtcacgctggggttgctaagccgttcgtggtgctgtgaagccatcccttcatcacaccggagcaccatcgcttggtgcccgcacaccgtcgtcaagttcatctgcgatgctttcacctcgtcaagccagagtcatcgtgctgtccgtccatgatgcactctctcttcatcacgccaagatgagatgttgtccgtccgtgattctctccctcttcatcgagatcaatatgccgccgcttgtttgtgtattggagcgtcgctcgtctatatcaacatgaagaaagaatagtgccgtctgtgatgccaatgtaccgttcgtgttagatctacaccaaccaatgtcctcggctattccgccgatgaggcatttacttcttccaaggtcgccgttactatcggcacactcatagagccccttttgcaggctcgtcatcatatcaaccggatcaatagtagattcgtcatccgaaggaggtgccaaagccacgtttgttcggttattgtctgcaccaacttcttcatcaacatcttcgttacaagtccctgttgtataagggacatgacgagtcaggaggtgcttagccatggatatccggctgccatctacaccaactgtcatcgtcaactctttgttactttgatcccatcaagtcaggaggtgcccagccatggatattcggctgttgtgtacaccaactgacttgaccaactcctcttccctttaacaccatcctgatgtcgttgctgatccaagcgacacgagatctatgcatgttgaagatcaatccatctactccaccacgttgctcaagactgatgaggcggagcgacgagggtgggcggagcctatatgaaggctacatcaccaacaccggcgcacggaccgatgaggccgcggatgcgttgccggcgcctagatatatatccacaatcttcaccaacattcatcgtgcatggagaacgtgaagcgaagacgacgagacgaccacatgcagcttaatcggaggtgctctgtaggcctaaacctgtggcagtaattaactaggagtctttcgagaccccaggaattagaagaccacttatccaagtttagatttgtccaacgacaggctatggagcgcacatacatatatacatatatattacattgggaatttgtatttatgatccttgagattaataaagcacatgttccct

SEQ ID NO: 7163 - DNA, 765 bp, Oryza sativa
  ref <308>: DATABASE ACCESSION NUMBER: AK064292
  ref <309>: DATABASE ENTRY DATE: 2001-12-06
cattccaaaactttcgaaagcttccattagcgactaatccagccttcgttaagggtgattagaatttgattaatttcaaggcctcagatcggagattgaatggagtgcggtggtgcgctgcagctgccgccggggttcaggttccacccgacggacgacgagctggtgatgtactacctgtgccgcaagtgcggcggcctccccctcgccgccccggtgatcgccgaggtggacctctacaagttcaacccatgggatctccccggtaagcaagagtaaaagcagatcgaatcgaatcgaggaaattgaagtcgaattcaaattcaattaattggggatttggaattgttgcagagagggcgatgggaggggagaaggagtggtacttcttctcgccgcgggaccggaagtacccgaacgggcagcggccgaacagggcggcggggacggggtactggaaggcgacgggggcggacaagccggtgggtcgccgcgggcggtggcgatcaagaaggcgctcgtcttctacgccgggaagccgcccaagggcgtcaagaccaactggatcatgcacgagtaccgcctcgccgacgtcgaccgctccgccgccgcccgcaagctctccaagtcctcccacaacgccctcagggttagtatttacttcttttaattacttacttctcctaatctaatcatctcttgctttcaatcatttctcctcaccaacgaatttacccccattttattttttaaaattctacaagg

SEQ ID NO: 7164 - DNA, 1708 bp, Oryza sativa
  ref <308>: DATABASE ACCESSION NUMBER: AK064293
  ref <309>: DATABASE ENTRY DATE: 2001-12-06
taatgatgctaaaaaagttaccgggccctggaagatgccaaatcccgttttgagatggaactggcaaaagctaaaaaggaggttgagagtatgaatgcacaatttagttacaatgaaaagcgacttgactctctgaaagctgcatcacatcccaaagcggacgaggttcgcagaatggaagagctggatgatatcatatctgctgagcaagctgaactaaatagacttgctaaatgttccagcaagctcaaagatcaggcatcagaactacagcagaaaattgaaaacgcagggggacaagtgctcaaggatcagaagctaaaagttgcaaacatccaatctcaacttgacaaaacaagctcagatatcaaccgccacaaagttagaattactacatgtgagaagttggtgaaaaaattaaccaagggcatcgaggagtctaggaaagaaaaggaaaagcttcttgctgaaaaggagaagatgatgtctattttcaaagagattgagaaggcagcttttactgttcaagaagattataagaaaacacaagagatgatggacaaccataaagatgagcttgacaaaacaaaggtagaatacaacaaattaaagaaagcaatggatgaactgagatccagtgaggtcgatgtggaatacaaactgcaagatacaaaaaagcttgccaaggagtgggaaatgaaggtgaaggcattcaggataaagcttgatgacattcagacaaatcttgttaaacacatggatcaaattcaaaaggatgctattgatcatgagaaactgaaagaaacattgagtgacgagcaattcaatgaggcgtgtgacatgagaaaagcagttgagatggtggcactgttggaagccctgcttaaagacttgagtcctaacctggattcaatagcagagtaccgcacaaaggctcgtgtatatggtgaacgcgttgatgagctaaatgccaccactcaggagcgtgatgatcttaaaaagcaatacgatgcattgaggaagagaaggttagatgagttcatggcaggattcaacataatatctttgaaactgaaggagatgtaccagatgattacgcttggaggtgatgctgagctggaacttgttgattccttggacccgttttcagaaggtgttgttttcagtgttagacctcccaagaaaagctggaaaaacattgccaatttatctggtggcgaaaagacgcttagctcactagctctggtgtttgctcttcaccattataaaccaactcctttatatgttatggatgagatagatgctgcgttggactttaagaatgtctccatcgttggacattacgtgaaagaccggaccaaagatgctcagttcattattatcagtctcagaaacaacatgtttgaactagctgataggctggttggcatctacaagacggataattgcaccaagagtataaccatcaatcccggaagctttgcggagagcatgaaggtagtttagtgtttgtgctacggaagtttgagttagatgtaatctgttgtctgcgtggtgccagcatggaaccgaggttccttcggtatcaagcttttgtagaacaaattgatttagaattgtgcgtgtatagtgatgaacgagaccaaaggacatttgttaacgtaaggtatgtgatcacatgccccagctgaacacaacctaattcagt

SEQ ID NO: 7165 - DNA, 817 bp, Oryza sativa
  ref <308>: DATABASE ACCESSION NUMBER: AK064294
  ref <309>: DATABASE ENTRY DATE: 2001-12-06
ctctatcttattctcttcttgtcccctcttcccctcctctttccctagagtggcggaggagagattggaggtgctagcctgagcggcggatatgcgctagatgtggccggcttcggatgtccccttcctctctcttgcccgcgcatggctgtggtggtggtcgtcagtggttgatgtcagcgaccggcgaggagggggctccaacatcgacgactgccgctttaaggaggaggcgcgagaaatggcgtatgtgcacgctgtattgcccgccgccgcttagcccgcttccaccagcgcccggctcgtcgtctccttcggcgacagggcaggagaggagcggcatgcggcattagtcgggagtgtagcagacggtctgagcgagccgagaaggatgaggcggggaggccggtgagcgcgcacagaaagggagcaggcagggaggcaggtgagctcctccaaatccaaaccactgctgccgacaccacttccgtcgcgctcatcaccgtctccaagcacgggagatgagcaagatagcggctctatggtcgagcacaacctcattcagatgtcgacggtgaatccgcagaggacgagtggaagtggaggaggcccacggttgcgaggcaggagcggaggtccctagacctcccagcggcattcgagctcagtgatgtctcgaccgtcaccgcgtcagttctatgcagagacttggagaagagaggggagaggaggaaggcactgttgtattattgatatgtgggcccatcatcatttaactattttttaatgtaactgacatgtggcccatgtatttttc

SEQ ID NO: 7166 - DNA, 1371 bp, Oryza sativa
  ref <308>: DATABASE ACCESSION NUMBER: AK064295
  ref <309>: DATABASE ENTRY DATE: 2001-12-06
gtccgtccgtccgtctctctctctctctcttcttctcttgtcagtctcgcgcctcctcctcctcctcatacgcagcagcaagcagccaagcatggagacgcccctctccagcaggaggatcacccgctccatggccaaggcctccgccgccgcccccgacgccacgtccacggcccacccgccgcgccccgccctgcacgacatcaccaacgactcccccatcgtcggcctcgcctcctcgggcctccgcacgccggcctccaccgccgccaaggcccgccccaccagggcctcccgccgcacccccggatccggcgaggcactcctccgcggccaggtcaagacgctcctccagaaggtccaccacgacgcctcctcctcctcctcctgcgccgcagccgctcctccctcccccaacatcctccgcatccacgcgcccatcggtctcgccaggtcgcccgcccacctcctcgcccccacgccggccaacacgccgcacctcaccgccgccgcccctcacgccttcaccatgacggtgccatgcgtcctcgaggaggagttgctttccaagctgcaggtcattgcagatgccctgccgccacctccagctcaggcggaggagaaccaccttggagagtgcaaccgtgcactggtgttcgacgactcccccgggaaatcggacctgtccaatgctgcctcggtgctctcgtcgtcgtccctctcgttccaggacagcagcagcaccgacagatcaccggacgacgacagctcatcggcttggtcaatccaggtcaatgccagctccgagaagggcgacgaggacacgttcactgatcaagacccagaggaggaggaggaggagtggctaacagaagatgatgatgatgatgagtgctttgatgatctgtgtgaggggatgagcaagatgtctgtgtttgacgatgaggaggaggaggacaagaaggctgggctgcctgcgtttcaggggaagcacaccaggttcatctacgacagcgacggcgagatggagagggaggacgtggcgcatgtgccggtggagaactgcaccatggttctgaggggcctgccggtgccggaggggaagcatctccgctcccacgaggtggaggaggatgaggaatagaatgacattgctaccagtgatacacttcgcatccaagcaacaaaaacaacattgctactatagtagcttcttctttttcttttcatctggacagacacattgattcagtctactgcaatataatgccttctgtgtttcgcttcatgtttcagttcttctgaatgccttttgaatgttacaactgaataatgcaatgcaatgcaaatatgcaatgttccattaccctt

SEQ ID NO: 7167 - DNA, 1755 bp, Oryza sativa
  ref <308>: DATABASE ACCESSION NUMBER: AK064296
  ref <309>: DATABASE ENTRY DATE: 2001-12-06
gtcttcttcctcttcacagcccaaaccaatcgagcttccacgcgcgccacctgttcgacgaaaggcgtctgagcgggtgctcagcgcgtcggtggccatggaagagccgcctggcaagaaaggtccggccatggaccccgcgcaagactcgggcagggactggctcagcggcctccccgagggggtcctccaccgcatcatgtcgttcctggactctcgccaggccgtgcggacgtgcgtgctctcgcggcgctggcgcgacctctggcgctccgtgccccgcgtccacgccgacatctgcgatctcatcccggacaggatcatcgacgtcgagggagagaaggccaagatggtggtgttcaacagcttcgtcaaccggctgctggagcgacgcgatcccaccgcctcaatagagacgttcttctgcagatgctgcataccagacgaagacggccatggatcggcagacgcgaacaggtggatttcctacggtttgcagaagaacgcctggtttctggaggttgtcatgctgctcaaaccattggagctcgatccctcggtgttcagttcaatctacctgagaagaattgccttcgacaatgttttcatggaccaaggtttcttcaagcaactccagatgggctgtccagcattggaacgtttcgacttagatggttgcatcgttgcggatgacgagatctcctccaacacactgaaggttttgaccttcgatactactaaattctgctatgagtacaggatatctatttctactccgacagttactactttgggcctgcgcaatactattggcggcaagcctgtactgaaggacgtggcatcactagtgagcgcatcagtggtactttattgtgtggaaaccagcgatttcgatgctaatgatctccgccactatctctggagcttttctcacgttaaagatttgattttcagttatcaggggaaaaagttgacaattgaaaacaatttgcaatggtgtccaaagttcttcaatcttgtcggcttgactctgggcaaatggtgtctgaatgcaaacttctatgcactaattgtcttccttcagaactcaccaagattggagaaactgaccctgatactcgcagaggataattggaaaacaacagaagtattcatcggtgatcttgaagaaagatcgtttacatgtgagcaccttacgagtgttgaagtcaaatgctgggaggatgatcccctggtgaacgtggttgacttctttgttggtagtggaatgtcttctgctcagattcatatcgaatacgaagacaatgatgaggatcaatttcatattgaatccgataacatggttgggtttgagcttgaggacgaggacgaggacgaggacgaggacgaggacgaggacgaggacgaggatgatgaggacgaggacggggatgaggatgagcaacgttcactttttcaatctaaggacgtatgaaacgtcaaaggggcacattccgtccaaaagatcgctctcttccgtcttcctcctttgattccagttgacttcgaaagcacagagacatgtttactgatcttctttggagctaggacgtgaagaatcatgtctttcgttgcatataagttcagtcgtcttttgcttgcttgcttctgtgatattccaagaaccaagactatgtgctacatgtttgaatactttattaggcctttatatatgttttgcaaagacgtgatattaaaatcccatatcgtgctttc

SEQ ID NO: 7168 - DNA, 2186 bp, Oryza sativa
  ref <308>: DATABASE ACCESSION NUMBER: AK064297
  ref <309>: DATABASE ENTRY DATE: 2001-12-06
cctcttcctcgtcttcttgtcgttgttggctttccttgttgggaattccacgtacggaacggagcttggatttggagaggagaggagactgcctctgcctggctctccctcgccgccggcgcacgccattctgggcctctcctctttgccgattgataagaggagaagccgaggagcctccctgtttcaattcgttccggcgggtcgctgcaatccggcagcgaagttgaggtacaggtacgcgcgtgccgtgtagcagtcgattggttcatctcctctcctcgccggagatctctcgggcgcattgcccatttgccttgcctggcggcggtgggagggatggaagaggaggcgggggcggaggtgccgttgctcaagatcaagggggactaccaccaaggttgccctggctgtgcctatgaccgcaagaaggaggtctacaggggattgccttacaaggagttcctctatctctggatgatctgcctcaccgccgctttaccaatatcatcattgttccccttcttgtacttcatgataagagacttgcatgttgcaaaaaggacagaagatattgggttctatgccggctttgtgggtgcttcgtttatgttcggtcgatgtttgacttcaactatttggggaatagcagcagatcgtattgggaggaaaccagttgttgtgtttggcattttcgcggtggtcatatttaatacgctatttgggcttagtttcacctattggatggcaatagctacaagattccttcttggtgctttaaatggtttacttgggccaataaaggcctatgctattgaagtttgccgacctgaacatgaagctcttgcattgtcacttgttagtacggcatggggaataggtcttataattggtccagctattggaggctacctttcacagcctgcagagaaatttcccaatgtcttttcccctgactcactgtttgcaaggttcccatatttcttaccctgcttgtgcatatcagtctttgctgctgttgttctcataggctgcatatggatgccggagacattacacaagcataaagctgatgcaaatagatctcaaactgttgaagctttggagagccatttgattgatccagaagaaaaggctgaccaaaatggtagtttggactgcaagaagagcttattgagcaattggcccttgatgtcctccataattctttattgtgtcttctcctttcatgatatggcttatacagagatattctctctatgggcagaaggtgacaggaagtacggtgggctgagtttgtcatctgaggatgtgggtcaagtgcttgcaatcacaggtgccagtcttcttgtgtatcaactcttcatttatcctcgtatcaacaaggttataggccatattaaggcttctcgaattgcagctattctgtgcatacctattctctttgcatatccatatatgacatacctatcgggacctggattaacgatcatactgaacattgcgtcagttataaaaaataatcttggtgttaccatcattacaggctgtttcatcctacaaaataatgctgtgcctcaagaccaacgaggggctgctaatggcttggcaatgacaggaatgtccttttttaaggcagtggctccagcaggggcgggcattgtgttctcgtgggcacaaaaacgccagcaggcttccttccttccaggtgatcagatggtgttctttcttttgaatctcttcgagttgcttggacttatcctcaccttcaaaccctttctggccgtgccacagcagcatgatacaaattagactgttcaggtatactacagatctagattcttcagaacttcagatgttggcaatttcatgagccctgcagccggctgtgaagcgaaggcatataacatgatgctcatctggatgtcccaggagcaatagatagaagtgagggttggtacctccttatgcttgtatagtaggtgccagatatgcaattgcagcatttcagcgaaaggaatatatatagttgggggtaaatggaggccaaattgatggctaggtttttcatggccagcctacatgtaataccgagtagcattctactagtataatgtatagagtactacattgtaactagtaaaactctgtaagtgacatcagcttgggaatgaaattattgccgg

SEQ ID NO: 7169 - DNA, 1717 bp, Oryza sativa
  ref <308>: DATABASE ACCESSION NUMBER: AK064298
  ref <309>: DATABASE ENTRY DATE: 2001-12-06
aacgactgatctgctgcgagaagcgtggccatggccatggtggagaagacggtgctgctctacccttgccctgcggtgggccatctcaaccccatggtgcagctcgccgaggccctcgtccgccgcggtgtctccgtcaccctcgccgtcgccgacccgcctgacaagggcgctgtgctggccggcgcgatcgcccgcatcgccgccgtgtgcccctccatcggtgtccgcctccttcccatcccgtcctgcgagggcaagacgtactcccaccccgtcatgtggatcgtcgacgcgctccgcctcgccaaccccgtgctccgggagctcctgcgctcgttccctgctgccgtcgacgctctcgtggtcgacatgttctgcatcgacgcgctcgacgtcgccgccgagctcgccgtcccggcctacatgttctacccgtctgcggccagcgacctagcgatctacctccaggttccgcatgtcgcccgctcggctccatcctctttcaaggacatggccgacacggtgctgagcttctccggcgtgccgacgattcgcgcgctggacatgccggacaccatgcaagacagggagagcgacgtgggcacgacccggattcaccactgctcccggatggctgaagcgagaggcattctggtgaacagcttcgattggttggagacgagggccctgaaagcgatccgcggcggcctctgcctgccgtccggccgctcggtgcccgcgatctactgcgttgggccgctggtcgatgggggcaagctcaaggagaacgacgcgcggcacgagtgcctcgagtggctggaccgccaaccgaagcagagcgtggtgttcctctgcttcgggagcaggggcactttctcggtgtcgcagctgagcgagatggctcgggggatagagaactccggacacagattcctgtgggctgtgcgtagcaacctcggcgaggtggacttggaggcgttgtttccggaagggttcttggagaggacccaaggcaggggattcgtcgtgaagaactgggcgccgcagtcggcggtgctgcagcacggcgccgtcggcgcgttcgtgacgcactgcgggtggaactcgtcgctggaggcgatcatgtccggcgtgccgatgatctgctggccgctgtacgcggagcagaggctgaacaaagcgcacctggtggaggagatgaagcttggggtgttggtggagggctacgacggcgagcttgttaaggccgacgagctggagaccaaggttcggctggtgatggagtcggaggaagggaagaggcttagggagaggtcggcgatggccaaggagatggctgctgatgccgtcaaagatgggggttcgtctgacatggcgttcgccgaattcctgaacaatttggggacgaacaacgtgaaaagcggcccgagagatacacccgtgcatgactgaaacactgtagccgagttggttttagcaggaccgagaataatgttcttcagtatatttagatttcgtcagattttagagttgttcatgtcgtgatgtggccgaatctgtatgagactacggtgcaactatgctagcgcatctcatgcaaagtccgggcatccttacagagaacacactaatttatttcccagttttttctccctcatgcaactatactttaggttgatacttgagaatttgaactttgaagcaccttgcattt

SEQ ID NO: 7170 - DNA, 724 bp, Oryza sativa
  ref <308>: DATABASE ACCESSION NUMBER: AK064299
  ref <309>: DATABASE ENTRY DATE: 2001-12-06
gcaacacgagagaggaaggaatccctcacgccgttctcgtctcgccgtcggcgcggcgtgacggcgtcgcgatggaccccgccgccgctgccgccgccggcggcggcgccggtccaaaatctgatgcggccccttccgcaccggcgctgcacggcctgccggtggagatgacgacgaaggccgggctccagttccccgtcggccgcatcgcccgctacctcaaggccggcaagtacgcggagcgcgtcggcgccggcgcccccgtctacctctccgccgtcctcgagtacctcgccgccgaggtgctggagctggccgggaacgcggcgagggacaacaagaagaacaggatcgtgccgcggcacatccagctggcggtgcgcaacgacgaggagctgagcaggctgctgggcaccgtcacgatcgccgccggcggcgtgctgcccaacatccagcaggtcctgcttcccaagaagggcggcggcaagggcgacatcggctccgcctcccaggagttttgagcgggtttttctcatcgggtggacgaagaggggatcgccctttcgccaatctcttgtctggatcgttcatgcgatgcttttttttgctcatgtttccgtgtggttgggggtgtttgaacttcgtggcatgtaaaaaactctgggttcattaaaggtggatgaatagatgatataaacaagaaagaaatgatggcttcttatgc

SEQ ID NO: 7171 - DNA, 1716 bp, Oryza sativa
  ref <308>: DATABASE ACCESSION NUMBER: AK064300
  ref <309>: DATABASE ENTRY DATE: 2001-12-06
aagagaagcagagtacagcaggcagctcttcttctctttgcgaaggttggctacttggccagccattaggaaacaagttagtttggagaagaagcagagttgagactgcatttgcattgctctgtagccatgggcaagcaccatgtcaccctgtgttgtgtcgtttttgctgtgctctgcctggcgtccagcttagcacaagcccaagttctcttccaggggtttaactgggagtcgtggaggaagcaaggcgggtggtacaactttctgcacgagaaggtggaggagatcgccagcacgggcgccacccacgtctggctcccgccgccgtcgcactctgtctcgccgcagggttacatgccggggcggctctacgacctggacgcgtccaagtacggcacggaggcggagctcaagtcgctgatcgaggcattccacgacaagaacgtcgagtgcctcgccgacatcgtcatcaaccaccgctgcgccgactacaaggacagccgcggcgtgtactgcgtgttcgagggcggcacgcccgacggccgcctcgactggggccccgacatgatctgcagcgacgacacgcagtactccaacggccgcggccaccgcgacaccggcgccgggttcggcgccgcgcccgacatcgaccacctcaacccgcgtgtccagcgggagctcaccgactggctcaactggctcaggaccgacctcggcttcgacggctggcgcctcgacttcgccaagggctactccgcgccgctggcgaggatctacgtcgacaacaccaacccgacgttcgtcgtcggcgagatctggagctcgctcatctacaacggcgacggcaagccgtcgaccaaccaggacgcggacaggcaggagctggtgaactgggtggagggcgtcggcaagccggcgacggcgttcgacttcaccaccaagggcatcctccaggccgccgtgcagggcgagctgtggaggctccacgacggcaacggcaaggcgcccggcctcatggggtggatgcccgatcaggccgtaaccttcgccgacaaccacgacaccggctcgacccagtcgctctggccgttcccttccgacaaggtcatgcagggctacgcctacatcctcactcaccctggcatcccatgcatcttccacgaccatgtgttcgactggaacctgcagcacgagatcgcgacgctggctgaaatccggtcaaggaacgggatccatgcggagagcacgctggacatcctcaaggccgagggggacatctacgtcgccatgatcgacggcaaggtgatcaccaagctcgggccgaggtacgacgccggcgggatcatcccctccgacttccatgtcgtggcgcacggcaacgactactgcgtctgggagaaggaaggcctcagggttcctgccggtagaaagcactattagctttagctatagcgatcgagttgcatggtgctttgcaaccctagataatatatatacgtacgtggctctagctatgaatcatgcaattttgctgcgagatgtgtacgagcgagcttcgatcgatgtacgcttcgttataactagcgttcttcggaaataagtaagcggaatgtaccctgttaatcctgcagaaatgtaggatgaatggaattaactagctactgttcgtttcgatcctcaagaaagacttgcaagatcttgtcagttgacttc

SEQ ID NO: 7172 - DNA, 1467 bp, Oryza sativa
  ref <308>: DATABASE ACCESSION NUMBER: AK064301
  ref <309>: DATABASE ENTRY DATE: 2001-12-06
tcatgctccggtacacccgcgggccgtcgtcgtacgccgcgctgatgggcgacgcgttcggccgcgccggggccgcgctgctcaacgtcttcgtcgccttcaacgccatcgggaccctcaccgtgtacctcatcatcatcggcgacgtgatgtccggcacgacgagcgacgggaaggtgcacgacggggtgctgacggagtggttcgggcagcaatggtggacagggcgggaggcggtgctggtggcagccgcggtgctcctcctccctcttgtgctccggaagcgtgtcgattcactgaagttcacatcagccgtgtccatcctactggcagtggtgttcatgttcatcagcctgggcatcgcggtgtacgccctcttcaccggcacagcgaagatgccgcggatgctgccggatttctcgcgcctctcctctccgttcgagctcttcaccgccgtccccatagtcgtcgtcgccttcaccttccacttcaacgtgcacccgatccgaacggagctaagcaagacgtcggacatgaaggcggccgtgcgcatctccctcgtgctttgcgcggccatctacgcggcggtggggttcttcggcttcctcctcttcggcgacgccaccatggcggacgtgctcgccaacttcgaccgcagctccggcgccggggtcccgcaggcgctgaacgacgcggcgcgcctcagctacgcgctgcacctcgtgctcgtcttcccgctgctccacttctcgctccgcgtcaacgtcgacgagctcctgttcccggggcggcggccgctggccacggacacgcgccggttcgtggcgctcacggccgtgctcatggcggtgctctacgcgctcgccatcgccatccccagcatctggacgctcttcgagtactccgggtcaacattcgccgtctgcatctcgttgatcttccccggcgccatcgttctcagggatgctcatgggatagcaaagacgaaggacaaggcattggcagcgacgatgatcgctctggccgtgatcacgagcagcatcgccatcgcctccaacgtcatgagctccatcagcggcaaggtggaaggaggccatgccgcaggtaggtagcatgtggtatattggtttgctgtccgacagcatcaagattcaaggctactgcccctgtagcgttcctctgttttacattttttttaaaaaaaaggaaaaaaaacttgcagggattgactcgtaacaatgtatacttgtgtgttgtaaggatttagcggcgagtcattgttgtatacttttacaggagatgcattatcgtgtataatgtgatatagaataaggaatagtgccttcagagaaaacggttggccctcatcagttaaaaggtaaacctatatgatccattgaattgagagttggagatcggcaagaagaaagaacatgaataatggatcaaagtagagttgcctgcttg

SEQ ID NO: 7173 - DNA, 1762 bp, Oryza sativa
  ref <308>: DATABASE ACCESSION NUMBER: AK064302
  ref <309>: DATABASE ENTRY DATE: 2001-12-06
aagaagaaggccgaagtccattgtccactccatccaagtcggcgccgctctgaactctctggtagtaacccgaccgaagcaatcccactgccatctcggatctccccacctccctccgctccacgcaaagcacccgagtccccccaccccgacctccctcccgctcaaaatcccccacccccgcgcgccacgccaccccctcctcctcgccatccgtcctgcccccgccgtggcgccgagctcgcatgaggtgcacctcctccccgcgccgtccgcagcagccatgggagctcagcagagcgtcaatgcggggaaagccaaggtggatgtgcacgtcgacctcacccacatgctctgcgaggcgctcctgctgccgcccatgaggaactctggcgccaccttctcgcaaatcgtcggaaggatatcactcaaacatccaagcctatttgggaggagcgagaagttagatgtcatattggataagggtatcaatgaatccaatgctgtcattgcctttagacggccaaggcctgaatggttatcacaacagtcatttgtcattcagcacacaatgacaccggaaatagcggtgcatggctttccggctgacaacttcacacgatcagggagcagagggataaatcttagtcgattgtcgcttggtgttgagcttaatgaaccatcaacatcaaactggacatccggaaccagtgttaaattcgagcatatccggcctgttaataacgagggacgctccatagccagggaccatgatggctttcctctaacatgcagtggtaacctccatgataacatgattatcttgaagcaagagtctggttatgcagatgttaatgataatagcttcttaaaagttaacctccaaatggaacaaggattgccacttgtaccaaaatctctgaccttcaacagagtaaaatgtgcagtttcgaaaggcatgaaattggggccaacatttttggttactagcttgacaggtggttccattgtgggggacatggcgccatatcaagcatttgcaataggcggacttggtagcgtacggggttatggtgagggtgcagttggtgcaggaagactgtgcctaattgctaactgtgaatatacggttcctttggcaaagcatctggagggttctattttcatggactgtggcagtgacttaggatctgcttgtcatgtccctggtaatccagctcttcgacaaggaaaaccgggatttggtgttggatttggatatggaatccactttaacacagaccttggtcaaatccgagtcgactatgctatgaatgccttcagtcgcaagacgatctacttcggtatcaacagtggtggcggttcatagattatgaatacagaggattcacatagcatagaattggcagtttggcactcaaattgattctttgccataagatggacacaaacccttcttttttccatttcaactagtgctgacataagccggtggttctaacttgtgacttctggcagacccctagatcagtagacccagtgggtgttccaaacatgccaccgaaatcatttgcatgtttgtgccagcattcggaagctgtacagttgagatgtgtgccttttgtattttctcctgtttggagattgaacagatgggccataagatagacatgcacgaacagcaagccctgtgagatgtggaaattttgacgcttctcatgatcttattcttttatatagaaatgagaaaaatacatcattc

SEQ ID NO: 7174 - DNA, 1892 bp, Oryza sativa
  ref <308>: DATABASE ACCESSION NUMBER: AK064303
  ref <309>: DATABASE ENTRY DATE: 2001-12-06
agctgcttccaacaaacccatattcagctacaaaagctggggctgagatgcttgtgatggcttatggaagatcttatggccttcctgtgattacaactcggggcaacaatgtatatgggccaaatcagttccctgagaagctcattcccaaatttattcttttggcaatgagaggcttgccccttcccattcacggtgatggctcaaatgtcagaagctatctgtattgtgaggatgttgctgaagcttttgaggtggttcttcacaaaggagaggttgggcatgtgtacaatattggtactgtgaaggaaaggagggtgattgatgtggccaaggacatatgcaagctctttggcttggacaccgagaaggtcatcagatttgttgagaacaggcctttcaacgaccagagatacttcttggatgatcagaagctgaagaaattgggatgggcagagcgcacactatgggaagaggggttgaagaaaacaattgaatggtacactaacaatcctgattactggggagatgtcgcaggtgccttgctccctcattcaaggatgttgatgacacctggagttgaaaggcataactggactgatgagatcaaatctctttccacttcaccagatgaagctaaggaatctagcactgcggttcctgcagccactgccaaaagcaccagcagtgcccctcaaaaggcctcatacaagttcttgatatatggtaggactggatggattggtggtctacttggtaagatatgtgagaagcaagggattccatatgagtatgggaaaggacgcctggaagagcgctctcagctcttgcaggacattagaaatgtgaagccaactcatgttttcaatgctgctggtgtcactgggaggccaaatgttgactggtgcgagacccataaacaggatactatccgcaccaatgttgttggcaccttgaaccttgctgatgtttgtcgtgagcagggcttgctcatgattaattatgctacaggttgcatatttgagtatgatgctaagcaccccgaaggatcaggaattggttttaaagaggaagataagcccaactttactggttcatattattccaaaactaaagctatggttgaagagctgttgcaagaatatgacaacgtctgtacgcttcgagtcaggatgcccatatcatcagatttgagcaacccccgtaacttcatcacaaagatagctcgttatgacaaggtggtaaacatccccaacagtatgacaattttggatgagcttttgcccatctccattgagatggcgaagcgggactgcaggggcatatggaacttcaccaatcctggggttgtcagccacaacgagatcctggagatgtacaagaaatacctcaaccccgacttcaagtggaccaacttcactcttgaggaacaggccaaggttatagttgcaccaagaagtaacaacgaaatggatgcatcgaagttgaagtccgagttccccgagttactgtccatcaaggattctttggttaagtatgtttttgagccaaacaggaaggttcctgctaactgaagatttacaggcgcgggcgggagttatggaggttacgagcgcgggcgggagttatggaggttattgcacggatgcagttgtgaccatacttttttttgtagtttttggttatatctggtgttttgttaagatacatgtaggtgaactacataccgttcgatacttaacctatttatttatatattcatagcaattcgtgtgcacggcatgtgcatattattttttttgctttggtttgtgcggtggttcagaatgtatctcacctctacgttgtactctttgaactacttactctatctaaaaaagggcaattcttac

SEQ ID NO: 7175 - DNA, 725 bp, Oryza sativa
  ref <308>: DATABASE ACCESSION NUMBER: AK064304
  ref <309>: DATABASE ENTRY DATE: 2001-12-06
ctaaaaccctcgcctttttctgagactcagagcggcggcgagcgccggccggtcgccggcggaggagttggtgtggagagggcggggagatggttgtccggatcaggctggcgcggttcggctgccggaacaggcccttctaccggctcatggccgccgacagccgctccccgcgcgacggcaagcacctcgaggtcctcggctactacgacccgctccccgggaaggatggtggcaagagaatggggttaaaattcgaccgggtgaagtattggctatcagttggagcacagccatcggatcctgtggagcgcatcctctaccgtgctggaattctacctccacctccaatgctagctatggcccacaagggtgggcctcgcgacagacgtcctattgatcccatgactgggcgccccttagaccttgagggtgtcacagttgttgatgattctcatactcccaagagtggtgatggagcacctaacgaggagacagcatagatgaggcatgatgatatatctgttttagcatattgtgtggttttgcaagattaaaaagtactgtttgtggcctttctgatgggtgtttgagcctgtgactagtatgttgtgacctttcttgctgaccggctttattgatctatgctcctgtcatctattctcaggaacacgaacctggaaacatgagttgttctttttgataaaatttgtatgttgtgttcc

SEQ ID NO: 7176 - DNA, 1908 bp, Oryza sativa
  ref <308>: DATABASE ACCESSION NUMBER: AK064305
  ref <309>: DATABASE ENTRY DATE: 2001-12-06
aaaagcgcgtcactgcaagcactgaacccaaaccgagccatggcggccatggggcgatctgtgcgggtggtgctggactcctccgtcctcctcgacccatccggtgttacagcggaggaggaggaggtggtggtggcgctgcggcctggggcggaggcgctgctgcggcgcctgcgatactccaatctccgggtggcaatttgccatccggagggcttgccaactaatgagtcaggttttcttgagaagactgcaaaattgtactcctttggatatatgccacttacatctccaagtgggagcaatttactaaatgagttgatgttagaatggagtggaacgaatttttgcttctatgtgacttcaggagttcatgaaggtctactatctgaacttcagaatcacaactgggaagttattgccatgggtaatgaagatgtcataaagaactctggagttatacatattagcatgcttcaagagttacttatcactttggcaacttcaataaaaaaggaaataggaaactcatctgctttcgtggttggctatgttatgaaacaatcccgtgaggaagactttgccaagagaggagcattccccatttatcctagtaaaaacgatcttatctttgttccactctcttttgaacttcccttagcttctcaattgcaagaagttgatctagtgctacacaaaataactgatgagatcatcaacattgatccaaactcttccatcagttttccgaaggggatttcattttctccgggaatgtctgaaattataaggtttgtagaagagcactgtgatttttgtgtaattgatccattcaaaaatatttatccattgctggatcgcatccaaattcaagaaattctaatccgactggaaggacttagcgccgaaggaaggccaaaactccgagcaccatgctttttaaagattgaaagcttttgtggcagtgaattacagaaacaactagcagaagctaagttatcctttccgctcattgtgaagccacaagtagcatgtggagttgctgatgcccacaatatggcattgattttcaaaatcgaagaatttagcaaccttagtgtgcctcttccagctattctacaggaatatattgaccatggatccaaaatattcaaattttatgcaattggagacaagatttttcatgctattaagaactcaatgcccaatgcaagtcatcttaaatcatcatcaggaggcaaacctcttacattcaacagtttgaagactcttccagtggctacaaaggagcagctgctgcaaaacgaggtgcaagatagcaaattgttggacattaatctagtagaagaggctgcaaaattgctgaaggaattgctagggcttacaatatttgggtttgatgtcgttgttcaagagtccagtggagaccatgtcatagtggacctaaactatcttccgtctttcaaagaagttcctgacaatgtggcgatgcctgcattctgggatgcaatcaagcagtcatatgagtcaaggaagcagatgacacaaacttagttcaagttctcaagcaaatgatttgcatacaggcgacaacattcatactaattggaaagggagaccgctctttgggatcgaattaactctgacctctagcagaggttgcttgtcacttagatttgtggaactgcttgcgatgaacattgctggcagagatgtacacctagcgctaataatttggggaacaaagtcttttgtgttccctgagttaaaacccttagcagaataagcatgcagaagcaactctcccgtgttaaactaattattctgttgtgcagtgtaccatttacatgtgaattttggccactctgtaaacactctgctgaaatgagaaattgcttactgatatgc

SEQ ID NO: 7177 - DNA, 1532 bp, Oryza sativa
  ref <308>: DATABASE ACCESSION NUMBER: AK064306
  ref <309>: DATABASE ENTRY DATE: 2001-12-06
acagtgatacagatcacttgcgccatcacaagtcgcaagccaaaaccatctcactgactagctcgagctcaccatggaattctcctcgagttcaacgtctctcttcctcctcctctctatcctgcctctcctctactttctttgccagcgccacgaccccaagaagcagcctcacgcccatgggctcaagtcctaccccgtcgtcggcacactgccgcacttcgccaagaacaaggatcgcttccttgagtttataaccgaaatcatgaagcggagccccacgcacaccttgtcgttcaaggcgctcggcctcaccggcggcgtcatcaccgccaacccggccaatgtcgagtatacgctgaagactaactttggtaactaccccaagggcgagcccgctgctggagcgggcggagcgcgacggccggacgctggacgtgcaggacgtgctggagcgcttcgcgttcgacaacatctgccatgtcgccttcgacgaggacccggcgtgcctcgccgaggacagcatggcctcgccccagagcgcgaagttcatgcgcgcgttcagtgacgcgcagaatgccgtgatggaccggttcatgtcgccggtcaagtcgcggtggcgcttcaagaggctgttcaacatggagcccgagaggcagatgcgggaggcgctcgccacgatccacggcttcgccgagcggatcgtccgggagcgcagggagagaggggaggccgggctggcgcgcagtgacgacttcctgtcgcgcttcgccgcgagcggcgatcacagcgacgagagcctccgtgacgtggtgaccaacttcctcatcgccgggcgcgacacgacgtcgacggcgttgacctggttcttctggctactgtccggccggcccgacgtggaggacaagatcgtacgcgagatccacgcagtgcggcgcgcttccggtggcacaggcgacccgacgttcaacttggacgagctgcgtgacatgcaatacctccatgccgccatcaccgagtccatgcggctgtacccacccgtggccatggactcgcacagctgcaaggaggacgacttcctgccggacggcacgttcgtggggaaagggtggtttgtgtcctacagcgcgtacgcgatggcacgggtggaggacatctggggcgcggactgtgaggagttcaggccagagcggtggctagacgaggccggcgcgttccggccggagagcccgttcaagtacccggttttccacgcggggccgaggatgtgcctcggcaaggagatggcctacatacagatgaagtccattgtagcatctgtgcttgagaggttcagtctccggtatgccggtggcgagggacacccggggttcgtgctctggttgacgttgcgcatgaagggcggtttaccgatgcaagtgaccactagaggttgatggccgtagcaacttgtggactacgctgttagagagttgctcccgcttaacccgagaaataaaagaaattggtgtgcttgttttctccgagtggcg

SEQ ID NO: 7178 - DNA, 762 bp, Oryza sativa
  ref <308>: DATABASE ACCESSION NUMBER: AK064307
  ref <309>: DATABASE ENTRY DATE: 2001-12-06
aagcgaggcgaaaaccagcagaagagcctctcctcttcttcgatcgtcgcaagaagatactaccagagaagcagatcgcagcgagaggagaaagatcaaagatggacgatatcatgaacaagctggggggctactggctcgggcagaaggccaacaaggagatctcctccgccggtgacgacatcgagtcgctgtcgacgagcgtcggggagggggcaaagtggctggtgaacaagctgaaggggaagatgcagaagccgctgcaggagctgctccgggagcacgacctgccggagggcttgttcccgcgggaggcgaccaactacgagttctcgccggagacgcggcggctgacggtgcacatcccggcggcgtgcgaggtcggctacagggacggctccgtgctgcggttcgacgccacggtgtgcgggacgctggagaaggggaggctggcggaggtggaggggctcaagaccaaggtgctcgtctgggccagggtcaccgccgtcagggccgacgccgccaaggtgcacttcaccgccggcatcaggaagtcgcgcagccgtgacgcctacgaggtcgtcaggggcggcatcatcgtcgaggagttctagcatcgcgcgtgcgccgccagccacgatcgatcagaggaaataataatacgtgcttgtacgattagtgttcgggatgggtaatttaccgcgaatgacctttgtgattataactgattattagtaattataaaagctggatgtccatgat

SEQ ID NO: 7179 - DNA, 1485 bp, Oryza sativa
  ref <308>: DATABASE ACCESSION NUMBER: AK064308
  ref <309>: DATABASE ENTRY DATE: 2001-12-06
acttcgccgccacgccgtgcaggtggagatgggaggcggcggcggcggcggcgggaggaaggaccgcggcgaggggctcggccgcgcgctgacccggcagcggaacaaggccgcggcggcggccaaggagaggggccacgcgctcgccctcgcccgccgcgcgcgccagccgctcgagtccgtcatcgaggtcagcgacatcgacgccgtgctccagcgcgccgcagaggaatacctcctcctcggtggtggtggcggcgacggtgccggcgacgtcgccctctccgcctcgctcggctccgggcttatcgatctggatgggacggtggagacggaggaggagaggcggtggctgcgggaggagcaggaggcccttcacgcgggcagcctcaaggtgccccgccgaccgccatggactccccagatgacggtggaggagctcgacgccaacgagaagcgggccttcctggagtggcggaggaacctcgcaagattggaagagaacgaaaaacttgtccttaccccttttgagaagaacattgatatctggagacagctctggagagtacttgaacgcagtgatctgctggtcatggtagttgatgctcgagatcccttgttctaccgctgccctgatcttgaggtatacgcacaggaaattgatgagcacaagagaacactgcttcttgtaaacaaggctgatcttttaccactgaatgtcagacagagatgggcagaatactttaagcaacacgatatcctttatctgttctggtctgccaaagctgctactgctgatttagagggaaagaagttgagcagctactccatggaaaactggaatacagcagatcttgacaccaagatatatggccgggatgaactcctggtgatacagattctgaaactgacccagaggaaaccactgaccttgaaggctcagatactgcagtaggtgccacagcagatcattgtgcttctgatgaacaagatgaggaaatcagtcaagctgatccaaacattagtcatgtactaagtgaccttgaatctttcgacctggccagtgaagtgtccaagaactctacaaagaagaagaaagaggcatcctataagcatcacaagaaaccccagaggaagaaggatcgttcatggagggttggaattgatggcgctgatggatctgctgttgttcgggtgttccagaaacctgccgtcaattttgctaccgttacaggttaatgtttttttgcggcactctgtgcgacttcattctcttttttagcttacggtaattgaagatgtcgttgaaagtcaaactacattttatccattttgtttcatcttctgctgtttgttatggccatctgtaattctgtattggaaatttggaatggtacgcaatgtggctatttttcgatgctagctttcatagcatttgactgaaaggatgaaaccttatgaatgttccattaggttatgaaaaag

SEQ ID NO: 7180 - DNA, 1923 bp, Oryza sativa
  ref <308>: DATABASE ACCESSION NUMBER: AK064309
  ref <309>: DATABASE ENTRY DATE: 2001-12-06
aacacagtgacagaggaaaccctcagctcacagctccaggcgatttttcgtcgccgccggcgccggcgccgccgcgagccccgtcgactccctcgccggcggcggctggacgggacggaatctcaggtcaaccctctctccccgccattagaatcttcgcgatactcccccaatcggaggagaaacgaaaccctcgtcgagaaatttggacgcgcgcgattgctcctcctgcttgggtttcttggttgctcgagatctctctctctgcaatggcggtcagctcggagctggagggcttgcaggacgtggagccctcccgcttcatcgccttctccttcccaaaccctctcctcctcctcgaccacgcctccgacccgtacgcccatggcggccatgagttcctccgcgtggcggttctcgaccactcctcaccccacccgtcgccgcgcacggcggcgatgctcgtgccggcggggcggcaccgcgactggatcttctccacccgcgccggccacctgcacctcctcctcgcctcccgctcccagtgcagccacctctcccgcctcatcctcgtcggccccgagctctccgcgccgtctccttctcgggtggtggtcgtcgccgccgccgctcgcccggacccggatcctgctcacgcgcggctgctcccactcctcctggctctatgcccccgtgccgcgtttgggggcgatgctatccctgacgtgccattgctctccttccatgatgacctcctccggcttgctcctgtcaaggttgtcgctggtcctgtggttggtgagatggttgttgaggatgtggccgtcgactgcgcgccacgttcggctgaattgcgccgccgattgcggttcaagcggatgccgttccttgttcagacgcaggtgcgccttgtgcggcaattatcgccgggtgattctttgatgttagatgcattggatgaggttggaggtggttcattgcagcctgaggtgggtggagagctggtccagccttacctacaggcaatggccgctggtcttgcggtgatcgccccttccatggatgagagctttcggttgggtggcaagccgaggtgtctttgtgctggtatcggtggcggcgctcttctgatgtcaatcagaatggggcttcagtgtgatgtactagggatagaggctgatggtgttgtgttggatgttgcaaggagccattttggattggtagaggatgagttccttcaagtccgtgttggtgatgctattcaaatgatccaggattttgctcatcaaggggaccctgatatgaatttcagtgcgattatggtggatcttgattcatctgatgctatatgtggagtcagtgcaccaccgttggagatgacaaaggaaagcattcttcttgcttcacgcacgatcctacatcgtgatggggctttcatattgaatgttatccctcctgctgcagatggatccttctacaaagggttgattgatgttcttcgccgtgtcttctctgagttgtatgaaataaatgtcagtaatggtgaaaattttgtccttgttgccacagtgtcaccagttgaaactatccttgctgatagttcaggaagcgttctgacaaaattgaggaaattagctggggattttttggaacacataacgagaatctgacattccaagtcactgtattgttgctccaattggcctccacaacatctgtccagaagttattttgtttggatttgtttgcatactattcagacggctatagtatttcactgttcttatctcaaatgaagaagtccatttgagccagccactggatttgataccccagattcctcagcccttcctgagtatttactgctgtatttcagatcttatttaactgaacaggtaatagcaacaattgagatatcattac

SEQ ID NO: 7181 - DNA, 1065 bp, Oryza sativa
  ref <308>: DATABASE ACCESSION NUMBER: AK064310
  ref <309>: DATABASE ENTRY DATE: 2001-12-06
acactacccagctcactgaagtagcaacgcagctcatcagtgtcaagatggctactactaagcatttggctcttgccatccttgtcctccttagcattggtatgaccaccagtgcaagaaccctcctaggttatggccccggaggaggaggtggaggtggtggtggtggtgaaggaggcggtggtggttacggtggatcgggctatggttctggttctgggtatggtgagggaggtggtagtggaggtgctgccggtggcgggtatgggcgtggtggaggcggcggcggcggtggtggtgagggtggtggctccggctctggctatgggtctgggcaaggctctggctatggtgcaggtgttggtggtgctggcgggtatggtagtggtggcggaggtggtggtggccaaggtggtggtgctggcggctacgggcaagggtctggctatggttccggctatgggtcgggtgctggtggtgctcatggtggtggttatggaagtggtggcggtggcggtggcggtggaggccaaggtggaggctccggctctggctctggctctggatatggctctggctctggcggaggcaacggacaccactaagctcatttcctctatcagctagctacaatatagcctgttgttataagtgaaccgtgatcagtgatgagtctctctcgctgctttacaaagagcttgtcggattgtatcgatatagcactgtgtactggcttgccgtttcatcacataaagttggcaaagcctagtaaataaaacgaccttttgtactcagatcatacttctgttattcacggagctgatgttcactaagattgatatgcaagaacatagatttaacccttgtcctagctagttgtttacatagtaagcatgcagaatggacttgttaactctcggtgatcttgagttgtaaactggacttgttctcagtagggctgctagctagcatttctagattccaacatgttcgcttacacggtgttaaaaaaatattgctgcagattgtaatgagactacccagataaagtttcaattggtcagc

SEQ ID NO: 7182 - DNA, 2001 bp, Oryza sativa
  ref <308>: DATABASE ACCESSION NUMBER: AK064311
  ref <309>: DATABASE ENTRY DATE: 2001-12-06
gaagaggaggaggaagagctagctatcctatggtgctagctgtagctagctccgacgactgaggtgaggagacgcaatggcggggagatgcgccggcggcggcgacggcggcggcgagggcatgctggcgcggctgcggagggcggcagccaggcggatcgggctctcctgcgcctccttcttctcccacgccgccacctccccttccccgcctcccaagaccatctcatgctcagcactgaatgcgcctgcagacagcactgatgaagaccaggaaaagctggaggagcccactagcacaagaatggctgacaagaatctctgtgcaatatgtctggagcccctcagcaccggcagcgttgatattgacaatggtgacaggccagcaatcttcacatcacaatgctcccactccttccacttcctatgcatcgcctccaacattcggcacggcaatgttacatgtcccatctgccgtgcacagtggtctcagctgccgcgtgacttgaaggtgccaccattgctgcagaacaaccagtctgacccaatcctccgcatccttgatgacaacatcgcgacatctcgtttcaacagaaggtcatccatccgtgctgcccggtacaacgacgatgatccggttgagccttacaccttgaccgagcatgtggatccatgccttcgcttcgctctgatcccatccccagtggcggctcaccatcatgctctcggacattacccatgtggccgtgtgatgccactgcagcagcattgccagtacagcagctcctccatgctctcaccgccacagattgcttcaccaagtgggcagaggcgcgcttacctctccgtcagtctcgcgccacagccagccatggacctagttctggttgccagccctaatgggccacatctcaggctcctgaagcaggcaatggcgctggctgtcttctccatgcgcgcaattgaccggttagccattgtcacaaatgccaccactgcaacccgcgccttccccttgcgccgaatgtcatcccatggaaagcgaatggcattgcaggtcattgaacacctctgctgtgttggtggtactgatcctgtaggggcattgcagaagggcctgaagatactagaggaccgggcgcaccagaacccaagcagttgcattcttcacctgtcagaccatccaatccgaagctgtttcggggtcgacatgaaccgtttcaacatcccggttcaccagttccatgtcggcctcggtttcggggtgcagaatggctttgtgatgcacgagtttgaggagctcttagcgcggttgcttggcggtgtcataagcgacacccagctcaggattggcgagcacggtggagtggtgaggctaggtgagctgaggggtggcgaagagaggaggatcccgcttgacctggtgtcggactgcggcttcatacttgttggctatagctatctggaaggtggaagggaggatcagttcaggacaggcgaagtcgctgtcggtttcgaagagaaaggcgataaccggtactgcggggtcagggatgccggtggtctgagtatcggcggtgagaggaggagcagctgctgcgccgagagatgggactaccttgatccgttcatggcgcggcgatgggcgaagcatttcaatgtgtatagggcctgagttaaaaagagggggagcttggggctttgaagtgatcagctcagcaagtctggtttaccagtttgacagcatatgattcttgttggctctttattttttttttcctctcttaacattcctgcaagcatctcatgatcatcagaggaaatgtttgcttttttggcttttgttgtggatcagggatccatttgtaagatgtctggttttgcatcagatgtgtgcaatgtgcacaaggctttctgttctcaatctgtatgtgtgaatcggactgtgaacaaaactcagcacaaagaatgaaatatggctgcattggagtgagttatttt

SEQ ID NO: 7183 - DNA, 1319 bp, Oryza sativa
  ref <308>: DATABASE ACCESSION NUMBER: AK064312
  ref <309>: DATABASE ENTRY DATE: 2001-12-06
aggagaaatccaagctcgctttgacgaagccctcctcctcccatttctcctccccgagctagggtttcgccgccgccgccgccgactagccggagttgccatggggacgccggagacgtcgagggagccgtgcccggaccggatcctggacgacgtgggcggggcgttcgggatgggcgcggtggggggctccctcttccacttcctcaagggcacctacaactcccccaacggcgagcgcctcgtcggcggcgcgcaggcggtgcggatgaacgcgccccgcgtcggcggcagcttcgcggtgtggggcggcctcttctccgccttcgactgcaccatggtcttcatgcgccagaaggaggacccctggaactccatcatcgccggcgccgccaccggcggcttcctctccatgcgccagggccccggcgccgccggccgctccgcgctcatgggcgggatgctgctcgccctcatcgagggcgcgggcctcatgctcaaccgcgtcctcgccacgcccccgccgctccccgtcgatgaccccaacctccccgccgtcatgggcggcggcggcgggatccccgggatcccgcaggtccccgtggcgccacctgaggtcgcgagctccagcggcggtgggagtggatggttcgggagcctgttcggcaagaaggaggaggagaagaaggcgagcccgagcggcggcaagtcggagatgttggagagcttcgacacgccgagcactccgatcccaaccttcgagtacaagtgaagaagaagaatcgcaggatggctgagtgcactgaagctcaggcagagattttgggtagtctggaaaaaaaagctacatcagagcgagatggaatgcttatttgacgaactcatgcgtgcgcacgacttgtttctagggctataaacctcccacagaggaaggtcttggcccctggctcttatatgtattaataatgtcataatgtatgtgaggctgtgatccgttttaatttaccatggtatgttttgcaactttgcaaatgatgtagcagtagcagtaataacctatagcattcttgtcattcagtgtactgggctcttaaaaagcctcaacttatgcttcaagctggcttataaagttttgacacttttgagttaggatgtggaagttatgcatcctgtcttcccactgatccgcttctcgatcagcaggtgcaaaaacaagaagtgtgcactgcaaacttgtttgtggactatacaagtgtacctgaggcttttgttcagaacatgaatatatttttctgtgtacctgatgcttttgttcaaac

SEQ ID NO: 7184 - DNA, 1375 bp, Oryza sativa
  ref <308>: DATABASE ACCESSION NUMBER: AK064313
  ref <309>: DATABASE ENTRY DATE: 2001-12-06
ctctctccatggcctcgccctcgccttcctaccaaagttaaaatacccacgtcaccacgtgaagtgacgtcaggtggccgtggcctcaaaccgcctatcaatatctctctccggcggcgctgcggcggctgcgatcctctccgttgagggggacgacgaagccctaggtgcgccgccgccgccggctgccgcgcgcagcgcagcgggagggaggtaggacgaggccggccgccccgcgcccacacgctgcggcggcttcttcttctccacgcagcacgccgcgcgcgctgcgtcgtcctgcgccaccgggcgacgtggggggggctgcaagcttcccacgtgctccaccgggggcgcgcgcgcgccgttgcgggggagactcgaacccctccgccgccacccgcgagctgctgcggctcggctccgacactacaggctacacgcgacgcgacgaggcgcgcgctcctccgctccgatccaccacgcgccgcgcgcccggccggccgcacgctgctggccgttgccgtccgtcacagcaggtgcctcgtcctgcgccgccacacgggctgctggcttccgagttcagcgaccgccaccaccccaccacacctgccgcggccgcggtgcttcgacgccaggccccccgagatcccgatcgcccatcgagcgccgcccgctagctagtcgtggccgtccgcctccgccgtcagctgtgggttcctcctctccgtatctggatcctggagttcttcgtcgcctgctatctgctctgattttagtcgattgctgctgggaattttataccattcaagatggctccaacaaggaaaggaaaaaaaattgaaattcccatcaacaaggaaactgatgctgtgtttccaatggggcaccatgcatggtgatgtcatggtttgtttatcaaggaattacaggagattgattgtgtacaagaagctgattcatagtaccgttctgcactatgctgcaatcaactgtggagatttcactttgcagtattgcgctgctcagcttgtacagagattggatgatgcagaacatatgtatggactcctgacagatgtcagcacccgaatatacttaaaccaactggtttttggctctgggaacactttgatgcgctgaagaagcataacaaggctgaggcttttatcacatcctcttattgatgggtcactattggatgtccccatggaagacttatttttgatagagaagtttattgaaaactaggaaggtagcccgcgcattcgcgcgggcatgtgtcctatgctaagtttgagatatttgtaagagtgaaatgttacatctaccacaatttctccataaattgttttcatcggtattaattgctttt

SEQ ID NO: 7185 - DNA, 1524 bp, Oryza sativa
  ref <308>: DATABASE ACCESSION NUMBER: AK064314
  ref <309>: DATABASE ENTRY DATE: 2001-12-06
gtcgtcttcaacctctctcgtgtcgcgtgccattcgccatcgccaccacctccactactcgatcccctcccatccctccggaacctccactactactcgccccaccaatggctgacggcgagtctccgccatgggcggagctcgtccccgacatcgtccgcaagatcggccgccacctcctgtgcgagatcgaccgccaccacgcggatggcctctgcaggtcctggcgcgacgcgcttctacaactccggcccccgcctccgccgctcccgcggcttgtcctcccggaagccgacgggcccgcgttctactgcgtccccagcggctgccgcccccaccccttcgtcctcccgcccgccgcgctccgcgcgcggtgcttcggctcgtacaacggcgcctggatcttccaggccgtcgaccaggcggcgaaccacgtcctcctcaacctcatcacccaccagcagctcaacctccccaacctgatccgtttcccctccttccggcttccgggattgacatttgacttcgaggtcgccttcgtcgccgccaccctctctagccagccgactgatcagggatgcgtcggcgccagcatcatcggcttcaaacgcaggcccctcaacccacggcacatcgcgttctggcgcatgggcgatgaggcgttctcgcagtccatcgagtcgaggtggattgacgaggagctggaactggatgtggtggacctcctgtacagcggccatggcgctggcgccttcctcttcctcacccgaggggaaaacatccgtgtgtttcgtcaaccgatattccctctcggagacatgcagacgacagtgctctacttcgagcggcgcggtgacgacgacgacgacgacgggcggccggtccttgatcgctacctcgtggagtcccgggggaagctgctcatggtcgtcaggttaggagatcgtgagcctggccgcttgccgaccacgacgttccgggtgttcgagagagaagacgagctgttcaacaactactggaccaagctgcccgaccttggcggccgaatgctgttcgtcggaagaggctgctccagatcgtacgaagcggcagatgggtaccccggcatggagggcgtctacttcctggacgaccggagcttccacgacccgatggttgtgtacaaggatgccgcccaacggcggtatccctgcagcgacaacgggagatggtcgggagcaccgccaccagcggaggtagagcgctgcttcccagagcaaggtccgtcgaactactcccctccggtttggattctcccatgaggcgcacgacacatgtttttggttgttgaaattgttgccggtgatcaggctagtctgtgatcgttgctaagctttcatgccttcatcagcatgtactgtgttagtgtgtttattcgttgagtttggatggttttctcgtgttaaaattgttactggtgtaagctgaagcaggattgctcaattcagtggagaaattgatctgcaggtgacttaccgttccctt

SEQ ID NO: 7186 - DNA, 1425 bp, Oryza sativa
  ref <308>: DATABASE ACCESSION NUMBER: AK064315
  ref <309>: DATABASE ENTRY DATE: 2001-12-06
gttgaccccttcggccatttgcgactgccgctttgcagaagcatcacggccgcatcggcgaccccgaactccgccgccgcccgcagccgccgccgccttcgcagccgccgccgccgccgccttcttccagggcaaacgatgctccgccgcgtcgcgccatccctgcggcgagctatcctcacatcctccgcccatggccgcgcgggcgcgcaactcacggagcctggtctctcgcctcgccacgctctgctcccgcaatggcgcctttgctcctccgcggcctccacgaactctcccccgcccccgccgccgcctccttcttctccgcctcagggaacaccgcgtccagcaggcggatccaccgtctcgtcgctgaaccctgccgaggtcgccaagttcgccgccatcgctgagacctggtgggattctgaaggtccattcaagccgttgcatctgatgaatccaactcgactgtcttttatccggtccactctctgtagacatttcaggcgggatccaaattcttctaaaccacttgaaggccttaaagttattgatgttggatgtgggggtggcattctctcagagcctcttgctcggatgggagctacagttactggaattgatgctgttgacaaaaatataaagattgcacgtgtccatgctgcatccgatccatcaactgcttccatagaatatttctgcacaacagctgaggatttggtgaaagagaacaaacaatttgatgctgtgatttctcttgaggtgatcgagcatgtggctaatccctcggggttctgtgaatctttgtcagctttgacagttcctaatggggccactgtgatttctgcaatcaaccgctcaatgagggcatatgcaactgcaatagtcgctgcggagtatattcttaattggcttcctaaaggcacacatcagtggtccaaactagttacccctgaggagctggtccttatactggaaagagcttcaatctctgtacaagaaatggccgggtttgtgtataatccgctgcgtggagagtggtctctgtcagatgatcttactgtaaattatattgcttatggcatgaagaaagtcgaaacaccctctgagtcaaattgacctcacatcatcaaaatattttcgtcgggaactaaaacgtgcgccacttgaaaattttggcagggattacaatcaaatagcacactgaaaagttttgacttctctttttgttaatttcggaaaacagggagcatgtagtagtgtcatggggaagccccactgaggtgtgcaaactgctaagttgatagcagtggcaacagctaacaagtaaagtaggggtagctttgtctctttgattgtaactagtagtacttctttcaaactttccttcatataaataagtacatttcagacgagttcacc

SEQ ID NO: 7187 - DNA, 1590 bp, Oryza sativa
  ref <308>: DATABASE ACCESSION NUMBER: AK064316
  ref <309>: DATABASE ENTRY DATE: 2001-12-06
aatctcgctaccgccatccgccaagcgaagcgaagcgaagcattgactcctactcctactacgagcggcttaaagtgaccagtaaccactaccaccacgccgcggccgccgtcgccatccgcgcgcgcccccacctgcctccgctcccactcgcgcacgcggccaccacccccaccgatacgcttctcctgcctgcctgcctgctgctgctgccgcgcgccggcagggagaggagaggaggaggagcatcgcttccttgcttcctcctcacgtgccttgcccccgccgctaagtagccggcttcctaccgaacaagaactgcagcgagcgactcgggaggaggaaggcgaggggatatgcagcagcagcaggcgtgggcggcggggcttggcggcctcgcggtcgccggggtcggggaggagggcggcgggggaggtcccgctcccaccaccgtcgacgaggcgtccatggagcggagcaagagcttcgtcaaggcgctccaggagctcaagaacctgcggccgcagctctactcggcgtcggagtactgcgagaagtcgtacctccacagcgagcagaagcagatggttctagacaacttgaaggattatgctgtgagggctttggtgaatgcggttgaccaccttggcacagttgcctacaaactgacagacctgtatgaacaacaggcttcagaagtttccactcttgagctgaaagtagcatgcttgaaccagcaagtcctcacctgccaaacttacacggataaagaaggcattaggcagcagcagatgaccggaaccgccacaagacatcacaaacattacattgtaccgactttggcgaacaaaagaatgcaggctttctctgagatgcaaactgatgctgatattgactcaaggcctagaccttatccctcagcaaaaacccttttctggcatttggcttcagagaaaaactccaaaaccaatggagcacgccaatctgaatttgtcctagaagaaacaaaggctacaaaacctgcatcgagaggtaaggaaccatcaacatctccattgcccaagcatctgcagacaaacttggccagctctgattttgctatgcataatgttggcatgaaggatcaacctggtgtcaggtatctatcgtcatttagttcttttgacaacccaagagggcgtcaaatccaaaaggctcccctccgtaccaaaagtatgctagctgctttctttgtcaagcacaagtcgggaaagatgaaaaacgtttctgttcgttgatcaatttcaagcctccagtttgtccagccctgtcacaacgaagtacaaccacggaattcagattacatctacaatatgtctatgtcttgtatattagtgctctagagatgaatcttttggataaagtttttatatcttaatgttaatgtcatctttctgatgacttaaatgtttaatatatgggtatagaataacagttttcagtataagtggatgtaaaaggagtatgtcaaccatcattttcattcatgtagattgtatgatgtgtttgtacagaagaaaaaaaaagccaaaaaagaaaagcagactactg

SEQ ID NO: 7188 - DNA, 1533 bp, Oryza sativa
  ref <308>: DATABASE ACCESSION NUMBER: AK064317
  ref <309>: DATABASE ENTRY DATE: 2001-12-06
aaaaccctagctagcggcgcgccggtttgtggtgctgcagcttggagcaacggagtggtggcgttgacagcggagacggcgacagttgctacagaggatctcgacgcagccggcgtgaaggagggagcagggtgtgcgcccgctggttgagccgcgcaaggggaggacgcacggcgggtgagaggcgcactgtacgagctgcgtctagacttggctgtggtagtgttcccgaccattatgggtctagacttagctatggatacaaaagcacaagctaccgtcatctcggaaatgcatgccaactgtttagagttgagccatggagccatggtgtccatactagcaatcctgatgtcttgtcaataccaatatctaaaatggccagtgtcaaggctgctaacaacatcaccatcgaaccagtggttcagtatgttgataaagagctggacaaggcatccaatagggataaaggggccaaaggcaacagaggtatggtggtggctgatcatttccaactgtggccatctccttatcagcttaattgtgaatgttctcacactgagcagcaaccatggccaccgcctactcaagcaggagacattggttgtcaagttgcgctgcgacgagtgctagggtcatcatccaaatgcagccaaggtgacttaatgccggtgacaccaccaaggccactgacaataggaaaattgcataactcgaggagccgttctgctggaaacacaactgaagccgtacaatcaattattgagtctcatgcaatatctttacactgtagaatttccaagtcaatgtgcattgcacttaattttgttgagagctggctacaaaacacagccaagaaattatgcaatggccagttgcttaacctttcagttgggatacattttgacgacagaaagatttctactacattgttttttgctgagttgcttgagcacccaataatatattttcaggtttacttaactgcttttcactgtgttcattcgaacaaaatcctgagaccatggattattgctagagctgctaatgagaagcagaacaggaaggtcaagagatgtggttatgattccattgttggttttgatggaaacaatcctattgatgccagtattgcagtaaaggtttccattgatgtgattggtacttggacagattcagagacgctatatgcataagttgcaaacaaggattatttgtctgttaaattacttgagctggtaagaaaggggtccaatacatactggttattagaactcataactaatgagctgaatccttggtgtttactcagatatcagagatggctagaaattctggggctcccacctttgactagggctgcgtggacaggacaagggaagatagaacaggacattagtgtagacataatttcagcatctcaagttatcaagtctctctgtctgaacaagtcatctattaggagctactcaagttattttctcctgatacatgctttggtcagtaaattgagagcttgggaagcattggtgg

SEQ ID NO: 7189 - DNA, 709 bp, Oryza sativa
  ref <308>: DATABASE ACCESSION NUMBER: AK064318
  ref <309>: DATABASE ENTRY DATE: 2001-12-06
cttgccagacagcccgtttgcttcctctaccaagtcgaccgcattctttaccgcaaccgctgccactgccattggtagcgagggagatttcactaccggtagtagctgcaatattggtggcagtgcggtcggcagcgccaaccctctccggcctcccacattggacataccttcgccaaggacctgcttcttccccatgcccaggctgtccgagcacggggcgatcgggatgtaaagtagtccacaatggaagtggctgaaaccctctccagaaatcatagaatacatgaagcaaagaaagtgttatcggaatataggggaaaaaaggagtggagtgtcagcgtagtttttaggatgtttagctcccctttcttttcgtttttaagcttctctcaccttttagtggatagctccattaaacaacacgagaagaagaagatgccattagcccttatggaagaaaaagtggcagcatatgaagtattgtgatatactactatatataatactactctatatatatataaataatttagtggtgcgcctaattatactagagaatatagtactatgtggcagttagcagttattttgtttactactgccatcagacaattgatgttgttacccagttcttccatgtataacaactactcgtatattatactgattctgtggttaatcctggaggcaagtgcctgccacgttc

SEQ ID NO: 7190 - DNA, 1669 bp, Oryza sativa
  ref <308>: DATABASE ACCESSION NUMBER: AK064319
  ref <309>: DATABASE ENTRY DATE: 2001-12-06
gatgtataccaattcaagttctttgcagagctttgccgaaacaagattggagagaatgactctgtgattgtgatgacacatgagccaaactggcttcttgattggtattggaaggagactactggcaagaatgtttcacatttaatccaggactacttgaatggaagatgcaaacttcgtttggccggggatttacaccattttatgaggcattcagctaatcagatagacaaccctacttctgtgcaacacttgcttgtcaatggatgcggtggtgcatttttgcacccaacacatgttttcaaaaactttgagcagttctctggagctacttatgagtgcaaggctgcgtatccatccttcgatgactccagcgggattgcgctgggtaatatactaaagttccgcaagaagaattggcagtttgacacaattggtggttttatctacttcatactggtattctcaatgttcccacagtgtaatcttggtcacatcttaaatgaagaaacttggtcagggcgtctgggaagcttctcaaatacaatatggagtgctttgctctatatttttgaacactcttatgtctcttcagtaggaagtctaactttattactggcatcatattcatttgtaccatccaagctctcacggagaaaaagagctattataggtggtctacatgttttggcccatctcactgcagccctgcttttaatgttgctgttggagttgggaattgaaatttgtattcggaatcatttattggcaacatcaggttatcacacactatacgattggtatcggtcaatggaaagtgagcatttccctgatccaaccggtcttcgtgctcgcttggagcaatggacacttggactgtacccagcatgcataaaatacctaatgtcagcctttgacgttcctgaggtcatggctgtgacaagaattaatatctgcaagaatgggatgatgtctctttctcggagtgttctgatgatgtactacacttctgtgtttatctacttctggattttctcgactccagttgtctccctcatatttggtagttacctatatatctgcatcaactggttccacatacactttgatgaagccttctcttcgttgcgtattgcaaactacaaatcattcacaagattccacattaagaaggatggtaacctggaaatattcacgcttgcagtagacaaggtcccaaaggattggaaattggatcccaagtgggaggcagaggaaaggaggcctcatcagctcagccatcaccggaagcaccccagcaagtggaggtcatcctcttccccagaccctgtcacgtcggtacgggttgtcgaccatttcaccatttcaagaacaagaacatcagatcccaacacctcttgttgattagacacatggtgggtcgaggaatggacaactactagttgcggtgcgcgttgctatctttatagatccagctgacttagtctgccgaactgacaagtgagcctgcattttagagaaatggagttttacagagtatatatagaattagtaacaaagaaatgattattagttcagcaaaattgtaaggcctgattggttgtattgcttgaagtagactattgagattgcttcagctagcatggtaaataaaatcaatcttgttatc

SEQ ID NO: 7191 - DNA, 1812 bp, Oryza sativa
  ref <308>: DATABASE ACCESSION NUMBER: AK064320
  ref <309>: DATABASE ENTRY DATE: 2001-12-06
gcacgcctccacgcacccgtggccggagaagaagacgccgccatggacgccggcgagtgctccagctcccagccctgcgcgtcctcctcgccggacgccgccggtggcgtttgggccaagctagtgccctccgattccgcgttcccggaggtggagctggccgaggacgacgccgtggtgtgctcccgggtcaccccggacggcggcggggaggtggccgcgtggtgcgagattaggcgcggcggcggcgatggcgacgcgtcgtcggcgacgattcggaatctgagctcggatgcaattattgtcgatggaagagtgatccagcaagaagcagttgacatcaaaccggggagtgaaattgtttcaggaccccagaaagatgggcatctgttgtacacctttgatataacaggcctgaatgaccaggacaaaactaatatcaagattgtgctggatattgagaatgcaaagtgcagcatatgcttaaatttgtggcatgatgttgttactgttgctccatgcctccacaacttctgcaacggttgcttctctgagtggttaagaaggtcttcagctaattcgcgtgataaaagtcagagtgctgcctgtccacaatgtaggacggcagtgcaatcagttggtaggaatcacttcctacatagtattgaagaggctatactgcaagctttttcatcgctacagcggtctgatgaggagattgcattgttggagtcatatgcctcggtcaagacaaatattgcatggcatgcattcatcccttttccatggtcttatgctggtgcgatgattcttagatccaccatggggataaacatctgtcagagggaggttttggggaaacagaaaatccagtcaaggaagcgccgtttgccacgttcaaatgatgaagctaaccatactaaccatgctgattttctatgccctcaatgtggtgctgaatttggtggatttaggtgcagtccaggtgctccacacttgccgtgtaatggatgtggaggaatgatgccagccagacctgacaccagtataccacaaaaatgtttgggatgtgatagggcattttgtggagcttattggtgttcccaaggagtgaattcaagtcagcataatccaatctgtgatcaggaaactttcaagatgatctctcagcgccatatctctagtgttcctgacacaatacatggaggcaatcaatacgagaaagatattacagaaagatgtatacagcaatcaggcaaagcattgcaagctataatctcagagtggatagtgaagtttgacaataaggagcttgatcgctcaaggctgcagctgaaccatgttgatgcaattacttctaggacatacgtctgcaaccaatgctacagcaagttcatcgatttcctgctctactggttccgtgtatcaatgccaagaaatctccttccacctgatgctgctaacagggagagctgctggtatggtttcatgtgccgaacccagcaccaccggcctgaccatgctaagaagctcaaccatgtctgtcgtccaacaagaggcaacccctagcctgcctcgttctctgaaaaaaatcatctattttcagtgttcaacagcagcattgtacagcaaagagcaagtgccataggctctggtttctcagtgtttaacagctctgtttgattagtaggaatgattgtcaggtacatcaaccagtttcaaatgcctaaactgatacaacctgtttatcttaatctctcctattgcaaccttccatacttatgtttttgcaatgcaacctcacatgctttc

SEQ ID NO: 7192 - DNA, 1456 bp, Oryza sativa
  ref <308>: DATABASE ACCESSION NUMBER: AK064321
  ref <309>: DATABASE ENTRY DATE: 2001-12-06
tggcggaggcttcggcgggaagccgcacaaggggggcgacccgaggtggaaggcgatcctcgcggcgcgagcccgggacgggccgctcgccatgggcggcggcgcggcgagggcgtggttcgccatgaaggtgatggacaaggcgtcgctggagagccggcggaagctgagccgggcgcagacggagcgggagatcctccagctgctcgaccaccccttcctgcccaccctgtacgcgcacttcgagaccgacaggttcgcctgcctcgtcatggagttctgccccggcggcgacctccatgccctccggcagcgccagcccggcaagcacttccccgagcacgcggcgaggttctacgccgcggaggtgctcctcgcgctggagtatctccacatgctcggagtggtgtaccgagacctcaagccggagaacgtcctggtgagggacgacggccacatcatgctctccgacttcgacctctcgctccgctgcgccgtctcgccgacgctggtgatgtcgtcatccctgggctccgatcccaagaggggcaacaatgcgcagtcgtgcgccgcccagccagccgcctgcatccagccgacgtgcttcatgcccaagctgttcggcaagaaacccaagagcagccagccgaggcagaggtatcatcatcagcagcagcagcagctggccgccgcggcgttgccggaggtggtggtggagccgacgggggcgcggtcgatgtcgttcgtggagacgcacgagtacctggcgccggagatcatcaagggggaagggcacggcagcgcggtggactggtggacgttcggggtgttcctgcacgagctcatgtacggcaggacgccgttcaaggggcagacgaaccgggccacgctgttcaacgtcgtcggccagcagctccggttcccggaccacccgccgacgagcaacgccggcagggacctcatcagggggctgctcgccaaggagccgcaggggcggctcggcgtgaagcgcggcgcggcggagatcaagcagcaccccttcttcgacggcgtcaactgggcgctcatccggtgcagcaccccgcccggcgtgcccagggctgtcgagcccgtcgccgtcgccgcggcggtgccggcgacggtgatgtccaagccgccgccggtggacaccgtcgagatggcaatccacagcaattgcaacagcaccaacagcagcaaaagaatggcagggcctccagaggtagagtctggaggcaagtacctagactttgagttcttctagcaaggtgaatgcaaagatctgccaaatattgcatcaggcagctgagaaaatatgaagtttttaaccatatacttgttttagtttgagttgtaactgtagtcactagtcagtgagtcccatactttcaacatttgggcaaaaggcattatctggatctgaccaaccagttgtact

SEQ ID NO: 7193 - DNA, 1715 bp, Oryza sativa
  ref <308>: DATABASE ACCESSION NUMBER: AK064322
  ref <309>: DATABASE ENTRY DATE: 2001-12-06
aaaaaaccaattaattacgtgtaatcaaaccggtctgaggacggcggctgcggcggcggcggcggcggagcgggagacctcacctctgcgcccctcgtcgcaccaccaccaccgagtcatcccgcgtccgcggcgtcggcgaggcgcatcgaggcggaggtcgccggcgcgaggcaggctcctctgcccctccaacccccaacccaaaccctgcacgacctgccgcgccgccgccaaacccgagggccatccggaggaggagcaattcggtgtggctctggtggatttcatcgatttctcgacgctaccactggatttaggtttatgaagctctaggagtataggttttcattgcttgtttgccagtttgttagagcaaggatgggaatggactactacaatatcctcaaggtgaaccgcaatgcgacattagaggacctcaagaagtcataccggcggctcgcgaggacgtggcaccccgacaagaatccaactggcggcgcggaggctgaggccaagttcaagcagataactgaggcctatgaggtactaagtgatccagaaaaacgtgcaatctatgaccgatatggtgaagaaggcttaaagggaatgcctccacctggttcacagagccggacttccgcagctgctggctcaagtggtcctagtaatttccggtacaatccgagcgaccctgatgatttctttgctgagttcatggcaagcaacaaaccttactccttcgaccaagaacgaacgcggttccaaccacgatcacagtggacagcagggaacactagaggtgaagcatcttctgcttcacataaggaaagcagtaccagtacaagtcaactagaaaaaccagcagctattgagaaaaccttactgtgcactcttgaggaattgtataatggaacaaaaaggaagatgaagatcactaggaatgttgcaaatactgatggaaaggtagaaatcgagacagaggtcttacctgttgaagtgttgcccggctggaaaaagggaacaaagataacatttcccaacaaaggcgataggctatctggtcagttgccacaagacctcaccttcgtcatcgatctgaagccccacgatgtgtacctcctggaagggaacaatcttgtagcaacccaggtgatccctctcgtggatgctcttgctgggacaaccatacatctgaagacccttgacggcaggaatcttcccatcagggtggaggaagtcgtgcgtcctgggcatgagattgtgctcgcgaacgaagggtggccgatcaggaaggaaccggggaagaaggggaacctgaagatcaagtttgatgtgaccttcccgacgaggctgtcatcttcacagcgtgcagccatcaggcagatcatgggtggttagctagagaagataagatacaccaacagattcgtcatacagaaacaagaaactatagttgtgctagtctgatagatggagctggattcaggattcagataggttcttctgttgttacaggcatatagtggtgcggtttttattctaccttgttcttgctctgtaagtgacagagaagttttcgttctgttgatcattggaaaagattctaatggtgatcgtgctataggctgattctgacatagtgacatgtagtagttctgaatgccttgttttggattggataaatagagcatgtgctcagtcagttcttgcct

SEQ ID NO: 7194 - DNA, 1481 bp, Oryza sativa
  ref <308>: DATABASE ACCESSION NUMBER: AK064323
  ref <309>: DATABASE ENTRY DATE: 2001-12-06
gaacgaacacgcacttgtcgtcttgtcgcctcaaaatttcctctctcctcgccaccgtctcttctgtttacgagctcctctccaaatccccaaaaccctaatccagccagccgccgccgccgccgccgccatgggaggaggaggaggaggagggcgcaagccacgcaacttcgccacgttccggctgttcccgcgcgccggcgccgccgaccccaacgaccgcgtcttcgtccgcgtcgacagcaacgactacaccgtccccggcttcggcgacgacgacgccttcgactcctcatccctctccctcaccggtgacgccgccgccggcgatcacttctcctccgcctccggccccctccccgaccacgtccgccgcgagatcctcgagctcggcctcccggacgacggctacaattacctccaccacctccgcgagctccgcccctccgccgccgccgccgcctcatccttcgcgcccaaccagactgccccgcctctccccctcgacgtgaaggcgtatgatgccagtagggtgcggattgcttctggcaatgttgaggatgagatggacgaggggaggacgatgtgtaaggtggccgcgaagacagcgcctgtgaggcggattgagagggcggttgatcctgacatcgcgaggttgctcgacgagaccgatgtctcccatggcgggtcggaggatgagggactggaggaggattttgtcatcatggcaaaccgggctgagggggatgaggaggaagatgatgatgatgaagaggaggaagtgatggatggtgtgttcttaagtgatgttgaagaggaagaggagtttgaggatgatgagggtgagcccaagccgagggtccggcggttgctggatgaacagtttgatttgcttgctttggaagaatatggtgacagtgatgatgatgatgatgatccaggtgttagaaatggggaatgtgaactgcctactgaggttatcgatgaactgaaactgttccatagtcaaaatgtatctgtcacagaagaatatagaacgccggcagattttgttcgtagaaaattggattcaagcacagcagaggaggtggatgaatctgctaatgtaatccaaaaatgtgctgaatatgctgaaaggtatttaaatgaaactgctgaagaggaagaagttgtacttgtttcagaaagcagtgatgagtctgaagtttgggactgtgagactattgtttccacatactcaaatcttgacaaccatcctggaaagattcaaacaccaggaaatcctaaaaataggctccctaaagtttttcctggagaaacagctacaacgaaagatatcatcaggcttcaaggcaaagagagacttccagtagaatacctaccacagaggaaaagaaatggtgagaaggagaagaaagcaaagccaacagaaactccaagtgctgaaagttttaagaaaggagctcaaaaggaaacaaagg

SEQ ID NO: 7195 - DNA, 1747 bp, Oryza sativa
  ref <308>: DATABASE ACCESSION NUMBER: AK064324
  ref <309>: DATABASE ENTRY DATE: 2001-12-06
acaagactgcatttcagtgttactgtagtgcaaacaagacacgcatatggcacaaacagtacaagcggcatcatctcttgttacttcgacttcgaaaacgtgacgtgcaacaattttcacgtatgctcagttcttcgggagcgccgcgccctggtgcagcgcctcggagagcctctgcagcgcggcgtgcgacgagccgccgcccgccgccacggcgctccggcacacggccttcatctccgccgccttctccctcgccttcttcccctcctccgacgcatcgtccatcagcgacctcaccgcgcgctccagctccgccgcctccacgaagttgtcccgctccctgtccaccccgagcggcacggccacgcccatgtcgcgcaccagctcgaacgcgttcaggtgctgctccgcgtacagcggccacggcgccatcggcacgccgtgccacaggctctccagcaccgagttccacccgccgtgcgtcacgaagccgccgatggccgggtgggcgaggatctccttctgcggcgcccacgtcggccacaccatgcccctccccttggtcctctccaggaacccctcggggaggagctcgtcgaggttcgcgtccgtcgggtgctccgacccgtcgggcgcgccggtgcctgactcggcggcgggcggcgggccacgcaggacccagaggaagcggtggccggaacgctccagcgcggcggtgatctccaccacctgcgccgcctcgaaccagcccatgctcccgaagcagaggaacaccaccgacgccggcggctgcccgtcgagccacgcgatgcactcgtgcggcggctcggagctgtccctcttgtcgttgccgccgagcgagagcacggggccgatggggtacactggcggcgcggcgcgccccggcacgcaccggccgtccgcgatggcggcgaggggccccggctcgagctcgtcggcggtgttcgcgatgatgcccgtggcgtccatgaagcggtcgccgaggcgcacgaaccacgtgtagttggggctcttcttgtccaccaccgggcacggcatggacgccggcggcagaggcggcaggccgggcacgtccacctccccgtccacctcgtggaactccacggcgacccggtcgtggagcactgggaggtgcagcatgagcgcgagcatggcgccggtggacgacatgaagacgtaggacggcacgccgaggtcgcgcgccacgtcgaccatgggcgcggcgaacatgtcgagcacgagcgcggcgacggggcgccccatcccggcgacggcgtccctgacgtgcggcgcgtgcaggtggatgtaccgcgcgatgaactcctccacgccggcggcgtcggcgggcgggtcgacggcggggaggcggtggaagcggatgtcgaggcccgacgcggcctcgcggcggacgtgcgcctcgacctcggagcccgcctcgtcggtgggcgggcgcatgacgagcagcgtgatggagaactccctgccgccgccggcgccggcgaggagcacgcgcttgcaggactcgagcatggacatgaggtggccggagccccactccggcaggagcaccagcgccggcgccagcgtcgccatactctcgctctctagctgatcaccgtctgcagcagtagtgttcgttcggcgcaacactctattagttggactagctagctagtagctaataatggataattgaatacaacaactcgtgattgatcacact

SEQ ID NO: 7196 - DNA, 1863 bp, Oryza sativa
  ref <308>: DATABASE ACCESSION NUMBER: AK064325
  ref <309>: DATABASE ENTRY DATE: 2001-12-06
gtttgtgagaagtcttcttgtggctacatttggtttagcaactgcacagaagctgtttgtaaagatgctaaggtgtgtttttcgagcgccaatgtcattctttgatactacaccatctggtcgaattttgaaccgagtttctgtagatcaaagtgtcgtggaccttgatatagcattcagacttggtggatttgcatcaacaacaattcaactacttggaattgttgctgtcatgagcaaagtcacatggcaagttttgattcttatagttcctatggctgttgcatgcatgtggatgcagagatattatattgcttcatcaagggaattgactaggatcttaagcgtacagaagtcgccggtgatccatttgtttagtgagtcaattgctggtgctgctacaatcagaggttttggtcaagagaaaggattcatgaaaagaaatctttaccttcttgactgttttgctcggcctctattttccagcctggcagctattgaatggctgtgcctgcgaatggaattgctctcgacctttgtcttcgctttttgcatggcgatactagtgagcttccctcctggcacaattgaaccaagtatggctgggcttgctgtcacttatggacttaatttaaatgctcgcatgtcaaggtggatactgagcttctgtaaattagagaatagaatcatctctgttgaacgcatttatcagtattgcaagcttcccagtgaagcaccactcatcattgagaatagccgtccctcatcctcgtggcctgagaatggaaacattgagctggtcgatctcaaggtacggtacaaagatgacctgcccttagttctacatggaatcagttgtatatttcccggtggaaaaaagattgggattgtggggcgaactggaagtggtaaatctactcttattcaggcccttttccgcttaattgaacctacaggagggaaagttatcatcgatgacgtcgatatttctagaattggcctgcatgatctgcggtcacggttgagcatcattccccaggaccctacgttgtttgagggtactatcagaatgaatcttgatcctcttgaagaatgtactgatcaggaaatttgggaggcactagaaaagtgtcagctcggagaggtcattcggtccaaggatgaaaagctggacagtccagtactggagaatggagataactggagtgtgggacaacgccagcttattgcattgggtagggccctgctgaaacaggcaaaaattttggtgcttgacgaggcaacagcatcagttgacacagctacggacaatcttattcaaaagattattcgcagtgaattcaaggattgcacggtctgcaccattgcacaccgtatcccgacggttattgatagtgacctagtcctggtgcttagtgatggtaaaattgcagagtttgacacaccccagaggctcttggaggacaagtcctccatgttcatgcagctagtatctgaatactcaactcggtcaagctgtatatagagaggcttagcttaaaatcccccacaccaagtaggaacagggaggtaggatagccacatctgccagtggactcacgccatagaagtaccaacatcatagggcaagacacaagccgaggtgtatatgagcggaaacaaaatgttccctgacgtgaataaaccatggaatcgatgagggaacgcagcgggcagcaccacgggaggagttggtgagattacccgaagctctgatgcttctgaatgtataaacaatgcggtactacttctcccttgcatagtggaaaaagggaaggcaatgttcatgggtaataaaggggtaacaagtttcattttggcacc

SEQ ID NO: 7197 - DNA, 1378 bp, Oryza sativa
  ref <308>: DATABASE ACCESSION NUMBER: AK064326
  ref <309>: DATABASE ENTRY DATE: 2001-12-06
agagtagagttcccaagctcctctgtcacagactcaagtaggcaagtcaagcagcagccataggccatagctgcaggcctgcaactcccggggaagagtggagtgctgatacgatagaggtagagcaagaagaaagcatccatggggaacatcctccggtgcttcaagggagacgacgatggcggtgatcactatccctactacaagccaacctccaggccacactaccagcctcctcactaccatggtcaacctgcagcccccccagctccactccagcagcagcatctcggcccccatggcgtcacgccgtccaccgtcggcgtcgccgccctggcgcacgatctcctcaacttcgaatccacatccatggttcctgatggcctcagtcagcacgttgtatcatccaggaaagcacaagttaaatggtaccagaaactgttggaggcgtataagaatacaacacctccaccaaaaacaccagcaaatgctgctcagctaattgcaagagcccttaatatgatccagagagctgatttggagggtattcttgaattttacaaccttccgatcccatcactccccacagcatcgtcaaactaccaaccatccttgctaccagagggcgtgcagtttgtgctaaacactttgccggtttatgacaagtgcattggagatggtgatggatttactgcatatgttcccacaacggatccgagggaatctgcaaatgtgccattggaagtgcatgagttggtgatagcaagaactcaagcacgcaaatgtagggattaccagagtgctgatgctcttctaagcagccttgatgaagctggatacaagataatatcttgttcagatgacgaggtcctcgcaaggaaatacagaataagaatgaggggaattgatgcaccggagcttaagatgccctacgggaaggaatcacggactgcgttggtgaaactaattggtgggaagagcgtcaaaatttatgtatatgatctggaccagagtttgcaagatgggagagagaggcaagagctgcaaaccgagggctttgggcgtcagggaatcctgagaaaccatgggattggagaagagaccaacgcaacgcaagacaggacgccatccaggtgtactgaagttgagtctccagctctcatttggccacaaatgtgcatatatgtctagttgggtaacgttgctgttgagtagcttgctgacaatgaatgtgtcaggaaccaaaagccaaaatgtatgtatggtttgtgttgtacaaaagagattatatatccaggaccaggagtcagctgtgccgtgtgaagtaacctgagaatgtagaggtgaaatgtggtcaatgcaagtgagctttgttcag

SEQ ID NO: 7198 - DNA, 1323 bp, Oryza sativa
  ref <308>: DATABASE ACCESSION NUMBER: AK064327
  ref <309>: DATABASE ENTRY DATE: 2001-12-06
aggtcaggagaggctccaacggtcacattatcctcgctgactccgccgcgcgccgcgtgctcgccttcctccccctcgcgccaccaccgccgccgccgagtcctcgtcaccggagagcgagggggtctccgccgtggtcgcctgcgcgctacgcggcgacgctgccggcttccttccgccggagtcaaccttgggggtaaggattgctgcaaacaactccagtttctgaataaagacagtgccgatattaatggataagaaacagacctcgttaggcactcctgtctacaggacaaatcccttcgattctgactctgattctgaagtgccctcaagaccgtcaagggcacaatctgtcccagtgcgacgcacagatcaatctatacaagagctggaggactatgctgttgataaagtagaagaaacatcacgcaaagtaaatgattgtgtcagagccgctgaagcaatcagagaagatgctacaaaaacactggttactttgcatcgtcaaggtgaacagatcacccgaactcatcgagtagccgcggatattgaacacgatcttagtatgagtgagaagcttttgggaagtctaggggggctgttttccaagacatggaagccaaagagaaaccaacagataaaaggaccgatttcacaaaataattctttcacaagttcagcgaaccacatggaacagaggcagaggctaggtatttcctcaacacgtcagccatctccaaatcaagtacatcgttcacctgcaactgcaatcgagaaagttcaggttgagatagcaaagcaggatgatgcgctctcagacttgagtaacatgttgggagagctgaagggtatggcattggatatgggcacagaaattgaaaggtaaaataaatcactggatgctttcggtgatgatgttgatgaactgaacttcagagttaaaggggcaaaccaacggggacgccggttattgggcaaatgatgccatcaggttgtcgaaccacagcaactctgtttctagcagttttctccatcccatgggattcaggacttgtgagtgcgattagcagatgcgcctacttcatctggatattctgtcgtgtctgaattctgagcaaatattcagattcccgtgttgtgttgttgtatgagaaatcgtcatatacacttgttgtatgataagttgatagcttcaattacttggtgtaggacataaccaccattccccttttctcttagaatcttgatgtaatctgtactcctaaatatgccagaacgagatgagaagagaattgaatcaagcgatagaattactccagc

SEQ ID NO: 7199 - DNA, 1904 bp, Oryza sativa
  ref <308>: DATABASE ACCESSION NUMBER: AK064328
  ref <309>: DATABASE ENTRY DATE: 2001-12-06
tggcaagaaacaagtttgcattgttggtctgcaagaatttgaggtttctgatgttcagattgtcaaggaatatattgagagaggaaatgcagcccggagtacagggtcaacaggggccaatgaagaatcatcaaggtcacatgctattctgcagctggctatcaagaaacatatcatagtaactgataccaggcgacaaagagatcgagatgctaatgaatctaaaaacacaaaggctgtgggaaaaatttcatttattgatcttgctggaagcgagcgtggagccgatacaacagacaatgataggcagacgagaattgaaggagctgagataaacaagagcctgctcgctctgaaggaatgcattcgggcccttgataacgatcagatacacattcctttcagaggaagcaagcttacagaagttcttcgtgattcatttgttggtaactctaggacggtgatgatctcttgcatttctccaaatgcaggttcatgtgaacacacattaaataccttgagatatgctgacagggttaaaagtctctcaaagggcagcaatacaagaaaagagcagcccactgggccaactataccttccagcaaggattcttcatctgccccttcatatcctatgcccatcgaaactgaggaaattgccaaccagattcaagagaagagacctgttgaaacttctaggaaggctgctgaaaatttcacctcgaactcttctatggaacctgacaggaatcctgttagtatgattccaagttattctaatagaggaaaagaagaaaatggttcatctggcttgaatgacagagaacgggttgatctgaattccagtcgaattagctacaacagtaaaccacagtctgttcagagttcagcaaatttacaagaagaggaaaaggttacaaaagtttctcctcctcggagaaaggcctatagggatgacaaacctgaaaggcagagcaactatgcgaagaaggatagtggacctgagacaagtaggcctgggtataaggtgcagcaggcaaagcagttgcaacagcaacaacggccgacatctgcttcagcttctcagaattcatcaaggcaatctgaaaaggaaagttcttgtgatgatgtggaaatagatgctgttcttgaggaagaggaggctctcatagcagcacacaggaaggaaatcgagaacactatggagattgtacgagaagagatgaaccttttggcagaagttgaccagccagggagccttattgacaactatgtaacacaactgagttttcttctgtcacgcaaggctgctggcttggtcagcctccaagcacgcctggcgcggtttcagcatcgcctcaaagagcaggagatactcagccgtaagaaatcttccagataaagcccccggtcatctctcggcgactttggccttttgccttgtcagagcaccgattggagctttgaccgccgtttcatgcgaagctcttcccctgtcgggctcctgtaacgttggatctaagcaaggagctaagcgaagatatagcgcagttgcttagagaggcgcctggttggtggtttcctttgggacgttttgtcaggtttggtcagcagtttgctaaaatagtccttccacagtggggctgcttgggcttgtgttgtttttttggcagatgcatggcttggcctcttttgccagtttttccattgtatgatgagacgtgtaactactgtgtttgcagatatggatgggttggtttccgatgtttgggagacaaatcctctcttcttttttttttatcaacatagagatattgctgctgtattctttactgattatttgcgttgagaaagaaaaagtttgtgtatgtcaaggactagaaaatatttaatattcaccccat

SEQ ID NO: 7200 - DNA, 1932 bp, Oryza sativa
  ref <308>: DATABASE ACCESSION NUMBER: AK064329
  ref <309>: DATABASE ENTRY DATE: 2001-12-06
actcgaaacggctacttcctccccttcctccccctccaccaccttctagaaccttccacgatgccgccgccgccgcggaagcgcctcggccgcggaagcgccggagtacgacccgaagatcgccgagaggaagtccgggcaggagccgctcatggtgtcgcagttcatggtggagctggtcgggaccaaggccgtggacggggaggccccgcccaggatactccacttcaaccccaggatccgcggcgactactccggcaagccggtcatcgagatgaacagctgctaccggatgcagtgggggcagtcgcagcgctgcgagggctacgcctcccgccctgccaacgagacagttgatggccaacttaagtgtgagaaatggattcgtgacgacgacaagaagtctgaggaatcgaagatgaagtggtgggtaaagcgtctaattggtaggccaaaggatgtgcacatcagttggccataccccttcgcagaaggcaagctgtttgttttgactctaacagctggtttggaaggttaccatgtcaatgttgatgggcggcatgttacttcctttccttatcgcactggttacactcttgaggatgcaaccggcttatctctgaatggagacatcgatatcgaatccatttttgctagttccctgcccaattcgcatcctagttttgccccagagagataccttgaaatgtctgaacagtggagggcaccaccactaccaactgagcctgttgagctttttattggtattctttcagcagccagccattttgctgagcggatggctgtacggaagtcgtggatgatgtatacaaggaaatcgactaatatagtagctcggttctttgtggctctgaatgggaaaaaggaggttaatgcggagctgaaaagggaagcagagttctttcaagacattgttatagttcctttcatggatagctatgaccttgttgttttgaagaccattgctattgctgagtatggggtgcgagtcatacccgcaaaatacatcatgagatgtgatgatgatacatttgttagaattgactcagtactggatcaagtgaagaaagttcgaagtgataagagtgtgtacgtaggaagcatgaactacttccataggccactaagatctggcaagtgggctgtaacttatgaggaatggccagaggaggcatatccaaattatgccaatggacctggctatgtaatttcagccgatattgcacgctacattgtatctgaatttgacaatcagacacttcggctatttaagatggaagatgtaaacatgggcatgtgggtcgagaagttcaacaacacgcttcggccggtcgaataccggcacgatgtcaggttctaccagtctggctgcttcgacggctacttcacggctcactatcagtcccctcagcacatgatctgcctctggagaaaactgcagtccggaagctcacggtgctgcaacgtgagatgacaatggcagcaaaaattagccgtattttggagcaaatagagacgatgttaactcgtaagctcagctcgctgttggaacaccagaaaatcatcagcattcagcgatgctgacggttcggaggagcgctcatcttctggactggacctgatatatgattcgttcattcttttggtcggtggctccgtttcaagctgctgatttctgacgcctgatcaatgatgttcttgccttcttggggattctttcgcctgttgatatttatactcgcgtcaaatttatttgacctaggaatttttgaggctggtggtggtggtggtggcggcggtggtatgccggcggcatgttttgtgtataaaaaggattttatgagttttactgtttgtgagtatatattcggtggactcctattggctgacactcttaccattactgttttt

SEQ ID NO: 7201 - DNA, 2229 bp, Oryza sativa
  ref <308>: DATABASE ACCESSION NUMBER: AK064330
  ref <309>: DATABASE ENTRY DATE: 2001-12-06
agcactgcacgcgttcctgctccttgtgttcctctctcctctcctctcctccgcgtagggggtagagtaggggaatccgcgccgcctcctgctcctggccgccgtgaatgctatggccggcggcgaggacggggccgacggcgtcggagatgacaccgagcttcgcaggttctcagacgtggagctgctggagaagtcgcggcgcattcagggggagctcagtgggggtatcgagcgaaggctcaaggaccgcggggccaagtttcgccgcttgctagacgccatcgtccgcgagattgatcgccgtaaggcagcaacggatgatgacagatgcgcaagggtagttcaatcgggatgtgcagaatcatcagttaaacaacaagcagtaaccatatcagattttcggtcctcctttgggatagatgaagaggcaggcgttgatgtatctcatttggaaacaagtgcatgcattggcgacccaaaaacttcaacagataatgaggggatcttgtgtgaagaggaagattcctgtaagtgtaaaccctctacgtctcaaaaggcatcatatgttgataggtcaacttatatggaaaatatagatgctgctgatgatggcaaggataatggctacagtaggatatgcaaagatgcccacacttctaggaaaaggaatggagaattttcacctaccttttcaatgcgattgcggtcaagaaaggtggttgaagaggtggttctactcgatggagatacttgcatttcagactctgcagaaaaaacatcctctgcatgtgatgcaatgaagatacactatccttcatgggacacccctaattctattgagctttcttattctgacatgaagtgtcttgagcctgaatcattgttgtcctcacctatactgaacttctacattatgtacctaatgggacaaatgccatcgacaagtaggcttggaggcaagtatcatattttcaatacatacttcttcagcaaacttgaagccttgacatcaaaggtggacaatgatgcttatttcttgaatctgagaagatggtggaaaggtgtagatatatttaaaaaggcatacataataattcctgtgcatgcagacgcacactggagcttggtcattatatgtatgcctgcaaaggaagaccaatcagggcccaccatatttcatttggattcactgaagtttcatagcagcagatttattttcagcaccgttgagagattccttaaagaagaatggaactacctgaataaaactggttctttagaagattgtcatctacatgaatcagtgtggaagaaccttcctcggaaaattaagaagaaagcagttacagttccacagcaggacaatgaatacgattgtggtgtctttgttctgtactatatgcgacgctttatcgaggaagcacctgaaaggcttaacaacaaggactcatctaatatgtttggcgaagggtggttccaacgtgaagaggcttctgcactgcgaaaggaaatgcaagctctgcttcttcggttgtttgaggaagctaaagacaacaaccacatgagagatccaacaacaccagtgtcagcaacagcggagcaccctgttgaagtcttgtcaaccgagccagcagtaccagaccaccctcggaatgcggttggcgtcgccacctcatagtttgcaggcggctgccatgggagctggccttggaatgtggaaggttggtgtgcatccggaaaacatagctctcaattgtcttctccggttatgccacaagagaaggaaacttggaaggtactgtactgggtactatggtaggtaggtctgcaaagatgcgatactgccgtgtatagtttaggtagaaagccgggttatccgctgggctcttggggataattttggttcttggttagttcttaggctgggctacaagagaatggtcgaatttgacaaactgctcctacaagctctgagctgccaagttgacagctgcaggatctgcttgtaaacccatgaggaaggggagaatcatcagaatagctctcacctgcctgcccaaatttctgcttgtaaagcattctgaattgaagttctgatgggtatagccgtcggtggagtggaggcacaacttttggagttggatactgtcatcgctcttaaaaccatgcttttggggacacttgtacatttggtgctagtaaaagtcaggcggcatcacggagttc

SEQ ID NO: 7202 - DNA, 1677 bp, Oryza sativa
  ref <308>: DATABASE ACCESSION NUMBER: AK104985
  ref <309>: DATABASE ENTRY DATE: 2002-08-28
acaaactcaccaattcgaccacagtcaccacagatcttcttccttcccgagacgccaggaaacgccgggagaaagcatgggttctctgggagcagcaggtaagccgcacgccgtgtgcatgccgtacccggcgcaggggcacatcaccccgatgctgaacgtggcgaagctgctccacgcccgcggcttcgacgtcacgttcgtgaacaccgagtacaaccacgcccgcctcgtccgcacccgcggcgaggccgcggtggcgggcgcgccgggcttccggttcgccaccatccccgacggcctgccgccgtcggacgacgacgacgtcacgcaggacatcccgtcgctgtgccgctccaccaaggagacctgccttgcccccttccgccgcctcctcgcccagctgaatgaccccgccacgggccacccgcccgtcacctgcgtcgtctccgacgtcgtcatgggtttctccatggctgccgccaaggagctcggcctcccctacgtccagctctggacagccagctccatcagctatctcggataccgtcactaccgcctcctcatggaacgtggccttgccccactcaaagatgtcgatcagctgacgaatggataccttgacacgccggtggaagacgtgccggggctgaggaacatgaggatcaaggacttcccgagcttcatacacacgacgaacccggaggagtacatggtaggctacgtcatcgaggagacggagcgctgcaaggatgcctcggccatcatcgtcaactccttcggcgacctcgagggtgaggcggtggcggccatggaggcgctcggcttgcccaaggtgtacacgctcgggccgctgccgctggtggcgcgcaaggacccgccctcgccgcggcgctcgtccatcaggctcagcctgtggaaggagcaggaggagtgccttcagtggctcgacggcaaggaggctggctccgtcgtgtacgtcaacttcggcagcatcaccgtcatgaccaacgagcagctggtggagttcgcgtgggggctggccaacagcggcagggagttcctgtggatcgtccggcgcgacctcgtcaagggcgacacggccgtgctgccgccggagttcctggccgagacggcggagcgcggcctcatggcgtcctggtgcccgcagcaggacgtgctgaaccaccccgccgtgggcgcgttcctgacgcacagcggctggaactcgacgctggagagcttggccgccggcgtgcccgtcatcagctggccattcttcgccgaccagcagacgaactgccggtaccagtgcaacgagtggggcgtcggcatggagatcgacagcaacgtcaagcgcggcgccgtcgcgtgcctcatcgctgagctcatggaaggtcagaaggggaaggagatgaggaggaaggcggaggagtggagggagaaggcgatcagggcggctaagcccggcggctcgtctcaccgcaacttcgaagagctggtccgccacgtgctcctggccaaagagtcgtagctcctcgcgtatgatttcctttgcgctagtgtcgttgtcatgagtgataagccatgaggtgatcagtgttgtattgtgtatttgtggctactggcctactgcctatatatactggatggtgcaatatcaccctgtttgatttg

SEQ ID NO: 7203 - DNA, 1524 bp, Oryza sativa
  ref <308>: DATABASE ACCESSION NUMBER: AK064331
  ref <309>: DATABASE ENTRY DATE: 2001-12-06
gaaaagcgaaacccgcaccaaacggcgacgcgcacggcggcggcgccctcgagcccaacgccgacgagcccccatggcgggcgtgcagaagccggccaagcggctggggggaatggcggaggcgctctccatagccgccgacctcggcttccccgcccctcccgcgcaggaggatcagggcagctcagacaaaagcgatgatctagtgagggttttgagggaactgactgttgtacagaggaacattgccaatttgcaagtggaactacagggcagaaaggatgataaaaatattgctcatctgactcacgttagtgagatggagaagaagtgtgaatctttggccagaatcaccactattttgaaagatgtaattcaaaacaaggatcgcattattgctcgactgcaacaaccttactccctcgattgcattcctgttgaagctgaataccagaaacaattttcagagctacttctgaaagcagcaagtgactatggggcattgacagcatctgtaggtgatttccagtggagccaaaacttcagagagtcacctgctgtatggggggaaatgcttcgaccgatacctgctgcgcttgcttcttgcacgcgcttctttgaggccatgtctgcaatgagggaatccttctctacacttcagaaattacgtgtaggtcattcttctctgtcgatgaccccgggtggatccagtgacgattcaaagttcttgacgccgcctcagtggagagagggctcaatgctcgatagctggaagcaagtggacgagacaatccctgagagtgatggactcgatgccatcaaccagaggaggttgtcatggccatcctccatcaagagggagcagtaggccaaggttcacccaacagatactccatatgtttgtgtgctgtataaataggattctggggtttcttttcttctgtgtggttactgttcagccatttgcaaaagctcccgttggcaggtgatactgacaggataaatgattacccatgacactgaatgatgttagttccttgtaacaaactatcactgggcgttaagacttaagaggcaatacatgtcccaatatttccagttgtcacgagatgattatcaatgaaaagaacagagcatttctgaacatggtttccttcacaactgtagttccttaaatcccctgtgattagctattacctgtgcatgcaaaaatgtataatgattactggaaatctatcatctttctgtgtaatattttgatcgacatcgtttttaggaagacgctgggaacagaacagattgacatcagttactgagggtgtggtccatgtggaactgcaaatctgatatcactagttgacagctgaaactaaactagctaatgtaatcttaaggctacgtttaatgtaacctgaccaggccttcatttctgttctggccatcatcgtgccaaacaatgataatcacatgcctgggagcttcatctgtgttggttaatgaaagcccaacattattattagcaac

SEQ ID NO: 7204 - DNA, 2289 bp, Oryza sativa
  ref <308>: DATABASE ACCESSION NUMBER: AK064332
  ref <309>: DATABASE ENTRY DATE: 2001-12-06
gaacacgaaaaaaagaagactccttttggtcaataaatcgaaataacctcggaaaaccagggaatttaaccgtgcccacacccatctgttcccttccagcatccacaacctcttcaaccgcttgcctgctcttgtgaggtagctaggcaaagatcaagaggcagtagaggtgtggaggccttggacagttggattcttggagggaaaagaaggaagaacttgcataccagtggaattcttcaggctggtcatggagatgcagctttggaggagatgggtcggcgtggagctcagttgcaggcgctagttcttagcgcgcgcaaaccacatgctgttctgaagtctccaagcgcgcgctgctgtctggaacaagagccgggagcagatatggtcccggacggcggcgaggggcatgagatcgtcgaggtcgccggcgagcccggcgcgccgtcgtcgacaatgcggctgatggacttcatacccatctacatcccgacggtggagacgggcgcgctgagccggagcgcgtgcaagcggcggttcttggacttcctccgcgcccacccgtccagggactggttcctccggtcaaccttcgtcggccgcctccgccaccggggccagggccaggcggcgtcgggggatgacgaggaggtggactccggcggcggtcgccggcggccgcggaggcggttccgcgtgccgttcgtgaggaagatcaagtgggggaagctgtggagctacgcggtgagctggtgcaggaagcccgagaacttcgccatgatcatctggctggcgttcgtcgccgccgggctgctgatgctgttcatgctcatgaccggcatgctcgactccgccatccccgacgacgagcagcggaagaagtggacggaggtgatcaaccagatcctcaacgcgctcttcaccatcatgtgcctgtaccagcaccccaagatcttccaccacctcgtgctgctcctccggtggcgccccggcgccggcgccgaccgcgaggagatccgcaaggtgtactgcaaggacggcgcgccgcggccgcacgaccgcgcgcacatgctcgtcgtggtggtgctgcctcacgccacctgcttggcgcagtacttctgctgcgctctcttctggagctacgcgcgcaaggaacggccggactgggctctcaacatcggctacggccttggcaccggctgccccgtcatcgccggcctctacgcggcgtacggcccgctgggacggaagcagcacgaggattccgacgaggagtcagcggcggcgcaggccggcggcggaaaccggccggcggagaacgaccgtgaggtggagatcaagatatacaaccggcgcgtggtggtgagcagcccggagtggagcggcgggctgttcgactgctgcgacgacgggacggtgtgcgcgctgtcggcgacgtgcacgttctgcgtgttcgggtggaacatggagcggctcgggttcggaaacatgtacgtgcacgccttcaccttcatcctgctctgcgtcgcgccgttcctcatcttcagcgtgacggcgctcaacgtccacgacgacgacatccgcgacaccgtcgtctccgtgggcgtgctcctgggcctctgcggcttcctctacggcggcttctggcggacgcagatgcggaagcggtacaagctcccggcctccggctgcgggtgcgggtgcgagtgcggcgccggcggacaggggcacgcgtgccgcgcggcggtgagcgactgcgccaagtggctcttctgctggagctgcgcgctggcgcaggaggtgcggacggccaacttctacgacgtggaggacgaccggttcgtgttccacggcgcccgcaacgaggacgggcgcgccgtgctggtgccgcttccgcgggaggcctccaccgccacggcgcactcgcggagcatgtcgtgcccgcccaagatcgacgccgtggcggcgctgagcggcgcgagcccgctgggcgtgcagatggcagccatcaacatggagaggtcggccacgtacagcggcgagcaccaccccgccgccatgcgtccgcctgtgcccccgctgatgcaaatggaccaggaatagtggcagcggcagcagcatgcgcgccctagctacaccgtggccatgtatacggtagtattaattctatgatacgtacggtagtattaattctatgatacgtataaggtcgtcgtctacacgtactgcaggttgtattagactattagctggtttttatacatacggattcgtttgtttgatagt

SEQ ID NO: 7205 - DNA, 2968 bp, Oryza sativa
  ref <308>: DATABASE ACCESSION NUMBER: AK064333
  ref <309>: DATABASE ENTRY DATE: 2001-12-06
aagagcccaagcaaaagcaaaagcccagaaagaaggaagggaaaccccacgcggaggcggagagcggagtggcggcgggatggactccacctacgccctccacctcgccgtcgccaccctcctcggcgcctccttcgccgccgcctccgcctactatatgcaccgcaagaccctcgaccagctcctccgcttcgcccgctcccttgaccgcgaccaccgccgccgcaaccgccacctcctcgacgccgacgacgacgatgacgacgaccctcccagagaccacgatcgccgcaccacccttcccatcccaccgggccttccgccacttcacaccggccgagaaggaaagccaattatctcaccagcttccaccaaaagagttggacctttggttagacctactacaccaagatcccctgttcctactgtcagtgcatttgaaactattgaagattcagatgacgatgatgagaatattgccccagatgccaaaaacaatgccgtttccttgctcacaaatggaactattggatcagatccccttccgggtaaagcaagtcagaatggggacacaaaaccagtaccatcaacaaacatgattagatctcaaagtgcaacaggcagtctgcatggggcccagcacaatccagttgcagctgatattcttcgaaaggaacctgaacatgagactttcagtaggatcaatataacagctgttgagactccatctcctgatgaaattgaagcatacaaggttcttcagaaatgtcttgagctacgagagaagtacatgtttagagaagaagttgctccatgggagaaggaaatcataactgatcctagtactccaaaacctaatcctaaccctttctattacgagcagcagactaaaactgaacatcattttgaaatggttgatggtgttattcatgtataccccaataaagacgctaaagaaagaatctatcctgttgctgatgctactaccttttttactgatatgcactatatccttcgtgtgttggctgctggggatattcgaactgtatgttataaacgtttaaatcttctagaacagaaattcaatcttcatttgatggtcaatgccgatagagaactacttgctcagaaagctgcaccccatcgggacttctacaatgtcaggaaggttgatactcatgttcatcactctgcatgcatgaatcagaagcatctgttgagatttatcaagtccaagttgaggaaagaacctgacgaggttgtgatttttagagatggtacctatttgactcttaaggaggtttttgagagtttggacttgactggttatgacctcaatgttgatctcttagatgtgcatgccgataaaagtacattccatcgctttgacaagttcaatttgaagtataatccttgtggccaatcccggctgagggagatctttcttaaacaggacaaccttattcaaggccgatttcttgctgaattgacaaaagaagtattttctgatcttgaagcaagtaaatatcagatggctgagtatagaatatctatctatgggagaaagaaaagtgagtgggatcagatggcaagctggatagtgaataatgaattgtacagcgagaatgttgtttggttaattcagattcctcggatatacaatgtatacagggagatgggaacaatcaattctttccagaacctccttgacaatatttttctgcctctttttgaagtaactgttgatcctgcttcacatcttcagctccatgttttcttgcaacaggtcgttgggctggatttagtggatgatgaaagcaaaccagagagacgcccaacaaaacacatgcctacacctgagcaatggactaatgttttcaatccagcatatgcatattatgtgtactattgttatgctaacttgtacacgctgaacaagcttcgtgagtccaagggtatgacaacaatcaaacttcgtccacactgtggggaggctggagatattgatcatcttgctgcagcatttcttacttctcataatattgctcacggggttaatttaaagaagtcccctgtcctccagtatctgtattacctagctcagattggtcttgccatgtctcctttgagcaacaactcattgtttattgattatcaccgaaaccctttcccaacatttttcctaagaggccttaacgtttctctatcaaccgatgaccctttgcaaattcacctgacaaaagaacctttggttgaagaatatagcatcgctgcttcgctgtggaagctaagttcatgcgacctatgtgaaattgctaggaattctgtgtaccagtctggtttctctcataggctcaagtcacactggattgggagaaactactacaaaagaggtcatgatggcaatgacattcaccagacaaatgttcctcacatcaggattgaattccgacacactatttggaaagaagaaatggagctaatacatctgaggaatgttgatataccggaagaaattgataggtgaagacctggcaagaattttgcaaaccctgaagttacttggttgttgatgatggtcctggaaggcaccccatcttcctaccataaactttccaggtacaaccaagaccgtgcggtttctacttgcttgcggaagggaggagaaagggatctaggatgattctacttttcgatgaatctccgtagcgtgttgcgttccctagtagtaggattttgataaaagaaattatgttaggactgaggccgtaccataaaataagaaagatttgagtcatggaatactggaagtttaaacatacgcatgcatcgggggtcatatagtccaaaataacaatggaaaattgataaaccccaactagccaagggtctagtgaggttgcacatgtgctgtatgctattactagtacacgcgtacatttatacatgtgatgccgttcgatacact

SEQ ID NO: 7206 - DNA, 1741 bp, Oryza sativa
  ref <308>: DATABASE ACCESSION NUMBER: AK064334
  ref <309>: DATABASE ENTRY DATE: 2001-12-06
atctcccatcttccccacgccaccaaaccccgagaacaagaaagctatataccatctctcatgcgagtaaataattaagtgagagctctctgtgtgcgtataagtagagatcgatcggtataatcgaggactacatgaggatggggctgcggacctgcagcgccatggaaggtgaggtcgtcgccgcctcgcctttcttcgagtggctcaagccaccgccgcggccggcgtcatcctcgtcgtggtcgtcgtctttctcctcgtcgtcctcgatggcttccagggatcaagaaacagtagtacctggtgaagatggcggaggtgaaattcaagaagatcataagagcggtatgacttgtttgccgctgctcagcatgctcgaggaggggaattcgaagaggcatgagcaccctgtgaaagaagagatcatgagcagtgcacacgcagccggggtagtggagcctggcgtggagttgaatatcggcttgccggttacaggatctagcgctcaggaggtcaccatggaggaggacgatgaggaggaggatgacgacgacgtaggggaggaggagatggacgagtggaagcctatgcatggcggttgcaaggtggagggggatgaagagcagtacggcgaggcggtggcgtcggtggaagggtcgagcagcatcaccgccgtgggggatatgttcggcggggtcggggcggagagcggcgtggcgatgagcagccggtattggatcccgacgccggcgcagatcctcgtcggcccggtgcagttcatctgccatgtctgtaacaaaaccttcaacagatacaacaacatgcagatgcacatgtgggggcacgggcgggagtaccgcaagggcccggagtcgctcaaggggacgcagacactggcgatgctgaagctgccgtgctactgctgcgcggcggggtgcaagaacaacgtcgcccacccgagggcgcggccgctcaaggacttccgcaccctgcagacgcactacaagcgcaagcacggcgccaagcccttccgctgccgccgctgcgccaagcccttcgccgtcaagggcgactggcgcacgcacgagaagaactgcggcaagcgctggttctgcgcctgcggctccgacttcaagcacaagcgctccctcaacgaccacgtccgctccttcggtgcccaccacctccccgtcgccgaatccgccgccgccgccgccaccacccccgccgacaaagaccgcatcataagcttccaacggtgagaaatatcgatcggtcgaggtcgacgatgatcgatcatgatgtgtaggctgcagttacctggttcgttactaagtctatgtatacgtgagcactgctgctcgcgtatatatctacttagtaagttaaccatgcaattgtccagcatatagacaacaagttaatcaaactatagctactagctagagagtaatgtatgctgatatgtgcatgcatccgtggggatttaggaggaaatttaagcagactattagcacacaataattaaggtggctttcagccggtgccgatcgaaagctgtgagcctgtgaagtagatgaattttcttctgccagagtgtgagctgtttagtgaggctatgtccccagctttgtatcggagaaaatttctcagcttcacaggctaattaaacaggtaatttggaacctattttaatttacatgcatttattaaacgattattgatcaatgagagagct

SEQ ID NO: 7207 - DNA, 1830 bp, Oryza sativa
  ref <308>: DATABASE ACCESSION NUMBER: AK064335
  ref <309>: DATABASE ENTRY DATE: 2001-12-06
aaaaccctaattacccccagcttcgccgccgccgtcgtcgccgtcgccactgcagcggcagccatgaagcagaggagggaggaggagaagaagaagaaggacatcctcgcgggctccgacaatgagtccgatggaggcggcggcgaggaggatctctccaagatccagatcaacgaggagtacgcccgccgcttcgagcacaacaagcggcgggaggcgctgcagcgcctggaggagcgcaagaagaagggcctcgtcccgccggaggaggaggaggaggaggacgacgacgacgacgagtccttgtcggacgacgatgacgccgccatcgcgtcccgccgcgtcgaccgccagatgttcgaggtcatccgccgcatccggcgcggcgacgccgccatcctcgacgcgaaggccaagatgtattcctcctcgtcggagagtgaacccggcgacgaggagggggagaagcccaagaagacgaagaaggagcggcccctgtacctcaaggacgtgaacgctcgccacctgctcgaggagggccccgagttcgcggcgcaggctagccatggcggccacagcagcagcaagtacgacaagatcgcctacgacgagcagcagaggaaggggctggaggctttccttgcggcggagaaggcggcattaggcaatggcgatggcgatggcggcgaggatgatgacgatttgttccaagtgaagccgaagggtggagatggtggtaacaaggaggatgatgacgaggagaagaaggagactgagcagatactgattgatattttcggcaaagacgaggagctggacgagaacagcaagttcctgaagaaattcttcctcgagaggccgtatctcgagacgggcagcgagaagaaatactctccggatgatatccaggaggtatcggacgaagaggagcatctcatagagcaggaggattatgagaccaggtataacttccggcatgaggaagcagccgcgactggtgcggatgtaatggacagggtgatggggcattcgcggtttgtcgaggggtctgtgaggaagaaggagagcagcaggaagcagcagcgcaagaacaaggaggagcggatagcacgggccaagcaggagcaggcagaggagttgaagcatttgaagaacttgaagaagaaagagatcgccgagaagcttgagaggatccggatgattgccggaattgatagcgatgcagcttgcaagctcggagccgatgacttggaggaggattttgatcctgaggagtatgacaggaaaatgaaggagacattcaatgacaattactatgaagcagatgatgttgatcctgaatttgggagtggtgaggaaattgatttggaaaaaccagactttgacaaagaagatgaactgcttgggctacccaaggactgggctcttgatgggcaagatggatcgtctgcagcagctgagggggcttctcagaaaaagaaaggtggaaaagatattgcaaatggtgaggggacaaatcagaaaatgaaaggaaaaatttctttgaaggacaaggtggagcttgagaaggagatggaagagtactacaagttagactatgaggacactattggagatctgaagactaggttcaagtataagcaagttaagccgaacagtttcggcctgagcacctatgagatattggcatcagatgacaaggatttgaaccagtatgtatccatgaagaagatagctccttacagggaggcagaatggaaggtgacgcatcataagaaactgatcaaggattcgatccttggaggacaggataaagaaggcaagaaggtc

SEQ ID NO: 7208 - DNA, 2123 bp, Oryza sativa
  ref <308>: DATABASE ACCESSION NUMBER: AK064336
  ref <309>: DATABASE ENTRY DATE: 2001-12-06
gagagagatacgcgacaaaacaaatccgcccccgagaaaaggaggccacgaaattacgagaatgccactcaacctcgcctcctctcccgccgccgccgccgccgccaaggtctgcgccggcgtgcgcgcgtccccgcgccacctcctcccccgcgctcttgaccaccagagccgccgcgtcctcagcttgtcgtcctcgtcgtcggcggggcgtgcggcgggtgtgcgggccatggccgcggcggaggccggtgcgtcgacggcgacacaggctaagtcgagcggagtcaaacaagcactgatatcattgtcggataaaacagacttggcctatcttgggaatggccttcaagccttggggttttctattatttcgactggtggcacagcatcaagcctggaagcagctggagttaatgttacaaaagttgaacaaattacaaattttcctgaaatgcttgatggtagagttaaaacattgcaccccagtgtacatggtggtattcttgcgagaagagaccaggagcatcatcttaaggcattgaatgagcatggtattgggacatttgatgtggttgtggtgaacttgtatccattctataacaaggtcacctctggtgtaatttctttcgaggatggcattgaaaacattgatatcggtggacctacgatgatccgagcagcagctaagaatcacaaggatgttcttgttatggtggatcatgaagattaccctgctctattagagtatctgcaaggaaaacaagatgaccagcaattccgcaagatgctagcatggaaagctttccaacatgtcgcttcttatgattcagctgtctcagaatggatgtggaagcaatcgaacaaaggagatgtattccccccgaacttcaccgtgcccctgtccctgaaatctacacttcgttatggtgaaaatcctcatcaaaaagctgccttctatggggacaagagtctttctgtagttaatgctggtggtattgcaacagcaattcagcaccatgggaaggaaatgtcttacaacaactacttagatgcggatgctgcatggaactgtgtatcagagtttgagagtcctacgtgtgttgtggttaagcacacaaatccatgtggagtagcatcccgacaggatattcttgaagcatacaggttggctgtaaagggagatcctgttagtgcatttggtgggatagttgctttcaatacgacaattgatgaggatcttgcaaaagaaatccgtgaattcaggagccctacagatggacagacgcgaatgttctacgagattgttgttgcacccggctatacagaaaagggtcttgagatcctcaaagggaaatcaaagacattgaggatactggaggcgaagagaagtggaaaagggatgctatcactcaggcaagtcagtggtggctggttggctcaagagtctgatgatctaacccctgaagatatcaccttcacaacagtgtccgagagagctcctcaagacagtgagctctctgatgccaaatttgcctggctttgtgtaaagcacgtaaagagtaacgccattgtgatagccaagaataactgcatgttaggcatgggaagtggccagccaaacagactggagagtctgagaattgctttcaggaaagcaggagaggaggccaaaggagctgctttggccagtgatgcattcttcccattcgcttggaacgacgccgtggaggaggcgtgccagaacggcatcggcgtgatcgcggagccgagcggcagcatgagggacggcgacgccgtcgactgctgcaacaagtacggcgtctccctcctcttcaccggcgtcaggcacttcaggcactgagctagctagcctcatgaaccttgatcttcctgcaaaaaaggaaaaaaaacatgggcatgtcagatcgatcgctctttctgtatcacaagagcatgcagatcgaccagcgtttgatcaccttgagaaaaactcttgacggcttgtactaggctgcctgccactggtgtgacagaatttgatcagcttgacattttgcaataagattcatggtgataataagattaggatgtctcgtactcaaaaaaaaaaaaaaaaaaag

SEQ ID NO: 7209 - DNA, 2301 bp, Oryza sativa
  ref <308>: DATABASE ACCESSION NUMBER: AK064337
  ref <309>: DATABASE ENTRY DATE: 2001-12-06
actttggtttgttggttggtgacgcgttgttgtttgttcctcaaatttgttctcctacgatcttcagttgtggtggtttttggccttttgcatttgcagctcgccggttcttccttcgtcgctgtcgcgtcagaagtcagagcagtgaaagaagcatccgtgcatgagcaatggaggccaacggcgtcatcccagatgtgatgatgccgtcgctcctcgccgacgtcgaggtgtcacacctcgccggcttcgatgtcacgccgagcccgcacgctgaacccagcccacgccctcagctccgccacgacaatccgtcccgctcccgggttccgccgctggaacgcgtgtcgcggcgcagcgaggttgtgttcccgccgctggactcgccgttccaggctccaggataccgatcggtgcagcccgtgtccatcagcctgccggcgtcgccgacaggcttcggcgtgcccgtggccctccccatcgccgtgggcgacgccggcgagccggccgacctccggaggcaggctatgtcgaacgcggcacgcgatgcggaagaacagcagctggcggcgcagggcaagggaagcaacaataacgttaggttcgtgcagccggacaaggtggtgttccggtcgcagccgatccctggcggcaagccggcacgccgcgcggcatcgaaccgcggcggccggatgatgtcccgggacaggcgctacgactcgttcaagacgtggtccgggaagcttgagcggcagctcacccatctggctggcgccgggccggaggtccccgaggaggaggaggacggctgcgacggcgacgccatcagcagccaccacaccaagtccatgcctcaggttgatcgcttcttcgccgcactggagggccccgaactggacaaactccggtcatcggaggagctggtgcttccgtcggacaaaacgtggccgttcctgctccggttcccggtgtcggcgttcggtatctgcctcgacgtgagcagccaggcgatcctgtggaagacggtggcgacgtcaacgccgacgagattccttcacgtcactaccaaggtgaacctggtgctctggtgcgtttccctcgcgctcatgtgcgtcatcgcggccatctacgcttgcaaggtggtcttcttcttcgaggccgtccgccgggagtattaccacccgatcagagtcaacttcttcttcgcgccgtggattgcctgcctcttcctcgccatcggcgtgccgccgtccgtcgcgacggagctgccacgctggctctggtacgcgctcatgacacctatcctctgcatggagctcaagatctacgggcagtggatgtccggcgggcagcggcggctgtccaaggtggcgaacccgtcgaaccacctgtcggtcgtcggcaacttcgtcggcgcgctgctcggcgcgtccatgggtctcaaggaggggcccgtcttcttcttctccgttgggctggcgcactacaccgtgctgttcgtgacgctgtaccagcggctgccgacgaacgagacgctgcccaaggagcttcacccggtgttcttcctgttcgtggcggcgccgagcgtggcgtgcatggcgtgggccaagatcaccggcgagttcggcctcgggtcaagggtcgcctacttcatcgccatgttcctgtacgcgtcgctcgccgtccggatcaacttcttcagggggttcaggttctcgctggcgtggtgggcgtacacgttcccgatgaccggcgccgccattgcgtccatccgctactccacggaggtggacaacgccttcaccaaggcgctctgcgtcgcgctctccgtgctggccatgctcaccgtgctggcgctcctggcgaccaccatcgtgcacggcttcgtgctccgcaacctcttccctaacgacatctccatcgccatcaccgagcgcaaggtcaaacccatcgtggagctgcatgagatgctcggcagcaatgacagcgccgccggtcgtagcaacgacgacatcgaggccggtgttgcggcagtcgaatcatcgtgatccgactaaaagcacacgctcagtacaacatgtacatgaatcgaggatgacacgagacaacgcatgactgttcttgcttgcctcgtggacttgcattgatctgtggcttagcatacgtggcatgctcactagacacaaagattgcctcgtggactcctggtgtaaatcaagaagaggaacctttaacttttcgattaagcttgcggctagatgttctgtacatttttcagataatggattataagaacctagt

SEQ ID NO: 7210 - DNA, 1477 bp, Oryza sativa
  ref <308>: DATABASE ACCESSION NUMBER: AK064338
  ref <309>: DATABASE ENTRY DATE: 2001-12-06
acgagaagatttccattaactccgccctcgtgtgttatctatccatccatccagccatccgtctcatcacccccacctcttcgctccgtcgcctcctctctctctctctcctcgccccgccgctttttagggtttttgttcgcgccgccccggtgagaggtagacgggtctccccggcgagatgggccacgtcgacgcatcggccgccgccgccgccgcgcgcgacgcgaagaagaagagggggaaccggtcgtcggcgaagctgaagcagtgcaagctcgacgcgcgccgcgagcagtggctttcgcaagtcaaggatggaaaggaggctaaggcatcgacttcgccgacaggtacagagccaaatgctgggtccatgaccgttccttcgccacaccctccgctccctcgccgtcgcttagatgtgaggtcgaagggaggggatccagaggaggacagggaggagaggggtgctgccaggcaggagttaggcagcagctatctggactctcctgtgcacagccctagctcggacaattctgggagcgttggcggcatgcacaggaagcattacaacaatggtggtggcctcaatctcagcagcagcagcagtgtatggtccagttcgagaagtgtgagcgaggccgaggatgatgatactggtggccctgaagaggagaatggggtcttggatgactgggaagctgttgctgatgcagatgcgcttacagttgatgattgtcattcccaccagagttcaggtcatgtggcgccaccagctgctccaaatgtttgtacagctcctgccaatcaaactggaaggcaagatcccattcagagaacaaaagcttgggcgcctgatgatatattccgtccacagagcttacccagcatctccaggcaggtcagcttcccagcaagcatcgggaacggctggatgggtgctgcacagcaggccaacctctctacgcctttgacatgtccaatatgctgcgaggatcttgacctgacagactcaagcttctgtccttgtccttgtaaattttgcctgtgtctcttctgccacaacaagatcctcgaagctgatggacgctgccctgggtgcaggaaggaatatgttgctgcgcggctatcccggtcttgtagcatgggtccaagatactaggttgtgccagggtttataatagctctctgtcgcaatttggtcctttgctgttgctgtcagatatgcgttttgtcttgtgttgtccctttttggtataaagaaatgtgaatattggataggtgctaaatccatatagaacgtctccagaaactcggtgtctgtttttagactgtttgcattgtatgtgatgcgtatgttgctggagaggactccttatcgttttgtgatatcatatatgatagctatataagatgaccttcgcagctacttatctacccatttatgagcaatgaagtacattgatctttgcgt

SEQ ID NO: 7211 - DNA, 1376 bp, Oryza sativa
  ref <308>: DATABASE ACCESSION NUMBER: AK064339
  ref <309>: DATABASE ENTRY DATE: 2001-12-06
ctctccgaaccagccgccgccgccgccgccgccgactgctcggcgatcatggtcggcgaccgaaagcgcccggctcccttcgccggattctccccgttcgctcgctccctcctcttctccgcctcctcctctaaaccactacctctccccggggatccacccgccgccgccgccgacgaaatcccttcaggaatcgccggctccagtcgcgatatgccgccgcccaagcgcgccaagcgggccgagccttccagcgacgaggagcgctacagcagtgacgacgagagctacagcagcgactccgacgacagcgacgacgcgtcggaggagctcgatacggtgcaagcggacttcgccttctacgaccccaagcccggcgacttccatggcgtcaagctgctgctcaagacctacctcgactccaagccgtgggatctcactggcttcgtcgacctcatccttgagcagaccacggtgggtacggttgtcaagattgctgacgatgaagaggatggtgaaggaaatggtgctgatggaagcagcactggtggcaatgacgatctgtttggtctcattagcgtgcttaatcttggaagatacagtgagcaccgctgtatgaaggatcttaaggattacctgcttgctgtttgtggtgacaaggataccaagaagaagctcaagcaaatgctgggggacaaagcacctgatgtgggtctgcttgtgtgccgccgttttgtgaatttcccatatgaacttgtgcccaagatgtatgaatcgttatttgacgaagtttcatgggccacagaagacgagccaacacaagaactccgggactccttccggttcaagcagtacctaatggttgtcagagtacttgagaggaaaactccagcaaagcaaaaggcaaagaacagtacagaagaggatgagcctattatctatcctaagttagaagacgaaatttttcgcgagctttcttcatggtcgttcactttcccaatacgttctgaacaatcggctcagcaagagatgaagaattacaaggagatgggcttagtgatggccgtcaaagctgaagcaattccgaagttccgaaagaagttggaggatctactatctgaatagttctctccacgcattgtaggtcgtgtggaattttgctgctgtccacatgatattggaacctccatatcttctcttgctattgcttgttagtgtccctagtaagcgcggacgctaagtttgtgagtgcaaagccctaattgaattgctagcattgccatagtagaagagaaattcatgtgtaagaggaaatcaattatgaacttcccttatactgatatcaagagattttgaaggacttttttggttgctcg

SEQ ID NO: 7212 - DNA, 1467 bp, Oryza sativa
  ref <308>: DATABASE ACCESSION NUMBER: AK064340
  ref <309>: DATABASE ENTRY DATE: 2001-12-06
aacccaacccgcaaatccccaaatcgaacccgccgcctcccaaaccctcgctctcccagccccaagaacctcgccgccgccgccgccgccttcggccaccggccaccgccgcctcccgaccggccgccatggcgcgaaacgaggagaaggctcagtccatgctgaaccgcttcatcacgatgaagcaggaggagaagcggaagccacgggagcggcggccgtacctcgcctccgagtgccgcgacctcgccgacgccgagcggtggcgctccgagatcctccgcgagatcggcgccaaggtcgccgagatccagaacgagggcctcggggagcaccgcctccgcgacctcaacgacgagatcaacaagctcctccgcgagcgcggccactgggagcgccgcatcgtcgagctcggcggccgcgaccactcccgcagctccaacgcgcccctcatgaccgacctcgacggcaacatcgtcgccatacccaacccctccggccgcggccccgggtaccgctacttcggcgccgccaagaagctccctggcgtccgtgagctcttcgacaagccacccgaggtccgtaagcggcggacccgctatgagatccacaagcgcatcaacgcagggtactacggttactacgacgacgaagacggcatgctagagcggctcgaggccgttgccgagaagcgcatgcgcaatgaggtcatcactgagtggcaccgtgtggagcgggtgcggcgggaggccatgaagggggtagtgagcggcgaggtggcctcggcaggtgggcgcggcggggaggctgctagggaggtgctgttcgaggaggtggaggaggaggttgaggaggagaggaggctggaggaggagaagagggagagagagaagggcgaggaggctgggaaggagtttatcgcgcatgtgccgctacccgatgagaaggagattgagcggatggtgttggagcggaagaagaaggagctgctgagcaagtacaccagcgacgccctgcaggttgagcaggaagaggccaaggagatgctcaatgtgcgccgctaggagagatggttggctattgttggaatcttcatgatctgaaacttcagcactgaagtacaacgaacacccatgcgatgctgacgctgaagcgcaggaaaacaaggaggagcccgttttgcagcgcattcatgaacgcagccctggcaaacatctgttgttaaagaaaaagcagggcttccctgtgttttatccattttatcactaaccttgatgagtggtgagtgatggcgaagcacttacatattcgtaatgtaaaccagagttctagtgcactgcatgcttttagtgtactctctaattactctttatagctgattagcttctaaaattttagttgtatactggagaatatgtacttcgtctgttttccggcttctatgatgtgcaagagaatccatgttat

SEQ ID NO: 7213 - DNA, 1632 bp, Oryza sativa
  ref <308>: DATABASE ACCESSION NUMBER: AK064341
  ref <309>: DATABASE ENTRY DATE: 2001-12-06
aacgcacggtgcacggcccacaatctgacaagcacccacccaccgatctgccccctcgctgctgacgtcatctccgccgccacccccgctcgccgccgacccatggagccaccgccgcggggaaccaagcgcccgctcccggccgacgccgacgccgacgccgacgccgccggcggagacgacgacgacggcgctcttcccggggagcgcaagccgcggttccccaaggggaagaaggccaagtaccgggaccccgccgcagccgccgcggcggagggcatcgacggcttgataaaccccgagctcgcggcggagcggcgcgcgaggcgacgccaccgcaaggacgaggattcgaagtgcgatacgaggatagtgcaaatttggttgatgatggcattcgactagagccttttaacttggaacaagagagggaggaaggatattttgacgaaaacggaaactttgtggagtacgcaaggggcaacgacatcaaggatgcctggttggatagtgttgaagttgacacaaagtatgctgaaaaggttcaaaagaagagagagaaagagaaagaagaggagttccaggatctttcatccgatgatattggaaagataaaaagaagaatatcaaacatacttgagccaggcgaaacgataatacaagctttgaaaagattgaagaatacatccagtgataagcgtggcaagatgactgaggggaccaaacgtatctttgatgagttgacagaagctgccatgaagctaatggagaacggagagtataatgtttattcagatgatcgggagacttttgaacgtgaggctgcgggttatgaacgtctggcacgtgctcgtcttggtctgccagaagctgaagaagatatgtttgcagacagtccaaaagataaaaccactgcctcgttactggatatggagcctggtccttcagctgcccatacctctacaaccaccaccacatctaaggaagatgacagtgactttgacatgtttggtgacgatgatgacaagaccgatgtcaaacgtgattctgatgcaaatgctgtaggttcaggttcgaatcctgaacaagtatctcacgatgctaatgaaacctcaggtgcagagaaaggtgagaatggaagtgtgagctcagattatgtttatgatccaacttcaggttattactatagcagtagcacgggctattactatgattctacatctggatgttattgctctgcatctacaggagcctggtactcgtatgacgaacaaactggcgaatacaaagagatacagtctgaacaagccagcacggtcaatgaaacaccgggagatggcatcaaagagtagcccgagtacttgtaattggctctctcaagttagcttgtttattacacagtgggatgtagcttcagtttttcggtagaggggcattcgaatctcacttttgtttgtacaagtacggggagaatgaaaggctgtcttactaccataggattttatttagatatagagcagaatgatccgctgagtgcaacccttacgcccacttctttattttgcattgccccatggtccatttccctgtacaaatctgtgacatgtaatattccctgccatgttcagcttc

SEQ ID NO: 7214 - DNA, 2522 bp, Oryza sativa
  ref <308>: DATABASE ACCESSION NUMBER: AK064342
  ref <309>: DATABASE ENTRY DATE: 2001-12-06
ctcttccacgcttcggcttccatccaatcatctgcatcgtcgtcgccggcgagcgccatgaggccgacctcccgcatactggccgcgggccacctcctccgcggctcacgctcacgctacgacccctcgccggtcgccgctgccgcccccatattccggcggccgccgaccgtgccgaggcctctcccgagccctctgctcggaggcttcgggccgaattgttgggtttatcccggcgacgggaagtatgccccctttggtcgcctcagctgcttcatgtcggactccacctacccgccgcctccccgcgatgtgagaggacatgcattttccacatctgccaatgctgtggcagttgggaaatcatctgatgacaaagtgaagaaagatatctccaaaaaggatgttgatgatcagatagcagatacacagatactgaaaaaccttgggaaatacttattgttgaatgatagcccggatatccgcttcaggcttatattgtcattgggcctcttagttggggcaaaggttataaatgttcaagtgcctttcttgtttaagcttgctgtcgattggcttgcagcccttgctggtgctgaaacttcacttgcatcattcacagaggctaatgctaccctattggctctctttgcaagcccagcagctgttctgattggatatggaattgcacgatcgggagtatcagcctgtacagaactgcgaaatgctgtcttttctaaagtgacattgagagccatccgttcagtctccagtacggtattttcgcacttgcatgagcttgatcttcgttatcatctaagccggcaaactggtgccctaaatcgcataattgatcgaggtagtcgtgcgataaattacatccttacagtgatggtgttcaatgttgttcccacaatattggagattggtatggtgtcaagtatacttgcatacaaatttggttccacctttgcttggattacttcagtttctgttgctacttatattgctttcaccttggctgtgacgcagtggcggaccaaattcaggacagccatgaataaagctgataacgcttctagcacagtggcagttgactcccttctgaactatgagactgtcaagtacttcaacaatgaacaatttgaagttgagaagtatgacaaatatttaaagaagtatgaggatgctgcactgaaaacccaaagtagccttgcctacctgaactttggacaaaatatcatatttagctcggctttatccacggctatggttttgagttcatacggtgtaatgagtggtgctctgactgtcggtgatttggttatggttaatggtcttctattccaactttctttgcctctgaacttccttggaagtgtctatcgagaatctaggcaaagcctgattgacatgaagtctatgtttcaattgcttgaggaaaaacctggaataaaggatgaaccacatgcacagcctttgcagttcaagggaggacgcattgaatttgagaacgtgcattttgggtacgtaccagaaaggaagattcttaagggtgccacgttcactgtacctgcaggaaagagtgttgcaatcgttggaactagtggcagcggaaagtcaaccatacttaggcttctcttcagattttttgactcctcttcaggatctattcgaatagatgggcaagatatccgagaggtgacactggatagtctccggaagtgtattggtgttgtaccgcaagatacggtactttttaatgacacaattaagcataatatacaatatgggcggttatcagcaacagatgaggaggtttatgacgttgcccgccgggctgctattcatgatacaattatgaactttcctgacaagtacaacacagttgtgggagagcgaggattaaagttaagcggtggggagaaacaacgagtatcaattgctcgtgtattcttgaaggaaccttccattctattgtgtgatgaagctacaagcgctcttgatagcaccaccgaagcgtcaattttaaattctctgaagactttgtccgttgaccgtacctctatctttattgcacatcgactgacaactgcaatgcaatgtgatgagattattgttttggagaatggggaggtagtggaacaaggaccacatgattttctgctgtcaaagggtggccgatatgctgaattgtggtcacagcagaataacagtgatgccatcgatgctgccgcggttagcttagaggtttcatagactatatacataattcccttttgcaagggaaaatgcaaaccatatttgaatgaaagaaggcttccccatatctgcattgtaaattgaatggttaggtttttagatatcggggaacagaaatttatagcttaggagcaaataactccgtttgaaagaaagccaggaggcaaaattttcctctttgaggaaacacccaacagttcgacatgtttccatgatgtaagcattttttttactaatccaagtaaatattttttcccact

SEQ ID NO: 7215 - DNA, 1702 bp, Oryza sativa
  ref <308>: DATABASE ACCESSION NUMBER: AK064343
  ref <309>: DATABASE ENTRY DATE: 2001-12-06
atcgcagcagccaacaatccacaaaagcctagccatccgctcacccccttcgcttcggtgactctctccccatctccttcccctaggccgccgctatgaaacctccggtcgccatggattctgccggaggaaactcaggcaagctgttcgacgaaatgcctccccgttcgtcgggtcgaggatgcccccggagcccgtcaccggcggcgatggaacacggcttcgacagacactgtgtggtgctcggcggaatgcccaagaagagatcaaggttggagttgggcgcgggggtgtcactgtgggcaggccttcaaccggacattctgggaatcgtgctccacttccttccatgccttgccgaccgtgcgaggatgcggtccgtgtgccgtcactggcgagccagcgcgaacggccacgtcctgccaccgccgctgcccctgctgatgcttcctggtttcaagctctcgagcctatcagacaagggggatttgatgcctgtgcggtgcgtgccggtgcctaaggaagttgcagctgatgatctccgatgtgtgggttattttgatggatggcttgtaggtgtgactcctaacaaggatcgcagcgacgagtacaacagagatgccgatggtgactgcttcctggtgaatgttttctctcgcaaggtcatccgcctaccgcagctgtgccatatgcgttacaattttcctgcttactccagtaagaccctccgcatcatcaatggttctggtgaggtctattttcgtgtcaatgatatatacacaatgtcactatgcaatgtggcactatctgcttcacctgactcaagaggcaagtacattgtagctgcttcctctgaccacaagtgtgcatcaaaacttgctctctggcagcctgggatgatttcatggcatatttgcgctggcgttgacattgatggcccaagagatctcactttttaccttgggaagctgtatgtgctccaaagatataagatacgcctctttgcttttgaagttggggaggacaatggtgggctcatggtctctcgcgttaagcgttgtctgagtgcgctgcctctccatcatccctaccagggaggtggtgcaataagttgcaatatggttgtgtggcgtggagagctattattaatcatcagacactacagcgacaattaccgtgaccgagaagttcttaaagttgaagtgtttgcactggatgttaacacaaacccttatggactaactgagattcacagcttgaatggtgactgtatctttgttggcttaggtggctgcaagtcctttcctgctggtctacatcatggagttgaaggtgaccatatctactttgtccctgatgattggaagccttatgatacatttgtgtatagcatgagagatggtaagatgaggtcctttgccgtcaaactattagcttccgactttgatgtggaccagttgagtcgtgatttcccggtgtggttacttcctaccgaatgatgctgcacagcaaaactgatctaactggttgttttgtgccgctagttgctcttatcaagacagagcttacttgtcattagactctttggtcatgactataacatgtataatctgctatgctcttgtcacaattctcagatttttctttctttccgaaaaatattaatatggaaggttctacttcaacatttaactcttttagc

SEQ ID NO: 7216 - DNA, 1355 bp, Oryza sativa
  ref <308>: DATABASE ACCESSION NUMBER: AK064344
  ref <309>: DATABASE ENTRY DATE: 2001-12-06
gtctcaaaaaaaaaaagctctctttgttcttcgtcagagagagtccacgggttgacagttccactcctgctctcttggaggcttggagatcaatcgatggagcacgtccagatcccgagagtgaagctgggaacccagggcctcgaggtgtccaagctcgggttcgggtgcatgggcctcaccggcgtctacaatgcgccggtcgccgaggaagacggcgtcgccgtcgtcaggcgagcgttcgaggccggcgtcaccttcttcgacacctccgatgcctacggcccgcacaccaacgaagtccttctggggaaggcactgaagcaactacctcgtgagaaggtacaagtggccaccaagttcggcattgcaggatttgatgccaatggcatgcttgtgaagggcactccggattatgtgcgtgcatgctgtgaagcaagccttgagcgccttgctgttgactacattgatctgtactatcagcatcgcattgaccagtcagtacccatagaggaaactatgggagaactaaagaagttggtggaagaaggtaaagttaaatttgttggcttatctgaggccagtgctgataccattagacgagcacatgcagtttacccaatcaccgcagtgcagatggagtggtctctatggaccagggatatagaggaagaaataatcccgctgtgcagggagcttggcattggaattgttccatatagcccaattggccgtggcttctttgctggcagggctgctgtacagagcataccatctgagagttggctgactagacatccaaggtacaatggggaaaacttggagaagaataaagttttctacacacgaattgaagagcttgccaccaagtatggctgctcccctgctcaacttgctctctcctgggttcttcatcaaggggatgatgttgttccaatccctggcacaacaaaagtgaagaaccttgatgataacattggtgctgtaaaggtaaagctgagcaaggaagacctgaaagaaatctcagctgctgtccctgctggcgaggtggctgggtccagacttattggagtactggagccttattcttggagggttgcaaacactccacctccaaaatcattgtaaatattaagatgcaaattaaaatatactctagctatgctatgttttatttctttctagccccattggatacttattcaaggcttaatttgaacaaactatgtttgtccatgcccaagaaaagattgtgtattttgggcaacagatgttattggtgttgtactgctgtgtgcaatgtagtgattgctttacgttatcaaaaaaatatatgtcatattgatgttaaactc

SEQ ID NO: 7217 - DNA, 1631 bp, Oryza sativa
  ref <308>: DATABASE ACCESSION NUMBER: AK064345
  ref <309>: DATABASE ENTRY DATE: 2001-12-06
agattttttccgttcgctctccctcctcctcctcctcgtctccgccgatcgaaggaaaacaaaaagctagggtttagctgcctctctcgctcgccatcgctcgcggcgactcgctgctagggtttttgggtctctctctctctctccaccggcgatggatgcggcggcgctcgacgacttgatccggcggctcctggacgcccgcggcggccgcacggcgcgccccgcgcagctcgccgacgcggagatccgcaagctctgcgccgccgccaaggacgtcttcctctcccagcccaacctcctcgagctcgaggcccccatcaaaatctgcggagatatccatggccagtattctgatcttcttcggttatttgagtatgggggcttcccaccagaggcaaactacttgtttctaggtgattatgttgaccgtgggaaacagagtatagaaactatatgtcttctccttgcgtataagattaagtacccagagaacttcttcctccttaggggaaaccatgagtgcgcatctatcaaccgaatctacggattctttgatgaatgcaaaaggaggtttaatgttcgtatttggaaggtttttactgattgtttcaactgcctccctgtggctgcacttattgatgacaagatcctatgcatgcatgggggtttatctcctgacctaaagaacatggaccagattcgcaacattgcccgcccagttgatgttccagaccatggtctcctgtgtgatctgttgtggtcagacccagataaagaaatcgaaggttggggtgagaatgacaggggtgtatcatacacttttggagctgataaggtcgctgagtttctccagacacatgatctagatctgatctgcagggctcaccaggttgtggaggatggctatgaattctttgctaagcgccagcttgtaaccatattctctgcacccaactattgtggcgagtttgacaatgcgggggcgatgatgagcattgatgattctcttacatgctcattccagatccttaagccttctgataagaaaggaaaagcaggaaccggaaatatgtcaaaacctggaactccaccaaggaagataaaaattaatattatttaggcagattcccactaatgtgaactgagaaattgtgatggagtactcctccaaacttgttattggaagatttttggtgcgcatgacactgttgaaaaatgtcgacctgcgtacctttgtgttttcactgtctgatgcaaatctgtcctgccgttattcctgctgaaaagaagatcatacttcggctgttcggcaaaaaccatacttggaagccttctttaacatggattacttatttcttcttgatctgctacataagtcagaaaccagaatatctgtcaatgggtaggcatagggaaactactagtctcatgtagattttgttcaatgctgtatgccattcacctgtaaagtgtgcctttgaaagggactgactgattagctgaagtcttttactgatgctgattgcatagaatggtaactttttacccagcagctgatagttaagtgtctttatctatgtgataggtgctttgtcattgccattttaaacaagcattttggtaagctt

SEQ ID NO: 7218 - DNA, 1662 bp, Oryza sativa
  ref <308>: DATABASE ACCESSION NUMBER: AK064346
  ref <309>: DATABASE ENTRY DATE: 2001-12-06
agctcatcgcccattcgccctcgcgccgcgccgcgccgcccgccgccgcctcgccttgcctcctccgccgccaccggcgctagagccgacgctgctgcagcggagagtgcggtgccctcctcctcctcctcccccgcgcgcgcggcggcggcggcgggggtttccggagttaatgcgcccgtgaagaggcggccgcgtcggctgcagcggagagagggagagggagagtagagtcttttgtgcgggtggttggggcgtgggcggtggcgtgttcaaggcggggagctacgtttcctgccggaggagatggggggttccaaggcggaggagaagcccgccggcggcggcggcggcggcgaggactggtggtgctaccagttcggcaacaaggacgcattgattgtgaagtcctctaagaaatcacccctcgcattgagaatggttgttttcgctatgactatgatctgcgggatatttatctgcacgatgtgtatgaagcaactaggaagtgatagcttgtctagaatagtgaagatcgaggttgcagaacagctatgcaataagtctgcaatcctgcattcagaggttcactttgtgcattacccacaaccgataacttatagcaggagtgaatgcaagtgtacacctgtccggttcttcgcgattatctcgtcacaacgttctggaagtggctggtttgaaactcttcttaacagccatatgaatgttagctccaatggtgaaattttctcttcaaaagaaaggagaagtaacatttcatctataacaaagacactggataaggtgtacaatttggattggaatagtagtgcttctaagaatgaatgcactgctgctgttggcttaaaatggatgcttaatcagggtcttgtggcaaatcatgctgatatagctgactacttcaatcgaagaggagtctctgcaatatttctcttcaggtggaacctcctccgtcagttggtatctcaacttgcgaataatcatgacagatacctcaagcagttgaatggaacgcacaaggcccatgttcacacggcatatgaggccagtatacttgcaagatataagcccagactcaacacaacatcattaatacggagtctgaaacaagtagatgattacacccgtgatgctcttgaaaatctaaagagtatcaaccacattactatctactatgaggatctcatccgaaatagaacaaaacttcttgatgtcctggatttcctcaaagtgccaaggagcaaactagtagccgacacgtgaagatacacaccaaaccactttcggagcaaattgaaaattgggatgaagtctacaatgctctaaatggcactcagtatgagagcttcttgaatgctgactacagaatatgacagtgtgccttcacactccctgtatagatatatcctttttctggttacatttctttttaaaatagctggccttgatgtgcctggcgaaaattttgatggtgcattgccacggttgcccacgagtgttctttgataggttcactaattgtcatagcagggttttgttttttgttttatgttttctgtaactgatatgctcaggattctaatcttgtgtattgcagtgcttattcttctcccatgttaatgatatgcatgtttccagctc

SEQ ID NO: 7219 - DNA, 1437 bp, Oryza sativa
  ref <308>: DATABASE ACCESSION NUMBER: AK064347
  ref <309>: DATABASE ENTRY DATE: 2001-12-06
aagattgcggccgccggcgacggcgagggcgacgaggctggcgaggcgtggaagcaggcaagagattcgctcccgctgctagctcgccgcggccctccgcgcccacttcctccttccccgccgccgacccgccgcccgcggcgtctgcactctgcactctgcagcagcaatgaagatagagaaaacaaatgcaggatttctaacaaactttgaagtgcttgacttcttacgatctagaggtgctaaaaccgatcccatgggatgtttgggtgctgttgctgcatcagagtgtaaggtatatgagtaccttctaaaaactcctgcttgcaaccagacaagggaatcaattaacgaatttgtgacaagatgtgagagcttcaagcttacaaatgctgacaagctaaatgtaatcaattggagaccatcctcggctgctgatgcctatgcgcagaatgaggggatactcagggcaattatccaaatatggggccaagactgcaaataaatccgactctttgcagtaatgcgtgattcaagaagctggctctattcaacaatcttcttatggcaaacacttgattcacaccattaagctctatgatctggatttctatactatgccttttatacatgcgtgcatcttaatggacttttgaattttctttgcaataattgacaaatggagattagttcggataggctgaatttctatgttttatgttttctatacatagatgaatatcaagtaagttttggattttccttgcaataattaacaatgtaaattagtttagacaaactgcgctctctggtgtggcatgtccttgcaaatcccacaatttctcgcacagagacaattatgggaatagctgtttaggtttgtgtcacaatcaacgaatctgaattttctgttcagagaatttgagtgaatagttctatgttacatatgtgagtaaccttttgtaataaggaatttgttgagtaaccgtggtctgggtctacctgcttgtgttgccttgatattttctttaggtgtagatctccctaatctatttgacatattggttcctttgaacactgcagatgatagaagagtgcggtaaacgattttcgaaggatgagcggggagaagcatgcaatgaagatgaacgagttgaggaattcttggagctagtgaaggaggcttttccaccaccacctccaaagccagaggcaatgatagagtgagcgtggtataactgtagaagaatatctgaattttcgccatgagatgcatattcaattgttcctgtagcttgtcttctagagtcatgttgctcatagagacactaggggtttggtagccatgtacctaccttgttggaggcatctatatattagaattagaaacagttgttaacatcggagcttcaatgacagtatgaaaactttgaatcc

SEQ ID NO: 7220 - DNA, 1746 bp, Oryza sativa
  ref <308>: DATABASE ACCESSION NUMBER: AK064348
  ref <309>: DATABASE ENTRY DATE: 2001-12-06
cacgcgcacacctacacttctcccccgcattctctcacccacccacaccgcgcgccacagatctcgccgcagccatggccgccgccgcgcgccgcctcctcctcctcgccatcgccgtcgcggcggtgtccctcgcgccccgcgccgcggcggaaatcaggacggaggccttccgtgaggacccgagacccaccatcctgttcgagaagttcgggttctccaagacgggcgcggtcaggatcgtcatcaccggcgccggcatctcctcgacgttcgcccgcccggaccccaagcagctcgggttcttcctcctctccgacgagtcgatgttccaggccatctacgaggcgcaggcgcggcggccgccggagaggcgggaggaggtggcgggcggcggcgccgacgagcccgacatctcccgctgcatcctcacgagcccctacgtcaagacgctcttcaccttccacgacctcaagcgcggccactacaacaagacgttcccggtcacccaccccgacgagtacagcctctacttcgccaactgcgcgccggagtcgctcgtcaccatgagggtgcgcaccgagatgtacaacggaaacgccgacggctccgtcgactacctccccgtcggccaggcgcccgtgccggcgatctacggcttcttcgccgcctgctacgccgcgttcctcgccgcctgggggtacctcacgctctcctcccgcgaccaccgcgccgcggcgcaccagatccaccacctcatgtcgggcctcctcgccgcgcgcctgctctactgcctctccgccgccgaggaccagcactacatccgcgtcacggggacgccgcacggctgggacgtcgcgttctacctcttccagctcgtcaagggcgtcgtcctgttcgcggtgatcgtgctcgtcggcacggggtggtcgttcctcaggccggtcttgcaggacagggagaagaaggtgctcatggtggtgatcccgctgcaggtcatggccaacatcgcgtccgccgtgattggggagaccggcccgttcttgcaagggtgggtgacatggaaccagatcttgctgttcgtcgacgtcgcctgctgctgcgccgtgctcttcccggtcgtctggtcgatgcgatcgctccgggagacgtccaagactgatggcaaggcagcgcggactctatcgaagctcaccctgttccggcaattctacattgtggtgatcggttacctatacttcactaggatcgtcgtgtatgcgctcaagaccattgccagttaccagttccggtgggtgagcgtcttggccgaggaggtggccacattggcattctacctcttcatgttctacacattcagaccggccgagaggagcagatacttttcgttcgacgaagatgaggaggaggctgctgagatggtgctccgggaagaggaattcgagctttgatgagttgcggcgattcgcagcaatggcggctgcctggcaattggaaaatctgctcaccttgttcatttgatctcttctccctgtgagatttagcacaccatacaaatttcaggaatatagctcattgtcttgtatttactacagggatgtaagattgttttgttcctctctccttgtagcttcaaattttactgatgagactcaggatactaaactggacatgtacaagaaggtttcttgcttggagggcaatgtggaaggaaggaattaattcagcatgtactattgcttaggg

SEQ ID NO: 7221 - DNA, 1837 bp, Oryza sativa
  ref <308>: DATABASE ACCESSION NUMBER: AK064349
  ref <309>: DATABASE ENTRY DATE: 2001-12-06
aaaacagagcagagcaggttgtgagccagcactgcatcagcatgatgagcagtcgtcttctcaaacgcgcctgcctcctcctcctcgtctcgtcatggctatgctccctctccgacgccaagaggaagacgccaccctcgccgccgccgccgccctcctcctttggcctccccgtccgggcggtgtgcctcggtggctggctcgtcacggagggctggatcctcccctccctcttcgacgccatccctaacaaggacctcctggacggcgcgcagctgcagctcaaggccgtggcggcgggcgcgtacctcaccgccgccgaccagggcggcgccgcggcggtcgtcgccaaccggacgcaggcggcaccctccgcctcggagaccttcaagctgtggcggatcaacgagacgacgttcaactttcgggcgtcgagcggccggttcgtcggcgccgggagcgacggcggcgcggcggtggtggcggtggccgccgcgccggggccgtcggagacgttccaggtggtgcgcgacgacggcgacaagagccgggtgcggattagggcgccaaatgggcacttcttgcagatagcattgggatctaactcagtgacagcagattactacggtgaaagcacaagttggggagacgatgacccatcagtatttgtagtaacaaaagttttggagctgcagggagagtaccagatttgcaatggctatggtacagccaaggctacaccaatactcaggaatcattggagcacatacatagtcgaagacgacttcaagttcatctcagcaagcgggttaacagcagtgcgaattccagttggatggtggattgcgagtgatcccaatcctccggctccatatgtcggaggatccctgcaaaccttggacaatgccttcaagtgggcagagaagtacaagctgggcgttattattgatctccatgcggctcccgggtcgcagaacccatgggagcatagctcatccagagatggcacgcaggagtggggaacatctgatgctaacatcgcagagacagtgcaagtgatcgacttcctcgcatccaggtacgcaaagagcccaagcctcctggcagtggagctgatgaatgaaccgtttgcaccccgtgccaccttggagagtctgatgaagtactaccatgatggatacaacgccgtcaggaaatactcatcgacggcttacgtcatcatgtcgaaccgtctgggaccgcatgatccaactgagtttcttcaatttgccaacggcttcccccgtgccgtcatcgatgtgcactaccacacggtgttcaatgacctgttcaataacctgactgtgcagcagaacattgattttatcaaatcaaacttctcaagtgagctaaaaaatgtcacaacacaaaatggccctctcacctttgtgggagaatgggtggctgagtggagagtacccaatgcaacaaaggaagagtaccagagatatgcaaaggtgcagatggatgtttatgggcaggccacctttggatggtcctattggactctcaagaatgttaacaaccactggaatctagagtggatgatcaacaatggctacatctccttgaaaacctaacaactgacatgcctctagctgccattgttacgaggtactggctccgtcccaaaatataacaatctaatagacatagattagactttttctattaataaaaatctggatagaaagtatgcccagatttattataatataatatatctgggttgttatattctcgaatggagtagccaaattttttgagacgaataaattgggccacatagatcagtgag

SEQ ID NO: 7222 - DNA, 1840 bp, Oryza sativa
  ref <308>: DATABASE ACCESSION NUMBER: AK064350
  ref <309>: DATABASE ENTRY DATE: 2001-12-06
ctctcagctccctccatctctctctcccctctctctctctctctctctctctctgatctgcagagccggagcccggaggcgcggctgcggctgccaagcctcctcctcctcctccagcgcgcggccagcgagcagcctcggaggccaccgccgccgcctcctcgcccggacggcgggggagcgggcggtgctccgtccagcggagcgagcccccccaatcttggccggaatcggattgaaggatcttgcgttagttactgtgctgttcgctggatgctggcaatggggtcagaggagtgggagttgtatccatcttccttcattggtgctcaggtcatagattatgggcatgtttctggagacatggatgatgatcagagtggagacttggccgtgtcgatggacgccgttctccctgatgatcttttagaaaaggtcctctccttcttgcctgttgcaagtgtcataagatctggatctgtttgcaagagatggcatgagattgtgcatgcccggaggcagacatggagcaaaatggtgcctcagaagccttggtacttcatgtttacctgcagcgaggaagcggtctcggggttcacctatgacccgagcctgcgtaagtggtatggattcgacttcccttgcattgagaagaccacctggtcgatttcctcatcgtccgggttggtgtgtctgatggacagtgaggataggagccgcatcatcgtgtgcaacccaataactaaggactggaagaggcttgttgatgctcctggtggcaagtcggctgattacagtgctctcgccatttctgtgaccaggacctctcatcagtacatggtggctgttgcaaggtgcaaccaggtgccatcagagtattatcaatgggagttcaccatccatttgtacgagtcagagatgaatacatgggtgtctcccttcactgaactattgattggatggcgaggaggtgatgagtgcgtgatctgtgatggggtcctctactatctggtgtactcaacaggagttttggtgaataacaacgagcatcgccattgtcttctcatgtatgacctatctaccaggcctactcacacttctttgatgagcatggctataccagtgccgtgccctcttacatgtggccgtttgatgaacctcaatgagaggcttgtcttggttgggggcattggcaagcaagataggcctggtatcatcaagggaattggcatctgggagctccggaacaaggagtggtatgaggttgctcgaatgcctcacaagtttttccaaggatttggcgagttcgatgatgtttttgcaagctgtggggcggatgaccttatctatattcagagctatgggtcaccggccctcctcacatttgaattaaaccagaagctgtggaaatggtcactgaagagccctgtgacgaagaggtttcctctgcagctgtttactggtttctcttttgagcctaggctggacattgcttcctagttttattttgtttcacttccacgggaattcttgcattatttgcctggtttggagttaccaagtgaagagatgatgtcattggaagccattcgagaaagtgtttcaggttttatagatctattctatttattgctgagtatatcttctaattgaaagggcgtctaaacttccctgtttcatttttgttgatttgatggttggataatagagggagggatgatgccatacacaagaacaattcttgctgaattgtgttttctttattcttatgttgcctgcaaacaaagtgccacttcagatgtcccaaacctaaaagattgttactttcttgatttatagt

SEQ ID NO: 7223 - DNA, 1725 bp, Oryza sativa
  ref <308>: DATABASE ACCESSION NUMBER: AK064351
  ref <309>: DATABASE ENTRY DATE: 2001-12-06
acagccatgtcctccgccggccacgccgtcgaccagcagcgcaaatccaccacgatgaaggcgcacttcgtgctggtcccgatgatggcgcagggacacatgatccccatgaccggcatggcccgcctgctggccgagcatggcgcgcaggtcagctttgtcaccactccggtgaacgccgccaggatggcaggattcgtcaccgctgtggaggcggctggcctggcagtgcagctggtgaagctccccttcccggccaccgagtttgggttgccggacgggtgcgaaaacctggatatgatccagtccagggatctcagccgaaacttcatggaggcctgcggagcgctccgggagccgctcacggcgaggctccgtcagctatgcccacctccaagctgcatcatatctgacatggtgcagtggtggaccggtgaaattgcaagggagctcggtatcccaaggctaacatttgatggcttctgtaccttcgcctcccttgccaggtatatcattttccgcgacaaactgttggacaatgtcgcagatgaggagatcgtcactttctcagggttccctatgctgcttgagttgccaaaggctagatgccctggaagcttgtgtgttccaggtatggaacaaattcgtgataagatgtatgaggaggagctgcaaagcgatggcaatgtaatgaacagcttccaggagctggagactctgtacatcgagtcctttgaacagataacaggtaagaaggtctggacaatcggcccaatgtgcctctgtgacagagacagcaacatgatggctgctagaggaaacaaggcatcagtggatgaggcaaagtgcttgcaatggcttgattcaaagaagcctggttcagtgatctttgtcagctttggcagcctcgccagcaccgcacctcagcagcttgttgagctgggactggggcttgaagcttccaaggagcctttcatctgggtgatcaaagcaggaaataagtttccagaagttgaggaatggcttgcagatgggttcgaggaacgcgttaaagacagaggcatgataataaggggctgggcaccacaggtgatgatcctatggcaccaggccattggagggttcatgacacactgtgggtggaactcaacaatagagggcatttgcgcgggcgtgcccatgatcacatggccacatttcgcagagcagtttttgaatgagaaatttgtggtgaatctgctgaaaattgggctggagattggagtgaaaggagtggcacaatggggaagtgaacataaagaagttagggtgacaaggaatgctgtggagacagcagtgtccacattgatgaatgatggagaagctgcacaggagatgaggatgagagcaaaagacttgggtgtaaaggcaaggagggctttggaagagggaggttcttcctatgataacataagcctattgattcaagaaatgggaaacaagcaaaatgcatctggttgatacagatgggaataagcattttttttaatcatgatgagcatgaagtggaggacctatcatacttatatcttcataaagtatggaagatgtccacatttggttattcaactatggatttggcctgaatttcatccctctaactataaaggattgtgttttacaaatgaccagtatgttgtgtggtatgattctatggtttaaaataaacctggtctaaattgcatc

SEQ ID NO: 7224 - DNA, 1402 bp, Oryza sativa
  ref <308>: DATABASE ACCESSION NUMBER: AK064352
  ref <309>: DATABASE ENTRY DATE: 2001-12-06
aaggctccctcacgcacccacctggctggtcacctcccttcttccgctgccctcctcttccttccttccttcctccctccctccctccccgacgactgcccccgccccctcccggcctcgtcgcgagggtggatagccgccaccgccgccagatcctacgggcagagggccagaatgcccgcgcagaagcgccggctctcgtcgtcgccgtcttcgtgacagagttcttaggaggactccattctcagatgggttattcaccccttcacttctttacgatagggcaatatggccatcaggaaatgctagtgccaggcaaaattcagcaatcatgcaaaggactaattcagagagaaattctgaactgcaattggattcttcaaccgactctgcaactctaagagaggccaataatcgggatctactggagcgcagatcagcttttcttgagaggaggaggatacgatctcaggtccgagctctccaaagattgggcagcaggtatgaaaatctatcaggactatcaggacatgagagatcatgcatactatctggtcagcatagaacgggaaattgtaattgcagaacgagcagtcgaccaggaaattctgatgaagaaacaaacacaagagctagcatatcaagaatcgttatgttagcagaagcactttttgaggttctggatgagatccaccaacagtctgctgccttatcctcaaggccatcgttttcttcaattgggtccgttcctgctccaaaggaggttgtcgagcgtcttcctgtaaaagtatacaggagatcattaaaacaccaaactgaggaggctgcacaatgctacatttgccttgttgaatatgccgagggagactgtgtccgtattcttccatgcaatcatgaatttcatctaacatgcgtagataaatggttgaaagagatacacagggtttgtccactttgtcgtggtgatgtctgcagatccaatgcatcaggcattggaaaaaccacatgatcttctcttctgtgagaaaaatggagcttctgacattgtttctgatccaatcccaacagaatttgtaatacacgtgtttcaggtgtaatttcacatattctttccctccttcgatcaggacaactcagagtgctccttcatgtggtggcaaatttgcatcgcagtcatccctgttataaaatcgatgaactgccatgtgaatttggaattcttgtatggcaagggaagtttgttgatattaggatttcattatacgttttctttgagtgttgtttgaacttgttgagacgatgactgtctttttagatgcatcagccaacgacaactttcaaaattgtgttgtcatgctgaagcaatcaatagatttttcatgctatatgggtttgatgaggc

SEQ ID NO: 7225 - DNA, 2379 bp, Oryza sativa
  ref <308>: DATABASE ACCESSION NUMBER: AK064353
  ref <309>: DATABASE ENTRY DATE: 2001-12-06
atacgccgcatccttcgttcacgccgccgccgcctcgcgctcttgccgacggccaccgcgccgcctcgccggtcgccgctcccacccttccacggcgaccggagccaaagacggtgaccggcgggcgcgacgacctaggggaatgtgtacctcacctaccccacatcgtccccgcacccgcattccctaaacccccaaaccctagcccgctcctccgttgtcggatacgccaacctgctatatgcgagagaagggcatccacaactgtttgatgatctccaccggagccgccgtttaccggagtaaccgtgcttacgcgtcagctggaggggtgacctcggattcggtggagggctgatggctccgacccagctggtcgatcgctgcggcggcggcgcccccgcgagtcgctgctgtgagcctgtgatcgcctgtgatgggggtgtccgtggtggcgcaggcgccatgggggaagtaactcatgagatgggatgtggccgcaggcgcgattgtcgctgtgatggcgcccttggctatgcttggggcgacgatggtggcactgatgcccctgcaagcggcttcggtgcccacgattggtggttcattcgtgatggtggacttgtgaccttgccaccgcctcctccgcaagacgaatttgtgatgatgatgcagcctatgatagtatgatagcacattcatcgatgactgcgatgtcgctgtgatgccgtacccacatgccagagctgcgatggagctgctgcctttgtgcgcaggccttccaccttattgacatggtattgcagccccaacaagctggacctatgatgccattgttggcacagccgcctttggccatggcactcctctactcaagcttcaacatctggactactttgatatgccttctggaacagggaaatggcctcttccatgaatgaatgagccccctctatagccatcacttgaatgatcagatattcagtgggcatggacagtggaatccatggcgctacaagaactgaatcaagaactctctatgtggaaggactaccttcgaactgcacaaagagagaggttgcacatatttttcgccccttttctggttttcgtgaggtgagattggtcaacaaggagtctaggcatgctggaagctgtaacctcttgtgttttgttgatttttcatctcctcctgaagctcgtgctgctctggagactctgcaaggctataagtttgatgaacatgaccatgagtcttccaacctgcgcacacaattctctctcactcctcgcaggaggtcaattggtgggccttgtgttagaaactaagtttcttgggtggagttgaattaataatgcagagcaaaatttgtggagaatctctagggagacttgtatacaatgctagaccaaacttgactctagggaaacagcctcttccacgaagcaatgagcccccattatgtccatcgcttgaacaatcagatgtcctatgctgctggtgctaaccaaagtgctattccacttggtgggatggccacatattcagcgggcatggacagtggaaaccatggcgctacaaggaccgaataaaaaactctatgtggaaggactaccttcgaactgcacaaagagagaggttgcacatatcctttttatgcctgtaaactaaaatcacattttcctagctataattagtctaggtatcttttgcgatgtaattcatgttacacctcctaggtgcttttgcccttaaccctgtcttcttcagatattcttcgcccctttctggtttctttgaggtgagattggtcaacaaggagtctagatatgtggaaggtatataatctcttgtgttttgttgattttgcaactccttctgaagctcgtgctgctctggagactctgcaaggcttgctaagcgaggtttatcgcacccgaatgcttgtcccttctgcgaccaggatgatgaatctattcggcactttctcatctcatgtgtatttccccgccatgtctggacatgtattctacagaagctgaatatgttggcctccgtgcctcggtctaccgcgtgtctctctagttggtgtgatcaccagttactactaaggaaaggtgttcggtgatgccactaagatcatggttccagggacgatgcaaaggcaatggaacatgtttcactgaggttctcattcagggcaaaggggaattgctcttcggagctatgtgaatttgtttggcagaaacactgcttcgtatggttgcaagtgtattctagcgtgaattgtattttctcaaggtctaaactgtaactgaatttaaattgtaatgcttggagtgaatgtcttaagttaaaaacttttgctttttgtttgagtt

SEQ ID NO: 7226 - DNA, 1967 bp, Oryza sativa
  ref <308>: DATABASE ACCESSION NUMBER: AK064354
  ref <309>: DATABASE ENTRY DATE: 2001-12-06
gctcgatgatgtagatgctgcaaatatgcacatggagattggtaggcgcatatacagagaaaggctggaaacaagggaccgggatgccgacatggaacagcggcgggcatttcaaaaactcatatatgtatcaaatcttgtctttggggatgcatcaacattcctgcttccatggaaacgtctttttggggtcactgattctcagattgatattgctatgcgggaaaatgccaaaatcttatatgcatcacaactcaagtctattgggagaggtcttgacataggcacgcttatcgaagtaaggagagcacaacttgcatacaaactttctgatgagattgctgctgagatgttcaaggagcatgcaaagaagttggctcaagaaaacatttcgtcagctttggacatcgtaaagtcgcgtaccaaagcagcgaatagcccaacacaggttattgaagatgtgaagagcatccttgcttttaatagcttgctcataacactaagcaaacaccctgatcaagatagatttattcgtggtcttggacctatttcgttaggtggagagagtgatcatgataggagggctgatgatctcaagctactatatagggcctatgcaacagaagtactatcagatggacatctggatgatgagaagctcgctcctttgaatcaactgaggaatatatttggactgggcaagcgtgaagcagaatcaatcatgtcagatgtcaaagctcaagtatacagaaagagacttgctaaatcatttaatagtgagttggctgcggcccctagcaaagcagcattcctccaaaatatctgtgaagagttacagtttgatccggaacttgctagtaagatgcatgaagacatttacaggcagaagcttcagcagtttgtagcggatggagagctgaacaaggacgaagtggaagctttgatggcattccaagtgcgtctctgcattccacaagaaactgttgatgctgtccattcagaaatctgtggcaagttgtttgaaaaggttgtcgtggaagcaatttcatctgttgatggatatgacactaatagacgacaggctgttaagaaggcagcacaaggtctgaatttgaaaaacgagtctgtcatggccattttcagcaaagtggtacggaagttattcctgaactacattcagagagcaaaagcagctgggaaccgcattgaaactgcaaaagagctgaaaaagatgatatccttcaacacagtagttgtgagtgagcttttagctgacattaaaggagaaccaacaactgctgaacctcaaacatcagatgcaacctcagaacctgaagtcagcgagtctgagggggatgatgaatacgaatgggaacagctggagacattaaggaaaactaggcctgataaagagctcagagagaaactggcaaagtcaagccagaaagagataaccctcaaagatgacattccattgagagacagagctgagctgtatgaaacatatttggtgttctgtgtcactggggagacgaccaatgtttcatttggaacagcaatctccacaaagaaagataattcagagtatttaatgctgaagcaattaggagacatacttggtttaacccgcaaggaagctcagaatgttcacattaagatggcagaaaaggcatttgtgcaacaggctgaagtgattcttgctgatgggaagttaacagaggccaaggctgaccagcttgcaaagatacagaagcaagttggtcttcctactgagtatgcactgtacatactgatgagctagtgtagaccatatcaatataggatgcagatggaagtagtattagttagtatgagaggtaaattagttagttggggctgaagaattgggggttgtcctctacccaggaccaattttgccttgtatgatgatcagaagtgggaatgcaagagaaatctacatgatttac

SEQ ID NO: 7227 - DNA, 1572 bp, Oryza sativa
  ref <308>: DATABASE ACCESSION NUMBER: AK064355
  ref <309>: DATABASE ENTRY DATE: 2001-12-06
cttcctactccttcctcttccttgttccttccttccttcctcaccccacgaacgcgcacaccaacctttcccatccctagctgctgcccttccatcggatccacggatcgagacctggcacggcggcggaggacgggccggcggagatggaggtggaccacgcggaccgcgacggcgcgcggcgccggtgccgcgagtacctgctcgcgctcgaggaggagcgccgcaagatccaggtgttccagcgggagctccctctctgcttcgacctcgtcacccagactatcgaggggatgaggagccagatggacgccgccggcagcgaggagacggtcagcgaccagggcccgccgccggtgctcgaggagttcatcccgctcaagcccagcctctcgctgtcctcctccgaggaggagagcacccacgccgacgccgccaagtcaggcaagaaggaggaggccgagacgtcggagaggcattcgtcgccgccgccgccgccgccggaggccaagaaggtgacgccggattggctccagtccgtgcagctctggagccaagaagaaccccagcagccatcgtctcctagcccaactcctaccaaggatttaccgtgcaagccggtggcgctgaacgccaggaaggccggcggagcgttccagccgttcgagaaggagaagcgcgccgagctgccggcgtcgtcgaccacggccgcggcgagctcgaccgtggtcggagacagcggcgacaagcccaccgatgatgacacggagaaacacatggagacggacaaggacaacgacaaggacgccaaggacaaggacaaggaaggccagtcgcagcctcaccggaagcctcgccggtgctgggcgccggagctccaccgccgcttcctgcaagcgctgcagcagctgggcgggtcccatgtagcgacgcccaagcagatccgggagctgatgaaggtggatggcctcaccaacgacgaggtcaagagccatttgcagaagtatcgtctacacacgaggaggccgagctcgacggggcagagcagcgccgcagccggcgtccccgccccgcctgcgccgcagttcgtcgtcgtcgggagcatctgggtacccccgccggaatacgctgccgcggccgccgcacagcagcacgtgcagcttgccgccgccggcaataatgcgtccgggagcgccaaccccgtgtacgctccggtggcgatgctgccggcaggcttgcagccgcattcgcatcggaagcagcaccagcagcagcagcaaggacagagacattccgggtcggaaggccggcggagcggggacgccggcgatggcagctcgtcctccccggccgtctcgtcgtcgtcgcagaccacctccgcttgattagtgtagattcgtcgattacatcattatatgtacgtagtacgagagtgcatcacatcaaagtgcagcttgattttggagctagctagcttaaattaagggttaattactgattgcttcgtgatcgcacacaccacatttgctgttttgtttgtaaaaaagataataaaatacataaatattaagg

SEQ ID NO: 7228 - DNA, 1150 bp, Oryza sativa
  ref <308>: DATABASE ACCESSION NUMBER: AK064356
  ref <309>: DATABASE ENTRY DATE: 2001-12-06
acacagcaacttgctttacattgctgcaaacatgggcctcgtgcacgcactcctccccttcgcagcagcagcagcattgctgctcctcgccgcgccgccgccggcgacggccgacgacccgggcctcgccgtctactggggccgccacaaggaggagggctcactgagagaggcctgcgacaccggccgctacaccaccgtcatcatcaccttctacaacgccttcggccacggccgctactccctcgacatctccggccacccgctcgccgccgtcggcgccgacatcaagcactgccagtccaggggcatcaccgtgctcctctcaatcggcggccagggcggcgcctactccctccccaccaacgcctccgccgccgacgtcgccgacaacctctggaacgcctacctcggcggccaccgcgccggggtggcgcgccccttcggcgacgacgcggcggtggacggcatcgacttcttcatcgaccagggcggcgccgaccactacgacgacctcgcccggcggctcgacggctacaacaagtactaccggggcagggtcggcgtgctcttgacggcgacgacgaggtgctcgtacccggaccaccggctggagaaggcgctggcgacgggggtgttcgcgcgcatccatgtgaggatgttcggtgacgagcagtgcaccatgtcgccgaggtactcgtgggagaagtgggcggcggcgttccccggcagcaaggtgtacatcgggctggtggcgtcgccggagcaggacagcgcgtggatgtttcagaaggatctctactacgagatgctgcagttcgtcaggtcgctgcccaactatggtggcttggccatctatgacaggtacttcgacaagaaggccaactacactggtgagggttaattagctagtgatcatcgtctttgctgtctgaagtgaagactagatttttaccattatgtaaaagatctgaataaagacacctcttttttctgtaacattgtgattttgatgtacttcaataatggacgaataaaatgaggtctcaaaagctatgttggcatccctccaaaaaaaaaaaggaaagaaggttatgcatggatcagatctcaaataatgcttaataaattaatcatcactggctgtaat

SEQ ID NO: 7229 - DNA, 845 bp, Oryza sativa
  ref <308>: DATABASE ACCESSION NUMBER: AK064357
  ref <309>: DATABASE ENTRY DATE: 2001-12-06
aaaaaactcctgccccttcttcttcttcttcttgccgaggaagccaaagcagcgggagcaaagcggagcgcaatggcggggtcgtcggagccgacgcgggtgatggtcgcggtgaacgagtcctcgatcaagggctacccgcacccctccatcagctgccgcgccgccttcgactggatgctctccaagctcgtccgctccaacgccgccggcttccacctcctcttcctccacgtccaggtccccgacgaggacggatttgatgatatggatagcatctatgcatctccaccagactttcagagaatgaaacagagagacaagataagagggcttcacttgctcgagcactttgtgaatcaatgccatcaactggagataaaatgtgaagcatggattaaacaaggggatccaaaggaagtcatctgcagcgaggtgaagagagttcaaccagatcttctagttgtgggaagtaggggccttggaccatttcagagggttttcgtgggcacagtgagcgagttctgtgttaagcatgccgactgtccagtcatcaccatcaaacggaaggccgatgaagcaccgcaggaccctgttgatgattgatcccttcaatgtcatacttgagaatgagatattcttcactgctcaatgggtttaatgtacaaaatacaatatggtagtagtgcttggaactagtacaaatctttgcccagtccaccccaaaactagagtgaagatgaagaacactattgcgacaagaggttgtatcctatatgagatacatccaagtttgttatgaacctaagctaccttgatgatgaatcacgtactgggcttcgcag

SEQ ID NO: 7230 - DNA, 1372 bp, Oryza sativa
  ref <308>: DATABASE ACCESSION NUMBER: AK064358
  ref <309>: DATABASE ENTRY DATE: 2001-12-06
cttccgcccccgccgccgccgccgccgcctcgccgcggctcgcatccctcttcctctccctctcttcttcgccggcgcgacgcgacgaggcggtagctgcctgccatgccgaggagaggtggagcggcgaagaagccggcgggcggcggcgagctgtcccgcttcctgcagtcgcacctccagaccatcaacgacaccttccagatgatggcggaggcggctcccggcggcttggagcggacggagtggtctgaggtcgtcaagctcggcgagcaagtctccaggcaggccactgttgctggaatggtctggagtggtgatttgcctgatgtagaaacactcaaggagaacatcgtcgcatatttcaacatcctgcagggtttccttttgggttgccacggcagcacagttggcgcaggacccacacttcacaaatccatctgtagctctgcaaagaatgatgttgactccagcttctcattgttcaatcgagctgtttctgcttatgaatcacgcagtcctgaccggaaaacaactatacctcaggtgacaggaactgtatgggaagcatgtcttgctctcaacaaggtaccaacaaccaactgtgttgccataggacgagccatgactcagataggtgtgtatctgaaggatattctccgagagatgaaagaactaccaattggtgattctaatggcactgctgaaaaatcttctaatggagctgtggacaccacaagttgttctgatagagatggatcgtcaagtgaccttgagttagatgaggacttcactgaagaggaggttgctgttgccaaattggttgtcactgtggcttccgatgcgcttgttgtggtgaaagaaacaattcgtttcattacttgtttgcttaagatctcaggtaaccgaagtggagctaatgaggaaaaagttgagacaatggaacaattgttgagctgttgcagacaggctgctgaccagattaacgacctcggggcgtctgtgtacccaccacaagacttatctgagatgaaatcctcagtgaaaagattgtatggtggcgccaatgcaatgcggagggaaatcaggagccttggtggctcacctgagggtgcctttgtagcccttgaaagatttgagaagtccctgggagctctagaagtggagatagctgatgatgtagcaaacgagatggaaaatcttaccattagctcgtcctgattgctggaacttgaaagatttgccatacctatatgataatatgtcctcttgttcgagctataagcttttgttgttcaactaaaacgatgaatatgtataatcctttccagtgtgagatcaaatgcttattgcttagcctgctttgctgttc

SEQ ID NO: 7231 - DNA, 2238 bp, Oryza sativa
  ref <308>: DATABASE ACCESSION NUMBER: AK064359
  ref <309>: DATABASE ENTRY DATE: 2001-12-06
aactgatcctcaccaagaatttcgtcggcgaggatctccccgacgacggcattgctggattcgacaatcttgaggtgttggcccttggtgattgtgctctcaggggaagggtcccggaatggctgcatcagtgcaagagactggaggtgcttgatttgtcctggaaccaattggttggcaccatccctgaatggatcggtcaacttgataacctgacctacttggatctttcaaacaattccttagtcggcgagataccgaagagtttgacgcagctcaagagccttgtcaccgcccgacgttcgccgggtatggcgttcactaacatgccgttgtatgtgaagcataacaagagcacaagtggccggcaatacaaccagctctcaaacttcccaccgtcgttgttcttgaatgataatggtctgaatgggactatctggcccgagtttgggaacttgaaagagctacatgtgctggatttgagcaacaatgccatatctgggagcattcctgatgtgctgtcccggatggagaatttggaggttcttgatctgtcatccaataatctcagtggatcgattccatcgtcgctgacggacctgaccttcttgtcaaagttcagtgtggctcacaatcacttggtggggccggtcccaaatggaggacagttcttcaccttctcaaactcaggttttgaaggtaaccctggtctgtgcaggtcaagttcttgtgaccagaatcagcctggggaaactcctaccgacaatgacatacagcggagcggcagaaacaggaaaaacaaaattcttggagtggccatctgcatcggtttggtacttgtagtactgttggctgttatcttggttaacatctcaaagagggaggtcagcattattgacgacgaagaaattaatggctcctgtcatgactcgtatgattactggaagccagtgctattctttcaggattctgccaaggagctaactgtcagcgatctcatcaagtcaacaaacaactttgatcaggccaacataataggatgtggcggttttggccttgtgtacaaggcctacctcccagatggaacaaaggcggcggcgaagaggctatctggagattgcgggcagatggagagggagttccgtgctgaggtggaagcgctgtcgcaggctcaacacaaaaatcttgtttcactgagagggtactgccgctatggaaatgataggctgctaatctactcatacatggagaacaatagcctggactactggctgcatgagagatcagatggaggctacatgctgaaatgggagtcaaggctcaaaattgcacagggttccgcaaggggactggcttatctgcacaaggactgtgagcccaacatcatccaccgagatgtgaagtccagcaacattcttctgaacgaaaatttcgaagcgcacctggctgattttgggctagcaagactgatacagccatatgacactcatgtcacaactgatctggttggtacattgggatacataccgccggagtacagccagtcggtgatcgccactccaaaaggggatgtctacagcttcggcgttgtcttgctggaacttccgacaggcagacggcccatggatgtgtccaaagccaagggatcaagggacttggtctcctatgttcttcagatgaagtccgaaaagaaggaagagcagatctttgacaccctgatatggagcaaaacacatgagaagcaactgttttcggtccttgaggcggcgtgtaggtgcatcagcactgaccctcggcagcgcccatcgatcgaacaagttgttgcttggcttgacagcgtataatcattaataattctgtgtttttaagttgtctgctgttcattttggattgcaggctaggcctgacatgagaagtagacagagggtataggagcaatctgagtgctaataatctttagaagatgcagtctatgtgatgtacatagcttagtgtcgttttgttatattatatccaggaatagacctgtatctttgttttgttgtctgaaacttggccttccagcaaaataccaatcaagaattgagtacctagtactatgtggcattccagtgctatatcttggagataagtggtggtttgtgatgaaatgtagtaatgttcttgtaatttgtcctgcgaaaactgaaattctggcagcttatggtacaggggtacatcatcacagatttcttatgc

SEQ ID NO: 7232 - DNA, 1365 bp, Oryza sativa
  ref <308>: DATABASE ACCESSION NUMBER: AK064360
  ref <309>: DATABASE ENTRY DATE: 2001-12-06
atcaatccatcctacttaagcagtagctagtaagctagctaagcacacacacacttactaattcagctaaggatttggaggatcggagatggtgatggtgaagcttaacgcggcggtggccgccgccgccgttgtgctgtctctgttggtggtggtcgccgtgcatccggcggcggccgacgccggcggcgattggtacggcaagaagagcatcgaggagacggtgaggaaggaggtggagaaggccatcaagcacaatcccggcgtgggtgccgcccttgtccgtttggtgttccatgactgctgggtcaacggttgtgatggatcggtgctcttggacaagacgccgtacagcagcagcacggagaaggcggcggcgaacaacatcggcctggacggcttcgacgtcatcgacgccatcaaatccaagctgggcgccgccgtctcctgcgccgacatcgtggtgctcgccggccgcgacgcctccgccatcctcagcggcggcaggatcacctacgacgtcggcacgggccgcaaggacggcgtcgtctcctccgccgccgccgccgacgccgtcctcccggagtccaccttcgacttcgcccagctcaaggacaacttcgccagcaaggggctcacccagggggagctcgtcatcctctccggcgcccactccatcggcgtcgcccacctctcctccttccacgaccgcctcgccgccgccaccgccacgcccatagacgccacgtacgcgtcggcgctcgccgccgacgtcgaacggcagaagggtgtccagcgcacggacaacccggcggagaagaacaacatccgcgacatgggcgcggcgttccagagcgccgccgggtacgacgccgccggcgtggacacggcggcggtgggggcgctggacaacagctactaccacaacaacctgcagaaccgggtgctgttcaagtcggactgggtgctgcgcaccgacggcgacgccgccgccgacctcgccgagtacagggacaacgccaccaagtgggacgtggacttcgcctccgccatggccaagctcagcaagctccccgccgagggcacccacttcgagatcaggaagacttgcagatgcaccaaccagaactactactagtagtagtagtaactagtcaacgatcgagtcagcggaaaaaaatacgacggtattatactagtatacgcgtagtgtacgtacattaatacgactacttgtacgtacctactgtaatatcaccttggtttaaaattattactactgcatcgttaatcttaagtctttgattaattttgtagctaatgtataataagggcttataatgcaattcatttctagcattctat

SEQ ID NO: 7233 - DNA, 2009 bp, Oryza sativa
  ref <308>: DATABASE ACCESSION NUMBER: AK064361
  ref <309>: DATABASE ENTRY DATE: 2001-12-06
gtgctttacattgccataaacttgttcaagatgtactatggcgatgattgggagggtctctttgagtccatcactggctatggccttggtggatcctcaatggctctgtttggaagggtgggtggaggtatctacaccaaggcggctgacgtcggtgctgatcttgttggcaaagttgaaaggaacatccctgaagatgatcctcggaaccctgctgtgattgctgacaatgttggagacaacgttggtgatattgctggaatgggatcagatctgttcgggtcgtacgctgaatcttcctgtgctgcccttgttgttgcttccatttcttcctttgggatcaaccatgatttcactgggatgtgctacccgctgctggtcagctccatgggcatcattgtctgcttgatcaccactctctttgccactgacttcttcgagatcaaggccgtgaaagaaatcgaaccgtcactaaagaagcagctcatcatttctacggctctgatgactgttggtattgcactggtcagttggttggcgctcccatacaaattcaccatcttcaattttggtgaacagaaggaagtcactaactgggggttgttcttgtgtgtttcgatcggtctatgggctggtctgatcatcggatacgtgacagagtactacactagcaatgcatacagccctgttcaggatgtcgcagatgcttgcagaactggtgctgccaccaatgtcatatttgggcttgctctaggatacaagtctgttattatcccaattttcgctatcgcgcttggtatctacgtcagcttcaccattgctgcgatgtacggcatagcagtggctgcccttggcatgctgagcacaattgccactggactgtccattgatgcttatggtccgatcagcgacaacgccggtggtattgctgagatggcagggatgagccacagaatccgcgagagaaccgacgctcttgacgctgctggaaacacaaccgctgctattggaaagggttttgccattgggtcagcagcactggtgtcccttgcactgttcggcgccttcgtcagcagagccggggtgaaggtggtcgacgtcctgtcccccaaggtgatcatcggattgatcgtcggagcaatgctcccgtactggttctccgccatgacgatgaagagcgtcggcagcgcggcgctgaagatggtggaggaggtccggcggcagttcaacaccatccccgggctgatggagggcacaggcaagccggactacgccaactgcgtcaagatctccaccgacgcctccatcaagcagatgatccctcccggcgccctcgtcatgctcacgccgctcatcgtcggcaccctcttcggcgtccagaccctctccggcgtcctcgccggcgccctcgtctccggcgtacaggtcgccatctctgcgtcgaacaccggtggcgcatgggacaacgcaaagaaatacatcgaggctggggcgagtgagcacgcgaggtcgctggggcccaagggatcggactgccacaaggcggcggtgatcggcgacaccattggcgacccgctcaaggacacgtcgggcccgtcgctgaacatcctcatcaagctcacggccgtcgagtcgctggtgttcgcgccattcttcgccacgcacggaggaattctattcaagctcttctaggagagagagatttaaaattcgatcgaatttgaggacggacggagattttcgaataataactagaccacgggatcatgtgggctgaaaaaaaggaacctctgcaaataatgttgctttggtggtagtgggacactatctctacgatttaattttgtctcatgtaggttttgtaatttgtttttaacttgctgcgtcgttttcagtttctgtctgcctgagccctgaggcatcgtgaacttcttttagctgatgtacggcttgtataaagtgaccagatggttttcatctgcagtttatgtgcatatttttgtcatctt

SEQ ID NO: 7234 - DNA, 1523 bp, Oryza sativa
  ref <308>: DATABASE ACCESSION NUMBER: AK064362
  ref <309>: DATABASE ENTRY DATE: 2001-12-06
aaaagaaaatctcccgtcccgtctcctcagctccttgcgccatctcgctgctgaacagggagggacgctgatctccatctggcgagcagaggaggggagtggaggggatcctgttgggagatggctgggtttatgtcaagaggccccccaaatggttctgtttatgtatgcaatctgcctcctggaaccgatgagaccatgctggctgaatattttggcaccatagggttgctaaagaaggacaaaaggactgggcgtccaaaaatctggatatatagggacaaagttaccaatgaaccaaagggtgatgcgacagtcacctatgaagatccgcatgctgcttcagctgcagtagagtggttcaataacaaagatttccatggaagcaccattcaggttcatatagctgagtcaaaaaacaaagacatgaatgatagctctgcaactgcaagtttgaacaactctgctgaacttggtggacaagatgaattagataacggggaaggcagagggagagggcgcggtgatggtccaggaaaagcctggcagcaagatggggattggctgtgcccaaatacaagttgtggcaatgtaaactttgcctttcgtggtgtctgtaatctctgtggagctgctcgccctgctggtgttagtggatcaagtgctggtggtggtggtaggggtagaggccgtggaagtgatgatgcaagaggaggcagccgtgctgctgctgctgctgctgttggtggtcctcctggactgtttggtccaaatgattggccttgcccaatgtgtggcaacataaattgggcaaagcggatgaaatgtaatatctgtaacaccaccaagccaggtcacaatgaaggtggtgttagaggtggccggggtggcgggtataaagaacttgatgaagaagaactagaggaagttaaaaggcgccgcaaagaggctgaagaggatgacggagagatgtatgatgaatttggcaacctcaaaaagaaatttcgtgctaaaacacaacaaactgaaaatgcaccaactcttcctgggtctggacgtgctggatgggaggtcgagcaacgtggctccactggaagagaaggcaaggaaaggagcagagatcagggcagagaccatgactacgatgaacgggatagcaggaacagagatagaggcagtcatggaagggagcggcgccgaagtagagaccgtgagaaggaaagggggagggacacgggcagagatcacagctatgagaggagctgggagcgaggaaccgagcgtgaccatgatcgctatagatgaatacgatggcagattttcgcatgttgcatgccgattttggttttatgatacttccgttttgctgctggatagctatgctgcttcagctagtgctgtcagatgggtttgcacattatttgtcttggcctgatggcagtttatatctttgaatgtttggatgcactggaccactaaactttgattaaatgtgctatgtactttgggagtgttttcatgtg

SEQ ID NO: 7235 - DNA, 1371 bp, Oryza sativa
  ref <308>: DATABASE ACCESSION NUMBER: AK064363
  ref <309>: DATABASE ENTRY DATE: 2001-12-06
aatgccacaagcccaacccaattcatccccaagtccaccaccacacacacacacacacgcacaccactcctctccccacaacccatccactcccacgccgccgccgccgcccggatcgccgcgagatggagcaggtgagcacccctcgacctccgcgatgacgatgccctttgctgtatccgatccatccgcgagcgtggaggaaatggtcgctgctgctgctgctgatgatgagtgtgtttgtgtgtggctggaggagcagtacgagaaggtggagaagatcggggaggggacgtacggggtggtgtacaagggcaagcaccggcataccaacgagacgatcgcgctcaagaagatccgcctggagcaggaggacgagggcgtcccctccaccgccatccgcgagatctcgctgctcaaggagatgcagcatcgcaacatcgtcaggctgcaggacgtcgtgcacaaggagaaatgcatatacctcgtcttcgagtacctcgaccttgacctcaagaagcacatggactcatccccggatttcaagaaccaccgcatagtcaaatcgttcctctaccagattctccggggcattgcgtactgccactcgcaccgtgttctccaccgagatttgaagccccagaacctgctgatagatcggcgtaccaactcattgaagctcgcggactttgggttggccagggcatttggcattcctgtccggacatttactcacgaggtggtgacattgtggtatagagcacctgaaattcttcttggtgcaaggcattattccacccctgttgacatgtggtcagttggttgcatttttgctgaaatggtgaatcagaagccactatttcctggagattctgagattgatgaactctttaagattttcagtattatgggcactccaaatgaagaaacttggccaggtgttgcttcactacctgactacatatcaactttcccaaagtggccatctgtggatcttgcaaccgtggtcccaacacttgattcttcaggactcgatcttctctctaaaatgctccgtttagatccaagcaaaagaatcaatgcccgtgctgccctcgagcacgagtacttcaaggacctggaagtggcgtagattatgcctcatcttgtccatttgtaaattaagattgcattgtttgctcagccgagttcttttttggctttccttaatctaagttggtgtgctcctcccccaactctatttttgcccttttggttgtgtagagatgagaacagaaggtacctcctggctatccctctgtgtaattcaagccaattgaaagatccttattgcgggagctctacattgcaaaaaaaaaaaaaaaaaaaaac

SEQ ID NO: 7236 - DNA, 1407 bp, Oryza sativa
  ref <308>: DATABASE ACCESSION NUMBER: AK064364
  ref <309>: DATABASE ENTRY DATE: 2001-12-06
agcgccccgattcctcccccttctcctcgccaaaaggccaaaaaacccaactcccccgatctccccaccaccaccacccagatctcgaaaccctcgccgtcgccgccctcctcctcctccaccgtcgcggcggccatggcgaaggagttccccgtgccgccggtggtcttcactccctccacccctacccaccgccgccatcctcccccagggaccggcccctccccgccgccggccttcgcgcctccccgcccctccacctcatccggcgcgaaccctctccccttcatgtccttcgacgtcggcaacgcggccacctcctcctcgccgccgctgttcgccgggccgatcggcgtcggcggctccggggcctccttcgaggacgagccgccgctcctcgaggagctcggcatcaacacgcgccagatctggcggaagacgctctccatcctccacccgctccgctccgccgatccctccctccacgccgacgccgacctctcgggcccgttcctcttcctactctccttcggcctcttctagctgctcgccggcaagttccacttcgggatcgtcctcgggtgggtcaccgtcgcttccctcttcctctacttcgtcttctccatgctctcgggcggacgccgcggcgatctcgacctctacagatgcgtcagtctcgtcggatactgcatgctccccatggtcatcttctccgcgatctccctcttcctgcctcggggtggcggcctcatatttggggtgggcatggggttcgtgctgtggtccaccagggtgtgcaccaggttgctcgctgagcttgcatcaagcggtgacgagcatagggggctcatcgcctacgcgtgctggcttgtctacatgctcttctcgctgctcgtcgtcttctgatgccctttttatgatcatgttcaggattcttttgccgtatgaagtggagagctgccaatctaccagtcgccggagtggtcttggtgtgttttgctggacaacagattatcacgccagttgggagattttgtgtaatgatctgttcctttttcaccccgtagttcctgtggcatggtagttttagagggatcgtacagatcttggtaaagaaaagaaaggcaagatcaagacaccgaaaatatgaagtaattaggttttgctgaatattgatggaatctggcgactttcaaactaattcgtggtctgtacgaacttgttcattgtatttacttaccacgattagttgttttagggtcatctctgcctactttgtttttacccccatcttttcttcgtttcagtttgataagagaggattgttttatcattaggagatgtgttagttgctgactcaaattggatgagtcacttaagtagttatgtttctcttggtaacaggtc

SEQ ID NO: 7237 - DNA, 1546 bp, Oryza sativa
  ref <308>: DATABASE ACCESSION NUMBER: AK064365
  ref <309>: DATABASE ENTRY DATE: 2001-12-06
ggacctcggcgccgcccaaagtgcgaccgaagagagagagagaaatcctcggcgcttctccatggcggcggcggcggaggaaccggagccgaagcccgaaatcgaaaccccaccgccggcccgcgagcctccaactgagccaccagccgccgcccccgcccccgccgccgcagccagcgaccgaccgctgcagccatgggagcagcacgcggcggtgataaacctcccgcgctacgactaccgcgcgtcgggctccctcctcctccgctcccactccggcttcctcatcacctgccccatcaaacgtgagaaaagcgcaacaaaggaagccatttccattcttgaaaattccattggtcatgcaaacagctatagttctgaaatgtcagaaccaagtgatacggaagtttcagcaaagaaaaggaaaatatgttccgagacaccagatattgaaaattcaggagatgcagtaacatatgagaagggtgatgcttcagaaacaactggcagtgtagaaaaagactcagtttcacctcactccaaaacaagtaaaaatgttgacgacacttcaaatctctcactggttaaactgtcaagaagtggcttgcttttcttttcgtttcctagcggaggccttcgtgttgttcaaatgcttacacaaatgtttcattcactgcattctggcaagcttaaatctccacaatggtgtcatcgcatatttcctattcaggaaacatgtgttctgtcagaagcagaactacatactactgtgtcaaagttatttcttgactttgtaaagagtaaggaagaccaagatgagcctatcaagttcgcagttgggtataatagaagaggcattgatgaaacagagatgaaagggcagaagaatggcaatgaaggttcaaaacaacaaactttaatggacagggaccaatgcttcaaggtcgttgctggtgccgtcaaatcagttgctgagaactcaattgtggatctcagatctcctgaggtggcagtactagtggagatgctccctatttctggggtatccctgggatcttcagtggctggggtgtccgttctcccgtctgaactcatctcgactaagcctcgtctctgtgtcaaggctttggtgcctgatgcaaaagcggcaaagaagaagtgatgcctccttggttgatatcaatcagatggcaccgtgatgggcataatacagatgatacaatttgatcagtctgctcatttcaagtttacaactctgcggcagcttgaatcttctatggtcgagatggtttaacaaacatcaaacccttccatggttgcgtgctgttctacgcatcatatcatctgtagtccccaccaactgctgtttggctggttttgggtaggtcagtgtataagttgcagccctgcagagttcgttcatgcagctcttggagggtacttcttgtcgttatttttgcatgttgcgatgtcaaaaccatgaggtcgctggctattatggtgttctactgttttctgaactttatctattatggccagttcagac

SEQ ID NO: 7238 - DNA, 1540 bp, Oryza sativa
  ref <308>: DATABASE ACCESSION NUMBER: AK064366
  ref <309>: DATABASE ENTRY DATE: 2001-12-06
aaagagaaaaaaaaagaagaagagaagggcaaatcgattcgccatggctgctccccgcacgcctctccccctcgtcctcctcctcgtctccgccgcgctcctcgcggcggctcccctctcgccggcggccgagaccggtgccgccgcgttcgacgtccgccgccacctctccaccgtcaccaggtacgatgtggcgaggggatccaatagtgtgtcctccgcgccgtctatgtcggatgagtgccgcgtgatccacctcaatctcgtggcaagacatgggactcgcgcacctaccaaaaagagaatcaaagagctggatagactggcggttcggttgaaggctcttatcgatgaagcaaaacaagggcctgaaagtgactccctgaaaaaaaattccttcatggatgaaagggtgggagtcaccctggaaaggtagggtgaaaggtggtgagctggtcagtgaaggggaggaagagctatacaaccttgctatcagagtcaaggagaggtttcaaggcctatttgatgaggaatatcaccctgatgtgtattcaataagagcaactcaggttcctcgggcatcagctagtgcagtagcatttggtttgggtctactttctgggaaagggaagcttggacctgtgaaaaaccgtgccttttctgttctgagtgagagtcgtgcaagtgatatttgtctgcgattctttgatagctgtgaaacatacaaggaaaagaaaggagcctgatgttgaaaagcaaaaggaaccaattttagaacacgtcacatcggcattagttaaccgttatcatctcaattttacaccaaaagatgtttcttccctctggttcctttgcaagcagaagagctcatacttcgtgcaggttatacacaatgaagctccagtttcaatgccgggatgcgggaacaaagatttctgcccatttgaagagttcaaggagaagatagttgaaccccacctgaagcatgactacgacgccctatgcaagataaggccggtggcaagagaggagccttcctccttcagttccaggatgtccaatttcttcctaggtttgttctcgcagaaaggataccgtgttagtgctcaggatgtgaagtcggagctgtaggtttatactaggcagatggtgcatcttctacctttcgcactaagctgctactatccatctaccatggataaccaagggactgactcgtggactaaactacggtgtttctgtacttgcaaccctcagtttgatgagcgagtccaatgtgtaacaacacgctatcactggtgcccctcttctttcagatagaagacgtttgttgatcaatgtaatctttgttttaatctggactttctctagtgctcaactgctgactctgttgagatcaaactgaaagtactagcacacggttgtgattgtggcccttgtggtaggttgagatcatgtactactacttggacaatccgtttcaagctttcactcaatcaatccagatttgggagatccccaattcgagatgaatcatgac

SEQ ID NO: 7239 - DNA, 2916 bp, Oryza sativa
  ref <308>: DATABASE ACCESSION NUMBER: AK064367
  ref <309>: DATABASE ENTRY DATE: 2001-12-06
aaaaagagaaaaaggaaaatctcccctcccgtctcgtcgtctcctccgctccttgcgccatctcgcggccgaacaggggagaggaggggaggggatcctggtgaggtctctgacgcggagcacatggacgcggagatggcggctcctgcgcttgcggcagctcatctgctggactcgcccatgaggccacaggtgagcagatactactccaagaagaggggtagcagccacagcagaaatggcaaggatgatgccaaccatgacgagtccaagaaccaatcacccggcttgcccctgagcagacagagcctgtcctcatctgccacccacacctaccacaccggagggttctacgagatcgaccacgagaagcttccccccaaatccccaattcatctcaagtccatacgcgtggtaaaggtgagcggctacacaagcctggacgtcacagtgagcttcccgtccctcctggcgctgcgaagcttcttctcctcctccccacggtcgtgcactgggccggagctcgacgagcgcttcgtcatgagcagcaaccacgcggcccgcatcctgcgccgtcgggtggccgaggaggagctcgcgggcgacgtgatgcaccaggacagcttctggctcgtcaagccctgcccctatgacttctccgcgtcgtcaccacatgatgtgctgaccccgtcgccgccgcctgccacagcgcaggcgaaggcgccggcagccagttcctgccttctcgacaccttgaagtgcgacggcgccgggtggggcgtgaggcgccgtgtcaggtacattggtcgccaccacgatgcttccaaggaggccagcgctgccagcctcgatggctacaacacagaggtcagcgtccaggaggagcagcagcagcgactgcggcttcgactgcggttgcgacaacgccgggagcaggaagacaacaagagcactagcaatggcaagaggaagcgggaggaggcagagagcagcatggacaagagcagagccgccaggaagaagaaagccaagacttacaagagtcccaagaaggtggagaagaggcgcgtcgtggaggctaaagacggcgaccctcggcgcggcaaggaccggtggtcggccgagcggtacgcagcggcggagaggagcctgctggatataatgcgctcccatggtgcctgcttcggtgcgccggtgatgcggcaggctctgcgggaggaagcccgcaagcatatcggtgacaccggcctccttgaccacctgctcaagcacatggccggcagggtaccggaaggcagcgcggaccggttccgtcgccggcacaatgcggatggtgccatggagtactggctggagccggcggagcttgccgaggtacggcggctggctggagtgtctgatccatactgggtgccgccacctgggtggaagccaggtgatgacgtgtccgcagtcgccggtgacctcctggtcaagaagaaggtggaagagctcgctgaggaggttgatggtgtaaaaaggcacatcgagcagctcagttctaatttggtgcagctggagaaggaaacaaaatctgaggcagagcgatcttacagctctaggaaggagaagtatcagaagttgatgaaggcaaatgaaaagctcgagaaacaggtgttatctatgaaggataaatacaagcttgtgctggagaagaatgataaactggaggaacagatggctagtctctccagctccttcctttctttgaaggaacaattgctgctgccaagaaatggagataatctgaacatggaaagggaaagggtggaagtgactttgggcaagcaagaaggccttgttcccggcgaaccactgtatgttgatggtggtgaccggatcagccagcaagcagatgccaccgtcgtccaagtcggcgagaagaggacggcgaggaagagcagcttccgcatctgcaagccacagggaacgttcatgtggccacacatggcgtctggcacgagcatggccatcagtgggggaggcagcagcagctgccctgtcgcctccgggccagagcagctccctcgcagcagcagctgccccagcattgggcctggtggcctcccgccgtcgtcacgagccccagccgaggtggtggtcgcgtcgccactggacgagcacgtggcgttccgcgggggcttcaacacgccgccctcggcatcgtccaccaacgccgccgctgccgccaagctgcctcccctgcccagcccgacgtcacctctccagacacgggccctgttcgccgctggcttcactgtcccggcattacacaacttctccggcctcaccttacgccatgtggactcctcgtcgccgtcgtccgcgccatgcggtgctagggagaagatggtgaccctgttcgatggagactgccgggggatcagcgtcgtgggcaccgagctggcactggccactccgtcctactgctgatcaagttcttccctccccttctgcttcgccacccgcccccataattaattaattaatcacggaaccaaaagatttattctagtttaaggtagagaaatgataacataagaagacaataacaacacacacacacacacacaaaaatataagatagaagaggaagagttatttttctcggttacaaactcaaagttgcagtttagaacttggtaagtagatgtttcaggctggttggtcagttaatggtttgagtccccatgtcagtactgatcgatgtaagcctgacaaattttggtaggctgatactctccctagcccttcgcgtgacacattcgaagtggaatgtgtccagttttctgacgggctaggtccgctattttgtcctggatacatattcattattcatcattgccattggtagtatataatttaagatctgattct

SEQ ID NO: 7240 - DNA, 418 bp, Oryza sativa
  ref <308>: DATABASE ACCESSION NUMBER: AK064368
  ref <309>: DATABASE ENTRY DATE: 2001-12-06
atacaaaccaagctccatctctctctctctcctgccatgtccggccgtcgccgtcgtcggtcgatctctttctctatagctcccctatcaatttcctcgcacctccggctttgcctacctccgacaactccattttgcccctttcccccttctcttcccctttgaatcaagtcaccaccgtctccacccatgccggccggaggtgagcccttaccgtcgccgttccggccttatctctcactccttctaccagccaacggcctccccaggtgcgtggtgctagggaacaccacccgccgccggcgtcgccgccatccagccaccggagcaccggcgccccacctccctccctcttctctgttgccggcaagaaagagaagaagaaaggaacgggaggaagaaggagagaaggaaaaag

SEQ ID NO: 7241 - DNA, 1622 bp, Oryza sativa
  ref <308>: DATABASE ACCESSION NUMBER: AK064369
  ref <309>: DATABASE ENTRY DATE: 2001-12-06
gaagatgatcagagacgccatgcaccagtctgttgtgtacaaggagcagcttaggatgaaccaagctgcaacgagcactctcatggcgagactcgaggcccagagagcaatgtgtgactcatccgaaaccgagctccggaggaagtaccagcagaaggatgaactggagaagcagatcaagcctttcaccgatcaagcaaggaagcggtatcgtgttgacgatgatggattgctagaggaaaggcacagcttagaagaaaggcacagtgaaagggtgaagtattttccaggaataagactgaggagcagaaaccctctcaagcaggagctgagggttttcctggaggaggaccagagggcttcagatgcatacatctccctagaggaagaggaaattgcaggtgaaacttcaacaatgggaaatttcaggaattcacctttcaaggtgataaacttcccaaggaggtccatggaagacaacacagttgacactgagagaggaagagcatcagtgagggagaagctggagcatctggcgatcaaagaacggcagcgcggcagaaggagagaaaggaccatgtcatcaaggggatcaagggcaactagcactcctgtgaggtcaagagatggcaatggcaagagcaaagcagccatggtgcaatgtgagtctgagactgaaagatctcagacagtttcagtgccaaggacatcctcagttcctccaagtcctccttacagagtaactggcatgtatggaacacctagatatcctgcagagaaatcggtgctattgaaaaagaataatgtgattcatcggcaaggcgtcggtcgatccgaaggcgacgcaaacatgaaccacaccggcaaaggaactgtggataagtggcttcaaatgctcatggaggatcagcagcagcaagaagatcctgcagcagcatatcattcttctgaagatcacaacactgctgatgaaatcgcttcagacgagcaccaaatgcaaagcagaattgatgatgagagctgcaggaatgagatcaccgaatgctccgatgagatcgtcgaggtcggtggcgatggtgctactgagcagcaggacaggtgcaggaacagctttgagatcaaggagaggggagaggagaagaagatctggttcccaaggtctgacagctccaggggtttcaggtctctgccttcctcaccttccaagatccttggaatgagaaggggtgtggagtgcatgagcaggaagcccaaggtggtcggcgacgacaatggcagatacggctatgaagattcagtgtccacaagcagcagcaagttcctcaccaggtgcaagcaagccatcaagaaagcagtgaacaaataaacaattctttgcaccatgatgcagcacatttcaacctgtttattcttcaaatctgtgtgtttaaattcgtgtcaaattgctagttttgttttctgtagctgaataagttagtactcaagtgaggcatacatagctttgcagagttccttctgcaactagtgagacagacatttactgttcatggtcactattatgtgatcatactggcgttgtacaactatttgttgatttatttatgaagagaaactaaattctt

SEQ ID NO: 7242 - DNA, 1301 bp, Oryza sativa
  ref <308>: DATABASE ACCESSION NUMBER: AK064370
  ref <309>: DATABASE ENTRY DATE: 2001-12-06
ccagagaagccacttgcaccaaggtctaacttcttaacagatatgagattgatgatggaaccaggaatcgtacctgtgaagtttgtgttattgaggaacagattctccaagctagtgtcctgtgagaaatttggcagattaccagatatgccaggattcttggagaggttgatcgttctcaacttcttgtgctggaagatgatgggaggaaacgatccttgaaacttgtttttggatagctgaagaacagtgagattggagaagccagccaagaactctggcactgaacctgacaagtgattatagtgaagctcgatcatagtgagtgcttgcaaggcagagaatgatgcacagatgggacctgacagtgagcaataaggtaaacttagaacctgaagctttggtgtatatttggctatgttgtcacaccatcgttctccattgccggacagatccaccattcccatatggagctcctccaggttgctgtggttttcaatcaaggtctccatgtttggcgctgagagctgccaaactgagtctgagtcgaatgtcacctgctcgtcatcgttgtactcgacgatatagaaactggtggagaggtcgaggtagaccaggttcgtaaggcggccgatgctacctggcacctcgcccgctatgttggtgtcggagagatcaagataaaccagttcggtgagctgctcgaatccggtgatcaccgggagctgggacatgctgaagtcgttaccggagaggttaaggtgcttgagtgaggttaacctgaacaatgcagggtcgacgctgccggcttgcaattggtggccgcccaggtcgagtgaggtgacacggccatctgcgccaccgcagccgacgccatcccagcggcagcagtctgtgccggcgacccatgactggaaggcagtggagtagtcgccggcggtcgcgttgaaggagtgcttcagccggagcagcgctgaggcttgatccggatgacaccgaaccggtggtactacggtgcgtgccgtattggtggtggcctggacttggaggagaatgtacatcgcggttagcagcaatgacggaagatggtgagcaactctcttggtggacgatgacatgttgatgattcaagattggctgtgtttgtctgccttgaattgtgtggataaatacaggagtactactatttcaatatatcagttgcacgttgttggtatccagtagcttttgattgtctgtgagtcaaacaaatggttcggaaaatcagacagttcaaggaaagcgtgtgctcttatgaatag

SEQ ID NO: 7243 - DNA, 1327 bp, Oryza sativa
  ref <308>: DATABASE ACCESSION NUMBER: AK064371
  ref <309>: DATABASE ENTRY DATE: 2001-12-06
acggatgccaccgcacctcctccattgagacgagccaccatggaggccaccgtctttgctccccaccaggtcgccatcctggcactgccagcggtggaggcggaggcggccggcgccgctgcaccgggaggatggctatgaatggcatgagatcgatatccaaggtcggggctgtaatgaggaggtacacccatggaccctgccggaccggtgtgtgcggtggatgcgggcaaggagggaatcgcgcagctggtcaaggaaagatcccatctctctctgttaatcccgatctcctcatgagattgctcttgaggagagggagtacgtccctgaacttgattccttgcatcagttcatcccttctgttgaggctttgagtggctggggcttttgatgctatgtgctcttggtttgactcgatttttgctttgttttggtgcatgcagcaagatcatagagttgagcaggaatggaccagaagctatggctcgctaactggcatattgaacaggagcacaaccttaggagggatagagtcagatcatggctctctgatgattttctaaaatcattgcaacatcagtttgcttgctcgagacctataatcatagccaaaatatcagaattggaggtttggagatgctcctatagtggctggaaattcatctggtcacggctggtgaacgtcggcacacatgttcatacttcataccggcacaggggacattgcagaaaaaaaagagaagtagatttcaggacagatcgtctttctcgtgcccaaatgccgtcctcggtcttgctacgcagcccctccaaccgtgcaagtttggatcctctcgatggcggaggacgtcaggcggtgggagatggatctgctccccccgccgagtgcgtaggtgctgtttgttcctttcgtgtgtgattatgcgttggattgtcttctacaaccgcaggagaagctaggctgagaatcgctggcgaatacactgtcttcaatatggtgcttctcctgatatgcgttcgatagagaagtttatgtggcttcttgaggtgctctataaggaggaaggtgaccagtgaggagcagaagttgctgaatgtttccaggcgatgcatgttttgaaaaaatagcacctgtagaacgtgcaggtaatatttgtatatgtggtatagaaagttagataccatgagctattgtttgtgttttgaaaagtttcactcacagtgatgaaaatattgcagaactctattcatggccaattttgggaagttattaacagtgtaataacattcatgagaacaatacaaatctctctatcgttatttt

SEQ ID NO: 7244 - DNA, 2241 bp, Oryza sativa
  ref <308>: DATABASE ACCESSION NUMBER: AK064372
  ref <309>: DATABASE ENTRY DATE: 2001-12-06
actgttaccagttggtgtgattctccagccgaaacttcaccaaccaagcaggaatggcgctcctgctgccggagttcgacccggcggacgtccgcgccggccgcgacctcatccaccgcctcaccgccgacgccgccggcatccagcggggcgtcctccgcgagatcctctcccggaactccggcaccgagtacctccgccgcttcctgggcggcgccgccggcgacgacgacgacgtgcgagacgcattcaagaggcgcgtccccgtgtccggctacgaggatgtcaagccgtacgtcgaccgcgtcgcgtccggcggcgagccctcctctgccctcctctgctccgaccccatcacctgcctcagcaggagctccggcacgtccggcgggcagcagaagctgttgccgtccaccgcggaggagctcgacaggaaggtattcttctatgctgtccaggcgctcgtgaggaacatgagcttgcacaccgatcatggtgaagacgacgacggcggtggtggcgagggaatgtacctcatgttcgccttccacggtgaccggacattgtctggcctgcccatccagtctgctctaactacctactaccacagcagacagtttcaggaatgcgacattggcgggtttgataagtgcacaagccccctggaggcaatcctctgcccctatggcgagcagagcatgtactgccagttgctctgtggcctacttcaccgatgcagagtggaccgtgttggtgccagctttgccgctgggttggttcgggggatcaagttcttggaaaatcactgggaggagatgtgcttcaacatccggagcgggcagctcagcgactggatcacgcatactcctctgcgtgatgcggtcactggacagtatcttcaaggatctaacccagctttagccgatgagattgcatccgagtgtgcgaggaaaccttgggatgggatagtcaggaggctatggcctagggcacggtatatccggaccattgtgactggttcaatgtcacagtacattccaattcttgaggtttatggtggcgggctaccgttggtctcaccaatctatgcatctacagaatgcgctgccgggataaatctgaggccacttgatccaccatcccatgtgtcatatgcattgcttccaaacattgcttactttgagttcttggaggtcatggatgaaaatggtgaaaaggtacaaggaactaccaggcttgatgacaatttgggtgaggtaaaagttgttgaccttgtggatgtcaaagttggtcgatgctatgagttgattgtcactacctttgcaggtctttacaggtaccgggtgggtgacctgtttactgtgagtggcttctacaatgcgacgccattgtttcacttctcaggacggcatgatgtcatcctaagcatagattacgagaagataagtgaggaggaccttctcaatgccattgcagaaacagataagttccacctcaggcctcttggctacatgcttgttggtagcactgcatatgcagacatatccactttgcctggccactatatccttttctgggagctgaccaatacctgtgatagcaatgttgccattgacatcgaccaaactgccatggagaagtgttgcttggcagtggaagaccacttcgatgaaatgtaccgcaaaattaggcaccgtggctcaatcagtgcgctcgagataaggattcttagccatggtgcgtttgatgctctgatggacttctttgtgtctagagggacatcagcgagtcaatacaaaactccgacagccattcggtcgaaagaggcgatgatggtattggaggaaagggttgtaggaaggtttttcagccaagcaactcccagctgtcgttcagccgaatttgagaggagataataattgtactgcctgttcggttggcgtctcggtgacaggagagggcatgttccttatgaaaagttcagtcctgatcacgaataagtggcgcagcattgcaattcgtgcactggagaaggatgatccactcatctccatcttggcacgtcctttttcagtctggaatttggtctcaggagtatcatttcgtgttttcttgtaaattcagaaagaacttctgtactgctccttccacatagcctttgggcgtaactgtagacacaacccttgctccgaggtttataagttacctccgaatttactgattgactgtgttctcaagtcc

SEQ ID NO: 7245 - DNA, 1429 bp, Oryza sativa
  ref <308>: DATABASE ACCESSION NUMBER: AK064373
  ref <309>: DATABASE ENTRY DATE: 2001-12-06
aacttgaggcacttgaggaaaagaatacacgctgccaatgtgaaaaacttgaggagaagttgaaggattcgcactcagaaatcagcagccttcagaaggaacttgaaggccaactagctcatcatgaccatgaaattgagaagtgcaagaaggagcttgaacacgttcatgagaagtattcccacgataaatctactcttgaaacagaaataataaagctccaagacatcgtcaagaatttcgaaggtgatctagcaaaaatgtcacaagagaaattgcagctcaaggcccaggttaaggaacttgaacaagcatctcgcagctagatgattcatcagcacagattatgaagctccaagaaataatcaaggatctgcaaagaaggctggacaatgattcaaatgagaagaagatgctcgaagaacgtgctatcgaatttgaacaagttcgtaaggagctggagggttcaaggactgaggtcgcagaactacaagctacaatcaacaatctgaaagctgacctaggaagagctctggaagagaaatcacagctggagagccgtatcaatgatctggaacacacaatcgcctgtaatttggaagaattctcgcaggagaaatcctcacttggtgccgagatccaaaaactgaaagaagccaatgcttctcttgaaggcaagctgacatccacagagtcacagctccagcaactccacgccgagaaatcagaagcatccattagcagtgagaagcagatctccgatctgaatcaagccatcgccgatctcgaaacaaagcttgaactcctttcttcagagaaaactacagtcgataacaaggtggctagcttactgaccgatgtcacagctcgtgatgagaagatcagggagatggacagccacctgcaccagctgcgcctggagcatgtcaagctgattgcagaggcagatgccgtgacgaaggcggtgtcggagctgcgagcacgggtgagcgagctcgaggaagaggtggaggagcagaagctgatggtctccgatggcgcggaggggaagcgagaggcgatcaggcagctctgcttctcgctcgagcactaccgccatgggtaccagcagctcaggcagctcctgcagggacaccacaggaggccattggtgatggccaattgagagtgagaatttctaaaacctatcttggcaatgcaactgcaaagcaaaattgcatcaaagaacctgtcaatgcaatgcaaaattgcatctccctccccttttcttgttctatgatgtagctcattcagatgctggtaccctatggtgcgtgtattgtaatcgaggaaccgagtctgaacaaacttctttttttcatttcctggtaatgaatctgtcgaattctgctgtgagcatgtcaagaaaaatgatctgtctcctctttgc

SEQ ID NO: 7246 - DNA, 2895 bp, Oryza sativa
  ref <308>: DATABASE ACCESSION NUMBER: AK064374
  ref <309>: DATABASE ENTRY DATE: 2001-12-06
acaatgtatagtcctgttcttcatggtgatgtgaaacctgctaatatactgttagatgaaaaccactcaccaaagatatctgattttggaatagcaagattgctttgtgctaatggggctcaacataccaaaaatatcattggttctataggttatgttgatcctgcattctgcgagaatggaattctaaccccaaagagtgatgtttatagctttggagtggttttgctggagataatcaccagaaagaaagcagtggatgggaccatcacccttgctcaaagtttcactgatgccattgaaaaagggaagaaagtgatgaatttgtttgatgaggaaatcaacgataaacaaaacatgaacttccttgaagatattgggaagttggcagttaaatgcttgaggagggatgttaaagtgcgccctgaaatggttgaagtagcaaccagtctaagaatgattaggaaagatctggagggagaacaagggaatctgactcagcaacatacaagtacaccaaacaactcaactccctcaaagaatgaaggctcagcaggacgccaatttggcaatctaaatatcttcaaacaagaggaaattaagcatatgacaagaaactacagcatgacctttagggaagaattccatgaacgtctatacaatggagttcttggcatggttcatgcagttatagtaaaacaagtgagtacatcttcaaaaaccgaccgagaagtgtttctgaagactatgggcaaactatgccagaagtatcacaaaaatgtcgctaatgttgctggctttcatttaggggaatacatttcagagtgcgtgtatgaatcttgctgtgaattatcccaggtaaataatggccatatttccttctctaaccgaaacctttatgagatcatctgctccacggaaaaacttcctcttcatgtacgtttgtcaatagctgtccagtgtttagagggcttggttcatatccattcatttttagctgaaaatcctgaatcgcgtggcacaagcctgttcggaaattttaggtcagccaatatttttctagacaagaacttcatgccaaaagttttcaatgccaacttatcaacatttctcgggctttgcgccgtgcaacaatgtactgcctctgttgattgtattcatgaccaaagatcacaaaaatattatttagacccaaaggatgtttctgatcatctgttcaaccccaagtctgatgtttatagctttggagttgttcttttggaactcattacttggaagacagcgaaatacaagtctggtggacaggctcatatgcttacgacagacttccttgatacttacagaatagaccatagtgcaacagacttttttgtcaagaaggtttatgacgaggaaggcaagtgtttccttcatgaagccattgctattggagttgagtgcctaaaacttgatgttcaaatgcgaccagaaatgagtgatgttctttcccgtctccggatcatctctgcagctcagagtatcagaagcaagctcatgggtccacaagcaaaagattgtggcgataatggacctagccaatacatagcccctacccctgtcaacaatgatgtcaaaattccttctccaccaacttctgcgtcgaccatttcgctggacatactgaagaaaataactaggaacttcagtaacaattccctaataggagaaggctcacacgctaaagttttctttggagtgcttaaagatggaaaaaattctgcagtaaagaagctcaatcctaatgaagaaactatagtgcaggtttcgaccatttcaagaatgttgaagcatgacaatgttgtccaaattcatgagtattttattgaaggggaaaatcatgttcttgtttatgagtatgcaccaaagggctccttgcatgatattcttcatggtagagaaggtgtcacaggagcccaagcaagaccacctctatcatgggtgcagcgagtgaagattgctataactgctgcaaaagggcttgagttcctccacgagaaggccgtgcctcctgtcatccacaccaacatcaagtccagcaacatacttctctttggcaatgatgttgcgaaaataggtgatctcggtgtctcgaagcagcttcatgttgaagattatgattacagttatacacgagtagttccacagatttttcgctatgaagcaccagagtatgcaacacagtgtttccatgctttcagattgttacactagagccttggcttggaaatggcatgcattacctcctactgatatgctctttccttcgttggttcttgctaggtgcaggttgagaggacagtatagtgtaaagagcgatgtctacgcctttggggttgtattgttggagcttttaactggtcgcaaagtatttgatcatacacttccgcgtggccagatgagccttgtaaaatgggctacaccaaggcttagtaaagacaaggtgaaacaatgcgtagatccaaagcttggacgagcattcccactcaaggctgctgccagggtaataatattcctaagcctggatgttactgtctgtgtttcacaattttttttacatcataattgcataagaatttcgggaagtttcatttgagatcatgttttgcctacattgaatctgaacttcgtcagcataaattatctgtagggtcaaacaatctgtttctgttcttcactttgaaaaaacagatggtttcttttgcacatgtaactcatggttagctcccatgtaaagttagatatgaggataggaagcgcaggttagttgagggccttgttaatccacataaaaccctcagcagtctatcacacgaacaagtcccattatggacatattatatttatattcaaactttc

SEQ ID NO: 7247 - DNA, 1805 bp, Oryza sativa
  ref <308>: DATABASE ACCESSION NUMBER: AK064375
  ref <309>: DATABASE ENTRY DATE: 2001-12-06
acttgcagagaagaaacgcaaaaaacaaggtcacacaacaaacacaggacatcaccatccccccatccgtctataggttaaaaagcccagcaccaagcgcaaccatcaagctttcgtctcggcagctcttggctccgcctcctatcctctcctcttcccctactctcctctcttctctctctccgcctccaccagtctccccctctccctctccaaaccctccatagctataggcagcagctgggggtgctggcggcgttgaggcattcttgaatccggcgtggtcgcttccccagatctatcttttttggatcgtttcttcgggcgatttggaggagcaaagaaagccctcccaaatcgcagaaaggagccgcctttgcgaagctcctgctgccttctctgctcgttgttcctggcctgggatcacatatccccgcaaggaaaaaaaaggagccgcctttgcatttattcttttggccccttgggagatcgccctcgtcaagatttggtgggaagtgggaacccaattcgctcgcggttctcacttctccttgtgtggaaaggcgccgctttggctcctgtttccccccaccgctcgctcccgcgccgctcctctccctatatatctatctctctgactatcttgttcacatacgcctgcgcgcctgcctaactttgttttacttcgatccatccaccggttttcggcatcccccgtctcggcatttgatcgttgcttagtcgcttgttgatttgacgcaggccagatcgctgtctggcgcttgttttattttgagttgttgcggtgtgtttgctgttcttggttggaggcatggctgcggcggcgaacggaggtggcgcggcgctgttcagcgaggaggagctgcgggacgtcagcggggtgcgccggtgcgaggatttcgtggaggtgacgtgcgggtgcaccagccaccgctacggcgacgccgtgggccgcctccgcgtctacgcttccggcgacctcgaggtcagctgcgagtgcacgcccgggtgtcgcgaagacaagttgacgccttctgcctttgagaaacactctggaaggcagactgctggaaagtggaggaatactgtgtgggtcatggttcaaggagagaaggttccattgtcaaagacagctctgctgaaatactactcgctgtctcacaaatctgctaatggttctaacaaaggccgtaatggtcgcctgtcacaccgagatgagtttattcactgtacggaatgtggcaaggagaggaggtttcggctccggtctaaagaagagtgccgtatttaccatgatgctcttgctaaacctaactggacatgtgctgatttgacaactgatagggtcacctgcggcgatgaggaggagcgcgcgagccgcaaggtgctgagaggctgctcccgctccacgtcgtgcaccggctgcgtgaagtgcgtgtgcttcgggtgcgaggtctgccgcttcaccgactgcgggtgccagacctgcgtcgacttctaccataactccaaggagtaggaggatgaaacaatgcatgaaacaccaccatgggacatggtaggatgaaacaccagcatggtcgatatacccttgcagacccagatgttttttagtcaaaccccccaggtccaatgattccccggcttcactggggggggcctcctattctgagaactgagatgttctttgactagcttcttcccatagacaacaactagtaccggggaaagccggccgatttttgcttcatataatttaccaaaattctattcatgttcatttt

SEQ ID NO: 7248 - DNA, 1727 bp, Oryza sativa
  ref <308>: DATABASE ACCESSION NUMBER: AK064376
  ref <309>: DATABASE ENTRY DATE: 2001-12-06
aaagcgagagagaccaccccaaccaacgcagcagccagcaacctccacctcctcctcctccgccgcggccgccttcctcctccgccgccgccgtcgccgcccggactcactacccccttgtgctaacccccggccacccaagcaggcccccctccctccacgacgggcagcgcgcctcgggaggcacgcacgcgtcagcagcagcgtcgtcagcgtcagcggcatcagcatcagcatcagcagcagcagccgcggccggagatcgcctccccgcctccccccgcgttccaacgcgccccgcgcgcggaagctgcagcagagtacattttgtggctagctttatactaagaggggtcgaattggaggagggctacactacttggtggagattttactgagattctacgttgtgtttcaattacatttacatggcatatcttttctaagacatgccgtcctctacgccaccatcagtgcaacctgcaccaactgtgcaaccattaccgtcatccacggcaggacagagcactcgtattgaccttcgtgagattaagtccaacatcattaagaggattgggccagggcgagcaaagaaatactttcagcatctagagaggttcttatcatcaaaattgaacaaaaatgagtttgataagctctgtcttgtgacacttggccgtgagaacctcccattgcacaatcacctcatccgttctattctccacaatgcatgccgtgcaaatggtccaccggcaattgatgcgcccaagttagcaggagatgtttctaaatcagaacagatacttcatcctgtttggaacaatggtaatgtttcaatccagcatgtcaaagacaatagatcattgaccattgagcaggagggagcgcctattatcagggagaatggtgctccaaattttagtgatctgaagagatgccaacaggttcagaacagtgagcatgctgagccacgtaacaagcgattacattatgaaaaggagccaccgagttttcttgagccttcacacagcaatggcccttctgctatatcttatggtgaaaactcgggaggtgaaaatatacaccgtatccaaggtcccgtgcgagctccactggggattcaattttccccagttaattttggtgggattcagaaatcttcagccattgcttctgtccctccaaatgatagctctgttagttgctatgaacttggtgagttatgtgatactatgctactgagtaagaggatggaaaaagttgcagaagcagcaggtttggaaggggtctcagtagaatgtgctaatttgttgaataatggagttgatgttttcttaaagcagttgattggatcttgtgtgcagctagttggaacaagatcacagcttgggaaactaagccatgcatcactgaagcagcagttgtcacgtaagctaataaatggcgtatcactgaaaaatcatgtgcatgggcagggtattattatacctacaggccctaactcgactccaaacaaattgaggagccataacacagaattctctgtaagtggactgcaatgatacatgcttttcaattgttacatttctagcatagatagcagagtagatgatgatttatttccaatcagttttgctttagtgttagcaaaagtagggattatttataaggaatatgcgcatagaaaaatgtaatgttcttttgagaaatgaatattccttcccttc

SEQ ID NO: 7249 - DNA, 1366 bp, Oryza sativa
  ref <308>: DATABASE ACCESSION NUMBER: AK064377
  ref <309>: DATABASE ENTRY DATE: 2001-12-06
gagcacaagaaaccctaccgccgccgccgcttcctctcctcttcttcttccaccaccggagcagaggaaaccaaaccatggcccccatcgtgcgcccctccaaatctggctccaactccgattccgattcccacgctcaccaccctcctcctgagccgccgcaagaaagctctgacggcgaggacttggagctcgagtcctccgaggaacttgattcgcatggggcgcccaccaagaaagcccccttcgtcgccccgccgccgccgccgccgccgccgccgccgccccagcagaatgggaaggaggtctccgattcgccatcgctgcccaccaatagtgccatcgtcctctccccgctaccaccaccgctgcaggcgaacaagaatcaccaagaccaagattctgagtctgattccgattctgatgacgacgagccaccgctgcccaccaacaatgcaatcgtcctcgccccgccgaacaaccaggagtctgagtctgattctgattctgatgacgaccaagagtcagcgctgaaggcgaacaagattgtgtccttgtccggcgatgacgaccaagagtccgattccagtgacgacgaggcgctgccagcgcttcaggccaacaagaatgcgtctccgtccgatgatgatgaggatgacgaccaagagtccgattccggtgacgacgatgtgctgctggaccccgcgcttcaggcgaacaagaatgtgcttgccttcaatgggaagaggaaggtgccgccgcaagaggttggtcagtctcttcggcagcccaagaagaagaagatggaggcaccagcccaaggaaacacagacattgacacgcaattcaaggagaagattgcgtcctactttttccttgggaaggtggtttctcttctggatgaagagcaccccgacttgtttaaggaggctttcttgaagcttgctgacagcaaggccagtgccctggatgctaagatcaagcagctgactttggctcaggtcagggtgtctttgaaggggcgtgacctggagaaggaactgatcaagttgctgtcgggcttcctcaagtgatcattatagacatggagaaaacttcaaggaagtgggggctgactggactggggtacagtatgctaatgcacctggtcattttgcttttgattctggctcatatcaacctcgttggcatcgtctcattttggtccaagatggacatgtttaatctactgatgtaaatactctggtgatttgggaccaccaagactagctactctaccccatatttagatagtactagcttatattccactgaactacctgcacaacagttattaatcatggtaaacttcagttaagcttcattc

SEQ ID NO: 7250 - DNA, 1631 bp, Oryza sativa
  ref <308>: DATABASE ACCESSION NUMBER: AK064378
  ref <309>: DATABASE ENTRY DATE: 2001-12-06
aagcaaacccttcttctctctctctctctctcctctcacgcttcgctcgcggccgctcctctctctctccatccatccatggcgcaggacgacgccccggactccaccacctcctcctcatccgcctcatccgcctccgcccccgccccctccgccgcccgcctcaacgccgccgccccggagttcacccctcgatccgccgcccaccaccaccaccaccacgccaaccctcgccgccagcaccgcgggggcgggggtggggcctaccaccaccaccagcagcactaccagccgcaccaccaccaccagcaccaccagcactggcaacactacggggaggatgagggggacgccgcggcggccggggcggtgggagaaggagggatcccggaggatgtggctcgtcgggtcgtcaagcaggtggaattttacttcagtgatgtcaatctggctacaacagaacatttgatggaattcatgattagagatccagagggatttgtgccaatgtctgtagttgcatcttttaggaagatccgggagttagttagtgagagatccgcattggctgcagtattgcggacgtcagcagagctggttgtttcagatgatggaaaaagggttagacgtcgagtgctctttactgaggcggatgctgaagaagttcagtcacgcattgttgttgctgaaaatttgcgtgaagagcaccgctatccaaatcttatgaagattttctcagcttttgggagtgtgaaatcaattcgtacttgctatccacaaggtgggattgatggtgctggaacttctactggcaaagcatcaaagattgagatgttgtttgctaataaggtgcatgcttttgtggagtatgaaactgttgaagatgctgaaaaggcagtttctgaattcagtagtgggagaagctggagagatgggattagagtccgctcactgcttggttgcctgaaacaagccatgggtcaaggaagaagaggtggagatgaggtggatgctgcagacgaagatgaccctgaaacaactgaccatccacaagactacgaaacagaggatgcttcccagatttcagaagcacatcttgatcatcaggctgatgatggctaccatgacaaaggcgggatgaggcacgggagagggagaggacgtggtggaagagggcgtggccgtggtcagtactatggccatagccgggatgccaatcatccaattggcactcctccatcgaatcacagtgctcttgctgatcatctttcaaagccaccccctggtcctcgtatgccagatggcacaagaggatttaccatggggcgaggaaagccactcaatcctaccaatgctgtttaatggcagtggccatgccggtggcagcctgttgccctgttccctcttgcaaatctgatacttgcctcaggttccaaaccgatgaacgccgattaccgttgatactatagttagatacaacatgtgttggttcgttttggtgcaagattttgcagagaaaagttttacctggtacatgcatgtatactggtacagcagtggtgctggcaatgtgaacatgtcttttgatatctggatgctagttaatttagcaaaatatgtagatatagatg

SEQ ID NO: 7251 - DNA, 1618 bp, Oryza sativa
  ref <308>: DATABASE ACCESSION NUMBER: AK064379
  ref <309>: DATABASE ENTRY DATE: 2001-12-06
catatttttataatgatgacgggaaaacagccacagttgttggaaaagttgcaatcacaaaaaatccgtgtctccatcctggtgatatccgagtacttgaagccatctatgaccctgatttggtgggcatggttgattgtcttgtcttccctcaaagaggagaaaggcctcatccaaacgaatgctcggggggagatttggacggcgacctctattttattacttgggatgacaaacttattccagagaaagttgatacacctatggactacacagcaacaaggccgcgcataatggatcatgttgttacactcgaggaaattcagaagcactttgttgattacatgataaatgactcgcttggtgccatctcaactgcccacttgattcacgcggaccgttcgccactgaaagctcggagtcccgagtgcctccagctggcaactctgcattccatggcagttgacttcgccaagacgggagctccagctgaaatgccgcgaacattgaggccgagggagtaccccgacttcatggaacggtgggagaagccgatgtacatctccaatggtgttcttggcaagctctaccgatcagcgatgggtcacatggagaaatcaggagattcaggagctctctcatcatcctcagcacaaccaagccccacatacgatcctgacctcgaggtccctggctctgacggattcctgcaagctgcagaggagtactacgagctgtacgaggagaaactgaccacgctgatgaactactaccgtgcggagctcgaggacgagatcctgacgggcaacatccggaacaagatgctgtacctgaagagggacaacaagaggtacttcgagatgaaggaccggatcgtcgtcgccgtcgacgccctgcacagggaggcgaggggctggctgctgagctccaggaaggaagaggacgcgtcgcggatggcgtcggcgtggtaccgcgtgacgtaccacccagaccgccgccgcgggaagcggttctggagcttcccgtggatcgcctgcgacaacctgctggcgatcaaggcgtcgagccagctcaggcggcggcggcagaaggacgatgactccaccgcggtggtgcagatggactgcagcgcctgatgtggcagaggattctctgactttgagtgactgacatgtgggcctgctggataagggatccatgggtcagtgacaagttagagggaaataaattagaggttctctgacgcgccgtcctaagtgaactttcaactgcacagttcattgctgtgcgcctgtgcctgtacgctgtacaaatctggttcgactaatcttagctgagctgaacagcagagctccggctcgcaacttggaagaggaaagagtttgatgatgaacacctacgtagagtaaaagttcctcttcctaataaaagagtcttagtgctgatctaccggtaaggtggaggcttccatttcttgttttctgcgaaggaaagaaacttagggtgtgtttagttcacacaaaaattgaaagtttaattgaaaatgaacgatgtaacgaaaaagttggaagttcatgtgtgtaggaaagttttaatgtgatgaaaaggttactccctc

SEQ ID NO: 7252 - DNA, 1707 bp, Oryza sativa
  ref <308>: DATABASE ACCESSION NUMBER: AK064380
  ref <309>: DATABASE ENTRY DATE: 2001-12-06
aattcttctctctccgaccctctcgttcaccggcgacggcggcgctacgacggccggcgggctcccgtactccgcttcctcctcctcctcctcagtgcgctggtgaaattgataagaggctgttggaacttggaagctgtatagttcaggtcgtcatggctcatcaaaagcgtgaagcaaccagcgacaacggcggtggcgatgaagagtgggcatcaaaacgccccaaagttgtcggcgctgctgctgaaaaggagcacattctgacatctgacgcttcgcatgaaacgaatggcgatgaagctcaaggaggagatgcctctcgaaaggaaaacacggtgtcgacaaacccgtgtgtttcagatgagaaagcagcaaccaactcgaatgtttcaagtggccatggggtgattttgactagtgtggaagctgatgctgcagaagacaagggttgcaggcatactatggaagatgcatgggtgctgcttcctgatgctagcatggaatctccgggaaacctgaggtgcgctcatttcgcaatatgtgatggacatggtggtcgcctggctgcagagtatgcacagaaacatttgcatcagaatgttattgcagcaggattaccacgtgagttgatggatgttaaagctgcaaagaaggccatcattgaaggttttcgtagaactgatgagtgcttactgcaagaaagtactaaaggaaactggcaagatggtgcaacagctgtctgtgtctgggtcctggggcagacggtggttgttgcaaatgctggagatgctaaagctgtattagctcgttccacatcagctgatggtgaaggtgcagtggatgatgccaaaagtcaactgaaggctattgttttgaccagagaacataaagcaatctttccacaagaacgtgctcgaatccaaaaggctggaggatctgttggccctaatggcagattacaaggtcgcattgaagtatctagagctttgggtgatcgtcagtttaagaaggttgggctgattgctacaccagacgtccactcctttgaagtaacgagaaaagatcattttattattcttgggtgtgatggcttatggggagtatttggaccaggtgatgctgttgaatttgtgcagaatcaattgaaggagacctcgtcagcgactctggcagtgcggcggctcgtgaaggaagctgttcgtgagaggcgttgcaaggacaactgcactgccgtgctgatcgtcttcaagcaccagaattcttttcacccactgcgaccgttttcgttttttcaccaagctgaactggggaaacgaatcatctgacaacgaacaatatctagttctattgttaccttatcctgcactgcgacgttctggccgtgtctgtattgtgatcgagacccttgtgcactgctgtagccgtctatgtattgtgatcgagacctttgtgcactgctgtagcttatgcggttatgccacctctggaatgaatgaaatattggagcccctccactccaaaatatagctttatagtacgagatcagatacaacctaacaacggatttgaataggttctttgttcagattcgttgcactatggtatgactaatccagtaaattaggttgctatattttgagatttttgagatggagggagtatttttctagatattggagtaattcctggtactactagattttt

SEQ ID NO: 7253 - DNA, 3544 bp, Oryza sativa
  ref <308>: DATABASE ACCESSION NUMBER: AK064381
  ref <309>: DATABASE ENTRY DATE: 2001-12-06
agaaattacggcaggatcgttcttttgtggagtgaagaattgtttaatgattggatcccctgtagatgtagattatcggaggaatatgtgtgcccatgcacgtattttggctttggaagaagcaattgatactgaatgggtttacatgtgggacaagtttggtggttatttacttcttctgcttggcttgactgccaaagctgagcaaatacaggatgaagttcgtcttagactttttctggacagcataggtctttctgacttaagtgccaaagaaatcaagaaatggatgcctgaagatcgaagacattttgaacttattcaagaaagctacataagggaaaaagaaatggaagaggaggtcttgatgcaaaggcgcgaggaagaagggaagggaagggaaaggaggaaggcattgttggagagagaggaacgaaaatggaaggagcttgaaatatcactgctatcttctattcctaatgctggaagcagggatgctgcagccatggcagcagctgtcagagctgtgggtggtgattctgctctggaagattcttttgcaagggacagggtctcgtcaatagctcgtcacataagaaaggcacaattggctcggcgagcagagcagactggcattccagacactgtttgcatacttgatgatgaaccaaggagtactgggcgtcattgtggagagattgatttgtgtctttgtgaaagtaaaaaagttagcttctccattgcagtaatggtgcagccggtgtcaggtccagtctgtctttttggaacagaattccagaaaaaagtgtgctgggaaatcttggtggcagggtcagaacagggaatggaagctggccaagttggtcttcgattggtgactaagggtgaaaggatgacaaccgttgcaaaagagtggaatattggtgcatcaagtattgctgatggcaggtggcatcttgtcactgtgactatagatgctgatctaggtgaagcaacttctttcatagacggagtctacgatggatatcagaatgcgttgccattgcctagaaataatggcatctgggaacctgggacagatatttgggttggtgctaggccacccacggacttagatgcctttggtaggtcagacagcgagggatcagactcaaagatgcagatcatggatgcttttctatggggaagatgtctgactgaagatgaggttgctatgttgcatacagccatctgttctgctgaatatggcctttttgatcttgctgctgaggatgcttggcatggaagttattctgcaagggtggatgactgggaaagtgaagaagcaaattttgaactatatgatcaagaggacgttgaatgggatggacagtactccagtggtaggaaacgtcatgcgcgtgattctgtagctattgacattgactcctttgctagaagaccaaggaaaccaagatttgagacacgagaggaagtcaatcagcgcatgctttctgtcgaaagggctgttagagaggctcttattgcgaagggagagagaaattttactgatcaagagttccctccggatgatcgatctctgtttgtagatccgatgaacccatctctaaaattgcaggttgtctctgagtggatgaggccttctgatattgcgaaggaggtatctatcagttcacaaccgtgcttattttctggttctgtgaattcgtcagatgtgtgtcagggtcggttgggcgactgttggttcttgagcgctgttgcagttttgacagagatggcccgtatatctgaagttataatcactcctgagtataatgaagaagggatttacactgtcagattctgtatccagggtgaatgggtggcagtggtggttgatgattggatcccctgtgagtctccggggaaaccggcatttgctactagtagaaagcaaaatgagctgtgggtatccattcttgaaaaagcttatgcaaagcttcatggctcttatgaggcattggagggtgggcttgtgcaagatgctctagtggatctcacaggaggagctggtgaagagattgacatgcggagcccccaagcgcagattgatcttgctagtggaagattgtggtctcagttgttgcattttaaacaagagggctttcttcttggtgctggaagtccttctggctcggatgctcatatttcatcaagtggcattgttcagggacatgcttactcaattttgcaggtaagagaagttgatggccataagctcgtgcaaattagaaatccgtgggcaaatgaagttgaatggaatggtccgtggtcagactcatcacaagagtggactgagcgaatgaagcacaaacttaagcatgttccacagtcaaagaatggggtattctggatgtcttggcaagattttcagatccactttcggtcaatatatgtctgtcgtgtttatccacccgagatgcgttactctgtccatggccaatggcgtggttatagtgcaggtggttgccaagattatgactcatggcatcaaaatcctcagtaccggcttagagtaacaggacgggatgcactgtatcctgtacatgtatttattacccttacgcagggtgttggtttttctagaaagacaaatggtttccggaactatcaatctagccatgactcttctatgttttacattggaatgaggatactcaagacacggggctgccgtgctgcttacaatatctacatgcatgaatcagtgggtggaacagattatgttaactcaagggagatatcatgtgaattagtgttggagccttatccaaaaggatacacaattgcgcccacaaccatccatcctggagaggaagcaccttttgttttatcagtttttacaaaagcaccaatcaagctagaagctgtttaatgcaagattcatactagatgtgttcgctgctggtagctgtgccttgctgttgctggcccaggctcctttggggttcaagtgatgcagattccagctgtgggttcaagaggatcagataatggtgtttgctgcagcaatatgccggtacctgggagatatgaagcagcagctctgctcttgaacctgaacattctgggcttcatcagacgctacatgcaaccgcataagcttgattgcttcctaacgtgacaggaaaggcaatctttctgtcagcaggcatggtgttgatacatcagaatcatttgatcgccgtgcatgactctggatgttttctagtcgatgcttgtagatagtggtggcaactaacatttagacctggtagccccatcccgtgtataggtatcccatgtcaccgtgtacatactatagaattagatgagttaaccttgtggtgtcgtttcctgttagcgaaatagagctcttgtgcagctgggaaataccattttagcatgctgcagttttgctgatcaaggcgagcagtcgtcggccatagcgttttcattgattgcctgtatgtaatcgaaatctgatctcattcaatggaagctattttttggtaccctttgaagc

SEQ ID NO: 7254 - DNA, 1961 bp, Oryza sativa
  ref <308>: DATABASE ACCESSION NUMBER: AK064382
  ref <309>: DATABASE ENTRY DATE: 2001-12-06
ttggcaaacttccttgcaaacttgacagatcaagtccatcatatgacatattgtttatgctaaaagttctagaggggttgaaccgatactcttttcacctcgtctctgatgagagaaaccgtgcttttgtacatggaagcataactgaccttgatgatctgaaagttgatgtttctgtagttccacagcaggagtttgtcagtgctaaattgacagataaactggagcaacagatgcatgatcccttggttttaaggtctcgttgcctgcctttatggtgcactgaactgatgtctgcatgtcccttcttgttttcttttgaggcaagatggaagtatttccagctgacagcatttggttctttgatcccacaacatgggaatatgatggatacaagtggcagtggtgtaatgacagaaagggtgccttccttctcacggaaaaagttcaaagttgatcgcgacaatatacttgtttctgctgctaaagtgatgcaatcacatgctcggagtaatgcaatgcttgaagtagaatatgaagaggaagtaggcacaggcttgggtcctacgatggaattctatacattgataagtcatgagtttcagaagtctggtttaggcatgtggagaggggagctctccggcgaagctggcctggataatgttcatggtggttctgtatttgtggttgcccctaatggactttttcctaaaccatggtccacccatgtggattgttcttccttctcagaagtgaataaacagttccacctccttggtcaggtcgttgcaaaggcagttaaagacaacagaattctcgacattccattttctaaagcattttacaggcttatactaggacaggaacttaatatatatgacattcactcatttgatcctgaactagcaatgacccttatggagtttaaagcacttgctgctcggagaaaatatttagaatcaagttcaagtggggactgcaagagtacatctgatttgtcttatcgaggttgcaggattgaggatcttgctattgagttcgctcttccaggatatccagaatatgttctttctttagaaaatagcttggataatgtaagtgctgacaatttagaacagtatgtttcttttgttgttgatgcaacaattagaagtggaattgcaagacagctggaagcttttaagtcaggattcaatgaggtatttccattaagcatgctccaggtcttctcagaggatgagctggagcgattactctgcggtgaacaagatacgtgggattttgcgaaacttgtggatcatataaagtttgatcatggctacacttccagcagccctcctgtcattaatttgttggaggttatacaggagtttgaaggccatcaacgcagagctttcttgcaatttataacaggttcacctcgactcccaccgggtgggttagctgcgctaaatccgaagttgacggttgtccgaaagcataacagcaacgaggctgatgatgaccttccgagtgtgatgacttgtgctaattatctaaagttacccccctattcttccaaggacaagatgagggagaaactactctacgcgattacggaaggtcaggggtccttccacttatcttgacttgaaactgatagcatctagctgcgcatgccatcacacgcagtagaaatgtgtgttttgtaagtatcacgtaggaaaacatggtgtaaatgtgggtggttcactgcttaacttaccaagacatatgattcgggtggagctgatgttaggaaagggaaaaaactgaggtggcgcatgcccttccttctctgtacatagtggtagttgcctgtaggtgtgctcaagtagtcgcgaacatggcgactctcagcttagctcgctgctgttgatgcaaaccttctcttttggtgtaaatatacgtggctggtgaaaatcttcaatactattactatc

SEQ ID NO: 7255 - DNA, 1931 bp, Oryza sativa
  ref <308>: DATABASE ACCESSION NUMBER: AK064383
  ref <309>: DATABASE ENTRY DATE: 2001-12-06
attgatgcgggccgatccggaatcaacgcaaaaaaaaaagcgcctccacaccatcgccgccccaatccaccctcgcgcctccccacatacccaccagcgcctcctctcacgcccgtacccacgccctaaaaacgcctcgcccccgccgccacgccacgcctgccgctgccgctccgccgcccctctcacgcctgccgccgccgctccgccgccgcccttcgtgccgctcgggaggagttgcgacggggtcgagcccctcatcgccgaccacctttcttcgctcgcagccgccgtcgtagcgtgcgtcgtcgtcaccagacacctgcgatcatcattccctctgtgtcacctcgccgtccgtctgtactacacctctgccgccgggcagccgccgtcgtagcgtgcgtcgttgtcaccagcgatcaccattccctcagtgccgcctcgccgtccatccgtactccacctctgccgctgggactcagggccgaacagatctccccggccgcggtcgctcgttcttttgctgcaaaactaaaatgatttggcctggtgaacctaaagcagttttctgatgcagtgttgctgcaatctgacactagtaggcgtgatccacggagacagtagcgctacccatgcctcgtcccgtatcacagcgaacagctgcttctatccctcacaatctcattccctgaattgaagattctgaaaaagactgaaatgaaagagtttgttgggggcaccgcaccatcaagtacaacatcagaccctcttgctgatataacaaatacaaatggtctcggtttcactaatagacggggcaagggtagagccaagtcgttatgtgttgttcgaagaaacgacgaagagtgtcacggctctaaagaaaactgtgacaactctgaacagaacactccaatagcttcaaatgtgcatcctattgtcacgcctaatagtcagtcatttgcggatgaccgcgatgcatccttcagtacacccagcaatttgcctatgtgcacaggtgcgcatggagatgttactaaccttacccatgctgaagttgcaagaaagcgtgctagaaactggtacacatcattgacccaggagcaaaaggatgagagaaacaagaaggaccatgagagaagaaaacggaagaaggaggaaagtcaagttttaaagtctgcaaccaatagtggtgtagccccacttggcaagctttccaatgtaagtgctgctgatttaatgacatgccaattggaagtgaacgattcttctacgttgaagaacgaagtgatgcttcccatcttaatatcacacccagacgtctcccatttacaatcatcaacaatgtagctcactatggtccaaatgaagttccaatgagctgcgtaattcaaacaacccaaaacagagacgtcaagttgcgtaatgcaactcttacaccggagcagaagcaagctaaggtcgatcgacagagaacaagacgtcaagcactaaccaatgaacagagactagagatgaatgatcgccgtagggttgcaaggcaaactctgccggatgtggaaatacatgatatgaatgctcgccagcgatcaagacgacaaagtgttactcctggagaacggtctgctcatctggcacgacgtaatgaactgtatgcagctaggcgtgacaaaccatgcactcaatcgattgcattggagtgccctgaggattgtagctcgtcgttgctaaatccaacgccttcctttgaaacaaccggtgatgtgccagctacatcgagcctgcaaactgaacttgctgcagatcatcttgcacgatcgtctaactttgatgatggtatcatctatatatgtttttatttatactcgcaatttgtacccttcctcatactcactttatattcaactaaattagatatggattccttc

SEQ ID NO: 7256 - DNA, 1353 bp, Oryza sativa
  ref <308>: DATABASE ACCESSION NUMBER: AK064384
  ref <309>: DATABASE ENTRY DATE: 2001-12-06
aattcgcacgcggagctaatcctcttctagggttccgacgaatcccgagctcggaggccgatggcgtcgtcgtcgtcggcggcgtcggggaagtcgcggccggagtgcatcaactcgtcgaacccgttccacgagtgctccgactactgcctccgcaagatcgccgaggccaaggagcgcatcgaggacgagcagcggccgccggtggaccgcaccgtccaccccgactgcatcaacgcctccaacccctaccacgtctgctccgagtactgcttcaagaggatcgccgacgccaaatcagggttggagcgtgcggagcaagaaccgccttctgcagacgctggcaaatccgacgctgcccaagctgagggtggtggtggtgatgatgatgcggagcaggaggacgccggctcagacgacggttacccgcagatgacagagaagcagaagaagctatttgagttgcggctgaagatgaatgaagctaggaaggcaaatcagcaagcgatggtggcagagaagaagaggatggagcctcgcgctgagagtagaggtgtttctaaacaaaagtggctggaagacagaaaaaagaagatcggaaagcttcttgactcaaatggcctggacatgacaaagtcttacatgctcgatacacaggagtcggccgaagcaaaatacaagaagtgggaaaaggaacctgcaccatatggttgggatgttttcaaccagaagaccttatatgatgcatacaaaaagaggaccaagaacattgaggttgacatggaggcatacaacaaagcaaaggaagccgatcctgaattttatcgggacgcttcaagtctccaatatgggaaggtgtctaaggtcccggaagaaaacatagacaggatggttaatgagcttaaggaacgggatgagaaacggaaagcattcagcaggaggcgcaagttccatgaagacaaggacattgactcgatcaatgaccggaacgaacacttcaacaagaaggttgagagggcatttggcaagtatactcttgagatcaagaacaatcttgaaagggggactgccttgccagattagaaactctgcacactctgctggtagagagtggacatgttgtctgtttccccagctgtcttttgcttgtaagttgtaacctatcaacaatttgcttggaaactgtaactgtaagaaagccaactcggatgtaatgtcgtgagaatatagcatattcgagaagttgtgtatccaaaatgagcggaatcattaactatagtgattttgcaatgtatccaaatgagcataatcattaactgtagtggtgtgctggtgccccaaatgtcttgcaat

SEQ ID NO: 7257 - DNA, 2120 bp, Oryza sativa
  ref <308>: DATABASE ACCESSION NUMBER: AK064385
  ref <309>: DATABASE ENTRY DATE: 2001-12-06
ctcccctctcgtctcaccctctcctccctctccctctcccgccgccgccgccgagcgccacatccgtctccccctcacgctgccgcctccacctccgccgccgtcgtgtcgccgtctccgcctaccctcctcctcgtcgtctcaccctctcgcgccgccgccgcctccacctccgccgccgtcgtgttgctgtctcctcgcccctccgtgtccgcctcttcctcgcgccgtcgcccgagcgcaaccgtctccgcctccgccactgccgtcgctgtcgccgagtgctgccacttccgccttcgcctcgctccgcccctacctagcaccgcgccgcagctgccgccgttgccgagcaccgccggagcgccgtcctccatttctgtcgctatcgccgagcgccaccgatgcatccttcgccgccatggctgacgactgctgcgccaagttctcctcgagcagctcgccgcagttgtcgatgaggaagtggcgtcgaatccggcaacatctgacctgctgctgcgcctgcgccactgtcaacaatcgatttcacctgccatgaaaaaacaaaagaaaggtcagttattccggttccctgccttattcgagaggaaaaggaagtattggtgtaggcgtttagctacaaatatggtcatgcagcggcgagagcagagctgaggcatcaggcgtggtgcgcgtcgcttgatggtgcttgccggcactgtcagcaaacctggcaagaggaccactcgatgatcttgtgaacatttacagacggcttttgcatcattaagggaacttgttgcatcatggatgactaggatatcagaagagtgcaagttgtggacttcttctgctctatccaaacaaggaagacttcagatatcctaatatgcatattaatggaatttttagaaataaaattttcagctcctttaactttctgcttcaaatgcatatttcccattccaatgctcctaatggattgtattttgtctcaagcagttgttttagtaaaaaaattgtatgtaatacatgagatagcctgggacagtaatagctcaagaaacaaaactctctttgagcacaaagagaaaagtcctttcaagccgtgagaaacttttgggtgcctttttggcctcctatcatatgagctcctttttcttctcccctgtaaatttgtcaagttctacctcactgtaagagagaggagatagagagagatgtactaactgatgaactgatcaatacaagtcctaactgatgaactgtacaaattatatgtgttgcgggagcgagaagttgtgcacagctgagttgggatcagatcatctaatgcttactggagttcaatgtggttattttctatccacgcgatctcaagactttgcttaggggctattacaaacacgagctaggtgggcgacggacctcatattatgacatcgaagtcacttctgactgagctagcttgctggaagatgaggaggtgaacaaatccttcccagatctgtacagttggttctgaccctgagccgcttctagacactacggcgggagttctgcttccattgcctccagattcctgcaactccatatacggcacatattctgttggtgtattccagcaggctaggatatcaaggaaacaaggggttgatgaggtgatggacaacagtgcaggatcaacaatgagaacaggatggagcggagagatggatcagtagttcctccaatctacaagtgcatactataccgaacgccacacatgatctccgtttaggatcctcagtagtggtatgtctaacatgatgtggtgatctttgcggaacaggcataggtttgtgtcttaggtgaaaaatagcacatatattattctgatgagaatatatttgttggtgctattttcagcaacacctatgcatttggtggattaatgtttgccaagcagttctattcacctaaaagtcttgatgataccaaaagttggttaatggttatagtagtgtacatggacaacgttgcatagattatcttatctgtttttgcaaggggatattcataccaaattttcttatggatacttctctaacaagaaaaatagtgaattaatttgccctgac

SEQ ID NO: 7258 - DNA, 1833 bp, Oryza sativa
  ref <308>: DATABASE ACCESSION NUMBER: AK064386
  ref <309>: DATABASE ENTRY DATE: 2001-12-06
gatctgctatctttggacgttaatccagaaccttcttccgacaaatatgaattgctatcttacaaaggagaaccgcaatctcttgatataaatccagaaccttctgccaataaagatgaactactgtatttacccataaatgctctcaccgaagcatcaagtcatgtaccttatgatggtgatgagtccctctttgtcgagcagcaagagcagttaagccatggcaacgaaatcatattcccagttgaaactcaagaagggcctgtgcaagttagcagaggtgaaagtcttatgacttgtgtattgtctaccttgccagcatcttgtgagcagcatagtgttgctaccaatttggataatcctggaaacaatgaaactgttatggctcatgatgtgcagactgctgctgtctcttcctttgatctgaaaggcattgagaaacatgttgaatctctgcatgatgctatggaactagatggtacagagtcaagtaaaatgaacctcattgcagattttaccgctcccttatcttctgatgatagcttggtgtgttatgctattccatgtagtatggaactttctgacacgagtgtcgtgaataagtgccctcaccagtctactggcttcccagattatgctaaagcttgtacagaatgtgactctgggttgacctcctgtgagagggttgataggatatcacaggatcatgacattctttctggttccagtatttactctaagaataaggacctctactcttacagtgacatctcagttttttctgagactcacaaagattttgcagaaccgctagagttgcctccatgtgggaaagatgatgaggcgccaccagatcttgcagctcaattgcactgtaattcatgcaaggatgttatgatgccaccgcaagttataagcgatgaagtagagccagttgacagaggagcaactattttagtggaacatactccctgtggtccagagactgccttgactgcttttctttatgataaaggatccattgatacaaccagtaaaactgatgagttggcaaagcaaaactcaaactctctggagggagatgttgctaaaatacatgaacaactactaaactattcttatgctagtggtgaggtggagatatccctaactagatcagaaaagcgaaccaaaaaattaaggtcgcaacatccgatttatgttcctttcttgggcttcctcaagtctgtgtcctttaagaagaaagcatccaagggctggagctcatcatcatcttcgtcgtcgtcgctccgccgggtgttgagcaccggaggaggcctggtggaggaggagcggcgggagcgcattgacaagtaccggagcaagcgcaatcaacgcaatttcgacaagaagatcacctacgcttgccggaagacgctcgcggacagccggccgagggtgaagggccgcttcgcccgtaactcctccgacgacgctgctgctgctgctgcagctcaagtcgaggtgtcgccggcgacgaataataatgtgccggagtggtggccggcagtgcaggaggcgctggccaggcaggagcaggaggcggctggcctccatctctgcgacaccgccgacgatgacctgctagccgcctacctcggcgtctcctccatcgatctctactcaccccgcggccactgatcgatccattcaatcatcactgctactctgctacctactcctacctcttaaaacggttcaatttactctgctatctactccatagatattttacccctgactcgcaaaacggttcaatttacaccctcagtcaatatagaggtggtttaagcc

SEQ ID NO: 7259 - DNA, 1799 bp, Oryza sativa
  ref <308>: DATABASE ACCESSION NUMBER: AK064387
  ref <309>: DATABASE ENTRY DATE: 2001-12-06
aaaaagaagaaccctagcaagagggggagaaaaagaggaggaagaggggagggaagggagaagaaagtggaggagatcagcagcagcagcagcagccgcggccgcggccgccggaggatggcgccggtgaagaagtccaagaaagggaagcgcaagtccaaggactccggcaagctcaagatcgtcaagtatggcggcggcgcccctcccctcccccccgagctccgcggcctcgacaccgagtggtggtacaccttcctccacaagcactccgagctaggtctgagcgcgccgtcagatgagggggaggcgttcaggtatttcttcaggacgtcgaggaggacgttcgactacatctgctcgattgtgagggaggatttgatctctaggccgccgtcagggctgatcaacatcgaggggaggctgctcagtgtggagaagcaggtggcgattgccatgaggaggctggcgtcgggcgattcgcaggtgtcggtgggggcggcttttggtgtcgggcagtccaccgtctcgcaggtgacttggaggttcatcgagtcgatggaagagcgggctcggcatcatctggtgtggcccgggcaggagaggatggagcagatcaaggcgaggttcgaggccgagtccggtctgccgaattgttgcggcgccatcgatgcgacccacattatcatgacgcttcctgctgtcgagtcgtctgaggattggtgcgacccggcgaagaattacagcatgttcctgcaggggattgttgatgatgagatgaggtttattgatattgtcactggttggcctggcagcatgatgttttcgcggttgctgaagtgctctgggtttttcaagcactgcgatgctgggactcgcttggatggccctgtcatggtttcagcagagaatggagaaatcagggagtacattgttggtaacaattgttatcctttactcccatggcttatgactccctatgaaggggagagtctgtctgctccaatggccagctttaatgctaggcagaaggctgcaagaacgcttggaccaagagcactgtcacggctgaagggctcctggaggatcttaaacaaagtcatgtggaggcctgataagaacaagttgccgagcataattcttgtctgctgtttgcttcacaatataatcatagactgtgaagacgaactgcttccagatgtacaacttccagatcgccatgatactggttatagtgaagagaagtgcgagcaagtggatcctaatggcaagataatgagagatgtcattacaggatatcttcaaatctaagaagcttcccattgaacttagctaagctgactggcagtactctggagttgcaagaaggcatctctgttcttatgtttttctcctcagttgtccttgttgtaatcagacctgctggtctccattcggtaaagattagcaatgaaataattcagttaggaattagctagctcaggagcaaactatctcttccttgagttaaggaaaaaatgttaatgtgttcatggtgatgacaatctccatcattttgaggtacaagatatatcagtggtcaattgctttgaatgaaggaaatcgcctttaaggagagtagctattcaactttgttttataaatgtttagatttgcataatatagtaaaactcatgctcgcatgttattaaagcatatccaagaaaaatagtaacctatatatgacatgttgagttgagtgaactagtcttggatgtacatcatctcattttcattttattgcaaggctattgttttct

SEQ ID NO: 7260 - DNA, 1911 bp, Oryza sativa
  ref <308>: DATABASE ACCESSION NUMBER: AK064388
  ref <309>: DATABASE ENTRY DATE: 2001-12-06
ccatcttccatagttccatccaacatccaggcagaggcagagccatccttggcttcccaaaaactctcttttttctcttctcccttcctttgttgcttctcctcctcctccatcgtctcctcttcaccttgcgtcctccccatccaaagctcacaacttgacgacacacgcacacgcgctcccatgtcctgtagcctcctctccatgtcaagccacgccgccccctcgccgtcgcagccgtgagacatccctccgcgccgcggcgagacttcccctgtgtccatgttcgccgctggttcttgattcgttcaggtctcgtgacaaacttgcttctcctcctgatttaatttgtccggtgcgggaagggaagcctccctctgcagcatggcgccgttgcgcggggccaagcgccggaggaaggcggcggcggagaagaaggctgcaatggcggcggccgctgcggcgggtggcgcgcccggagcaggcggcggcgactggtgggacggcttctgcatgcggatgtcaggaaccttgtctggtatacaggatgcacaaagatttgagtttatcttcaaaatgccaaggagaaccttcaactacatctgtggtttggtgagagatgaaatgatggtgaggtctagcagctatacctttcttgatgggaaggtgctgtctttagaagatcgggtggcggtggctctgataaggttgaattctggcggatcactagtgactgtaggatctgctgttggtgtaaaccactcaaccgtgtcactgattacttggaggtttgttgaggctatggaggagcgagcaagccaccatttgcggtggccagattccagtgaagtggagaagatcaaatccatgtttgagaagatacatggtttgccaaactgctgcggtgttgtagacacaacacatatcacaatgtgcctttcttcagctgagccaaactgtaaggtctggctagaccatgagaaaaattacagcatggtcttgcaagctgttatcagtccagatatgaggttcatggacattgtgacagggtggcctggtagcatgaaagagtcgagcattttgcatagctctggtcttttcaagatgtgcgagaaaggagcacggcttaacggcagcaagatggtagtgtctgatgggtcagaaattggtgaatacataattggtgatgcaggatacccccttcttccctggcttctcacaccgtaccaagaaaaggacctctcagattctaagctggagttcaataagagacacgcagcggccataacagttgctccaagtacattggcgaacttcaaggacacatggaaattcctgcatggcgagatgtggcgccccgacaagcacaggctgcctcggataatccatgtgtgctgcatgctgcacaacataatcatatgccttcaggatgcaaccatcgacgaggcagccatgtcgaacgatcacgacgcgaattacaagcagcaggtgtgccagttagcagatgagaatgctgtgagggtgagggacaaactgtctgagcacttggtcagcaggtgaggacaagagaagaaagagggtgtggatgtcccgaagaaactgaaccttcttagtctgctgcagcctgcagctgagtcttttagctgtgagtttcagttttgatgagtttgtttatttcttttaggggagaaaggggtagtgctaaactgctaattagtcagtcagttgtgacaaatgaaaacccaactgtaaccgtagagctctccagctcgcccctgtgatgtgaattacatttgattactttggttctgaatgaaaaatatcatacagatcaaagctaaagttgaactgcggaaactatctatgaaatcattggcatgattaatatttgtgatgaacaattagctttgc

SEQ ID NO: 7261 - DNA, 1442 bp, Oryza sativa
  ref <308>: DATABASE ACCESSION NUMBER: AK064389
  ref <309>: DATABASE ENTRY DATE: 2001-12-06
aacgcaaaatccaaaagataagcacagttacgcagcgagagcgagagaggagtggagagccatggcttccatcgtggcatcgaagaggatcccactgttccgcctcgtggagcagctcctcgccgcgtcgccggcccaaggcgccgcctccgctctcaggccggtggccgtcgccggcgggtcccgtgcatacaacaccggcgcgcagctccgccggcacgagagggacgagtcggacgacgacagcggccgtgggtacgacaccaggcgccccacacgcgacgccaccatgcccgccttcttctcagatgtgttccgtgatccgttcagcgcgccgcagagcctcgggcggctgctgagcctcatggacgacctggcgacgccggccgggcgcgccggcgccgcgacgctgcggcgcgggtggaacgcgaaggagagcgaggaggcgctgcacctgagggtggacatgccgggcctggggaaggagcacgtgaaggtgtgggcggagcagaacagcctcgtgatcaagggcgagggggagaaggaggccggcgaggacgagggcgccgccccggcgaggtacagcggccgcatcgagctcgcgccggaggtgtacaggatggaccagatcaaggcggagatgaagaacggcgtgctcaaggtggtcgtgcccaaggtgaaggaggagcagcgcagggacgtcttccaggtcaacgtcgagtaggagctcaatccgcgcgtgttcggcgtgcgaagttgcaggatgcggatggatcgtctccttttatccaataagaaatgcggcgtgctgtagctttgttttgttttcgaagttatggagataaaagttttggtttacttatgataaaaaattttacttatgcgattgatctcgtatcgcgagatctctcgcgtcgtggtcaaattcaggcggactccgcgcgaaaacggagcgagcgcgcacgtgaagcggaagaaccgtgcgcgagacaattaaagccaaggcgtccttcattttgctctacatatatccatgaaaaatcaaaacttggcgagaggaatcattttgctgtgcatgataaaattcaaaatttggttagaggaacccgttctgtaattggaatggtgacagaattcataaaaaaaatcaaaaacttggctagaggaatccgttcggtaatatgtatggtgagttggtgacagcagcttcaagctggattgctgaagcttcaagaagctatagctccatttcagtcaacaattttaacttgaaaaattgtttacgaatacttgacattgaacgaaatccaatgcgatatgtttgttgcatccttgaatagttatcatattctaggattgaattgtgaattgttgtcgtgtataggacttatatacaacattaccagaaaccttatcaatattggatgaacctaattttcggc

SEQ ID NO: 7262 - DNA, 1460 bp, Oryza sativa
  ref <308>: DATABASE ACCESSION NUMBER: AK064390
  ref <309>: DATABASE ENTRY DATE: 2001-12-06
aaaaaaaaaagaattttccctccaacctgctaaaaccctagcacccgccgcccccgacggcgccgctcgacgacgagtcgccggcgtcggtcgccgacgagagctagggcaagtgcggcggtacagggtttcagaggaggaggggagcatggcgtcgaacaacggcgcggggaccctcaggtcaacctccatcaacggcgtcaagctctactccatcactggcaaccgctacgtcgccccatgggtcctctcgaagaagaagcgcgccctccgcaaggacgcagagtatcagcggaggctggatttgatccatgacctgaggttcgagaccgccaccaccaagatcaaggtgacaccggatgagcagtatgtgatcgcctcaggtatttaccccccacaagttaaagtctatgaattgaaggagttatcaatgaagtttgagaggcacatgatttcagaaattgtagatttccaggtccttggtgatgattactcaaaacttgcatttttgtgtgctgaccgttctgtatgcctgcatgcaaagtacggtagacactatagcttgagaattccaagaatgggaagagatatggcatatgattgctggtcttgtgatttgctttgcgctgcttcatcaccagatgtgtatagaatcaatttagagcagggacgattccttgcatctctttcatctcaatctccagcaataaatgtggtttctcggagtaacatacatgggctcattgcttgtggtggtgaggatggtgtggttgagtgctttgatatgaggagaaaatcttctgttggcagaattaacacagctgtctctcctgaagattttaatcaggaggtcacatctctgcaattcgatgaaaaccaaggataccttatggcagtagggagcagcacaggaaaggtagcaatatatgatctacgtatgtcttcccctttgcgagttaaggatcatatgtatggtagcccaatattaagtattaagtggcaccagacacttaattctactgaacctaagctgattactgctgacaagcatatagtgagagtttgggatcctaatacaggaaataacatgactagcattgaaccagatggtggtactatcaatgatgtttgtgttttccggaacagtggtttgatgttattagctttggacaatagccagatccctgcccactttattcctgcattgggccctgctccaaagtggtgctcgcatcttgataatctaacggaagaaatggaagagaagacagagaatattgtatatgaagatttcaagtttttaacaaaagatgagatggatcgatatgatctctctaagtacattgatcagggtcttgtgagagcgcatatgcatggatatgtgatgaaacttcagctatataagaagctactagctactagtgctgttgatcctgagaatattcaagagaaggttaagc

SEQ ID NO: 7263 - DNA, 1755 bp, Oryza sativa
  ref <308>: DATABASE ACCESSION NUMBER: AK064391
  ref <309>: DATABASE ENTRY DATE: 2001-12-06
agtagacgcgggcacggcggcgccacggccaccgacaccgccgccggcggacatctccgacgagctcgctggcgactcctccgaagatagaatcgcgctactgcagccgcgtcgcctcgtaccacggagccccggcaagtcacactggttgtttcttgcaccgtggccccgacgcccgccgcctgttcgacggaatgcgtccacaagggaagacgttggaaatgggcaagagagccctacctcggagcagcgacggcgacgaagaccggacaggagacctgccggatgggatcctccaccacatcctcgggtccctgccggcgcgggacgccgcgcggacgtgcgtgctcgcgcggcggtggcgccacctctggaagttcgccacgggcctgcgcatcaccgaccgcgaaatgcgggagccggcgcccatggaaaagctccaggatttcgtggaccacctgctgctcctccgcgggcgcgcgccgctcgagacgtgctggctcaacttgacccggctgtcgtccgacggcgacgcccgccgtgtgaacctctggttccggcatgcggttctgtgcgaggtccaagtgctccggctggatctcattcttaatggctttcagctcaagctagacgacctgcctctagcctcccggtgcttggcgaagctaaacctttctggtgtccatttgatgcacagttttcccgatttctcatgctgtccggtgctggaacatctagatatcttcttctgtgacttgtcagatgccaagaagatcacttcacagtccatgaaatgcctcaatatcagacattgcactttcagccaaatatcccgcactcgtatttctgcccctaatctcatttcattgcggctagaaaattattggcaccggactcctgtctttgaggttatgccgttaatagtggatgcatttgtcagagtacacgatcgatctggggattggtatagttgtacaagtggtaatgctgattttgaggaatgcctttgtgaggattgtgacttttgtcatagcaacaccaattgtgtgattatgcaagctttatcacaggctaagaatttggtgttgtcagctcatgaacaagagtttattttcaaaaaggaattgatgcggtgccctacatttagtaacttgaagacgttgttactcattaactgcttctgtgtggccttcgatttgcatggaatcacttccattcttagacacacaccagttatagagaaactcattctttctttttttcgaggttactgaacatgatgatgaggtggaaatgaaaggaagttgtagtcaaatggagagatcatctgcaatatcaaaacatcttaagttagtcatagtcaaatgtaacgcgattgatgggagaattaccaaaattctgaagttcttatctacatttaatatttgtttcagtttcgagtaggctttaaaagttgggctgttccatggatctactactatgttactgttcagagcattggtggcttggtgcttaatttgctgtgacaattgagaaggttgcggtattatgtctgttggtatcatattgatgttctagtcatagtaactgtttaaaactgacaaaataaccttgtctgtatttgtaactgccttactatggcctagggagagtttagaagtgcttgtaatctagttggacggacctagtatactgtgatttgctatttcttttgaaatttttggttaattcggatttattctatgtgggatgatg

SEQ ID NO: 7264 - DNA, 2063 bp, Oryza sativa
  ref <308>: DATABASE ACCESSION NUMBER: AK064392
  ref <309>: DATABASE ENTRY DATE: 2001-12-06
accaaacccatctccagttctccaccatcacacgatcgagcatctcggggccgcgacttcttgcttttccgccctcgccaccacatcgacacgccgagatccgccgttgcatcgcctccaatcgagcccgctcacctcctgcatcaccagcaccactctccgcctccctggccgccgtcgcgccgggtcgagtgccgctcgcgtgcgcgcctccttccccaccgccgattggattcttgtgcagaaatccatcaattcctcaatcctcactagacacatcaacgctccaactccaggctagagaagagcagaaggcttgcggagaagaatggcttctgccgagcgcagcaagaagctgagggtcctgctcatgcccttcttcgccacaagccacatcggcccctgcaccgacctcgccgtccgcctcgccgcggccagaccggatgtcgtcgagcccactctcgccgtcaccccggccaacgtctcggtcgtccgatcagccctcaggctgcatggctctgcggcgagcaccgtggtcagcatcgccacgtatccgttcccgggagcggccggcctcccaccgggcgtcgagaacctctccaccgccggcgacgaaaggtggcgcgttgacgccgctgccttcgacgaggcgatgacatggccagcacaggaggcgctcatcaaggaccaatctcccgacgtcctcatcacagacttccacttctcgtggaacgtcggcatcgccgaggaactcgccatgccctgcgttcaactcaacgtcatcggtttattctccacgctcgccgtataccttgccgctgccgtcgtgaatgactccgattcggaggagctcaccgtcgcagggtttccggggccggagctacggatcccgaggtcagagttgccggatttcttgaccgctcatcggaatctcgacttagtggacaatatgcgcaagttggtacaagtgaacacgaggtgccatggcttcgccgtcaactcgttcttgttcctggacaagccatactgtgagaagttcatgtgcaacggcttcgcgaagcgcggctactacgtcggtcccctctgccttccgcagccaccggccgtagctagcgtcggtgagcccacttgcatcagctggttggactcgaagccgaaccgatcggtggtgtacatatgcttcggcacatttgctcccgtctcggaggagcagctccatgagctggctctcgggctggaagcctccggtaagccgttcctttgggcggttagggcggccgacgggtgggcgccgccggcggggtgggaggagcgtgtcggtgacaggggattgcttgtcagagattgggtcccgcagacggcgatacttgcccactcggcgacggcggcgttcttgacgcactgtggctggaactcagtgttagagggtgtgacggctggtgtcccgttgctgacatggccgctggtgttcgagcagttcatcacggaaaggctggtcatggacgtcctgcggattggggagagtgtgtgggacggagcacgaagtgtacggtacaaggaggcggcgctggtgccggcggcggcggtggcgcgggccgtggcgaggttcttggagcctggaggggcaggggacgcggcgaggatcagagcgcaggatttcgcggcggaggctcatgcggccgtggcggaaggtggctcttcgtatggagatctgcgcaggctcatcgacgatcttgttgaagcaagggcggacgccggcgagtccgcgctgcaacctctgtaacctgtcgtttctctatacgataccgagacattcgttccagactccatccagttcatctcgttctgttgcgttcaatcaaaataaattacgatgtgatgtattgatacatgggatcacctatatatttgttgatataattttttaaaaaatttgacagatgtaattatagtataattgtgatataattacactgtaacttatatgtaacttctatgaaactttcaaaaatatcttgtaatataatattggtgaaacggaggttgtggggacgagtcctctc

SEQ ID NO: 7265 - DNA, 799 bp, Oryza sativa
  ref <308>: DATABASE ACCESSION NUMBER: AK064393
  ref <309>: DATABASE ENTRY DATE: 2001-12-06
atgcctgtatagcttgagcaagtatttggcagtttgctgccaactgctaccctatttcaaatctaggtaagatctagctgcaggttatacagagaaggcaatggccgactgcactacgatgcgtttggcttcatctgtgaccatcatcttgctgctgctcgtagctagccaagctctagtagtctctggcgagtcatcttcctccgcgatgcagtccaagacgttgaacatgaacaagcttctcaacatcagtgaagatcactctcctaatggcggacgccactggatgcagcggatgcagccggacagctgctcggagcagaacgtggtggtgtaccagaacaacgcggagcacctccccagcggcatcccgacctacagcgtggaaatcatcaacgtctgcacggcgtgcacggtgtacgacgtccacatctcctgcggcgagtttgcctccgcggagctcgtcgaccccagccagttccagcgtatcggcttcaacgactgtctggtgaagggcggaggccggttgggtcctagcgaggccgtctccttccagactccaactccttcgcctacccgctcgccgtagctaatgtcgcgtgtgagtaggttttttcagtggaaatgcgtgcgcatgtgttgtacgtagtcgactggcctattagctacgtactgtcttcgatgtttcagacattcagttgatcgagcttatttatctatgggtgacatgcttcgactttatctgcgcaagtgcctggtgtgcattatgtggaggactatataataggttgctatcttt

SEQ ID NO: 7266 - DNA, 1365 bp, Oryza sativa
  ref <308>: DATABASE ACCESSION NUMBER: AK064394
  ref <309>: DATABASE ENTRY DATE: 2001-12-06
gacgcgtagcgtaacccaaaaatctaccaaaagccaccaccggcgcatcaactccgacgaaaccggcagcaggtatcccgatggcctactaagccccacgacgcttcggcgaccgggacgacgacgccgacgacgacgcctcgttctcctcctcctcctcctctccgtctccccctccgactacttcttccccccacgaggctctcccagcttgcgcgcgcgcacgatgggatcgcccatgtcgcggccggcgactgcggatgggagcgcgcgcggaggagggctagccttggctatcgcggacgagctccctcaagaggccgttgccaagcctgccttgatgagtcaggtcatggccgggaacagctctatggtggcaaagatggatgaggtttccagggtagctgatgatctgatgttcgctgaagatctgcagctggaagaggtcatccggttctcagctcactcagctggaccgaactgcgcggtgtgcgggcaggcgaccccgtcggtggatgcctcatggaagcctgactactgcaccatctgcatggagacggtggacgccatagagcggttcgccatccccgggtgcacgcacgccttctgcgccagctgcgtgcgccagtacatcgccgccaaggtggaggagaacgtgctgtccatcggctgccccgacccggggtgtaaggacagcggcggcggcgcgctgcacccggaggcgtgccgtgacgtgatcccgccgcagctgtttcagaggtggggcgacgcgctctgcgactcggcgctgtcgtcgctcaagttctactgccccttcagcgactgctcggcgctgctggtggacgacccaggcgacggcgaggaggcgatcacggacgccgagtgcccgcactgcagccggatgttctgcgcccagtgcaaggtgccgtggcacggcggtgccacctgcgccgagttccagaagctcggcaaggacgagcgcggccgggacgacctgctgctgaggaaggtggcgaaggacagcaagtggcagaggtgccccaagtgcaagatgtacgtggagagagtcgaaggctgcgtgttcatcatctgcaggtgtggccactgcttctgctacctctgtgcatcgccaatgtcgagggacaaccaccattgcaagaagtgcaagcgaacgtggtgaatgatctgaagctgcagaactctgattgagtcgaagaagttacttaagcttcgtactgttaaaaatggtcaattactatcattaacctagtttctacttattagcccgtgccgtacttagcattaattagctcgtatattaccactctgatgtcatttgtcaatcaatatcagtagtattactcc

SEQ ID NO: 7267 - DNA, 1726 bp, Oryza sativa
  ref <308>: DATABASE ACCESSION NUMBER: AK064395
  ref <309>: DATABASE ENTRY DATE: 2001-12-06
gtgcaagcgtatcacagttcacaaaagcagcacagagctagtctagtggcagccatggcgagctcagagcgcggcggcggcggcggcatccacgtcgtcttgctcccgtacccgagccaaggccacatcaatccgatcctccagttaggcaagcgcctcgccggccatggcggcgtccggtgcaccctcgccgtgacgcggttcatcctccgccagggcgagccgccgtccacgggcgccgtccacgtcgccgcctactccgacggctacgacgccggcggcttccacgaggccggcagcgccggcgagtacctgtcccggctggagtcgcgcgggtcggacaccatggacgcgctcctccgcgccgaggcggagcagggccggccggtggacgcggtggtgtacgactcgttcctgagctgggcgccgcgcgtggcggcgcgccacggtgcggcgaccgcgtccttcttcacgcaggcgtgcgcggtgaacgcggcgtacgagagcgtgttcacgggccgggtcgagctgccgctcgccgccgacggcgaggagccgctacggctgcccgggatttccgtcggcctcacgctggacgacgtgccgacgttcatggcgaacacggaggacagcccggcgtacctcgacctcctggtgaaccagttcaagggcctggacatggccgaccatgtcctcgtcaactccttctacgagctccagccacaggaagcggagcacatggcgtcggcgtggcgggccaagacggtggggctgaccgtgccatcggcgtacctcgacaaccgcctcccggacgacacgtcgtacggcttccacctcttctcgccgacgacggagacgaaggcctggctggaggcgagaccaccgcgcaccgtggcgtacgtctccttcggcagcgtggcgacgccgagcccggcgcagatggccgaggtggcggagggtttgtacaacaccggcaagcccttcctcgggtggtgagggcatcggaaacctccaagataccggaaggcttcgccgccaaggcggcgaagcaagggagagggctcatcgtgacgtggtgcccgcagctggaggtgctggcacacccagctgtggggtgcttcgtgacgcactgcgggtggaactcaacgacagaggggttgagtgccggtgtaccaatggtggcggtaccgcagtggtcagaccagacaatgaatgccaagtacattgaggacgtgtggcgtgttggggtgcgggtgcggcccgacggcgagggggtggtgaggaaggaggagttggagaggtgtgtgagggaggtgatggaaggggagaggagcaaggagttcatggagaatgctaatggttggaaggagaaggccagaaatgccatgtgtgaaggtggcagctccgacaaaaatatcgtcgagttcatcgctaagattggagtggaccgaaaatttaaatgattgagacaggtggattcgtcggccattggtcatgtttcctttctcatttgatttcactatcatgttttcagatgcaataatagtcgttatctgtcgctctagtctttctttttctagtataggatcaaatatttgcgatatctttttcccactatattcaatgaaatgggcacagtcggatgccgattcgttaaaaaaatattttacgatatgtatagtaaaataatcagtcatcagtcaatgcattaattgcatagttgttc

SEQ ID NO: 7268 - DNA, 1523 bp, Oryza sativa
  ref <308>: DATABASE ACCESSION NUMBER: AK064396
  ref <309>: DATABASE ENTRY DATE: 2001-12-06
gttctcactctcgctgcccactctcctccttctccggccgccgccgccatcgccgccggccgtagcatggttcttgcttgactgacctgaataaacagtaggggtgatgtcgatggaggaggcggaggagtgctcggcggcgtgcggcttctcgctgacgtgccaagaagacggcgccgacctcggcgacggcgtggtcgacgacgacgacgacggcgacgtattcttgttctacaatgccgttgcggcggcggacgacgaggaggaggaggaggagtacgtggagcagatggtctccaaggaggctagcttctgctgctcctcttcttcctccctcttcgacgccgccgccggcgacggctacggcgacggcgacggcgacggggactggttccggcaagcccgcctcgccgctatcaagtggatcctcgaaacgagggggtacttcgggttcggccaccggacggcgtacctcgccatcgcctacttcgaccgcttctgcctccggcgacgcgtcgatagggaggcgatgccgtgggcggcgcggctgctgtctatcgcgtgcgtgtccgtggcggcgaagatggaggagtaccagtcgccggcgctgtcggagttcgacgccggcggcggccgcgtgttctgctcggactccatccgccggatggagctgctcgtgctgtccacgctggggtggcgcatgggcgccgtcacgccattcgacttcctcccctgcttctcctcccgcctccaccgccaccaccacggcggcgccggcgccgccggccatggcgccgccgccgccgcccgcgttgccctcaacgccgtcggcttcacctttgccacagctgaagctggaagtgtgctagattacaggccatcaactgttgctgcagctgcaatcttggctgcatcctatggagctccactgacaaaagaagcattggagtccaagatgagcaacctttctccatcttgtcttattgacaaggagaatgtacatgcctgctacagtatgatggttggggacatgaacaacaacaggaggagcagcaagcgaccattgcaatgttcagactccaatgagattaccaccaccagtacatatgattctgttcttgttgatgatgttaccgacaccgccgccttcgctgcgacggcgatgaataagcggctcaggccagagccgccgcgaatccgttgaggaagctagcaccaccagggacacacaatttttagtcagatgtctagggggcgcttggtttggatcttctccttttccccttctttttttctccctttttttgacataagtttccaaaatatttattaggttctttgagccattgccattggttggcatttggcaaatgttgttggattggattggtttggtttgtgagaaggagaagagataatgaacaaaggaaaaaaggggctgagtgagctctcctaaggagaggagagcttgagttacttgaagccccaaattccagtgcccaaatggagcacatttcctctgg

SEQ ID NO: 7269 - DNA, 2364 bp, Oryza sativa
  ref <308>: DATABASE ACCESSION NUMBER: AK064397
  ref <309>: DATABASE ENTRY DATE: 2001-12-06
gagcctaacgttgcacctgcgccgcgtgccaccatgtcatctcaggcgccgtcggcgccggtcacgccggcggctccaccgccgcagacgccacccgtgacgcctcctccggtgactgctcccccgccggtctcaccccctccggtgacgccaccaccggtgactcccccgccggtgtcacctcctccggtgagtcccccacctgtgacacctcccccggtgagccccccacctgttacacctcccccggtgactcctcctacaccggtggctcctccaccagtgccaccgtcaccgcctccaccgacgccgaccccaacgccggtgacgccgtccccacctccgccggtgacgccatcccctcctccgcctgtcgcaagcccgccgccgcccgatgtcccaaccgccccgccaccgagtaacaaccccccgtctccgccaccgtcccccagcaacgtcccagcctcaccaccgccaccgcgaatttctttatccccaccgccaccgccctcgacgccgacgcagtcgggtgcctcctccggctccaagtcctctaacaacgggaccgtggtggccgtcggcgtggccgtcgcggcggtggtcgtgctcggcctcgccgccggtctgatctacttcttcgttagcaagaggcgccggcgccgccaacacccgccgccgccgcaccacccgggctacccacccttcccagccgaattctacgacccgcaccggccgccgtcgcagcagcagtcacacgcgctgtcgccgagcccctcgtcgacgccgccgctgctgctgcagccgcactcgttcgtgagcagcggcggggcgtccgaggcggcgtcggcggtgccggggatcgcgatgatgggcggcgcgttcgggtacgacgagctggcggcggcagcggacgggttctcggaatcgaacctgctcgggcagggcgggttcgggcaggtgtacaaggggacggtgcgcgggcaagaggtggccatcaagaagctgcggtccggcagcgggcagggcgagcgcgagttccaggccgaggtggagatcatcagccgcgtgcaccacaagaacctcgtctccctcgtcggctactgcatctacggcgagcagcgccttctcgtctacgagtacgtccccaacaagacgctcgagttccacctgcacggtagcggccggccggcgctggactggccgcggcggtggaagatcgcggtcggctcggccaagggcctcgcgtatctgcacgaggactgtcatcctaagattattcatagagacatcaaggcagccaacatcctgctggactacaccttcgaaccaaaggttgcagattttgggttggccaagtaccaagccactgagcagaccgctgtttcgacgcgcgtaatgggaacttttggatatttagctccagagtatgctgccacgggcaaagtgaacgaccgttccgacgtcttctcattcggcgtgatgctcctggagctgatcaccgggaagaagcctatcatggtgtctcacggtgaccagcctgacacattggtttcttgggcgagacccctgctggtgagagctgtggaggaggagaacttcgaggagctggttgacccgaggctggagaacaactacgacgcgtacgacatggggcggctgatcgcctgcgcggccgccgccgtgcgccacaccgcgcggtctcgcccgcggatgagccagatcgtgcgttacctggagggcgagctggcggcggaggacctgaacgctggcgtgacgcccgggcagagcgcgatgcagcggacgagcggcggcacgacggaccagatgaagcggctcaggaagatggcgttcggctcggccaccggtacgggcaccgtcagcgagtacacgagcagcgagttcagcgagccaactagcgagtacgggctgaacccgtccaccgagtacaccaccagcgcagccggcggcgacaccggggaggtgacggtggacgtgcagatgacggccggcgccagcggcgaggcggccggcacggagaggctgagcaggcggaccaccgctagacgtggcgggcgggtgtgacagtgcgacaccggaatttcggtgccccgcccggcgagcccggcgacttttagccgtacgtgatcgtcaaggttgcgatcgaatgaattaaatcattttgttcgtgtatatatacacgtaatgctgtcactgtaaattaaactacattccaaatcccgcggttgtttctttggttttcgaattcatgcaatttttgttggagtggaagtttgtaaattgtacctaccttcactaaccacccaggttaataaacatcaaagatgagatttgtttggaagctgg

SEQ ID NO: 7270 - DNA, 1653 bp, Oryza sativa
  ref <308>: DATABASE ACCESSION NUMBER: AK064398
  ref <309>: DATABASE ENTRY DATE: 2001-12-06
gttgcaatcgcggcttttctcctcctcctccgccgctaaaaccctcggctcaccgccgccgacgacttcgccgccggcgagcgagaaggcttcgacccaccaaccaagacaagttgtattagctagctagcaagccatggtgagcacccggggggccgcggcgaatgcgcctggtcggagggggcggccgccgaaggctgcggaggaggcggcgaggagccccgtgttgtcgtcgccggtggtggcggcggatgcggcggaggggtacgagagggagagggcggagaggatccgggagaacatggagcggatgcagaagctggggatactcgacctcgccacccgcttcaaccagtccgcgggcggcctcgccgggagcgggagcgggagaggccgcgggcggaggaaggcggccgtgacgccggggtccgtcggcgtggggaggatgatcaagcccgcctcgccatcgcctgctcgtcggtctctcaggctgaagaacgtagagcctgttagctactgtgaaattcggactaaaaaggacaaggacgacaatgaaggtggaaactctgttctaatcgaggctggatcaaaggaagaagtttacacggaagaggatgagaaacttttaggcccttgtgtggaaccctggactctctttgtggatggttatgggaaagatggtaagcgcatctatgatcaagtgaggggccaaacctgtcatcagtgccggcagaaaactcttggccatcataccagctgctgtaaatgccagattgtccaggggcagttctgtggggattgtttgtacatgaggtatggtgagaatgtgctcgaagctaagaagaatcctgattggatatgtccagtttgtcgtggcatttgcaattgcagtatctgcagaactaagaaaggatggtttccaactggtgctgcgtataggaaggttgtcagccttgggtacaagtctgtggcttactatctcatcgcaacacagcgtgcatccccagcaggctcagctgattcaaacaaggtggcagctaccaagtcagaagcctcatccgaatctgaccaggctccagttgctaaggaggatcaagaggatgcagaaatgagcggcaaagctatccagaaggtagaagctgaccaccaagtgaataatccccctgatgacagcgacaatgatgatagcaggagcgaatctgtcgtgacttctgactctcaggattgtcaagtaaatctggacattgggtgtgccactccatctaagccgacgggtccaaagaagaggaagtggatcgaacgaagccctgactgtgttgcgagcagactgaggtcccgttccaacaaatcatgaacagcctgatcttatgggcatgaccgtgctggtgcccagtgttctcggtggtcattaccttttgcgacggacaggtttactggcatgtgtgtttaaagttccatgtccgtgaagtttctagtgcattttgtgtttatagctgaattgcagcatttgattgtagtgctagtgccaactcttttgcttcaaacaatgatgcctatgtgcctatgtctagtgtggactccctattattatgctttctgatgtaagattagtgctccaatgaactgcaatattaataggctatcatcgcagct

SEQ ID NO: 7271 - DNA, 1717 bp, Oryza sativa
  ref <308>: DATABASE ACCESSION NUMBER: AK064399
  ref <309>: DATABASE ENTRY DATE: 2001-12-06
ctcgactgctccacggccgccgccgccgccgccgccgatctctgctccggtgagcgatgccgaggcttctccttcgccgtctctgcgtacgccaccgccgccgcccaaaaccccaagccctcgccgccgccgtctccaacgggaccacctccgccattgcggaggagctcaccgacgacctcctcgtcgagatcctctcgcgcgtgccctacaagtcgctctgccgcctcaagtgcgtctccatgcggtggcgccgcgtcatctcccaccccgaccaccgccgccagctcccgcggcatcacctccagcccctcgccggcttcctctacgccgactaccgcgtactaaaccgtttccagatcgtcccggcgctggatccccctcccctcatcgatccctcgttttccttcctgcccaagtgtgatgatctccagctggtggacagctgcaatggcctcctcctctgccgctgctggaatcagctcaacgaacacaggacattcaactacgtggtgtgcagtcctaccgcggagaaatttgtcgtcttcccggactccacctgctccaagaaggtccggccgtttttggggtttgatccggctgtctcgtctcacttccatgtgttcgaggttgtggaggattgggattattatgattgtgatgacgatgatctggaatgtgatggcgtcgaagatgttgtcggattgaggatctactcgtccgaaactggagtgtggagtgatgagattgataatggatggagcaacagaatcaggattcggcgtgatcaaaagggtggttccaagagtgttttcttcaatggaatgctgcatttggtcgccatacagcctgtggtggctgtggtggatgtggaggggaagaattggagaaccatccctctggcacacaaggatggttctcctttgtgtggtgctcatcctccttgtgcttctggtccagagggattcattgctctgtcccgggacctgctgcactttgcaagtactgacagctatggtgactgggaaatatcagtgtgggttcttgatgattactacggcggacaatggaccttgcaacacacggtcagcactatgcgtccatttgagcggacgatgaggaggaggatgaaccctgatgactgcactcttgtctggatcgaaggacgtaagatgtttttcatgttttatgactatgttcattgtatactcacgtcatatgaaatggacagtggggaagtacgatgtctaagtcgtcctcggagttattgcgagccaccatatcttccatatattcccttgttcttggaatcattagcagatgggccctaataatctaccgtactggatggcagctctacctgtgtcaatcttttccgatgatatgggaactagatcaccaattgctacgaggattgagccacttggactgccacagcattgtcttatccatcaatagcatgatatatatgcttttctttgtttctgagattgacacatttctaatgctttgtgaaacagtactatgttcttaagttggatggagtatcaataccaaagttcggtgtggtaaaaaaggttcttgcttcatgttacttttggttgtgcttgatttcactcctgtaacctgactttatggtgctagttatatgtgtgtactcagtgactgccattttcggtctaactttatgccagtatagctgtatgtgtttatttct

SEQ ID NO: 7272 - DNA, 1305 bp, Oryza sativa
  ref <308>: DATABASE ACCESSION NUMBER: AK064400
  ref <309>: DATABASE ENTRY DATE: 2001-12-06
atcgcccatcgccactatacatcacgcggcgaagagagggagagtgattggccgcggccgccgagaataactggagattcgccgtcgagcgaatgcagcaggctatagcggcgtagcggcgacgaccgccgacggggatggcccctgtggcgacggtcttgacggccgccatgtcctcgtaggccgcctctgcgcagtaggcgccggcggtgccgtcgcttcgactacggaggtttctggaccaaggtccttattgtggattagatttggatgattttaaaactctttaaacacaggatgcagaacagctcaataacagaagcgctggaccctggagggctatctccaatgctggttgaatatgaagtccggagcatattgcttagtttaaatttgttgtggtgaatagcgaggaaatcagctctttatgagtttgctcaagattgattgaagccagaccttttggtgaatattatcaaggacagttcatatggctagaggaataaacgcagccacacataaattatctacctgtaggaggataacccctgaggattgacaaggaatcaaggtgatattttgctacctaatgctcttcaaatagttagttgaattttcttccgcctattaagaaaatgcattgcatcatattttgtggtctcctcctccctagtccctaatgctgtatgcgtgtggattatgattagtgttatggcaatgaggagaaatgaaaggccggtcttacggctgcctcccattcccttcccgattcaattagtctctggtatgggacgggatggtagtagcatgatgtgcagttcggcgaaaggttctctgagccattctttctttacctccacttatgttcagtacactttatttcgtgttctttttagggtaaaaatattgcaggttattagggtcctcattcagtgtgcagatatacaacaatgcacgcacgttggaatttgcatagtcttgcgattttgttcttgcatactcttccagaagcattgatagcttttgtcgaactcctgattttgttcatagtttcagttatttgctggttatgggcccttccagccagccttcctctggattcttgttcttcgttactatcatcactgggcatcataggcgccatattggggcttattgtttgttgatttgagccgtctgtgccttttttgcttatttgttgtgtcgagagctgttgctttacttggaagtagtagatgtgctgatatgaaacaattacggtgtaatactccgtagtccgcaaatgactaacttatttgaccgtcc

SEQ ID NO: 7273 - DNA, 1428 bp, Oryza sativa
  ref <308>: DATABASE ACCESSION NUMBER: AK064401
  ref <309>: DATABASE ENTRY DATE: 2001-12-06
acaccaacatacggagttcgagtgacatacgagcagcagccaacacaagctcgatcgaaagttctctcacaagttcagagtagcatttggttagtgacagtaactggtcagcgtctctcaccatgtcgtccaattttgaggccaacaacaacaacaatggcgagaagcagctggtctgtgtgaccggagcaggtggcttcattgggtcgtgggtggtgaaggagctcctcatccgtggctaccacgtcaggggaacagccagggatcctgctgacagcaagaatgctcacctgcttgagctggagggagccgacgagaggctctccctctgccgcgccgacgtcctcgacgccgccagcctccgcgccgccttcagcgggtgccacggcgtcttccatgtcgcctccccggtgtctaacgaccctgaccttgttccggttgcagtggaggggacgaggaacgtgatcaacgcagcggcggacatgggcgtgcgccgcgtggtgttcacgtcgtcgtacggcgccgtgcacatgaaccccaaccggagccccgacgccgtcctcgacgagacctgctggagcgactacgaattctgcaagcaaacagacaacctgtactgctgcgccaagatgatggcggagatgacggcgacggaggaggcggcgaagagggggctggagctggcggtggtggtgccgtcgatgacgatgggtcccatgcttcagcagacgctcaacttcagcaccaaccacgtcgcccgctacctcatgggcaccaagaagtcctaccccaacgccgtcgcggcctacgtcgacgtccgcgacgtcgcccgcgcacacgtcctcgtctacgagcgccccgaggcacgcggccgctacctctgcatcggcaccgtgctccaccgcgccgagctcctccggatgctcagggagctcttcccacggtaccctgccactgcaaagtgtgaggatgatgggaagccgatggcgaagccgtataagttctcgaaccagaggctcaaggatttgggtttggagttcactccactgaggaagagtttgaatgaggcggtcctatgcatgcagcagaagggtcacctgcctctgatttatcccgttccaaaacgtgcttacctataaaatcaagataaaaatacgaattcgtctgttgcgatgggaaacagagagcaacagggaaaaaacaaaggaaaaaaaaggaaacacaagggctctgagattgtttatttgtgcaagtgtagtaggcatttatattttgttcttacacatgtaaagcccttctgtaatgaacaataaggtcccatggagggaacggcaaatgcaaatatggccttcatttgtattctgggcttcaggatgtaaatttgaatatcattgtatttattttctatgttgcagggaatttccgagt

SEQ ID NO: 7274 - DNA, 3311 bp, Oryza sativa
  ref <308>: DATABASE ACCESSION NUMBER: AK064402
  ref <309>: DATABASE ENTRY DATE: 2001-12-06
gatttcgaagagaagaagaagtgcagtcgtcacgacatgaagaagaacttgcgaaatgatgccaacgaagagaagaggaagagcagcgatgacatgcgagatggtgatgacgaagagaagaagtgcagtcgtcaagacatgaagaagaacctgcgaaatgatgccgacgaagagaagaggaagagctgtgatgacatgcgagatggtgatgacgaagagaagaagaagcgcagtcgtcatgacatgaagaagaactcgcgaaatgatgccgatgaagagaagaggaagaggaagaggaagtgcagtgatgacctgaagaagagtgtggtaaacgatgccagcaaagaggcgacgtcacacagtgactggagaaagaataggaaggctggaagcgatgctgagcaaagggggaagaagttgttgaatggcgacaagaaggctaagagtaggaaggtgaccactccattctttgaaaagatgcggaaaataaaaatgcagcgcacgagcaaccagaatggtgagaagaatatgaagagtgacggtgacagctataagaagacagtgccgctctcagtcaacaagggtaagatggagaaagatggaacgaacaagaggactttgtctaatacacttgttgcaaaggagaggaaaatgcgacctagtgacagtatggagatgaagatgaagaaaaagaagcgggatgcatcattcgttcaacctgatgagaggacagctcagacatttagcactaaaaacaaggaaaagaagaggaaggcgccatctacaccattgaagagggagcagaaggagcgagtggctagcagtgacaataaaaaggagacgaagaaggcttgtattgttgctataggaaatgagaaaaaaaattgtagggatggcaagaagaagaaaaggaaagcagccttcgcattcttcaaatttgtgcgcgacgagttcgaggaattactgttcataccaccagcagttgcacccagccttaaggatttaattgatcgccatgtatatcttgaagactcagaggggaagtgttcaaagatcaggctatcggtggtggatggttccctagctttttatgagggatggaacagtttcgtttcagaacattgtattaagtggggtgaatttctattatttgagtacacaccagaatcaacattttctgtgcgggtgtttggtattgattcttgtgaaagactacatttcagtgtcaaaagcggaggaaaaggtgctgtgaagaaaaggaaagaaaggcatacattatctgatgatttgatatcacattataatggtcagtatcaggactctgaagacatacacgatggccccaatgtttctggtgaatctcctaggagcaaagagcccaaaataacagttgatgctgagattggtaccaagaatctagttgctaaatctataaatgcagcttccgaaacacaagactctgaaagagttgaaagtgggattggatatggatccttaggggcactaggtaataaggttagaaatttaagcaatggggagtgtgatacaaggagtgactctgtgttctgtatccaagaaaaaacaagaagatctgaggttattataataagtgatgaagcttattcaacacaagtagacgaggataccatgaagcaaacagcaccaagtgaagcttcagaaatacatcatgtgactatcaatacacaaaaagaccttgaaagagttgtagatggtgtttgttgtgaatcctcagtagcactaaacaataagatgggaaatttgatccttggagagcccaaaaacaagaatatttcaccagcatgtagcacagaaaaaacaaatggatctgaaataactccaaccaccggtgtaattcctttaacacaagaaaatattgatacggtgaagttaaatacactttcttgcttcgaggaagacagaagcacaacaagagaatctgaacttgctgctgctattccaacaacatcagaaactcatgattcagataaagatttaggacagaaacatcgaaggaattccgttcaagtaaattctatcatagctgttgataaatatcctaatgatagtgagatgaatattagtggaaatattttcagaatatatgaagctccagcgggtactcggtgcttggagaagtggaaaaggggtattgtgaacggtcgagcagctcttgatgacattggacaggttagacctgaaaaaacacaaaaagctggagagaagttagttggtaattgtggtgcaatgggagaaagtccagttgatctacggatagagtctgatgttactgatacctgcctcaaaccaattctcaacatacctattgaagaactctcgattcttgatagcgtatcaatatccaaatgcggacgtagcaggacagaggtcaaccatttgttcaatcaaaaaggagctactgttcaactgcaaacaaaaaaggagccattgaaaccaactggtagcagcggaaatagaaagggggacaaaattgcagtgtctgtcaaccgtgtatttgctcatcaatcagaacttcagatcccccagcaggaaaatggaaattttaccagttgtgtaaccccagtggctctgctgcctgctaaggctgaactcctggatctggatgatcattcccttcaattctgcatcccttctaccattcagaaatggcttgagttgcccaaatcgcttccaatcacttgtcggcaaaaaggaaggtatgaccggaacgtcgtaatcctcaaggatcccatgaggaggctatggccggtcttctaccatgacaaaccggtcttcgtaggcttcaccgcgggctggaaaccttttgctgcagcaaacaacctccaggctggggatgtctgcaagtttgtgaaagagatggacgaagatgagcttgcgttccaggtttatatcacaagaaagtgatggcaagtgctctagctgggtgcaccatcttcagtagaacatggctgctctgctccctctgtaaatataatcttaggcatcaggaactatggcttttcttttggttgcaacgacaacaatgtgctggctggccaccaggttgtgtgaaagccgcggttctaggcgccctccactactgacgagatgatggttctttttgggttggctgttgtgctgcatacttgtcctgaccaattggtgtaatgtatatatatagccttgccgtccaagacgacaagctgacaatattgtggacttcaacaatgcaaaggtcaaggcattgaacttgtgttgaatacttgaataagatgttggcactttggaaccag

SEQ ID NO: 7275 - DNA, 1795 bp, Oryza sativa
  ref <308>: DATABASE ACCESSION NUMBER: AK064403
  ref <309>: DATABASE ENTRY DATE: 2001-12-06
ccggataccagatcagtaatgacatcatgaaccaagtcaagtaccgtgcaggtcttgaccttgcctgaagcatcaatgtcgcttggacagagaagcagcctgccaacaagggaatcaaaacagttatcagcttgttctagtgcattcatttcttgtccgtcagtgatgaggccttcaacaatccatcgtcttactaagctggtcctcctgattttgtagccaggtgggaaaatagatagatacagcatgcaactccgatacttattaggcatatcaaagtagcataactctaccatcttcttaggccagtaatcatgcagtgatcctctattgcctagtgcatcgtacacttggcttgaagaaccactctcattataatacagaaaccgaaggagcatcttcataaagtagatttgaggttcaagatagatcaacatgcatggtagaattttccgtagccaaccttccctttcatgtttaagcagagatatagctctactgaggaagaagttgagaacatgaccggagctatctggattgaaggttttatacggagagaaagtctgggccactttatcatcattatctgttgtgactataatggcactaccagcaggacaatcatctgggaaagcaagctttatatgatcccagatcaatttgtcacggacatcgtgaagaataacaaggaagattttacctctcaaatagcaccgaatcttctccaccagcttctcctcgttccagccatccatttcactcctgaacttgttcagagggagaacaacctgacatagtatatcttttaatatctgaacgtgagattgagctccgttgacagtgatccaggccttgcagtcaaataagatggcgacggaggagtcctggtaaactctttcagcaatgatcttaccggcttccacgccgactcccacaataggtatgagcctgggccctgcagattgatcctccatgagccatctgatcagctcgtttacagtgctcttcttcaggttggctggtggttcagcgaaagcaaaagaacgtctccaagcagtttcatctccatgttcaccatcgtcatcctgttcccacaattgacttaaggtgtcaaagcgggggcaaatatcatacgttttccgccggtcgttcacctcactcagtcggaccttgatgtcttggatccgcgaggccagccggtggcagacggaaaggttccggacaagacgggagactcgctggaagtggctgaggaggcccttggatggcggccggccggctgcgacacactgcgcatactgctcaacgcagtcctgacagtcgtgggcgagttccaccgcctgcttgatccatggcgcgcacttgttgtagtggtggcggtcgagggtgctggcctgctgtttcaggagcagcaggaggaaggcgtccatcatctccatctcgtccttgatgaactgcatgtcgcggcggacgcggccaagcagccgtgccttgtcagcgagcacggtgctgatgcggcccagcagcgtgtcgaggacgcccttgactgagccgatcacgagctgatctgccatcgccggcggccacaaagatcgatttgcatttgctggttggtttcagtgggtggtgatcactccaagcaagctaagggagtgaagctaaatagcaggagtacttggctagctagcgctgcacctgcacgtggagtggctcgcattcgttgtatggctgacccatcctccgctgaccttaattgtggattagttttaacatggaacgcgtggttgactttctc

SEQ ID NO: 7276 - DNA, 1781 bp, Oryza sativa
  ref <308>: DATABASE ACCESSION NUMBER: AK064404
  ref <309>: DATABASE ENTRY DATE: 2001-12-06
aagagcaacgagctgtgtcgacgctagctaagccaacaccaacgaagattcgaagctcgcggttttcttggctttggtcgtaagcatcaaaaatggccggagctggagaatacggcggcggcggcggcggcggcggcggcttcggcggcgacttcatggtgctgcggccggacaagggcggcatcggcgacctgttccacctgctgtggtcgtgcaaggtggcggagaacgccgccgtggactgccccatcggcacggagatcgccgagcgtcggcggcggtgggcgctgttcgtgtcgctggtggcgcagatgctgctgctgtggacgaagaagccgatggcgctgctcggcggcgggacggagtactggatgaacctcctcaacgagaatggcggcagcgtcttcatgctcatcaccaacgctctgcaaggaaaggtgagaatgccagacaaatcatccatcaattaccgatcatgcattggattgcttgacacaagaatcgatcttgacgagaagatcaaaccagaggatagaaactaccacgctgccctgtcgatcatggctgcaaaactagcctacgagaacgaactcgtcgtcagaactgttgttcagaaccactggcagatgaatttcgtgggcttctacaactgctggaatgaattccaggaggactacacgacccaggcgttcatggtgtcggacaaggcggaggacgcgagcctcgccgtggtggcgttctgcggcacgaagccgttcgacacggagcagtggtgcgccgacgtggacttctcgtggtacgagatccccggcgtcggcaaggtccacggcggcttcatgaaggcgctgggcctgcagaggaacggcggctggccggagcaacccaccggcgccggagacgacggcggcagcgacaagaagccgttcgcctactacgtcatccgcgagcggctcagggcgttcctggcggagaacccgcgcgcccggttcgtggtcgccgggcacagcctcggcggcgcgctcgccatcctcttcccgaccgtgctggcgctgcacggcgaggaggacatgctggcgaggctccacggcgtgtacacgttcgggcagccgcgcgtcggcgacgaggggctctgccggttcatggacgggcacctggcgacgccggtgagccggtacttcaggttcgtgtactgcaacgacatcgtgcccagggtgccctacgacgacacggcccttctgttcaagcactttgggacgtgcctctacttcgacagcttctacaaaggccatgtgacggaggaggagccgaacaagaactacttctcgctgctgacggtggtgcccaagtacgcgaacgcggcgtgggagctcgcccggagcttcgtcatcggctatgtcgacgggccggagtacggtgagggttggctgatgaggatcgccagggccgccgggctgctgctgccgggcctgccgccgcacgcgccgcaggactacgtgaacgccaccaggctcggcgccgcctcgctcgagccgctccgataggtagctcgtcggcgtcggcgccaacacatttagtagtaaactagtaacaggcttgtgattcatgattcatgaagtggaatgcaacatccacagtgtaaattcatgccttaaacacaataatatgattcataaagtggaatgcagcattcattttcagaattcttgaacaagacagtgtagattcgatgtaaattcatggcttaaacacaataatatgatgaaaatcggtccggttggcat

SEQ ID NO: 7277 - DNA, 1594 bp, Oryza sativa
  ref <308>: DATABASE ACCESSION NUMBER: AK064405
  ref <309>: DATABASE ENTRY DATE: 2001-12-06
cgttttcagattctactactagcagtttgaaggcctcatccaaagtaggcaaagggttttctgcaagcatgaagggaccggaagtaccacctgacctttcttttactggtgctgcccttccctccaatccatcatttgatgccaagctgagtagtaacttgaacccattaccagctgctagcacagatctctcattgtcgttgccattgccgtcctcaaatgacagtcctgctccatcttcgaatcatgatgccaatacagagggtatggactctagcagcaaaatcaatttatcatatgatgaggatcagaaggtttggatcccacaagataagaaggatgaaatggtcttgattcttgtccagcggcagaaagagttgcaagcacatatgagggattggacagactgggctcagcagaaggtgatgcaagtcactcgtcgacttgccaaggagaaggaagagcttcattcacttaggaaagagaaggaagaagcggaccgcctccaagaagagaggcacaatctggaagagcgcactcggaagaagcttttagagatggaatctgcgatttctagggcgaacacccagctggaaaaggcagaatcttctgctcgtagacgtgaagccgagaatgaacagctcaggatacagatggaagctgcaaagcggcatgcactagtgtctgcaacaaatattttggagctttcaaagaaggatgagaacagtcataaaaggtctcagcattgggaatctgaaagagccctgttgcaagaggatcttgctgctcaaaggaacaagctatctcaggtccaccagcaacttcatcatgctaaagagcagaaggatcaaatccaggcaaggtggaggcaagaagaggctggaaagattgaggcaattgcccgtgtaagcttagagaagaaagagagggatcagattgagacatcactgaggtcggaagagaacttcctgcatctcaaagcggagaacgatacgcaaagatacaagagccagatacgtgctctcgagcagcagatttcgcagctgaaggtatccttggactcgttgagggttggtgcccctcccaagtggggagcagacaacagaaccaacgcgttgcgcctttctgaagggagaaagaatggcagcgctcaaattttggccaatatagcagcggtaccccaggatttcgactttgacgacatacagcgtgaccgggagtgcgtcatgtgcctgagcgaggagatgtcggtcgtcttcctcccttgcgcgcaccaggtggtctgcgcgaaatgcaataacctccatgacaagcaagggatgaaggagtgcccatcgtgccggacccccatccagcgcagggtgtgcgcccgcctcgccggttgctagacttcttcatatacaccattttgttttctctttttatttgttttttttgattgatttgctgagcttgccttggatggatggatggaagattggatggaataatgagtggtggtgagagtggttaaactttgagaataatatacatggttggtcgcacatcaatcaaaaccccgcagagataagggataatgggatgggtgttggtt

SEQ ID NO: 7278 - DNA, 1743 bp, Oryza sativa
  ref <308>: DATABASE ACCESSION NUMBER: AK064406
  ref <309>: DATABASE ENTRY DATE: 2001-12-06
gaaattcctctcatttgggggaaaggcgtcggcggcgagagaacggcggcggcgaagaagaagatggcgtccaacttctccttccctccgttgacgccggagcagatcgcggaggcgctgcacacctacggcctcgcccccaccgccaacctccgcgcggaggacatcgccaacccgcagccggatctcctccccgccgtcatctccaacttcctcgccaccgtcgtcgaccccaccggcgccgacgacctcgacgggcagctaggattcgacgcgctggcgtcgctcgacaacccggagcactacatggagggcatccgggtactccgcctccacaagagggccagcgctttcctcgagtccatccagttccccgggttcacgctccgcgacctcctccgccccgacccgcgccgcctcgtgcaagtcctcagcgccctcatcaacttcctctactacagggacgacaagctcgccctcctgcagcccatcatccacgagttccccaacttggatgaacggtgcatggagctcaaggccaagcttgccgagcatcagaaggcaattgccgatcatgagctcgcggcgcaaatggaggagccgatggttcagcagatagaggcggaggtcaattccctgaagcaaaagcttgtagagtacaacaaaaagcagctggcactgagagccaacgcgactgcgatcaatgacaagaaagaggagacccacagaaagattgccaaaaatgattttgagttggtgaaactagcacaagaaaattccaagttattgccaaaaattgttgagtccccagaaaagcttcagagggcccttgaagagaagaaaacagctcgtgctgaattaaagaatgctgagaagatagcaacgcaaagtgtacaagagaaaactgccactttggagatatacagtaagggttatgaaaaattgtcgaagcattctactaaaatccaggctttacaagaacaggttactgcaactaaagcccttgagaaagaagtcaaagcgcgcaaaactaagattagtgatgaaagtgttgaaattatggcccttgacacaaagattattgaatgggatgggaaagtgcatgaaatggaggagcatgttaaagctaaagaaaaaaaaaggatcaaatagtagcagacgaaaatcagaagctggctgctttgagttctgaagttgaatggaaactcaagtgtcttgaacctcgtgaaaggaaagtagaggaaacaattgcaaaggctactaaactatgtgcggaagttgattcaacaaggactgatgctgcagaagaactacagctgatatatgctaaatttcaacaaattggacatgcgtttacttgctacaaggataattttaagtctttcttggaacaagttgatgaggtgagcaaagaaactttagaaagtttagatcgtcaagctgtggagccattggacacatctgcaacattgtagattgagaaagagaactcctgcagccccgctccctgaaaagaggatagccacttggagaagatagcctagtgtgttttatgccacagctgtaaatttggaattgagatgtttttgttatcactggtgacagttatggaccttatggtctgtttgaacctcgtctgaccaattcggtgactgagaatacttcatcgaattatctgcagtagttatgtaaaaatgccttgaatcactctgatatggaaatgttggtgtcaggttgccaagt

SEQ ID NO: 7279 - DNA, 1474 bp, Oryza sativa
  ref <308>: DATABASE ACCESSION NUMBER: AK064407
  ref <309>: DATABASE ENTRY DATE: 2001-12-06
aaaatcccatctcccaccgccgccgcagcccaccaccagccgccgcctcggccgcgagatcgccggccgccgccatgtcgaatccggccgcctactacgccgccgtcgcgcggaagcagtacttctgctaccaatgcaaccgcaccgtcctcctcccggcctccgccgccgccgccggggcgctctcctgcccggagtgccgcggggatttcatcgaggaggtcaacgtccccgcccccgccatcatccccttccccttcgccttccccccgatgatgcccaccgccacctccgcctccgccgccgccgccgccgcggcctcgccgacccagtcctcctcctcgtccgccgccacgtcgccatccagcgacctctccgcctccctcaacagcatgctcggcccgctcaacctccgcaccgacgagcggatgccgggaaccacctccgccgcgggcacggcgacccccgaggacgagcccgacgggttcgacgcggtcacgttcttccagaactacctccagaatctcatggacggcggcgccaacatccaggtcctcctcgacgacgccagcgtcggcctcgcccccggcatcggccgcgtcggcggcgccagcttcggggactacttcgtcggcccgggcctggagcagctcatcgagcagctcaccgagaacgacccgaaccgctacggcacgccgccggcggccaagtcggctctctccacgctccccgatgtcgtcgtgaccgacgccatggtcgccgcggcggatggcgccgagtgcgccgtctgcaaggaggatttctcgcctggggaaggggccaagcagatgccctgcaagcacatttaccacgccgactgcatcatgccatggctggatctccacaattcatgccccatatgccgctttgagctgcctactgatgaccctgattacgaggggcgtaagaaatcaaacccacagccaactgctggcgttgatgccggagctgcatctgggagttctactgctgctgaggagcgagaggagagtggggagagtgcgaggttggtcgaacggcggtttaacgtgtcgctgccatggccttttagtggattgggatcgcaaacgccgcagcaggatgggagcaatgggggcgctggtgccagtggctcgaaggatggaggcgcatccagtgacaaaaaataagcataaatgtgcgattgattggaggttttcctcttggatctggcgttcaaaggtctacaatatttatgtgtcgctgccacttatatactatagacatcaaaagaccaaagaaatttacagtctttttatccgctggaacaattgttcattcttgttctcgctgcccgttaggtcatgtacacaaggcacggaaactgccgaggcaggaaacgtgcgttgggagtttgagacttttatgtgtagatttgttaattaaattcatcaaagtaccaaacttggagcattcc

SEQ ID NO: 7280 - DNA, 1443 bp, Oryza sativa
  ref <308>: DATABASE ACCESSION NUMBER: AK064408
  ref <309>: DATABASE ENTRY DATE: 2001-12-06
aaaccccttcacacttccatcaccatttcttccttcttcccctagctagctgctggctgctgctgcttctctgggccctcgtgctgctcttctcatgtcaccaccgccggccgctagtgcctttctgggagccaaccaggaggccccggatcagatcttggcgtaggtttgctcgactcgctgttgttgacggtgaggagggcgcttgcctcgtctttctttcttccaaagagcctgctcttttcttgggtttggcctaggaggaggggtttttggtgttcttggtagggaggaggattcttggcatttggcgagagaggggggaaatcttttgtttccttgtctgattctgctcggtcggtgagtggtgcggcggcggcggcggccatggaggcaatcacgatgtcgccgtcctccgtctcctcacaccacctcgacgtcgacgctgcctccaccagcgaggacatgtcgtcgttgcaggaaggcctcctcttctcggacagcctcaaggacctgaggaatctgcgttcacagctatactcagcggcggaatattttgaagtattctacagaaacaattctcagaaatctacggtgatgacaagtctgaaagattacacagttgaggcccttgttagcactgtcgaccatctgggctttgtgtcatacaaggtggataaccttgtcaaggaaagatccgatgaggttaatgagacagaatttcgagtatcctcagttgagcagagagtacggatttgccaacagacaatcgaccaggagggaagatctcaacaatctcttctcattagagcaccaaaataccacaggcgttacatattgccaggcacagatatagtggaatcagccattcatccagtttcagaacctccacggtatagcaggcaacatatgagccgtaaaatgcacaagtcacaatctatctctacgccagttggcaggcaatctacaatgaggagcgcgcgttcaccatctccttcagctcgtggcacacatcatcgatcacggtccttgtcaccttctcgaaaagcacgagctaaatccccatctccccaaatcatcagcacacaaacaaaagaaacaagagcaggttcaccaataccgaattccaatccccttgcacgatctgccacggttgcaagaaggccacctgttcatccaaagcattttagacaaacttcaatgcagttacactctgactggagcaatcacaaagagcaggagaaaagctcaagcaagggcagggggttcctcaaatcattgctcacaaggcgtcggtggaggaacgatgagtcattgtacagctacttggacgaatattgatttcttaaatgttactgttaaccaactctcacttgttcacttatctgatatttgagattttagcttttttgtccaaatggaggcattttcgccttatctttc

SEQ ID NO: 7281 - DNA, 1482 bp, Oryza sativa
  ref <308>: DATABASE ACCESSION NUMBER: AK064409
  ref <309>: DATABASE ENTRY DATE: 2001-12-06
ggtttctatttgattattactatgttcaattcgacggaatcttagaggaggaaaatccaaatgaatggatgattgatctaatcgcagctgatataccacctatgaggcacacggatgatcctggcgcaatatatgccaagtgctatgacgcggtgcgggtgtactcggtcgaggtgaagcaaatcaagtgtgggttgcggtggcctatcgaggtgtttggccatgtcgccgtgcgagacagcgtcgatcgcaagcgcaacctcgtcttcaatcgtggccgggacgattgccaaacgctcacggcggaggtgatcgatcgaccttacctcaaatcagctacctgaaaatttgctcgcacacgcacattattattgcaacatccagtgctaacgttgccttaatcagctctagctaaacattgctcacccttgcacaacactatttttctcccaagtttttcctgctaacgatgtcatcttgttatttgcgtggtacttactagttcttctgctgttatggttgtactagcttgagcaatatagatatgcagtacatactaccacatcagtattcagatagcattgcttttgtttcttagcatatgcgtgttaaatactctacagataaattgatgtcatctattaaaaaacggaggtagtacaacttaaagtagctacactatggttccccttgttttactgtgtttcatatttgaaaacaaatttgtcttggatcgaaatatatgtgtataacacatatggctgtaatcaatatttgcaggactcctctttggtgttaacagggcctagtcgatatgtcttggcaatggacaatccggactttgaagttgagctaaaggtcaagggaattgcggagactgaagacaaggttttgagctctcatgcctttacattcaactgcatctatgacgatggtagtagtgttaagaggcgcgtggcttccaacaagcgcagcacggtgcagatcacgtttgctttaattccagagacagtggaggcgacatttgaggttaaagtcgttgatgggtcattggatccttccctacgcccacatttctttgcttctactcaccaccatcccagcacggaatgtgtgttgcttgatcctcgagagggtgcaacggtgatcagcgacaataatagtgtcaaacttactcgatctgttgtttccgttgaagtgctggggggattgaagcttactgcagaggctctagatgatgaaaaagctgttgttcctaggacaacaattatcttcgaaccacaaagggatggtagagtgtatggatttcttgatcttaattgttgtaagatggtggttaaagtttcctggtctcgactttccatttgttgactgaacattattttgtagccggtgctatgttgatatgtaggaacttgtgctatccttttttatgattaatgttagctatgtactgatgtatatgatcttttgccatctact

SEQ ID NO: 7282 - DNA, 1901 bp, Oryza sativa
  ref <308>: DATABASE ACCESSION NUMBER: AK064410
  ref <309>: DATABASE ENTRY DATE: 2001-12-06
atgccttctgactgtataaactattcatgtcttttgttcattagcttcttctcttttctgcacattttctttcatttggttaactttatgtaatatccaaagtgtatcaattgtctatcaacaatgtttgagtagactattcatacaggtttatgaattgtctacttaaatgcctgtttttgtacctttggtaatatcgtccaaattttgacagaagtttataagtattaatgctaagtactgaattatcttttagagttggcagtatatccttcaagaaatagcttagtttcacttgtcacaggtgttatgttatttatgcatctcatgacaaatgaacaaactttttgaaactagtgaatatatatcatgaaatgtgctctgtgggttttgtgaatgttactatttctgtatcctgttttgttttctctatatttattatttttgttatttcaatttttcaagctttctttcatatattatggatttatggtagtgttcttgctgtttcccgtaaaacaaggttccataatcataaaagacagtctagcccacttgtgtcctgccacgtgtgttatatcctgaataagcttacataggtcaaaggaataggcatgcattggcttacacgaggaaattggggatcgagaggagggaggagactgtaaacagagcccattctctgtttcatttctatcctcttgttacacaatagttggcttttgtaccctctcaaccttactagagtaaagaccactccatttactttcaccagcctggcccacatgaccgattaacccttagttctgccacctcacttcatattaccatagctgtagctatggtatgatctatcgaagctttctaacactatggatctttgaccatcagttggcctgtttgtttgttggttgtgattaatctgtgaaggctattactttgtgagctccattgggaactaactttactatttattttcagccagaagatttctggtttagtgcaccaaagaaagggatcatggtttttgcgttgcctggagagcctggattaacagaggtagctggtgacttcaagattcagtttcatgatcgacagggggatttctactgctggttaaatacaacaatgatggagaacagggtgactttgaatccaactgatcttgatgattttgacaaggtaattgtcgcttcatttttgaagctattttatgaatatgcttgtcaaaacctctatcaagctatttccactaggcacactacaaagcccatctatctataaaataagtttgattataaaaaatggactagggatccaattgaccccttcaaactttggtcataaaccaagttattgccaaatcttgatcaaatctaccaaattttcatatgttaacattgccaagcattttaagttcaaatcaaacacctgtggccttgtttttcaagcaattgcaggcaaggctagtcagaatagtgcatacaaatagatttcagtgttgaactgttagtcacatgaaagctgttctaacatctactgtagagatatgacaattgcaacttaaagagagacggaaagctgtagggaagtcatggggcccgaaaggaccctaaaatccctttgggccaaatacatacataagtgctctttcgccaaaattctttcttgcagtctatatgatgtttcacacatatagagcacatgaggcccttatcaagccgtgcggcctcagccttgttgaacaaattgatattcaataaatattagtctattgttgcccatggcagatatgtttccttgatgtacatcacagtatgatggtcagttggtcactatgtttgtgttgtctgagtacaatgatgcaaatatttaacatgaatgatgaaatgttttgagtt

SEQ ID NO: 7283 - DNA, 2107 bp, Oryza sativa
  ref <308>: DATABASE ACCESSION NUMBER: AK064411
  ref <309>: DATABASE ENTRY DATE: 2001-12-06
cagaagctgctgagcatgctggatctgtgatgacttgccaggctattgtgaagaacactattggcgttggtgttgatgatgaagacagaaaacgcacatgggttgctgatgctgaggaatgcaagaagcgtggttcagttgagacagcccctgccatctatgcacatgtgctcagtgtcttcaaattcaagaagagtatttggttgaaagcggctcagcttgagaagagacatgggactgaggagtctctttatattctcctcagtaaggctacaacatacaatcgacatgcagaagtgctatggcttatgtatgcaaaggagaaatggctggctggagatgtccctgctgcccaaaccattcttcaggaagcttacgcttatcttcccaattcagaggagatctggctagctgccttcaagcttgagtttgagaacaatgaaccagagagagcaagaattcttttgtcaaaggccagggaaagaggaggcactgagagggtctggatgaaatctgccattgttgaaagggagttagggaatgtagacgaggaaagaaagctgttggaggaaggtctgaagttattcccctcattcttcaaattgtggttaatgcttgggcaaatggaagaccggcttggtcatgtagccaaggcaaaggaggctaatgagaacgcactgaaacactgcccgaactaatctagaggagaagaaagaagaacccagctacacctgaactctggcttgcagcagttcgagctgaattgaggcataggaacaagaaggaagctgatgctttactagccaaggcattgcaggagtgcccaacaagtggtatcttgtgggctgcagctatagagatggtgccacgtccccaacgtaaagcaaagagctcggatgctataaaacgatgtgaccatgatccccatgtcattgcagccgtggctaaacttttctggcatgataggaagtttgataaagctaggagttggttgaacagagctgttactcttgctccagacattggagatttttgggccttgtactacaaattcgaactacaacatggaaacgctgatacacataaggatgttgtacaacgatgtgttgcatcagagccaaagcatggagagagatggcaagcaatagcgaaggctgttgagaactcacacctgtcgattgaggcccttctgaagaaagctgtggtggctcttggccaggatgaaaatccaaatgctgtagatccctagtctgtatcacttttaactttaaattaaggtcttcttctcaggtcgataaagaaatatgtagagaaagaaatacaactagacagtgaactgggatgcactcaagcaactgcttctgctacgacctcgcattctctacccaccgaactgattgctgcagtcccccaaccgtgaagcttacctgaagaagcaccaggcatgccattgctccaatgtgattggctatctctagttaatgaccaggagcatgaagcattacaagatcaactttcagggaaggatcattttcaaacagttttgtgtataaatgggacagtcccactgctgccttccttggcgtcggcagaagagctttgttctacatgtaagagcctacgtccgaaggaccttcagcttcatgttattacctccaatatgatgattgacgctttgctcaaaggaggcagataggaatatgccatggatatgtttagtccagaataatgtggcctacaatttatttaatgattattttcattggagcttctactgcttcccagctacctctttttctcaaagaggaaatatatgcagcatgtgcagtccctccctgagaaataccgttttcaagtatcacatgcagtatttgataatcgaaattctggtctgacaataagaccaaattgctacttcctccgtttcatattataagactttctagtattgcccacatttctttgtaggactcatctgaatccttagtttttataatcgaagtattgtttaaagtcaaagatgtcagaacatggatgtataaacctgatatttagatcagttatgtaatgtgatcatattcttgggagataacaagatcagtttttc

SEQ ID NO: 7284 - DNA, 1778 bp, Oryza sativa
  ref <308>: DATABASE ACCESSION NUMBER: AK064412
  ref <309>: DATABASE ENTRY DATE: 2001-12-06
atgcaggcgtttcagaaattcagagtcctatagctctgcgatgagttcagccatggcgtcttccatggccaagaactcctcgcctttcaaggtcgtgctcggatcgtcgtcgccggcgcgccgcgagatactggcggacatgggatacgagttcaccgtcatgtgcgctgacatcgatgagagggccatcaggagggagaagccagaggagcttgtcaaggccctcgctgaagctaaggcagaggccatcaaactgaagttgcatggggaagactctgctcaagagagagatcagcctactattctgatcacctctgaccaggtcatggtgagcaaagggatgataagggagaggccaaaaggccaggaagaagccagggagttcatcaaggggtattcgggtgataaagcattcgcagtgaactatgttcttgtgactaacctaagcaatggagcttccaaaggaggatgggatatacctgagatctattttcaccacataccagaggatttcatccaaagtgtggtgaaggaaggacacatgacctgcgtggctggaggccttaagctgacacatccttcggtgctgccattcatcaagcagttaatcggcacaatggatagcgttcgaggactcccgagggagctcactgagaggcttatccaagaagttcttggagccaaatgatttgcatctagagtgtcacttgcaacttgcaagaagggcattgctaaatggaccgtacgacgcgctggtattgtgaatcagtgaatgcttgttttctatcgatcccagtaacacgggggcgattagctcaatgggaatttatcaattagagaattttacgagtgaaaacgtgcgtctcacttcttttgtagtgttatagggctctttgatttgattttaactacaaaacaatctcaaataacctgtctccactgttatccatgtaaatacactttgaaaaaaagtccgaataacccctctccgtggaaaacgttgttgatctttatcttgccatacatgtacaaaaaatattgatgcttacacgaaaatttaggtgacattttccctaaaaaagtttagacattttccccttgatgatgaactcgttgcaccttccttggtcgaactgtaatcacattgccttcacctcgatccctctttggtggacgagggagcaccttggccctcgtattgggtggaacaagctgacagagattatccatcttgaggtgcttgaatatatcagaccctatcagggatggaggacccgaatggcgccaaggaggaaggcgccaagccgacacaaactcgcaagtcgtcatgtcaacgctgaagacgtgcaggctcctgtgcttctcatcctcctcgtagaaatcacccgccatgagatacacgacgccgtcctcctcgctgctcaacatgggctgggtcggcgacgtgttcgtcggcaaccctgatctcctgaacccctcctgctcccacaagctcccaacatggatactaccaaccttgtgccactgccttgagctcggcgtcaaatcccacatggataatagcatgtcgtatggaggatcggtgttgtatccctcgatggagacgaatctgatggagtcactgatgcaacggatatcacgatactgtgacggcagatgagtgagatagagcgagtcgcaaccaacgtagcaaccatcgggtaattggatgtaaccaaattgcaaatcgtcgtcgtcgttgttgttgatgttgttggtaccagacatgagatcatggc

SEQ ID NO: 7285 - DNA, 1761 bp, Oryza sativa
  ref <308>: DATABASE ACCESSION NUMBER: AK064413
  ref <309>: DATABASE ENTRY DATE: 2001-12-06
atgcttactgctgttgatcataagaagaagataatatgtattaatgacaccgttaatgttctggaagggccattccagggtaagcaaggagttgttaaacacttgtacatgggcatactgtttatccataatgaaagtgaaagtgagaacagcggatttttctgcgcccagtgcagttcatgtgaaaatgtcaagaagcggaaggaactggcaagtttcacttttggaaattcggacgataatcctattcccatgttttcatatgaacaaaatgagcaacgggacaatgaaaggccttacaggagcactagagaacaacttttctcaattggggagatgctgcgtattcgaaagggtcctacgaagggctatctctgtcgagtagttcgaatatttcgcaatgatgtaactgttaagctagattcactgctgaagattgtcacagtgcaagctgagtttctttcagtcccagctaaaagaggggataactcttctggtgctccatctggtccttttggttcagaagccgataaaccctcatgggacaatggattaccatcttttggaagtgattcctggcaacccttttcaagtgctgcattaccagttcagaatgcagatggggaatctgaagttgatccatggtgtaagaaaacttcatcttctgccaatgattctgatccatggggtacgaaaacaaaatctgcatctgttgatgtatggaacaacagtaccacacaagtagagaactccagtgacaatgcatgggataaacaacctggaggtagtggacctaatattggtggaagctcttgggacagaccagcaactgataaggaaagtgaaaaaagtgacaactggggtgaggcatgcaaggagacagagaaaactggtagtgatacagatccctggggaagcaaggtcaaagagatagatctgaaagaaacggatagctggggaaaggcttcaatgcaaccagagaagaagttggaggatgatagtcaaggatggggccaacctgttggcaagtcaaaccaagaccaagaaaaaggtgcagacaaatgtggggcttgggatactgttattgctgggtcatcttcgtctgttcctggcagaggggatgatgactcctggattaaaactgatactttgcctgttgctcaagatgatgcctggggcaactcaaaagattgtagtgatggggcagctgggtggaatgaaactagaacatctaaacaaagccacagcactggaggatgggatgctgctgctgccaacctgaatgaatcatctgatgtggatgcacataaggactcatggggcaaagcaaaagatacaacagctaatgctgaagaaaaaaataatgaaagtggaaactggaacaaagctggaccactagacaaagtttgtggcagtgattggggtagtccaaagttttccagtggtgatggtccatccagctggaacaagggagacaaaattggaggagattctcaaaacggcagctggagcagacctggtggaaactttgaaggtggtcgtgggtttgggcgaggacggggcagaggcaggggccgagaatctggggattacggtggcagaaatgaccaaggaagctggaagaactcagggactagtgacagttctggaaggccctcttggaggtctgatagtcaagttgagaaggaagtgggagattctggtggatatcgggggagaggaagaggaagaggccagtatggaggacagggaagaggaaac

SEQ ID NO: 7286 - DNA, 1394 bp, Oryza sativa
  ref <308>: DATABASE ACCESSION NUMBER: AK064414
  ref <309>: DATABASE ENTRY DATE: 2001-12-06
aagctagcttcaaaccattcctccttcagttttccttctccaccactcttcccccgtgttcatcttctgcttccccatgcttctcccttgtcatgtccttcttggcctcctgctcctctccctgcacactccggcgagctccgccgccgccacggataccgtgtcacccggccattcacttgccggcagtgacaggcttgtctccaataacagtaagttcgccctcggcttcttcaagccaggtaatgagtcctcctacaccaaccacaactcctaccttggcatatggttcaacaaggtctccaagctaaccccgttgtggaccgccaatggcgagaatccagtggtggaccccacttcaccggagctcgcaatctccggtgatggaaacctggccatcctggatcatgccaccaaatccatcatatggtctacccgtgccaacatcacaaccaatgacaccattgccgtgcttctgaacaatggcaaccttgtcctacgaagctcctcaaactcatccaacattttctggcagagcttcgactacccaacagatacacttttcgctggtgcaaagattggctgggacaaggtcaccggcatgaaccgccgtcttgtttccaggaaaagttcggttgatcaggctcctggtatattttccttggagttagggctcaatggggagggtcatctgctatggaactcaactgtggcgtattggtccagtggggactggaacggtcgatacttcggcctagcgccagagatgataggcgatgtcatgccaaatttcacatttgtccacaatgacaaagaggcctacttcacatacaccttgtatgatgacacggctatcgtgcacgctggactagatgtctttgggataggttttgtgggtatgtggttggaaggaaaccaagaatggttcaagaattacaggcagcctgtagttcactgtgatgtgtatgcagtttgtggacctttcacaatctgtgacgacaataaggatctgttctgtgactgtatgaagggcttctccgtaagatcaccgaaggattgggagcttgacgatcaaacaggaggttgcatcaggaatactccattaagttgtggaagtagcaaggacaggacaagcctcacagataagttctaccctatgcaaagtattaggttaccccacaatgcagaaaatgtgcaggctgcaaccagtggagatgaatgctcacaggtttgcttgagcaactgctcctgtactgcatattcctatgggaaagatggctgctccatttggcatgatgagttgtataacgtgaagcaactatctgatgcttcttcagacagaaatgggggagttctttacattcgccttgctgcaaaagagttgccaggttcag

SEQ ID NO: 7287 - DNA, 1774 bp, Oryza sativa
  ref <308>: DATABASE ACCESSION NUMBER: AK064415
  ref <309>: DATABASE ENTRY DATE: 2001-12-06
aatatcattacatgcactattctagttgacggcttcatgaaagaagggctgattagtgaagcctttcttttcttggatgaagtacgccaatttgacattgtccccaacctttacacatacaaagttatcatcaatggcctcttcaagggtaacgaatctgatgatttgtggggattctttggggacatgataaaaaggggatatattcccgatgttgtcctatacagtattattattgatggctttgtgaaagctttggatttgcaggaggctttcaggttgtatcataaaatgttggatgaggggacgatgccaaatatctttacatatactagcctcataaatgggttgtgccatgatgatagactccctgaaatgacgccactgttaaagaatatgattttggaggggctgacacccgacagaattatgtacacttctctcattgcatgctattgtaagcgttcaaacatgaaaaaagctatggaaattttcagagagatgaaaaatgggggtatatcgccagatacttttgtttatacatgtttaattggtggctacaccaaagttcgtgctatggattttgcggagttgttgatggaagaaatggaaactaaagggcttacacctaccgtagtaacttatacagatctaataattggatacttaaaaacaggagatgagaaaagtgcctataggacatatcataatatgattcagagaggtattacaccagatgccaagctgagctgcatattggaccttggcaatgatgcagatgttgataattctccaaaagagaaggatgtatcttagctatttccattgagatctacaaattgttcaagggatatcttttaaagggattaacccacatactgtggattgattattaggtctatttatttctctactatggactgtggagataagaaatgggcaagacatgacagttttatccatagacagcacctggggagctcagttgagctcattcagggatttcaggcggatttggtctaagcttccccgtactctccggcgcctgcagtttcatgtgtctatggctgctgctgggtgaccaaggtggaatggtggtgccttttggcttcttcaggagtcaagattgcagggttcagatccaattgtgattaggcttgatgcttctactgttaacgctgttcttgctgatcttttctcctctgttgacacattaactaaaagtccaccattgacccatgaagaggaagatgatttgggttagacaaatataaatgggtatgactataaacaaaaagtgttctttcattggcgatgatttcctgatcaacaccattggaccagctggtaaagagaaggtactgggcaatctctatgacggcacaccagtgatgatctcgactagtctattgctattcttctacctgatcatccaactgagatggctgatgaagagaggcggcggcgctccggcaagcctcccaagattgtcaagcaccggcatcctcgacttatcgacgtgatggaatgaaatcgcccgttctgtgtagcagcagcattagcagtgagccagatcgagaagcagctcggccattgcaaaagcgaagtaggattccacgatgtgaagcagctatgtgactgcacaaaattaccttctttttttgagtttgagcaaagatcttggaacagcaacagccagttgtgttacttccagacatggtttaacgctgtaattcctatactaaaatatactatcagtatattttctgaactt

SEQ ID NO: 7288 - DNA, 1999 bp, Oryza sativa
  ref <308>: DATABASE ACCESSION NUMBER: AK064416
  ref <309>: DATABASE ENTRY DATE: 2001-12-06
atttttaatataatgactactacctctgttccaatataagtgtaatctagatagacagctgtccagattcatagttctataataagtcacatctgtactaggttgtatttatatttatagtgtaatctagataatttctagtgtacatgcatctgatctcttggaaaagctttgcaaaatattccagataacctcagcgcttgagagtttgtgcatcgattgtcaaatgccctgaaatagattggtgcatagatctgtagcttcctcacatgcacatccggatgcacaaatatactccaagtaaaggtggtgaagatgtgactggtgtgagatgggcactcctagagtagactagctacaagtccatggaaggcgatataggagcgggaccaattttccagcatcaagatcaaatttaaagaagagaattgtgtctgtatgatttctaagcaattaggtgagacatctggggactgatcgatgaaggaccacttacgctgcgacacataccacagttcctttttgagaagagaatagatgcaatatgcaaggcattgtgtgcccctcgacaagtctctccctgtcgtgaccctagcttagaaagcaaacagataagggaacaaataaacgtgtcgcaccaatggctagtaagatcagtttgagcgaaatgaccactcaggtatggtaaataaagtagtaggatcgatcaatggtgtcacatgttgaaatccgaatcaccattaaccaatggaaacaagcgcactgccgtactgtcctaccaacgccactccttgttgatcccttttccccactgagacccaatttaacatttcctttcacacattacctttcacttccccaacaagccaactttttgctagtgttgagctatatggtataatgtgcacatggcaatagcactggctcgaatcggatcggaaaatataattcaggaaaaaaaattagcatataaaattctggagattttaccacgttctgaactagaaccgagaggtaaggaccacaagcaatatataagcatgggagggacactcaccagctaagcaattcatagcatgatagcaagatgccgagcaaaatgtggcagtacgattgcatctcgatcgctgggctctagctcgccccacgggacctagccaattggaccagttgctacagctgcacagacaagtggtcaaagtcaagttagtgtgtcaagcaataattcctctaaaagggcctgcttacttactgagagtccatccatcgacctcctccatgattctatgacctgtggcccagcttctgccctctgaagcagcagacaggatcgatagcagttatacaacagctatctagcagcagtctactgctgggttaactggaaagtgaccaaactgaacggaacatgcatccactgtgctagagcccagaaccagagaagcaaagaaactaatttgagtgatacctctcaatgtactgtgatgggcatgtaaatctgaccgtgactccatcaaatggcactaacttcacatgctgctgctgaaaagcgagggtcaatctcccttccacagtgcaaaaacctgcagagcaatctacagtcatgttgacttgcacagggcgacattattcgcggtgtcagctttcaagcaaatcattttcagaaagcagctgcccattgtgcacaaactgcgcatcagctcatcaaatcaggttgccagaaaaaaagtctagtatacacccaaggaatgcatgccattggttgaaaaagaaatgtattgcagcaaaaatgcattccctgatatggtgtgtacaagagttgcacgatcatctagtagctaggactactagctaggagaggtcacgagtcacatgtggaagctactgtttcaaattttcagctacatcatgtactcccatttggtgtagatagatcatagatacaagccgcactaaggtattactacaaaagaagagaaaatttcacaatcttacagac

SEQ ID NO: 7289 - DNA, 2399 bp, Oryza sativa
  ref <308>: DATABASE ACCESSION NUMBER: AK064417
  ref <309>: DATABASE ENTRY DATE: 2001-12-06
catgcataaagcaaacctgatgaaatgtcaagttgatgcaaagctttgcgcgttgaggtcattcataacatttctgtcagtatgcactggaacaagttcatataagaagtttggcttacctggtggagggatttcaataacaactacacaatcagcggttagatgtgcatgcaagtctctgcagtcagctgttgactccctccctcctgaggttgataacagtggggttttgtttcctcccttgtctggacaagtggaattgttgcttactatcaccaggatcttacttgaccatgctaaacaaagcaaaagttcaaggcatctttatccagttattgtactactcatgaaaacttcaggtgccagcacttcctttttgtttaatctcatgccatccagtcctgctcttaagcaaccagtgaagtccctccttgttctgcttttgtcattatttgaattcgtttacaagaaggttgacatgaaagatggatctgaagatgtcaatatatttggggagttatcccttttaagtatgagcttgttacctgtattatgcaaattggcagagagcagagaatattttgatcttgctattgcatcaatggacataatattgaaaggctttttgccttctaatgtatgggtgcctattctacaaaagcattttcgtctccaggttatactgcaaaagtgccaaagtggggctttattgtgtactcaagtcatattgaatttcctcttgactatggggcggacaaaggacggtgctaaaattcttcagtctgccaatatttttgctttcataaaggtccttctgagtcagatgtctttggatgactcctgtttgagaaattccttgagcacccaaacaaaggatgtgaaaatttggggtttgggtcttgctattgtctcctctttgaaccattgcatggatgatgatatttcccgcaacagtgttgcaaacagtactatcagcttcctttcagggcaagtgcctttgatgtcgtcttatctatctgcacaaagtgttaacactcatcagagcaagaaaaggacactgttacaaaagtcacagacatcactttcagctctcagtcttactgagaatattctcacacttctctgtattttggccaagtaccatttcccacgggacacaggtatgaaggaagtagattcagaattaagggagattattatccacctgcttgcatttataagcagaggtagtgaaagaaccggtgattccccaaactggaacttatcctttggttgtcctcctattattaaagaggaaatgaagcttaatgaagagccaccacttattaggagcaaatatggatggttccgatttgctgcaagttgtactttgtcaactccatctgtctctggtcctcccaatgcaggattgtcacttgtgattagagacaaaaatccagcggattctgattctatgaagcagactcgttttacagagatgttagcagtacaaatctataggattgcttttcttattatgaagttcctatgcagtcaagcaaaagaggcagtaagaagggcagaagaactggagttccttgaccttgctcatttcccagaacttccgatgccagatattcttcacggcctgcaggatcaagtggtttctattgtcactaaagtattagaggcaaatgtatctactgcactcaataccgagacagagagggtgtgccaacttctgttggtgatacttgaaacatcactttacatggaattgtgtgtatcccaatcatgtggcatcagaccagtgatgggtcgttttgaagatttctccaaggaaattaaggctatggttcatgcttctgagaagcattccagttttaaaccattggtcaggtcacttgcccaaattaccactcttctttatcccgggattgtacaaaataacaatctcatgtaatttttgtaaattgtgtagctatgataatgaaatttgttggttaactatcatagatggaatggcagctcacatatcattgtcaatgtagctcctgactgggtagtgtgtagccgccaaaaagaaactgggtagcatgtgactgttcatgcatcttaaacatctgacgtgatagcacatagcagaggctctcggcaaggcagcaacaccaagaactccactgttcgtcaacttctgtgctaacctattcgccaagagcgtagtgccaggaatgggcattaggaagactggaagttcatcttagctttttttttttttgtaggtttgatctgtttagttgcatcttgcagtttacatcgagttgcatcaatggccgatgtggctaccatgtttattgaatactctacatggtaggtgcaaatgaggactggaattagttccacagctattaccatggttc

SEQ ID NO: 7290 - DNA, 1540 bp, Oryza sativa
  ref <308>: DATABASE ACCESSION NUMBER: AK064418
  ref <309>: DATABASE ENTRY DATE: 2001-12-06
agagccatggcattgctccttgcctccttccagcttctccttcagttccaggccgatagccagttaaacccaaatatacatctgctctttcttttgcccggttacagcgtagcttctctcaatgctttgcccccctcattccatttatgttttattcctgtcatcttcgtgacctagttagtttccttttctttgccgcgttgtttaagatttccattgtatttcttgttttgcaattcatttggtgctccaagattgtggctttgactacatgtgtaagaagagagctctcttcagtccactctcagatggctgtagggttttattagctgccgaatcatccattcacctaccaggaaagttgcaggagtgtatctcttggtagcggactggatgacgcgggagctaaaatttagctctgcgccgtttgtggttggactgaagggtgctcccttgctcaagcactcgtgcataaaatcatgccctaatgttaataataatcttcagatttctatatgagttttatgtccagtgtgttcagtttcaagatttggactttttttttatatcagtggtcaatgacctgggaaatctacagacagaaatctactgaagcattgactagactatccaagcctgtctggatatggcttgtcatcaacagtgctttcatcattcttaagctgtatctactgaagtatgatttgattcggtttgtgtttttactatactggtgaggaaggaatatatgtccccaactgtatgctgttattgtacatacaatattcagggtgtgtttagttcacgctaaaacttaaagtttagttaaaattggaacgatgtgatggaaaagttgaaagtttgtgtgtaagaaagttttaatgtgatagaaaagttggaagtttgaagaaaaagtttgaaagtaaactcggcctcagttcaaaactacaggcatgtaaagcattattagttaaaaatgtcaacgttaacattattgtaaatgtgtctatgcatggaaatctctttattcacatcctgcggcccgtacatattgcataagtgctcagattaccacgaggcctagaaggttttactgagatcattgccgaaatccgctttcaggggcagctagccagctaaacattgactttctgttactcagattcttcaggtcagttaattcagaagttggcagtttgttaatgaattctcttacggcattctgtaactagctagctattgtataaattaagacctatatttaatttactatttgggtagagatcgatgagttatatttgtgtaaagagtgattggatctactatctctaggatctgttgtagggaattaaacgcaacttcaaggattagtggtgcttacatgcatgcatgcacattggacacattgagattgatctgttgtatacatcatcagaggaggatgtaaacccagaggacatatactagtactatatggttaaggatggctttcccggaacatatatatcaaattagcaatcatgtagtatttttcttttgc

SEQ ID NO: 7291 - DNA, 1582 bp, Oryza sativa
  ref <308>: DATABASE ACCESSION NUMBER: AK064419
  ref <309>: DATABASE ENTRY DATE: 2001-12-06
aaaaaataacaggctaagccgtgccgtaaggggggcattctccacacgggacggggccaaggccttcatgtatgggtgacagatcggccataggagtactccgggatatacaccagggcaactaatgtcgagcatacgatgatgccgcccgttttcatttcgtgaaagtccccggcagaggaaagggctgtaggtgatggcgcgttctgcttcttagggcgatgaaatcgttcctatgggatcgtgcgtggcagctggtatagatgatgatgaaaggcgggccgcttgaaccgggacctattctcataataggcagcaagcaaagcaaaataggaaagggggcgactgatgactgcctttttcgtcataaataaaaaaagggtggaatgtggagctaatatggctggctacaagtatagccaaagaaagatgagacgagacggactgtcagaggacgctgcgggactaccaggggaaagcccgcccccgctagctaacatagatatctattcttggtgcgcatattcgagatttagaatctctttccgaccaggccaggccgaatcgggccaccacttgggatgggaatggctcagcccacatgcatcatttgatgaaaccagtccagtcgcctccgatcagtggcttgtcaaccaccggaccgtagctcctcaccgaatgcccctgcgttggggcaacacagcacatgactagttcgctcaaggaccacaccctctcgagagcaggatgccggccgagatggagcgccaacctagactttccttgggcttgccttgccccaacatctaaataaagggcgggcgccgaaaaggaagcagtgacgccttttcgacgaaagcttagcttggtaggcgctgcttactcaccctactcccttagacaatgcaatgctgtgaacacgaaagtttgcagttcagccctcttctcccatgcagagtcgcaggcagcgcctcggataaaagcacggacgagccacatgcagggaaacttgcacgtgtggttctggccggggaccccggtatactgtactaatatgtgtaggttcctgtaatttgagtgagattgtcatggcgcaaaagcagatatggttcggtattcccttgttccctgtattggttatgttctttatttcttgtctagcagaaactaatcgagctccgtctgatctcccagaagcggaagctgaattagttgctggctataatgtggaatatgcgcgggatgcgatccttaatagttcactgttggcggaagccaatgtctcggggactcattctgacttaaacaaggggtgggtctttaccaacttccaaatccaagatttagggaaaaaaaagaggggcagggcactcttcattcttcattcgaaactcatgaatgtcgggtcggaggtttttgccttgttatcaaaaaggggagttgggtaaagcaaactccctccttgggcgagcacggggcttagtcaagtagaaccgggttgcgctgcttgatgctccgatcgaaaacaaatcagtggggccatgccggtacgacagaatatgcgttagaaaggtcccccttt

SEQ ID NO: 7292 - DNA, 1311 bp, Oryza sativa
  ref <308>: DATABASE ACCESSION NUMBER: AK064420
  ref <309>: DATABASE ENTRY DATE: 2001-12-06
ggttccatatgcctcctccgctatccccttcctctccgcggccggtgagctagctagccgcgtgccttctccctgtcggtcctgtagccgcgccgatcgctggacgtatccgatccggttacgcccgcgggatgccgattacgattatatatgagcccaaaacaaaccctacctctctggctctctctccatagttcatcgacaggtagaggagaagtcctgtggacggaatctgttcgcggcgccgcgtgtcgccaggtcgcgtcggcctacactgcgattaattcaacggcgagatgaattccaagaaaagcaagtgcacgtgtactctaactgatgatcttgtagtcgatatcctatcacggttgcctttgaagtcagtttgctgcttcaagtgtgtctgcaagtcctgggcatcactcttctcagatcaatacttttgcacgaagctgcccagaaggcctgcaggtcttttgtaccaagacagtaataacagttcgatccagattgcaaagttaccctcaggcaacagtgaaatcggcacatctcttagctttatgccacaccatgagaatctaaaacttgtagattgctccaatggtttaatcctttttacacatgggagtaaatctgattcacccgattcttctcacttcattgtgtgcaacccagcaacacaagagtggattgcacttcctgacacatgccctagagtaaatggatctgattatattgctatgttggccttcaatccatcatcgttctgtcatttttttgtctttaacttccagaagaggggatccccacactcaggggtttttgtcatcactgaagttgagatattttcctctgaggatttcacttggattgccgatgatgcatttgaaactgaaattatgatgatttcaatgccacatgtcctacttcatggtgttctgtatctacggactgtagaacatagtgtttttgcgattgaaacaccacacatgtataaaccatggatacatcgttggacctttgagcttcctggggattcatgtcccatgaacaactatatatggggctgcctcggcgaatcgtccggcatcttacactatatgcagccaaactatgatggctgctggcttaatgtctggaggcttgaaagtcgtcatcaacagtggagcatgacgcactctcttagctagccaagatgatgatatggtggtgttgtgtgttcaaaatgcatccatgcaagaaaccaaagaaaggtgcatggcagtgccactgttgtatttgttctttattttgatggaattgttcttttctatc

SEQ ID NO: 7293 - DNA, 2640 bp, Oryza sativa
  ref <308>: DATABASE ACCESSION NUMBER: AK064421
  ref <309>: DATABASE ENTRY DATE: 2001-12-06
tcttgcaaatgcaggaatggctgcacgactgtgcacgtattaccagaagacttcaccttctgaccaaacagctacatccctgcgaagcaacagtgatggactgggtacaatgcttgctattgatcccgctgacaaatctccttttctggggaacattcgttctggctcccaccaatcatgtcttgagacaaatatgtacagagcacctgtatttcctcataaggttgcgacgacagattatcttttagttcgttcacccaaagggatgctttctcttcgtcgcattgacaagttgtatgctgttggccaacaggaacctcatatggaagtattttcacctgggacaaaaaatatgcagaattatattctgaatcggattcttgtgtatgtatatcgtgagttccgtgctagggagaagcctggtattattcctcagattcgagctgatgaattacctattcagcctcctataacagaggctattgtgaggaaacggttaaagcattgcgcggatttaaggaaaggaccaaagggacatttgttctatattcagagacctgattttcggattccatcggaggaagaactgagaagattattgacacctgaaatgtctgctgttatgagagtatgcaagctggccagtatcgtctcaagcacttaggaattgagaagcttactcagcctgtgggacttgcatctgccatgaatcagcttcctgatgaagctattgagcttgctgctgcagctcatattgagagggaattgcaaatcactagctggaatcttaccagcaattttgttgcttgtacaaaccaggacaaggaaaatatagagagattagaaattactggtgttggtgatccatctggccgtgggctaggatttagctatgtacgagtaactccaaaagcacctgtatccaattcaacacataagaagaagtcagctgctgcaaaaggcaccactgtgactggaacagatgctgatctccgcaggttgagcatggatgcagctcgagagttgctactcaaatttggcgttccagaagagcaaattgacaagttaacaaggtggcatcggatcgcgatggtgaggaagctttcaagtgaacaagctgcatcgggtgttacaatggatgaaattccagttagtaagtttgcacggggacaaaggatgtcttttctgcagcttcagcagcaaactaaagagaaatgtcaggaaatttgggacagacaaattcagtcactttcagctatggacggcaatgaaaatggcagtgacacagaagctaacagtgatcttgactcatttgctggggatcttgaaaatttgctagacgcagaagaatttgatgatgaagatgttggtaatacagacataagaagcgataaaatggatggaatgagagggcttaaaatgagaaggtgtcatactcaatcccaaattaatgaggaaattcaagatgatgtagcagaggctgctctagtagaaaaactgcttgaagagagtgatagtgatatgaagaggaagaagcagcctgtggaaactacaaattatagcactcctatgtataatcagggcaataaaatgaagcagggtaaggctggccaaatgattaaatcgtctgtatatgccggtgcattaaccccaaaagagagcataccaagagaagccaaggaggttgaaaattttgctgaaggaagtttaccctcaaaactaagaacaaagacaggatttgatgcaaatgatgatattattctagtaaaaaggaaaaatatcccaggaaaggatgggttcaaggaaaagagacagggtgcaaggggagacactcttgtatgtggagcttgtggtcagctcgggcacatgcggaccaacaaactgtgccccaagtacggggaggaccctgaaacatccgaaatggatgtcaattccatcaggtctcatcctcctgatattgtgagtaatgctcaaataaaaacatcaaacaagaggttggtagcaaaagtttcgtctgaagcttttgaaactgaaggacctgaaagtattgaaaaggctaaacctgtccctgtaaaattcaaatgtggagcacctgagaagtcattggataggaacatgtcaatctcagcttctttggtttctgataaacgtatgatggatgctacagattcgaaatcaactggaaaggttaataagattaaaatatctaacaagataaaatatgatgattatcctcctgatactcctaagccatctgttgtaataaggcctcctgctgaagtggagaaggatctacctcgtaagaaaattattatcaagcagcccaaggtgcttggagatcagcaaagacctactgaacttaggagtggtcaggagcccagaaagacaaggaaaattgttgaattgtcaagctttgagaagagagacagagaggatgataatggtttttctggacaacctattcagatcaattcctcacatgatagggggtggggtctggtgggaaaaagaagcaaaggaataatggaaagtagtgaatcctggagagcttttgaggagcaacgggagagacaagaacagagactaattgaagctaggatatatgatgcaaggagagaggatgagctccagaaggcaaag

SEQ ID NO: 7294 - DNA, 1663 bp, Oryza sativa
  ref <308>: DATABASE ACCESSION NUMBER: AK064422
  ref <309>: DATABASE ENTRY DATE: 2001-12-06
atcgcaagatcaattggcgaacggcgacggcggcggcgacctggtggccagttggcaccttgtcgatttccttccaacctaccttccttctccctctatcttctccatcttccaccacttgtatcccttagttcatcctccttccacctctatttactggagtatggttgctattgtattggatgcttgcatatttgagtggaattgagatcagaggtggcctggccagccgaggtcgcgaccgatgtgcttgcaatcagcggcaaagtggaagctagagcagccggatgtcagcgagagcatgcactgcctcaatcatgagcttgcatcgccgagcttaattcggagtctgccatcaacataggtcatctttcctaaccaacctcaatttgtttacttggtccacatctttggcttcgtacctcaagtttgatgtaattccttcatttatgcgccggttaagttattgcttggtttgctcttgttattaatgaattcttactatttatatgagcatcttacatgacaaatgcagattgctacttactttgtctaggtatattcacaaggtcatttttcttaaaagttgaattgttccctctaaatgaaggcttattcaacctataggaataagtttttaaaagttgaattgttccctagcctgaagcaaatctctttcctgtttgaactctacaggaatgagcagtaatgaggcttgaaggtgatacagttatcgacttgaaattgtagtcggataaagtatttgattatttgcctccacatttgattcgtatatattagtttaacaaatacataattgaaagtgaaggatctgacctataactgacgcctaatggtaggcatttaaaggaatctgaaattgtaactaactttcttttgtacgaaagaattcaaatacataaatgtgcagatgcagcgaggctttttcagaaacaaatatgattcttactgttaaaatatcctctacctggcagacatctaaggaagtgtactcatttgaattctgattttgctttttctcagggttgtttcatgttctaaagagtgtcatctgcaatgcgatagctttagagagatgaaagtccaattatgctagattatcagtttttttgcaaggatgctagaatatcactttgacttgtttggtactgtccaatgccaatagtggcaatgaagacaactctttatacatcatcagaggaaatgctgactccattatttgtgatagaaaatgttaaacatggtggaagcaggggagtagaatgtggagcaaatataaatatattttgaagctaggcaggccatgagggtgctcatacaaatttctatactctagctagcgctggaatggtcctacttctttcatttacaacatatcagcttggtttcccatttggacttaaaactgtaaatatggcaagcatgtagataaagttgatcctacatgcatgccacaacttatcagacataccgtctgcatactctgattgtacattcatgtccatacaggggagtaagttcggtaaattcatcttagtgaacagaacatttgtgcatttcattcaattttttgttttgtggtgatgagaagactatgtcatttgttattcttctataagaaaataatttgttattcttgtgt

SEQ ID NO: 7295 - DNA, 2707 bp, Oryza sativa
  ref <308>: DATABASE ACCESSION NUMBER: AK064423
  ref <309>: DATABASE ENTRY DATE: 2001-12-06
tgtggtaaaggtgggtttggagtggtctacaagggaattcttgcaaatgggaaacccatagcggtcaagaggcttcaggtcatgccaggaatacaggacagacaatttaataatgaggttcatcatctcatgggacttaagcaccagaacatagtacaattaattggctactgtgatgaaagacaagagaaagtgatatatgatgagtaccagaaaaaaaatatttgtgctgaagtgcaagaaaggttgctctgctacgagtatatggcaaatggaagccttgacaagttagtttatgatcaatctcatgtgcttgaatggcatgaccgttatgcaattataaaaggaatatgccagggtttatgttacttacatgaggaattggaaaataagcctattattcatttggatctgaagccaagcaatatactactggatgataacttgctgccgaaaattgctgattttggtctctcaaggctttttggtgaagaacaaacacgaacatgcactacaatggttacaggatcaatagggtatatggcaccagagtattgtcataaaggaggaatctcaactaagtcagacatatatagtctgggtattctaatcctagaaattgtggcaggagaaaaaaaccaccaaagcagtgtcgatctttctggtcagcggtttattcatagcgtacgtaacaaatggtcaaggatgtcgaaaataacatcaaggtatccattgctggatacacatagcctccaacaagttcattcatgttttaaaattgggctgaattgtgtggagatagatcctaaaagacgacctcctgcaagaaaaattgtcaatatgcttccatgggaatgtaagaaggctgaagcaatggcatccatgcttcttccgaatgtttcaaatggtcgctttaccagttcagtggttgataaagaaagcaatgtgataggattaccagcgcaccaggttgactccaacatgaaggagatactgagtgtcaacccccttgagctttggttccccatgaaggcacaagaggagttttcatgctcaatgctgctaaaaaacaagacacaccactacgttgcttataagatcaacgcacaaaaattgaatatataccgcattgagccatgcagtggtcttatatctccacagttcacgtgcaatattagtgtaagaatgcaagcacaacaaggggtatcaccaaacatgcagttgatggacaggatacttgttcaaagtgtggtagtgagcgatgatctgattgatattgctaaagacttgtcctgcaaacaaaaggggaagctagtcttgaaagggcctgataagattatgtcaaagatttatgtgaacatccggaaaacaggagcccttgatgagaacaagcctatatgtggtaccacagaggggattggcaatagccatcatgacaataagctttctggtttaagtatcatgaaaaactcttcccgtgacgactacgtaattgatgggatgcgtatatatgtcaagatcccatcgattgcaaagaccattaaactcattgtgaagaactccaactctgttgctgatgtcaaggtggagattgaacggaaggaagggattcttcaggataaccaaatgctgatgtatgcaggtcgacagcttgatgatcgccagattttaagtcattttggtctatcagatgatcagatacttcatgttttgatatgcccgtttgagaagctccgtatctttgtcaacattagcaacagaagaactgtaaggcttgatgtcgagagctggtatactgtcgccgatgtcaaggtaatgattgaagcattgttgggttttccagcatgtacacaactacttatgtggaccaatcctagtgtggatattgagcttatggacacagaaacactcaaagagcagaatgtaaagaataatactgttctgttgttgcatccgaatgtccagatcttcataaaatcatgggaagggaggacattgaccacgttggttagcatgtttgatactgcagaagaaatctggaagaaaattaaaaaaaggtcgcagattaaagctgagaaatactttctctgttacagaggtcatgttctacctcctggggtttctcttgacatgtataaaatcgagagcaattccactatcagtatccgcctgcggaattcttatcgaaaagaggaaccaggaagaattactcgaggaaccagttcatttacattgcaaagtagtctcatggaatggtatcaggagagaaaatatgccagacaggctaaagccactgctgaagataccattctccacgcatagtggctttgatgaccatgaaaaagcttacccaggtggtgactccgtatgctggcgctgtgtgctaggttttcaagtcgaggctcccgtgtctttacgagggtatgctctcaattgaggtggcgtctcggctcctatgtggtggcacacgaggccactcgtcattctgcattgtatatgcctttcgagaaatgctcaggggtcttcctgctatctccacaaggtggtgggctagacgacctgggttcaaagcctcaccccttctaattatttgatattaggttatttcctaatattcgagttttttttttttttaatatgcctttcggaagcagcttgttgctactctgtttacagatgacagggcaagtttatgttgattcttctc

SEQ ID NO: 7296 - DNA, 1927 bp, Oryza sativa
  ref <308>: DATABASE ACCESSION NUMBER: AK064424
  ref <309>: DATABASE ENTRY DATE: 2001-12-06
gcttcctgatggctatacttaattaagtacattgcacagtgaatttgtggtggatgaacggcgccccactttgtgcacgcggagcaatgtggacatataatggaataaaaggggtgatgctaatgagaaaatttctagtttagatgccacttaccgaatcagcttgtcgaccacatctttattattatctttacacaacacaaacatattatcactaggaatttggtgttgtccgtgttactaataatatagtgtactgtaatatactgcagtctaggacaagttggtttcttgataagcatctaggacaagttcagaacttgatcaggcttgtcgttaagccaaactgtaattcacttgtgggttgtggctatgaagtctcattttgagctgaatgttggtacatcactgacatggcatgccttacctacctatggaaaaccaagataatcagaaggggacagggtaccggatggacaacaaaatctaaggcctaatctcctatcaatttttgtgaccgccactccgtggtcggtagaggtaactccggcatggccgctttcgctaagcgccaaagctcggcctcggccgccatcacctttgccacttcgacccaggtcttttgctgttggttgaagaccctgttgttccgctccttccaaatagtccaagctatcaaagctgcaacggtgtcgaatcctcgtcgttgagctttggcaaccttcattctcttgtcacaaagccataagaggaaggagggttcgttgaatggcagtatgtccgacaagccaattgctcggagtgcgaaccaccacagttgacgtgactccaggcatgcgaccaggagatgatcaatcgtctcgtcaccttgatcacacaggacgcaccgatcaggatgtggtaaaccccgtctccgcaaacgatcggctgtccaacatctgtttagtgccactaaccacaggaaatagcggcatcggggtggtgctaacgaccctcagataggcttgtcctggaattggaccttccccacaaacatggactgataagctgagcgagctgggtattctcctgacgactcccatctccagatgattgaatccggctcttccgatagggcatccaaggattgcaaagatgtccacaagctgaggtactctaggatagcttggattcccaaagccccagatatatcccggatccatgttctaccttggagtgcttcgcgaaccgtcctacgattccgctttcttgctacgaccgctgcatgcacagccggcgcaagggtgcggattgacgacccttggatccagttgtcttcccagaagagcacgttcattccattgccgacccgacatgtcaaagagacttggagcaggttcctctccttttgcgagattggaacgttgagtccatgccatggcttttccggcgatgtcctcagttgccaagcccagcggcaccggagtgcaagtcccatgcattcaagatcagggacacccaatccaccatacgatttgggtgcacaaacccgtgcccaagcgacccggcagcttccaccactagcgcttgctttcccggacgggaggaagccgcgacggaccttatcgattccctttatcacccactttggcacattgatggccatcagcagatagatcggtattgagattaataccgcatttaccatagtgactcgaccaatgggcgccatctgctctgccttccataccggcaaccgacgggctatttctgtagttccattgtatgactgtaccatatctacttgtatctcattgaacattgagggaaaaattaaagtacaaacaaaacaaggaggaaatttttcatggttcctaaggcagcaatgtcaagctggtcctctctgcacattccttcttgagaattgagataattgtttttatggtac

SEQ ID NO: 7297 - DNA, 1780 bp, Oryza sativa
  ref <308>: DATABASE ACCESSION NUMBER: AK064425
  ref <309>: DATABASE ENTRY DATE: 2001-12-06
caagaacatcacaaaagccaaacgtgtcttctgagatgcttttgaacaagtatgagaagagaattgctgagcaacgttctaacaagggtaaaagaccaagatcacctcctaggagagatttggttaatccccaagacaagtggagctgccttttccttacaatccacaaagtcatgcaatgggggccttgtccaatgccgccgccgggttatccttttccttacttcatgccatggggggcaccgccaccaatgtacgagttcgtgccaccaacggtgctaatgcaatttcatcaaagttgggtggagccatgaatgtcagtgcatgagcagttgttttcgtcaaacaaagactggtttcaatcaaagaatcggtttgaggaggaaagaggtggaggaaagcgcgccaaggtggagacaaggacttcagagctgattgttgtcaaagtggggtctcatgattgtgccaatacctactggagatgaagccagggtggttcaaagcgagaaaactgaagccgagacaatcacggcgtaggacaccagtgaaggtggatgcctaagaatttgacggcttcacaaaataggaggttgcaatgtcttcgtgctcatgagttgaaagaaaagaaaacagaagtgtggagagataggagatttaatgagttgcggctgccgccaaggcaagagtggagacctaagccaatggagattgaaaagccggtggttgctcaagatgaagagggagacttgaaagaggatgagccaccggttgttaattagcaatgattcaccaccaacggagaacatggatgtcaatatggtgtgcatgttgcctatggagttccgtgccacggatgaggctagaattgcctaatttcacaaggaccaagagatgcagcttttgagaagcccgatgagtctaaccgtcatatgaggcctctctaccaaaagggtcacattgatgggaagccgatctctaggatgttggtgtatggaggtgtcgctgtgaatttaatgccatactcactattcaagaagttggggcgtggagatgaggatttgaagaagaccaacataccactcaacggctttaatagtgaaccaatggaggccaaaggtatcttttctatgtagcttgccctggggaacaaaacgttgccaaccgctttcttcatcgtcgacgtccaaggtaactatagtttttgtgttagaggtgacacatagtggcaggtgagcgttcaagaatatatttatgtcacgtgctttttatggaaatttgaatgccatgcaaaatgtagtagtatggtgcgtagctatattttttttgtcatgttgaatttattaacgcgttgaatttataaattttattcccttcgataccatctatctaatttatttttgtaaaatgttttcaacgatatatattattcattttcaatttcttacaatgttttattgctatttggttgccattaaaagaatagggttctatgaccaaatgattattgtcatatatagcatataatatgagcaatattgatctcaaattattggtttatatttcttaaaactcatggcaaactatctaattgtatgtatgtaatggagggagaatacacatgtatatatttgaggaaagacatgatacatgtagaaggggatggaaggtatttgtgtatttttagtttgatctaatccatcacgtacggacaggcaagtggaggtgggaaggatcctttaaggattaagggttaattggatacatgtcacagcaactttgc

SEQ ID NO: 7298 - DNA, 1970 bp, Oryza sativa
  ref <308>: DATABASE ACCESSION NUMBER: AK064426
  ref <309>: DATABASE ENTRY DATE: 2001-12-06
ttgatgttgctggatagaaatttaaatgtgtgagtatcgtgaactgaaaatggagataacttgtttttagacttgggcggcgagtggtgtacatatggtgtagttgtacaccgatagggggagcgttcgcccgggtcgattaaggaccccactctatgtcaccaactaatgaaaacagtacaaaccacatgtgctaagtatgggttggcctcaacctattaagttgtttagagtttagccttgcatcttggtaggccgaagggtatgggttaccgggttttggtaatttatcggaacttcctatggtttgtgatatgatgaaattgattaatgatatgtggtatgtgttgattttagcgggtagtctatccaatacaacggtgtcgtgcctcgtgagggattccgggctgggttccttacggcgctaggttaaagcgtgggcccgctacctagtggcgctaccttgctagtagcgtgggtaaaacacacatcgtgctggtgcaaggctagacaataaacaatgtaacggttccgttatgacctctagatcacactcaatgtgtagagtgtggtgataccgacgggtatcgaaaaaaactagagcgatccatatcatgtgggcttaaaagttgtacaaactctgcagagtctaaaactaatcgattagccgtgctcacggtcatgagcggcatggtgaagtgtcatgagtataatttgtgattttgataaactcttgtgaacctggaaaatggttggaatgttttgtttgtgaacttgggtaaagttcggtgaatggtgatgagatgatggagagtggtgatgatctaccttgaggggtagatgtgtgttatttactcattcacattacaagttttacttactctatactattgttataaaattccgttgcgaaacatgttatgaactaaaattggcttttatgcaaattaacctatacacagcttatccttgaatatggccaacatgtagtatgctaggattgtttccgacttgccagtacattaatttgattaatgtactgatttcttgctttcttttacttgtttatgcttagaccccgctgcaggtaatgactgtttggatgaggagtttgatgcagcttgtgatgttgcagatttccaggatggttctaactagggatttaccctagtcggtttgcctatgggcttttgggtagcacgcttaccgcatgaaccaatatttatggcttgtcgccaagtactacttagaaccttattaagattatttatgcttattgcttagaaccacttattatttggatatcatgcttgagatgatttatgtaagactatgttgcattcctgggcaactagtcctacatgaggatgggtttgaaatggttgagataaccggggaatatgcctttgttgagatcgagtctctggggtacgcttttggtcgccaccattgagtggttgacgggcgtatgacatagatgactggtgtggctattctaatggttgtgtcttctatttcatatccgatggcttagagcctatgtagtgcactcttcaagacatgtcggggtctgcgatgaggttggatggttaccgtatttatttgggctttatttgagaccccatccatccagatatttcgcgctgacatgccttggagcgttgcaccacctaggctttgggacgtcctcacaagttgttcctgaaaggtgctgttagatccttttctttatttatttctctttttcttttttactttgttttataaagggatagcctcagcttctattgcaagctatataaggtagcaaaacaggtactgctagtccttcaataaacattttcttgtatttggcctagagaaaacaaaaggttgtccctaagacaaagctagcaatgtaagtccacacaacatggacatccgcacacagacatacagagaaaaacccacagaaaatagggaaatatatg

SEQ ID NO: 7299 - DNA, 1558 bp, Oryza sativa
  ref <308>: DATABASE ACCESSION NUMBER: AK064427
  ref <309>: DATABASE ENTRY DATE: 2001-12-06
ggactagtggacgccgccgcgcactaccgcaacgcgctccgcgtcatgctcgaggccaaggccgcccgcgtcccggacgccgtatcctccagcgagagggggcaggttagggtctaccaggagaagatcgcaaagtggcagactcaggtggaggaacgactccgggtgctcggccagaggagtggagcggctgcaccagtgccaaagaaggttgttacaaacaatcctgttaataggaatgacagagccgcatcaactagcttccataggcctacttcgcagcctagccctacctttaatagaggtggtcaagcatcttctcatcagaagagtagcagtggaggtgccaaacctgtgcaaagagctggtgcaaactatgatgataagcttgttgaaatgataaatacgaccattgtggatagaagtcctgctgttaaatgggaagatgttgctggccttgacaaggcaaagcaagcactcatggaaatggtcattttacctaccaagcgaagggatttgtttactggtcttcggaggcctgctagagggcttcttctctttggtcccccggggaatggaaagacgatgcttgccaaagctgttgcatcagaatctgaagcaacattttttaatgtttcagcttcttcactgacatctaagtgggtaggagaggctgaaaagcttgtacggacactcttcatggtcgctgtcgatagacaaccatctgtaatttttatggatgagattgatagtgtcatgtcagcaaggttagctaatgagaatgatgctagcaggcggttgaaatctgaatttcttatccagtttgatggggtcacttcaaaccctgatgatcttgttattgttataggtgctaccaataagccacaagagctggatgatgctgttctccgtagactggtaaagagaatatatgtgccattacctgatccaaatgtccgaagattactgctgaaaactcagctcaaaggacaatcattcaaattatccagtcatgatcttgaaaggcttgctgcagatactgaaggatattccgggagtgatctgagagcattgtgtgaggaagctgccatgatgccaatcagagagcttggtccacaaaatattctcactataaaagcaaatcagttgcggcccctgaaatacgaagatttcaagaaagccatgactgtgattaggccaagcctgcagaagagcaagtgggacgagctagagaaatggaacgaagaatttggttcaagttgacactagacaatggcctatctgaaagcctgaaaagatcaaattcttgagatgccatcacaactgaaactgaacacacgagcgaaccatcagttgatgcccagaatccagataagccatctcatgattggagaagaatgattggtggtggccaattggtgaggcgacgaggagctaatcatgtcccggacgaagccagcgtcgcgatcgccatggcagcagcagcaggtggacgtttactcatccgcatggcccatttagcgcccccatttgcgatttttcgcagcatcacggagag

SEQ ID NO: 7300 - DNA, 1413 bp, Oryza sativa
  ref <308>: DATABASE ACCESSION NUMBER: AK064428
  ref <309>: DATABASE ENTRY DATE: 2001-12-06
actcgatcagccgcagccgcagccgcgaaccctaggcggcgtcgctggatcgggagatgagatccctctggtggtctacacccaccccgtcctgagctcgctctcgctcccgcgctgtcttcggtgagttgctggagttgagttagacaatggatctggagacggagaatcatcttgcttctttactccttgaagaggcacggagattgcagttagaggctgacagggaaggtgttcacgcgtatctgcgaaagcccaatgtaaggcatcgcctgaattcacggttcctcacagccacagttcgtggagttcaacaaggttagaaaaatgttcttttttttctcactatcacatactcctggtgctggatactgttcaatgcagcacaacttctggttctcttgaatctgttgttcatcattagatttgcaaaatactaaaatcttttgtattgggctttttaccatgattatgtctttcgtgtcatgaaattcatacattaaggggaactgaagaaccagaatttgctaaacaacattgtaaaagccatctgtgtaaaattgcttcctctgtctaggaatgatcagccagataaacattagagtaatagctagctcataagcatagccaatatcacattacccgttctcttgtaaaaacaaatcaagtgttgttctggtgtgctgttgaataaaatgtgttattcacctgcagcaaaccgagttgtagaggtcaataaaatgtggcgagcaagggagaaggaacttgaattggagtctaagacaaaaagaagatctattaatcgtggtgactctagaggtaaaaaacgcaggagtgatgtaagaaaccagagctcaagtccaaggatggaacaagatagcacttcttataatagttcttacttggacctggagggtgctctaggggatgatgaaatagagatgttccttcattcgaggttagtagcgtccattttttcttgaaggaactatagagttgttttctcatgccctggtcaattataaaactaataagcccatttatctatcttttgatagtcatagcatcaaataattgtttccatgtctctgttttcttagaatcaaatatcctgcatatgattcccgtaccaatctttaagatttgttgacaaacaatttaattgtgtgctatgctagggtgaagagaggacgaggggccgttggttctaggatggatgagaccggtccatatcttaatgcttcatcacgtagtcaagacaacgtacctagtcttgatataagggtggaagaaaaatgggaactccaagtacaaggcccagagaggccactgtctttgagattccaatccacagatgattattggcatagggaaacaatggatggcgaatcatccatctctgggaaacacatg

SEQ ID NO: 7301 - DNA, 1879 bp, Oryza sativa
  ref <308>: DATABASE ACCESSION NUMBER: AK064429
  ref <309>: DATABASE ENTRY DATE: 2001-12-06
cagactctccagacagaagcaactacactatcagcacagttgtccatgttacaggtactttattttggctttaccttatctcatactttgtgcatccatgatttagacactctacaccaatgtttagcagttggttctactctactagacaaatgcctcagccccatgaaaatgtttatttaggtacatgcctatgcttttaacttggcattttttacctggcaggcttcctattatctgtgttagtataaggttactaaacttgtaggttattctaaatttcatgctggttgtatatcaagtgaagctatttgacaaagtgctgcactgctgcttgttctggaaattccgacaacccatacctaggggtggtaatgggcccatcattttgacctacaaaatgtgagggttgggtccaaaaaggtttgggctgaaatttagaatttttttgtgctaaaaatatttaagggttgagatgggttgtgaaaggacccacaggccaccccgaccctgtttcctctatctgagcagtaaccatttatggtagttaggatgttaacatctgatttattttttccagctgcaaatacaccttttgtatcctacaggttgatactgttaacatattgcagattatgtagtttttgaaggaacttacttttcagttttccacgagtctatccttgattatctctacctgaataatacagagagataccactggtttaacaagtgaaaatagtgatttgaaaatacgggtgcaaacaatggagcaacaagtcaggctgcaggatggtaaggttttcatatcatcgcagtaattctaatcgaattgccatatattttgagaaaaaaaaatgaagtgtcttcatgacacactaatttatagtatatataactggaaattacttgagcctattaagtattgttttcttttctctttattctcttgcgtcttcgttggaataatatagtgtgatattatcttcaattttctcctgatattttctttttcatcacctagtgatcgaagtgatattattgttttctctaccccttttgctgagttattaaccttttgtctatggtagagacgtaacaaaaaatcatataacaagatataagttgtatgaagaaagtaagcattagttaatgcaaattatgacttaggatatcatctttgataggcttcagatcatttattactattttgtaggtgtcacaaaaactctcctacagtgtttttccaatcatctttaggattgtaactgttccttgtttgcatgtagcactaaatgacaggctaagagatgagattcagcagctaaaggttgcaacaggtcaggttaatgccaactgcggcaaagtgggaaactttggcctctcctcatttggaggcgccaatccacaaggttaccagcgcagtcacatacaatctcttctggcagcccagcagctgcagcagctacagatccactcccagcaccagcagcaacagatgcatctgcagcagcatcatcatcttagcacggtccaacagcagcttctgcaggaggggttgcccttgccaggggatctgaagatgaaaggaattgtggcggcatcccatgcacagaacgccggcgcatctgaaagccacgctctgaggagtgagccgtgagttggcataggctcatggcggttgtcagtaataataacatgttgtatctgagtgactcatgcataggctagcgcagtatctaggtaaaatttcagactatctatgaagcacttagatgcctgcagcctgtagaatgtagatcccattcagttgtaagttgtagaactgatgaggcaaaactgagtaattcaccggtgccatggagtatgttcacgtcat

SEQ ID NO: 7302 - DNA, 3886 bp, Oryza sativa
  ref <308>: DATABASE ACCESSION NUMBER: AK064430
  ref <309>: DATABASE ENTRY DATE: 2001-12-06
atttgcgttagccatccggagtgacttccattccggtctcacagaagtcaaccaaccccttccaggggctggatctggccggcgagcggcagggacagcagagctgcgcgtccctcctgcttcaggccaagaggaggcggcggatctggggcgggcgggccttccttgctgtctacgacaggcttgttcccgacccccagtttgcaagcatggagctggcgacgggggcgatgaggagcctgctgcccaagctgcttcagctgctcgagaaagagtacggcctgcaaacgggcgtgagggagaagatcaagtctctcacgggagctcgatgtcgtgcacgccgtcctccgcaagatcggcgatgtgccatcggagcaggtcgatgagctggtcaagctttgggcgcgcgatgtcagggaggcatcctacgaaatggaggacatcgtcgacacattcttggtgcacgacgatggccctgaccccaccgatccacacatgctcctgcgcctccggaagaagttaggcaagctgttcaagaagagcaaggctcgccgtaagatctctaacctgatccaagacattaacaagaagttcgagcaggtgtaagcaaggcatgtcaagtacacagtcgacagcgttgtcctcaagtctctagcggcaacgaccatcgatcctcgtctccagaatctgtacaaaagggcaacagagcttgttggcattgacgggccaagggacgatctcataaacaagctatccctggggggtgatgttgatgtgtccgacaagaagatgaaagtcatctctgtcgttggatttggaggactcggcaagaccactcttgccaaagctgtctatgaccacttcaaaccgcatttcaagtgcagggcttctgttccagtcgaccagaatcctgacatgaataaagcattcgatgaccaggttgaaccgcatttcgaatgcggagcttttgttccagtgggtcggaatcctgacatgaagaaagtctttagagacattctcattgatcttgacaaggaaaagtacacgaatccgaatatgatggtgttggatgaaaagcagctcatggacgaactcaaggaattcgtcaaggagaagaggtgtttcattgttattgatgatatatgggacaaggagtcgtggaaattaatcagatgtgctctgcaagaaagtgattgtggaagtagacttgtcataactactcgtatttctgaagttgccacacatgctggtgaagcttacaaaattcagccactttctcgtgataactctgaaaaattattgtatgcaagaatagttgatggtgaatggaagtatttcgataatccatcagctaaggcatgtgaaaaaattttgaagaaatgtggtggtgtaccattagctatcattacaatagctagtttgttggccagtaaaccaggggaggactggtctgaggtctacaactctgtcggttttgggcatgaagacaatgatgatgtaggtaatactagaaggatattgtcttttagctactatgatctgtcttcacatttaaaagattgcttattgtatctatgtgtatttcccgaagatcatgtgatagagaaaaatagtttgatatggaagtggatagctgaaggtttcatccatgaggaactagcagcagggttaggattatttgagctcggggagaggtgcttcaatgagttgataaatagaagcatgatccagccagtggagacaaaacatgaagggtatgtagatggttgctgcgttcatgatatggttcttgatatgatccactcattatcgagtgaagaaaattttgtcactgtattgaatggtgatgagcgacagaaacttccggggagcattgctcgcaggttagccctgcagcgtgttctagtgcacaaggatggtcagctagctaatatcactctgaagaatgtgagatcccttattgccagtcagtgcttcggttcattatgcctacacactccggttttacgtgtattagatgtgataaactgtgcagaaagtgagacgcctaatgttttggaagatagggacaaaactatgccaagccatcttgggagtttacttcacctgaggtacctcgggttagtagatacatatatcactaagctgcccagggaagtaaggtatctcaagtttctgcagacactggatttaaggggaagtcgcataaaggagctgccagaggaggtgggactgctgacacaacttgtttgcctacgagctgattgggaaataatggtgaagattggtttgatcggtaagttgacctcattgcaagagctttggatagagcctgctgctgctgtttatgatgacgatgctgcttctgttgatgatgatgatgatgctgctgctgttgatgatactacgaagtctacgatgaagtttgtgaatgagctgggcctactgagggaactaagggtgctccggacttattttgaggatttgaatgagagcatggagagagctttgttggaatccctaggcaagctgcacaatatccgggacctgcacattgagggcccacccctagtgacaaggagagtgacaagcagtgcaagatctgtctcctgcctgcatctccgatacctgtgtctgaattgctttgtgttctctggactgccagcatggattaaatcatcgcttgctccgaacctctcctgtctggatgtggttgtgctaattgtgaaagagcaggacatggaaacccttgcgaggttgccagagctccgctgccttgtgctgcgtttgcatgagaccgaattggttagcataaagattcatactgaagatgttggctactttcggaagttgagaatcttaaggatacttggtacatctatctggtttgatctgcacggcagcaagtgcaacatcacagacaatagaagcttagcatctattatcatgccaagtcttgaattcctcgagtttgctgtccatatgcggttcctgaaagatgcaacccagcttggttttgacaagctgcttagcttcgagaagcttggaagaagttcgctccagaaagtcaccatagtactgaaatgtggagatgcccgtctgtcagaggtggaggaagtggctgctgcattgatgaactcagctgcggtccatcccaaacacccaactgttcaaaccaaatggcaagacgaacaagctgtgctctcaccctaccaagaggcatatatgcatgtgagcagaaccccggagttggtaaatgaggcctggaaggcgaacattgttagctctggccgtattcgagcactgcgtatgccagttacagaagcatcttcaagcaaagttatctgtctgctttatagaaaaagtgggaagggacttttagctctcagctcaaatgctgttcataagctgtggaaatgggagagcaatgacaagaatcctgctggcatgtccaccacatctgtcccacctcaagtgtggcaaccggaaagtgacattctaatgaatgacactgctaatggcaaccctgaagaagcagctgcctgcagtctactatccaaaaatgactgctatctaatttctgcatctggtggcaaagtttcgttgttcaacatgttaaatttcaagaccatgactactttcatagcacctccaccctctgcaactttcctcgcattccacccgcatgacaataacatcatagctattggaacggatgactcttcgattctactctacaatatccgtgttgacgaggtgagtgttagccgtgcatctcttgtcccctgtttgcataaatctcaaaagtattggcaaaactcactatctatgattcccactggaagtgcagtacccattgtgaaataatatgttctcgtttcagact

SEQ ID NO: 7303 - DNA, 1390 bp, Oryza sativa
  ref <308>: DATABASE ACCESSION NUMBER: AK064431
  ref <309>: DATABASE ENTRY DATE: 2001-12-06
gtttctttcagttgggcgtttatatcggatttcttggaattcttcattgatttattcatgagagaatctattctatacaactaagtttgttatagttcaacaattttgggtatcgcaagcaagtccaacacctttgaccaactcttgttatattttcgtaattgcaatctatatgtatcacctagcattaaattatactttctataattaaaataaatatgctgatgtttggattggctggtggagcagtcggtcatatataggtgtattctgaacttgccatggttgtcggggttcagctgtatatatttttcatcgtaaggttaaataacaattgttatatggcattcaagtgctgtagcgatcgtatcaaccacatgacctggaatgggataggctagcttagtagttctttcttaatggctttatcctgcgggcttaaggacttccgcgaatcctgtgagcgtggcctagtgatgagggttgttgttgttgtggaatccgattagatgatgtggatcaccattgttgcgggatccaatgattcgccgttgttgcgggaatcacccgcagagataattgatagatgggattgatgaaaagcttatgaccttagccttgccggcatacaccataaagtgtgcttcaaacaccaacgggcgtgggctttaaaaggtttaaggcgtctgtgggtacagagacacacctctgcagagtgtatgaagtgtgatatgtcactccctgttttgggtagaaaccgcgaatgcggtaggaaaggaacctatcggaggttctaataccgttggtgccttatatgcagtagattttataattacttaatatgagtttttacaacactgttttatgaacatgcataaaattccttgttggattatggtggctttggacatatatgtattatgcaggtggattatgggcatatatttgttggattgctatagttggacttgttgagtaccattcgtactcatcccctatatattattccttgtagtgttgagctaacaattaggtgacgagaagattctgcaaaaattgatcaagtgttgcatatctctacatcaactaaatgatgaaggtgatgatgatatagaagagcaaggtcttggtaagttgattcttactaaggaatgagccgtagaccggtattctacctcggaagtggaatacgagggtcgctacaggctggcggtggcggagtcggagacggcacgaggacggtggatcaagtgcgcactgcggcggccacaggcgacgcgctggtcgcgacacggtcctcgctttgagctgaggacgctggggaggccctgtcaataaaaacacaaaggggtgctgattgaacacagaataaaatcagaagttataactc

SEQ ID NO: 7304 - DNA, 1931 bp, Oryza sativa
  ref <308>: DATABASE ACCESSION NUMBER: AK064432
  ref <309>: DATABASE ENTRY DATE: 2001-12-06
ttatatgtgatgatttgatgattcgatgataatgtttggattcgataatgtgatagtgcgattatttattgattcaatgtttagatggtaatgtctatatatgatgacttgtgcatttttatatgtgttagctagtgatgatgaatttatatggctatgatgacttgtgcatttcaatatgtgttatctagtgatgaatttttatatggttgtgatgacttgtgcatttttatatgtgttagctactgatgaatttttatatggctgtgatggatgaattatatgatttttgggggagaatggtatgttgggattaatgtttagatatgggctgtgatggatgaattattgtgggctatgatggatgaatggcagtgatgattgctcaagaacataccatttttgggatgaattgatgtgggctgtgacttgtttttttatggctgtttttttttcataaggacagaccctctacacttgttcttatacggttgtttacaaaatttttgggattttttgggtccaatgggatggatgaattgatgtgggctgtgatggttgaattattttgggggaaatgtgagttttggtatgtgccttgtgttttttatggctgtttcttttttgcataaggacagaccctctacacttgttcttatatggttgtgtacttgtgttttttatggctgttttttatatggttgtttcttttttgcataaggacagaccctctacacttgttcttatatggttgtttgcaaagaatgtgggatattttgggtccaatgggatggtaagaacgggccctctacacttgttctttatttcttttgggggtgggggcagttgcaaatgatggtaattgatgcataatttctgagcaaaactgaggccaaacttattatatgtcatgacttgtgtttttttaggtacaaaaataatatatatgtgacttgtgtactatgggctattttgggtgattttgagggaaatgggatggatatgcatagggctgttattaaatgaagttagtgaaattatggcatttaggagaatacgaagtattccgattgccaaatatggtttggtcgggttactgcctacacggtaccgaccaagacaaattcgttcaaataagacatgtctagaaatctattatcgttaccaatatcctagattgctttcaaggtcatttctttagggaaccccattcccataaattcagtatccaaagctggttgctgtatctatgggaataagggttcccttacgaaatgatcttggacgtaatctaggagtttgctgacgataatgttagggatcttggatgcaatctaaggataggaagggttttggttgcctgtgtgttctatctgcgtccgcctcatcagcagatatgtagcatccatgttcctcgaggccggagcagacgggatctcgacctccacatccatatcccactggaacttgctaccgttgccactatcttatggtagtgacattgataggaagttcgagtgggatactgatgtcgaggtcgagttcccggctactccggccatgttgagcatggatgctcgtgttccgtcaacgaggcgaacgcaggtaggagatagaggtatatcaaaccatcagagaatgtgtgtagatgcaattttctgtttaaaaagtactttcttcctgtacaacaatcacataggacatgtcgtagcaaggcgaaccaatgtcgacgaccactactgggactacttcgagccagaatcctaggacccagaataagattcctaagtaagtctacaccataacagaggtggacgatattggatatccgacggcttcgatgaaagctgtcaaaaagttccctacgatatgtggagtcctagggaggcggaacttcactattctgaaggaccacatcgatctggtccctc

SEQ ID NO: 7305 - DNA, 1499 bp, Oryza sativa
  ref <308>: DATABASE ACCESSION NUMBER: AK064433
  ref <309>: DATABASE ENTRY DATE: 2001-12-06
tctacaagttggtgaacagcctcgctgaaaaacacaggtccttgttcacaccttacttcaagtacctgcttgagggatctgtacaatatctatcagaagatgatgctttgatcagttccaagcaaaagaagaagaaggccaaacttgaagatgctccagtggaacagaaggataaattatctggaccaaaactgtggaatttaagggccctggtgttgaaatccttacacaaatgtttcctttacgacaatgaccagaagatccttgattcctccaatttccaggctcttttgaaacctattgtttctcagtttgttattgagccacctgaacattttgaatcagttccagaagctccatcagttgatgaagttgatgaaactcttgttttgtgcttggggcaaatggcagttactgcacggtcagatgttttgtggaagcctcttaaccacgaggtgctgatgaggacaaggagtgacaaagttcgccccaaaatgctcggtctgaaggttgtgaggcacatggtccaacagctaaaggaggaatacgtggttctcctcccggagaccattccattccttgctgaattactcgaggacgtggagctccctgttaagactctagcccaggagattgtgaaagagatggaaaccctcagcggcgagagcctccgtcagtacctgtgaggcatctgacgtctctgatctgcaacagtgaagtgaatatttatgcacttccgggtaaatcacttaagaaaaacatgggagttctatgcaaagttaacactaactggaacattctggaatatattcattttgctgtgtagtacaatggtggccatattcatggtgtatggcctttttttatgacagtaactgtattgtttgcggttttttgctctatggttttgaacgctgtatggcaatatcaccgacaggtatcacgtgtctgctaagcgggtggccatgtatacgtacagtaaaatcaagttgtgaactccaattaggaattaaggatacgtcaaatttgtaggctgtactactgcagagtgcagactgacttttggggttttgcaccatgcacgatggttagcatgtgccaggaacaacacagcacatggagaagttttaaggcttcggaagtctactttttttctttatctagttctagcctctagtggaatcctggaaggtcagtaattcgcgttttatcatcaatggctgtgtacgtgatggtgatgtgtacgtgatggtgatgtgtatgtgaattgtcgtcgctatatcggtcacgcggaatctatttctgggtgtatcagaagccacatggtggttgtggtggactggtggtaagacaactactcagtacacatctcgggtgtgacatgtctctttcacgtactgaactttgaacagatatatggactcacgctctcaagtactgaactttgaatggtgaggtaaaaatttaggaagtaaagaaatgtcagttatcaacttctc

SEQ ID NO: 7306 - DNA, 1674 bp, Oryza sativa
  ref <308>: DATABASE ACCESSION NUMBER: AK064434
  ref <309>: DATABASE ENTRY DATE: 2001-12-06
ttatataatcttgaagtctccgaagacgaggttattgtgtctgattgtggactccaagacctgtcgatcacaccttttcttgatgctctaagattacataaaacaatagctgtgttggatctttcccataatatgctaggaaaccaaacaattgagaggcttcaacaaatattttcttcatcaagccaaacatatggtggcttgacactggatttacattgtaatcgatttggtccaactgctttatttcagatatgtgagtgcgctgttatgactaatcgattggaagtacttaatctgtctgggaatcgcctcacagatgcatgcggttcttaccttttcacaatcctacagaagtgcaaagcactgtacagcttgaatgtcgagcaatgttctatcacatcaagaacagttcagaagatggcagatgcactgcatgaagggtctgccctttcacatctctccttaggaaacaacaatccaatttctggaaatacaatgcttagccttctctccaaacttgcctctctgaaaaggttttcagaactaagcctgactggtataaaactgagtaagttaatggttgataagctgtgtgtacttgcacaatcctcatgcttatcaggatttctgctaggtggaacttacattggatcaggaggggcaactaagcttactgaggcactctcttgtgcatcacaagaattgctgagattggatttatcaaactgtgggcttacaactcctgatttctcgcaactctgtacaaatctttctcaaattaatatcgttgacttgaaccttggaggcaattcttttaccctagaggaatgtgatgctattagggcattgctttcgaatccccaatgcagtctcagatctctcacccttgatagatgcaatcttgggcttgctggcaccgtgggcattattcaagcactagcaggaaatgaccaattggaggaactacgcgttgctgagaacacaaacctggcactacagagaacattgcagtacgatgaagacgcgcaggatgtatcaccaggtactgaccaaaaccaacgtaccaatgctgaagcgaacgatcacatagaccctgataagatggaggtgccggatagcgaagacgaagaggcagtccacgaggacacccgtgcagcgaccggcccagacgggagctgtgcaagttcatgccagagaaactcctcttctggctgtcatgccatccaagaactcgctgatgccatcatttctgcaaagcaactgaaggtgctcgatctcagtcggaacgggttgtcggaagaggatatccagtcactgtattctgcttgggcttctggccctagaggtgatggaatggctcggaaacatgtagccaaggaggtggtgcattttgcagtggatgggatgaattgctgcggcctgaagccctgctgcagaagagacttgcagatgtagtaaacctggtcgacctccccaagcaccaggttagagttgctctctggaaatattattattaccacagtaaattaactagggttcgtcagtgtaattccggggctccgtccaaacagagatgaattaatgggaacttgtgtttcatcagaggtgtaaatagcggccgattttcgggtgtaaataaaattatggtactcctatttgcttattactatt

SEQ ID NO: 7307 - DNA, 1450 bp, Oryza sativa
  ref <308>: DATABASE ACCESSION NUMBER: AK064435
  ref <309>: DATABASE ENTRY DATE: 2001-12-06
acgtggccacgtgccaccctctcctctatttccccccccctctctctcttccatcatgatccccttcttcctccggtcacttttctggctgaatcttgctcatgtcccttttctggccacctcacatcatcgttgccaaggtcgccgaacagatcaggtcgccgttgccaccccctcctttgttttgccgtctgttcccctcctctctcttcttgtgcacagccgcctcctcttctcgctcaccaccatcgaatgactcaagcgccggcgaggtggtgatgagcgtcaaccatgtgccttcaccgccaatccacctcctccgccttgtcgataggagctgtgtgacctcgtcttcctcaccaaggtcgccatcgacggaagctatgcaacctcatttctcctcgatctggtagtgctggacgttgatccgacgggagaacggctaggaaggcagtgtggtccgacgacgatcagataggggggcccagtagcgagtagatcatcccaacaagtatcgtgacgagatggatcggaggcagctcctgccagtgagcttcgaggccgatgatggtagcgatggcgtggatcctcctgggatccgagcgtcttcattggggaaggaaaattgcgtacgtggaggagagtctcccgcatagatggttaagtccaaatgccataccgctatagtgtgaatggtctaacggtaccactatttatgttactctatatcatttccgtcctttgcttcgcacgaggccaccttcgatggtacgatatggttttttaaaaaagtttaatcaaatttaataaaaaaattagtaatgtctaaaccactaaattagtttcactaagtttggtattggatatattttttgataatatatgtttgtattgtgttacaaatatcacttcctctatcccacaaagattgacgttgtaaagatttggcaatctttcggtgtcctgtagcaaattttgcttaaagattttgatacaaattagcccacaatcataaattaccaaattgcccttgatttatcgttgtcctctgaatgcttgagaaaaacaatgaattgtttacttgcactcaattcaaatgggtggaccagaataattctttagaagtactaatgaccttgaaaaactaacatgacaaactttttgggacatcttataaattgcaaaacaaccatctttatatgactgagaaagtactacaatttatcataaacttgataaaatataaacaaattcaattaagaaaaaaaatcaaaatgactaataataatataagacgaaggagtactctagaacgtttccgtcgttgtttgctccgccacgagggcgcgctacactcccgatgtcacgtgcgctgccctctcgatagcacgagacgaggtcgcgttggcgtgatacgatacgatcacattcactacacacgagttaaaag

SEQ ID NO: 7308 - DNA, 1569 bp, Oryza sativa
  ref <308>: DATABASE ACCESSION NUMBER: AK064436
  ref <309>: DATABASE ENTRY DATE: 2001-12-06
ttcaggatgctgccattgtcgctgctgcacagcttgcggaccgctacattaccggtcgtcaatttcctgacaaggcgattgatctgattgatgaggcttgctccaccgtaaggctgaagattgatagtcaaaaaggggtgaacaccacaggaatgcaaaataacaatggaaatacgtcagtgaatggagtgaacgaagcaattgttggcccagatcatgttgctcaagttgtgagccgatggactggcatcccggtcactacacttgatcaagaggagaaggagaagttaatccacctggcagacagattgcacgagcgagttgttggccaggatgaagctgtcaaactggttgcacaggcagttttacgttctagggcaggccttgaacaacctggccaacctataggctctttcctctttctgggctcaaccggtgttggaaagacggagcttgcaaaagcccttgctgagcagctatttgacagcgagaagatgttgatccgctttgacatgtctgaatttgttgggagtggatctgtgttgcgtctcattggagcacctccaagctatcatggccatcaagatggcggacaattgacagaaaaagttaggacgcgtccttacagtgtcatcctttttgatgaggtggagaaggcagatccctcggtgttcaacgtgttccttcagctcctcgatgatggcatgttgactgatggcaaaggaaggacagtagatttcaagaacaccatcatcattatgacctcaaatctgggagctgagcacctaactgaaggagtgactggtgaaagaacaatggaagctgcacgggaccttgttatgaaacaagttcagaagtatttcaggcctgaacttctcaacaggctgagtgagattgtgatatttgagccgctttcgcacgacaatcttaaggaggtcgtcaaaattcagatgaagagtgtcgttaccagtgtggctcacaagggcgtatctctacttgcaagtgatgatgccttggacgtcatcttgtctgaatcatacaacccaatgtatggggcaagaccagtaaggaggtgggtgcagaagaatgtgatgacaaagctctctgagatgcttattacaggagatgctggacaggggtcaactatttccattgacgctactgatgacaagaaggggctgaactttcaagtattgaaggaggaggtagtggttccgcgaggcaagaggccagtcgaggagcttcaaagcgactcggatagcgatgacgatgtgttcgagatcgcccccataccaaagaggaagaaaggtgattattagcatataggagcagcctgacaagtagctaggttgccacttttgggttatccatattatattagtgaattgcaacatggtagtatctcctttagcttgaacttatgccggttttagccagtgggcgttgtgtctgtgagaactcgcgactcatatggtaaggagggctgcttgcttgcttgcatcggctttcctccatgacgctgtaagagctgaatgagacgacctgatgtccttaatgcatgttactttt

SEQ ID NO: 7309 - DNA, 1379 bp, Oryza sativa
  ref <308>: DATABASE ACCESSION NUMBER: AK064437
  ref <309>: DATABASE ENTRY DATE: 2001-12-06
aaagcaagcaacggagcagctagctagccagcacattcagttgagttagctaagctagcttagctcatagcacaatgaagctaagcaacatgacagcctttttgtcacttttgatcttcatccttctggttgcgatagaggctagaaatttggtgggagtggaacgggtagagctgccaaatcctgcatctatggtaacagcatactggcagaagatgcttccccactctccaatgccaacagctatactcgagcttttgaaccctcctactgatgttaatcaaggtgttcatggcaatggctatgatcaagtttatggcaacggatatgacggcggctacattaatggatatagtcattcctacagtaatggctattccaatggctattttcacaaggcaaacctccatttcctagaggatgccttgaaaccgggatccataatcactccctacatcacggggatagccacgcgtgctccctttcttcgccgggacattgcggattcaatcccagtgagtacaaagaactttgccgacattctggcaatgttttcgcctatatccctcgtcatggccgacggtatacaatcggcgttggacacttgtgagcaccaccgcccgatcaagggagaagaacgtgcgtgtgccacgtctatcgagtcggtggttgagttcgctatgtctgtgctcggaacacgtgacctccgtgccttctcccccgatgtccccccagaggggatcatgccaggaaacatgtacaaggtggtagcggtaagaacagtcgcgggcttaaggggggacaccgtgacgtgccacaccatgaggttcccattcgctgtgttctactgccacgcgatcaaccctacccgagtgtacgcagtggtgctggagagcgaggaggatggcagcggcagcggcagcggcacaccggagaagatggaggcgctcgccgtgtgccacctggacacgtcacgatttgaccccaagactccattgttcgtcgagcacaatctcaggccgggagatgcgtcggtgtgccacttcgttagcagggacagcgtgaactgggcacctgtagctgctgtgataacacatggagatgaacaagtctcaattgccgagtagaggcgaagcaccaagcatgcactcatcacaagtgtttgtattaaataaagctggtacatatgtacgtaccggtgcttgcgtagtactatgcatgccttccactgctctgttcatagttctgttctgccttgtacttgctctatatatgtatgttgcttgtttctacatgaaggaaaaatgtactctattgtatactatgttatgcaaggtttgaggatatatatatcatgaaaggggaaccatcttttgatt

SEQ ID NO: 7310 - DNA, 1406 bp, Oryza sativa
  ref <308>: DATABASE ACCESSION NUMBER: AK064438
  ref <309>: DATABASE ENTRY DATE: 2001-12-06
tattatcttcttttttcatgcaagcctgacctcagctgtccatttcttattcattcagggcgcccctagtggacttggcggtgctcctttctcaaaccagaacaactctgaacgttagggaaaataagggaagaccacctgagcgaaccaaccgaagggactttacttatccgaaccgaacgttagcggcttaagctaagcctatcacgagctgctgctgcttgatcggagcaagaaaacggatgcgcgtgctaacgctttcgcgctagtgcgctcaacccgttgcttgttggggaggaagatctaaaagtatggggcaaaggatcaagcgctttgactttgctttgtcccccgggatccaccacaggttgggtttgagagccgtgtgatgggtgactatctagcacggttcagagagcacgtgtatgtagtctgcgctggtgaatggaagcccccgccgcaaaaaagaagcggctcttcccacggctctgtcaccattgactctatttattattatggtaaattattgtatcaagatgtcaatcttagatcttatttcagttcgatacgtccacctacgatactcacctttggctttcgtctcggtaggtgtattattctacattttcccaaaaggacattcattcatttctttcttccccgtcgaccactacgactaaaacgacgcgacaaatcaagacccggaaaggataagggccggtggtgggcatttgggaaagtcgggccgatcgggtgtcttcattcaagcgagggtacagaggaagaacgaaacgaagtgagaggccggggggcagggaaaagagtcgagtcgatcgaccgggagaagcaaaacgaaatcaggatttggccgaaaaagatgcaacgttatggataccatgaccgatcaccatcgagaaagaagaatttttctaaattacttcgggtgagcggggccttcaagcatccgaaatacgccggggttgtaaatgacatagccttcctgatagaaaatgacggcccgacgagtcatctactaaaaaggaccctccccgctgtgcgcccctccttgaattatttggtcatgcaatacttttttaatacaaagaacaaaatgcatttcgaccccgtcgtagttctcaatcatttcgtggcaccgggtgtggctgaaccatctacgatggggggagcgaagggaggaagcttagataagagaatacgctctcgcatcgctttttttgtagaaagctcgaccagcgagaaaaagtgtttggcccgagcccaaaagaggttgatccacttcattcgccaagcgaatgatcttcgcttcgcgggaacaacaaaaaccaccatctcgctctttcctttcttcggtgctaccttttttaaaaaaaaaaaaaaaaaaaaac

SEQ ID NO: 7311 - DNA, 1293 bp, Oryza sativa
  ref <308>: DATABASE ACCESSION NUMBER: AK064439
  ref <309>: DATABASE ENTRY DATE: 2001-12-06
aaactattttgctggatccatggtctgagtctactatgaataatttattggagaacattaatgttgatctgaagaagttcgctggctatcataagagcaataaggtctatcatggaaaggtgccattaacttcgcctcagaatgttttaagaaacaaagtcattgaattaggtggtagaaagtaccagatcaaaggttctcctggtactggtgcttttgcaaaagtttacaaagccagtgtcgatggtaatacagaagacctggttgctttaaagattcagaaaccaccatttccttgggaattttacatgtatcgccagcttgatacgcgcgtatctgatattgagagaccaagctttggctacactcatgaagtgcatgtatacgctgatgtcagtgtgcttgtttgtgattacctgccatacggaactcttctggatgttataaattctcatctagtacttgaacgccatatggatgaagttctatgcatatattacactatagagatgctgcgcatgttggaaacactgcacagcgttggcataattcatggtgatttcaagcctgacaatatgcttgtttgctacccaagtggagaaatcacagacgaaaccttcaaaggcgagacaagatccgagcggaatcaggggctctgccttgttgactggggccgtggcatcgacctgaacctcttcccatccggtgcggagttctacggcgactgccgaacctccgggttcagctgcgtcgagatgcaggaacagagagcctggacgtttcaggctgacacttacggcctctgcgtcatcgcgcacatgatgctacatgggacgcagatgagcatccagaagacgcccaggcccgatggaagctacatgtaccagcccacatcgccgttcaaaaggtactggaacgtggagctgtggaaaaacctcttctccacgctgctcaacgcgacctccaacggcagcgacgcggccgtgctccggagcctccggatgtccttccaggagtacctgtgcagcaaccggcagctcgtcggcaagctgaaccagcaactggccaagcagaagacctccctgtgcctatcctgaccgagacatatacgcatctcgcgtttcatcctcatcatttttcccgattccctcgtgttgcctgtgtgtaaagtggtggagtataagataccttccgtaacttcgtagcacttcctctgtgcgtgcgtgtgcagcagtaattaacgtgccacatctccactttgaaagctgaaacatctactattgggccagatgg

SEQ ID NO: 7312 - DNA, 1548 bp, Oryza sativa
  ref <308>: DATABASE ACCESSION NUMBER: AK064440
  ref <309>: DATABASE ENTRY DATE: 2001-12-06
gtttttttgctgctgctccggtgctcccccacccaaacctctcctcgagcctctccccggccggatcgccgccgcccgccgacactcgccgtttctcccgaaacaggtggggtttgcatggtctcatcggtgctgagcatgtgaattttaggaagttgacaagagttcacatttaattcgtacatgatgaatggttcaaatggttcccaagggtatcatgtgaatggaaagcaagtgcaaagcgttgttccttccattcagaacaatggaccaagacaccggccattgactctaatgagacggtgccgtggcatgttatgtttggttattatgccgttgacagcatttatgatgatggtttacctatcccctgtaactactttcctcatacggttgttcagtgtgcattacagcagaaagtcgacatgctttctgtttgggatgtggttagcaatgtggccatttttgtttgagaagattaacaagaccaagtttgttttctctggcgaaactgtgcccccaaaagagcgtgtcttgttatttgctaatcacagaaccgaggttgattggatgtacttgtgggatcttgcgttgaggaaaggccgtttgcagtgcatcaagtatgtccttaagaaaagcttgatgaagttgcttatttttaactgggcatttcacattattgaatttattccagtagagcggaagtgggaggttgatgaaccattaatccgaagtagactttcggaattaaagaaccctaaggatcccctttggttggcagttttccctgaaggcacggattacacggagaaaaagtgtatcaagagtcaagagtatgcaaaagagcacggattgcctattctgaataatgtcctccttcccaagacaaagggttttcattgctgtctacaagagttgagggactccatggattctgtttgtgacatcacaatcgcatataagcatcggccaccgacttttatggacaatgtttatggtattgatccttctgaagttcacatacatgttaaaatcatccaagtctctgacatacccacctcagaagatgaagtcgccgattggctgatcgagagatttaaactgaagaacaagcttctgtctgatttctcggcacttggccatttccccaacgaaggaactgaagatgatctgtccacactcaagtgcatcgcgaattttgtagcggtaatcagcacaacgaccgtcctcacgtacctgaccctgttctcgtctgtatggttcaagattttcgtagcatttagctctgctttccttacttttgcaaccttatactccatacatctgccccagctgatatgctccccggaagctggtacccatgccaagaaatcctgaaagtatttgtgcaagtgtaaccctcagctgtgtattagcagaaagatattactactctgctcagaacccaacttgtgggttgtggcatcatcgccatgtatacctgtatatccaatgggatttgtcattggaaatgtttctagctctatagttcagtactacgattctttt

SEQ ID NO: 7313 - DNA, 1189 bp, Oryza sativa
  ref <308>: DATABASE ACCESSION NUMBER: AK064441
  ref <309>: DATABASE ENTRY DATE: 2001-12-06
tactgaccttagtggatttcaagtcaaaggagacagacaggctggtaatggagcttaaagcaagagtgatgagttccagaatcagaagagatgcaacgaagcaaagttaagtgttctctcagaagaaatagatcaactcaaagctaagattgagaatctgtcaaatgaacgagacaatctcttcgaagagaatgagcagaaggacaaggaattagctgcaaattgtcaaaaggatatgttcttgcaggatagagatgctgagatagctttgctcaacaaagaacttgcttcaatcaaggaccaagtgcagacatatttagaggagataaacactttaaaaagttcaaagaatgaaaaggaggagatgatcgagaagctgcaatcagagattagatcgttgaaattcgagtatgacaacctgaaaattttgatgtccactaacgactctgagaaacacaaccttgcttcccaagtgctgaagcttcggagagcccttgaaagcagggaggatgtgaaacaaaatggtgtcaaatcagatgaggacaaccaccatgctacttctaagcgcatcaagcatgacgacggcaccaccgggagctgtaacgtgctgccaagcaccaacagacacaatgcaaatggtgactgcaatgggcatgacaggagggatgcagctcatgatcagtcggtaaaggagctggaaatcctgaaggagaggaacactgcactggaggaagagctcaaagaactgcacgggcggtactcggagataagcctgaaattcgcggaagtcgaaggcgagaggcagcagctggtgatgacggtgcgcgccctgaagaactccctgaggtgatcttgatctatgctcctcacacacgttgtagtacaaaagatttagatgataccccggagggttttgtataggcaggcagctggatgagctgtatgaaatgaggacaatatctaggtgctctgcagaggccacaggtacccaggttagcagggtgtggtcagtcacaatacacagcattgtagatctccccccacaataatatttctttcttcttcttcttcctcttcctcttccattggtgtgtgtaactgtaacatgaattagcttctcatctagagtgttgtgttgtataattcctgatgcttggcttttgttgtgaagaaagaaaagtgagataag

SEQ ID NO: 7314 - DNA, 1768 bp, Oryza sativa
  ref <308>: DATABASE ACCESSION NUMBER: AK064442
  ref <309>: DATABASE ENTRY DATE: 2001-12-06
attttgaggtgttgcactagcttgatggacttgaggtttggttgtcaagttcatgcatgtgttcttaaaagtgggtttcaaggagattatgatgtttcaaaaatgcttcttgacatgtatgtgcaagctgggtgctttacaaatgcacgcttggtatttgaccgactgaaagaaagagatgtgttctcatggacagttgttatgtcaacatatgctaaaactgttgaaggtgagaaggcaatagaatgcttccgctcaatgttgcgagaaaacaaaaggcctaatgatgccacattagctacctcgctaagtgtttgttctgatttggcgtgcttgggcagtggcctccagctgcattcatataccatcaaatcaggatggaacagttcagttgtttccagtgctttagttgacatgtatgtgaagtgcgggaacttagcagatgctgagatgctatttgacgagtcagacacacatgacttagttgaatggaatacaatcatctgtggttatgctcaacatggtcatgggtataaggcattggaagccttccaagagatgatagatgaggggaatgtacctgatgagataacatttgtgggtgtcctctcagcttgtagccatgcaggattacttgatgagggaaggaggtacttcaaattgctgagtagtgtgtatggaattactcctacactggaacactatgcttgcatggttgatattctggccaaggctggaaaactagctgaggctgaatctcttattaatgagatgccattgaccccagatgcatccttatggaagaccattcttggagcatgtaggatgcatggaaacattgagattgctgagcgagcagcagaaaaattgtttgagtcacaaccagatgatatatcttcttgcatattgttgtctaacatttatgcggatttaaaaaggtggaatgatgttgctaaacttaggagtatgctagtagatcgtggagtaaagaaggaaccagggtgcagctggattgaaatcaatgggaagttacatgttttcctgtcacaagatgggtgcgctaaatactaaaatttgagtggtgtatttcacccatcttggtcctgcaatctgaaatgtcaatgcagtcacaggccagaaaaccggttccaggctaatcttagggtaaactatactgctggaaacgtagatttgtctgaagacttatatagttgcccacttaactggcagtaactcacacatatcaggataaatgcagactgaggagagttccttagtcgaggcatatggaaatggtaaggcaatattgcctgccattgtgagtaaagaattggttacagattaatgtggcacacgaagagcctgtcctacttcagtggatactggattgctcatatcacatttatattcaaattgggatggttgtgcaggtggggtgatcaacttgttgaccaacttaagtaaggtctgttcgagttcctcgccattattccatggatgaacctcggccttgagaagctgtttgttgctgctgatgagattccagagggggtatttctcctttggcatgacatagtccccttcccctagcttaagggaggggcaataatctcctctgccatcaccaatgtagatgaaatgccttttaccattggccgtctccaggctgacttgcctgcctccctcctccttacacatgtttgctctctgattctgtatcccatggtaccattaattagtagatcgatcgtggtcatcgatttttagt

SEQ ID NO: 7315 - DNA, 1686 bp, Oryza sativa
  ref <308>: DATABASE ACCESSION NUMBER: AK064443
  ref <309>: DATABASE ENTRY DATE: 2001-12-06
agtgctggccaacttaatgttagtgaaggatgagtccggaaaagtgcaggagaattacgagaccttgttgattgaacgggatatttctatcgggaaagctcagttagccgtttcaatgtctgaaggtgctgtaaggaaggttgaggagctcaccgtagaacttaacagactgaaggtggagttggaattggctcattccacatgccatgatgctgaaaaacatagtaaagacacgtccttggcatgtgatgaggattcccttaaatggaagagtgatctgaggcaagcagaagaggagctcaatcagctcgccaagaaaatttcttctattgaagaattgaaatcaacacttgacacatcaaccggcttgttgctcaagctgaaaaatgagctagctggatatgtggaagctaagccaattgataaagaagcacaaggaaatattactcaaagatctttacacaatgaagttattctatctacacgagagttggaggagtgtctgatgagcgtagataaggtgagagatgaagtttgtgctctgaatgttgctgcggcatcgctaaaaacagagttgatcaaagagaaaacggcacttgctaccatgaagcagatggaagcgacgtcatccatcgctgctgcatctctaagggtggagattcagctagcactccgggaactggaagcagttcaggccaaggagaaagaatcccgaaatggaatgcttggtttgcagaagattatggaagatacagccaaagaagctgatgagtctaagtccatcgcaagagaggcacaggagaagctaagaaaggccaaggaggatatggaccatgcaaaatcttgtcttgatactatggaattcaggatccaggcagttctaaaggagatggaggccacgaaagagtccatgaggctggcaattgatgccctcagaccgtttgacagtgagcttccagtggatatcgaggaacaaggctctcagatagtcacagttgacctggatgaataccaatctctcattgcgaaatccagcaaggcagaagaacttgtccatgaaaggacggcttctgcaattgcacaggccaagatagccaaggagtccgagtctcgtaccttatcaacactgagtgaaacacacaaggttttggaacaacgaaagcaggcattggttgctgccacagagagagctgatagagccactgaaggcaagcttgccatggagcaagaattgagaaaatggagagaagagaatgagcagcgtcgtaaggctggcgaagctttgaaatcgcaacttaatccatcaagcacccctgtgatcatcgttgaacgcagcagcgacaccaagagcacaagcaaggatgatagttacgcctcggttcatccactgctggatatgtctgcgaggagtacccctaatgattcagcgttgctctcgaataagaagaaaagaaagaagctgtcgttcttcccccgcatcaccatgttcttcacgaggaagaagtctagagctgctatatgaacaaaaataactttgttttaatgttttgcgtgatagaactttgtggatatgtgtatatttgcaataagcggatgtgttgcatacagcttacgcgacttgtaatttatctaccaacctgttgtatatattgtacggaattgatgatgcatttcattttctaggac

SEQ ID NO: 7316 - DNA, 1474 bp, Oryza sativa
  ref <308>: DATABASE ACCESSION NUMBER: AK064444
  ref <309>: DATABASE ENTRY DATE: 2001-12-06
cggtgatgcatttattaacacgattgcagatactgcatgtgttgcagttgatgtatgagtatactttcctgaagaagaggtagctgatttgtgtagttcacacaacataagcagcagttgtctaatcccttggataaaaccatatcaactacatgaagatctggtcagtttttgtccttgtatatatgttttcccctctttcatctataaatatatttatgttttttaaaatttagctggagtaagatgatcaattgctcccagttcccatgcattcaacacttccataatcagcaccttctttcatatatagattatttctattaaatctattccattccattcagtactaggcatatgcattacattaggcccacacaggagaaacatgtcatatattaagtcatagagttctgccttcagatttggcaagaaaaagatatttagagtggcttcaggtaatcttatgcaagcgggctataatattgttattaatttcacttggaaagggtcctctatctgtccattgaaattcacagtgcatgtgttcagttcagtttttatctcttttctggaaagaataccacatatctctacttcagagagtgcaggctttggcagttatctttaagatgggacctgccatagccatagccttgatctcctctcttcaaatggatggtggatgaggtctgtttaatttgcttgtcttagattgtggttttacttatgttccttttgttatacagttctggtgaaattttttatctctagctgcatcatacatttcgatctttccaaatctatagattgtgattttatcaaaaggtgcttgtgctccagtgaaaccactagccattttgctggtacagtgatattagggccatacatgaattagggttttgttttttttgataaactttggtgatgaggttcagatatcttcatgttactgtattgaagctgcaatcatttctaaattttcggatctcaattctttttctgacgatagcagtttggactgtatacatgtcattttgctggtttcttttgctttaagggaatcagggcaggacagaaggaacactgtgaccatgtcccccatgtacgcatcaagctcccaagtgataatctgaatgcctgctcagatcctaggcgccggcggaatcaaccttgacccatcaatgatggtcatcccccattgacgatcacatggtccatagagaccatggtgtctgatttttgacggtttaagctttgtctacactttttctttctcagcatttgcttctgatggtttatactttagagttgggtattggatgttcattctctagatgaattggtcatgtacttgaaattttgcacatttggtactgaatctgcactcgaagtgggtttcctaatttggttaggtacattgtataagctagattcgcattttgtacaattgattaaagaatatggtttgtct

SEQ ID NO: 7317 - DNA, 1640 bp, Oryza sativa
  ref <308>: DATABASE ACCESSION NUMBER: AK104986
  ref <309>: DATABASE ENTRY DATE: 2002-08-28
aaatcaacgtcgctcccctcctcctctcgcggcgcggctcctttccaagattctccgatccccaaacccccaatcgccagagcaaagaagggggaacatcgccaggaaaaagatcggtggcgagagaaggcggaaagcgaaggaaagcgaggggagcaaaaggagagagagagagagtcttttcaattttcttttgtttttcttttctccctgcaagaggcagctcggcgttgctgcgaattccatccatgtcgctcgccgtcctcaggatgaggttttgatgcccgaatccggccttttctctgtctatttcagcacctcatcgattttttttggctcttgtgatgccctctgtcgtagagctccccaatcagggcttcctcacttgtgccatgtttgttgctcactcctttcttgattattagtcggtagctcaccagtttttgcaggggttttggcagatcatgtagtctgcctgctcaatccctggtcagttaatctagaaacctcattgaataaacaagttcagaggttcttgattccttttgttgcaattgcaattgcaactttgttgtgcaaattgtccattgacccatacaaaggagattgttcttggcgcattctgcggcaatggacgatgtcccaagtcaattgctcttctcccatccggaggtgcctgatagcttcgatgatttcttgaacaacatcacaacctgcacccacacccacacctgcaatcctcctggtccgtcggcaaccatgcacacccacacatgcttgcacacgcacacccaggtcttcgcctccggcagtggcgaagatgacatcaaggaggacctgacgaagacccggaggccgctggggaacagggaagccgtgcgcaagtatcgggagaagaagaaggcgcatgcggctttcttggaggaggaggtcaagaagctccgcgccgccaatcagcagctgctgaagcgattgcagggccatgctgcgctcgaggctgaggtgatcaggttaaggagcatcctactcgatgtccggggcaagattgatatggagatcggcacattcccttaccagaagccgtgcagtgttggctctgtggcatgcactgatccaggtatgtgcttcaatggcaattctgagattggaggggtctgggaggagtgctctagaccagtgggtgcagatcgcatgatcgacaaagatggtagcatgtcacaggaaattgatatcccaggaccggtgcattccatttccatggatgttgtcggaagcttggtgacttctgcttctctatctgagtgaatgcttttaaaggatgtttcagttgtttggcagattttcaatccatgccatgccaggttcttcttacttgaggggtaaacaatttttgtcagttatactctcatggaataaaagggtaacaacgagtaggaactgatctggtgccttttatgttctaatgatactccttgtgtaagtttttcttttttagttaatgactcctcgtgtaagtgttcactgtgtatagactacggagtactcgtatatatatatatatagcactgcaagaatatgtgcttaatcatgtttttgaaaattgtaatgccagtatgtaaatgaagtatacttcagttctg

SEQ ID NO: 7318 - DNA, 1729 bp, Oryza sativa
  ref <308>: DATABASE ACCESSION NUMBER: AK064445
  ref <309>: DATABASE ENTRY DATE: 2001-12-06
tgctcaaattgtcgaggtggtctagactctagagaggttgctactgccattgccttgcctaaagagattggtttgggggtggggtgggacggggggcatgggaggcagatcgaaatggggtggagtttgctgttgacactgctgctgccaacctaattgtcatcactgaatttttcgtaccttcttaccatcacttctttttagctgctccatcagcagcctggagagcgagggattgccttttcctctcattgctgctgcatcaattattttcttccataattgctactgcgggctgattattttctaacttctgctgcatgcttattaatttcctcttaattgctgttgcatactggttatttcacgcaaaatctaattgctgctgtttgttagcttaatggggttgtttagttgtctgtgtaattgcctaggcgtccaggttctgttttcatgcttatcaggctggtcacttctatccattggtggaaattttaattgtgatgtttttcctgctattgatgcaaatttttgattgctctgaaacgataaggtaaaatgactataccactgcccatgcttagttaatgtcgacactgaaattattaaaaaaaaacttagttaaatacctctatttttgatcttttttatatttgcttccacgtttcagtatgttgtcgaataattttgtatttactttgtactgtttgttgcagaaattttgtgagtttaactgggagatggatgattatgaggactttgctgatgagaaagttaaagaggaggggctaccggaggatgagagagaaaaaatgaaggaattcctaaaggagaaggttagagagagaaaaagagagctgaaacaggctaaggaagctagaaagaaagctattgatgatatggatcctaagatcaaagaggcatttgaaaatatccaattttacaaattttatcctgtaaaaactctagatactcctgatgtaagcaacgtaaaggcaaggtacatcaatagatattacaggaatgcacaccatctgatgtaattgcatccaatcgtgcattttcactgagcattgccaaagaactgagctgtcaaacatggcaccgaaattttggaagccgtggttgattttgcaaggggttatgtgcgggctcaacggtgttggatctggtgatggtggcgctaataaaaaatcatattttgtcgccagtggtcatggtgctgatgctgactgtcatggagcatggatagtggctagcctagtggccccactagtcagctgctacgtgctatatttgccaggcaagttggtttagtgaaaagaagcagcgccatccatggtactcgtccagtccgcgggatctcgtgtcgcgaattcacgagcagccacggtcgaaaaggagagatgcaggattgcaacgccgtgcgccgtgcgtgttgtgacacggcatcttaatttcgcaccaaacgaaggcgcaaccttagctggagaaacttgcaggctacctgaagcttgaagagttcagatcaattggtcaactgaagattagtttacacctgtcaccaatttgtgcttctctttgatttgtaagaagcatagtaaattttgatgatttcagttctatagaaaaaatcctataaaaaccttcgaaactaagtattaaaattgaattctataaatccttcataacatttttatgggatgaacaatcctataaggattgtggg

SEQ ID NO: 7319 - DNA, 1923 bp, Oryza sativa
  ref <308>: DATABASE ACCESSION NUMBER: AK064446
  ref <309>: DATABASE ENTRY DATE: 2001-12-06
ggtaaaatttccagagattatgtgcatcatgcaaattagttttgttctgtgcagtaagcttatggttgttctgattaaaggattcaattcaaccctgcggcaaggaaatgttactcatcatgaatatatacagctgggtaaaggacgtgatgttggaatgaatcaaatatccaactttgaggccaaggtggcaaacggaaatggtgaacaaacactctgtcgagatatttatcgactagggcacagatttgatttctacaggatgttgtctctatacttcactacagttggtttctacttcaatagtatggtggctgttcttacagtgtatgtatttttatacgggaggttatatcttgttttgagtggcctagagaagtcaattctccaggatccacaaattaagaacatcaagccctttgaaaatgcacttgcaactcaatctattttccaacttggaatgttgctcgtcctccctatgatgatagaggttggcttggagaaaggatttggcagagccttgggagagtttgtaataatgcaacttcaattagcttctgttttcttcactttccatcttggaacgaagactcactactatggaagaacaatacttcatggtggtgcaaaatatagaggtacaggccgggggtttgttgtgcgccatgcaaagtttgctgagaattaccggatgtattcccggagccactttgtgaaagcactggagctactcattcttttggttgtctatctagcttatggcatttcgtacaggagctcaagtttgtatctatatgtcacaatttcaatatggttccttgttttctgttggctgtttgcaccttttgtcttcaatccatcatgctttgagtggcacaagactgttgatgactggactgactggtggcattggatgagcaatagaggaggtattggcctggcaccagagcaaagttgggaggcttggtggataagtgaacatgaccacctgaggaatggtacaatacgtagcctgctgttggagttcgtcctctcccttcgcttcttgatataccaatatggtattgtttatcatttacacatagtgcatgggaacagaagcttcatggtgtatgcactatcatggctggttatagctatagttcttgtatcacttaaggtcgtctcaatggggagagagaagtttattaccaattttcaacttgtattccgtatcctcaagggcattgtctttattgtcctcatcagcttggtggtcatattatttgttgttttcaatctgactgtctctgatgttggtgccagtattttggcattcatccctactggctggtttattcttcagattgcacagctctgtggaccattgttccggagattggtgacggagccgctctgcgccctgttctgttcatgttgcaccgggggcaccgcatgcaaggggcgttgctgcgccaggtttaggctgaggagccgggatgtgctccgcaagatcgggccatgggactccatccaggagatggcgaggatgtacgagtacaccatggggatcctcatcttcttccccatcgccgtcctgtcgtggttccccttcgtctccgagtttcagactcggctgctcttcagccaggccttcagccgggggctgcagatctccaggatcctcaccggccagaatggtagcggctcaaagagggactgatcatgatgaatatatgggttgtgcttctctgcaggtttgactagtacaatccgatgtaacttttcctggcaccgatatggcggttctgggatttatttgtttctggttccatcgtgttcatatgagggcatgtgtgtagtagcccctattgttttattgcttggttgcagtgtttggggaacaaaaaaacaatgagaatgacgaccaggattttctataac

SEQ ID NO: 7320 - DNA, 2488 bp, Oryza sativa
  ref <308>: DATABASE ACCESSION NUMBER: AK064447
  ref <309>: DATABASE ENTRY DATE: 2001-12-06
tgtttggagggaacatatccagtgaccatgcggataggactaatgatgtttcttctggtgctaataccaatccatctgatacattcaatgttactgatggcacaggtctgtgtcctgagaagataagtgatgttccctttcagcggaagggaagtggaggtagtagtcgtcaagccgaagcgtttgtctctgggagtacttctaatgagggcagtgttttttcctctgctgccaacagtgatgcttttgttccacctagtagtgttaataatttgcctccagagttgccatcatgtttgaatataggaggtggagttacacagtgcaaacaaagtgataattctggttatccatcagaggcatttgtatttggaagtgatgcttccttgagctcacactcttcaaaaaaggtaatggacgatcgtggcaattttgtcactggtgcaaattcaaaggcatttacctcagttcatggtaacatggagagcacacttccagccaggatgacaaaactgaacttaggccatggagccccatccaacaacaataaagatgaaactgctcaccagccaccagaagtatctggttttggaactaatgcagccacaaccttttcttctgcccaggcagcaagcatgccattcacaagcattcaaactaatgtatcctttgaactaaagggtaatggagggaacttggctaatgaggatattggaaacattacacattctagatcagataatgatcaaggttatgggcctagtagttttgttttcagtagtggtagcaatgccgtccctccttccgaaggatatgcagaacatgcattacaagaggacatcaagaaattaaacatcaatagggaaggggcttcagtcggatctactaaagtgaatggatcttcccaatttgtgttcagaagtaaagcagaagccattccagtatttggtgctattccccagcccaatgttccggagtcacgcgcattttcacattcaaatcattcatctagcttctctacttctggaaatgatatgccatctttcagtttcaaaactacaaatacagcaagtgatactattcctggtgaatcttgtgcagtcagacaagagccagcctggtgttcaagagagagcttatttggtattgactatataaaatcagcatatagagataaaaaggaagcgcataaaaacgcaaggaaaaataaaaggcccaccaagttaaagcagcatgctcaaccccatcactttgcttctcaagaaacatgcaccactgggccagacatggatttagcaggtgactactcaccaatggattgttctccttattcagctacagttgaacaggtagcaaaagaagcatcagtgatgtctgatcagtccgttcatatacatgattatggtgtctcaaaccagagctccagttgtgctgaagatctagtttctgcaactgagcacttggttattgatgcagatcttccaacatgcgaagatgaaggtagaattcccaatgtagacacatctgcgaacagctttgctagcagcttttctagttttgatgaagaagtaactatacctatcgcaccacaaccttcttcctccaatatgcatgacactgctaatggtaaacctaaatcagccccagctgaagtttgggatgatgcttataggctcaacaaccaagggcaagcctatgaagagaatggctacagaacagcgcacgagattggtgaacatgccactttccaagaaagctcagaagattttagtgggctgaactttaccttcggtgcttctacatctccccaaagctccgtgtcaacacaaagacgtaacactagaaggaaggtaagaactaagtctggtcaactgcctaagccttcagttactcaggcttatgtacagccaaaatcatcacaagacaaaaagaccatgcagttttcccctgaaaaaaataaagcaggggattcagcagatgagcagtcaacaagaggtgcatcaacttctgcagccttggagacttgtgaaacctggcgtacaagtggaaatcaagcctacacaaatggtcactttgctacagcggaggagtattatacccgtggaataaattctgtttccggtcatgattcttctggatactgttcccgtgcactgatgctttgctacagcaaccgtgcagctaccaggatgtctctcgggagaatgagagaagctcttcaggattgtttgattgctacatcaattgatcctacctttctcaaggctaaagttagagctgcaaattgtcaacttgcactcggggatcttgaagatgcattaaggagttacactgcctgtttaacgtccagtaagacttctggttctgacagaaaaatgctcgctgaggcttctgatggtcttgaaagagttcaggtgtgctatatttctgctcagggatcactttaagttctttattttgtgttaattactatccatgtgttttgttc

SEQ ID NO: 7321 - DNA, 1884 bp, Oryza sativa
  ref <308>: DATABASE ACCESSION NUMBER: AK064448
  ref <309>: DATABASE ENTRY DATE: 2001-12-06
taaaaacagtttgagtaggccttttgagcaacactcataattctattagtagcaactttagtaaaaatcttaaaactaacattaagtacaacattaagtacaggcctatattgttgaattttcattgcctctacgcacttgggcaaaagaataatggtaccatagttcaaagaagataaaggcaaacacccactatgaaaatctttaaaaagttctaacaagtcaactttaataacattcttaaaaaaacatgataaaacttagcaggaaatccatcagaacccggtgctttgttgtgttctatttagaaaatggcctccttaattactttttcaataaactcctaagttaaagcttcattctccaaaagagaaatttggggaatatcagcaatattattctccttagctagtagtaaaaggaaataagatcagatactgcttgtgcttggaatacacggagtagtacgatcgaaaacattgtaggaagaaaccagttacattggagatcaagaaatgattgaacactagcactgttcgaaggctaaaattttactgctccgatgataacacatcatcatcatcttcatcgaaaagctccaggcatccagggtagcttccaagtttctccagcacctcggcgagcagcgagggacatgaagccttgagctccctgaacccgtcggtcgccaccacagttgccagcatgccaggcgacgcgacgtactccatgcacaccgccttcagctgcgggccatctctctgacgtcttccctccagcagctgctggcggcagcttcgccgtcctcgacgggcggcaacctgtccgtgtagatgaaccggagcacggcctcgaagaccgtcggtttcatgtcaaggatgcgcacgtacctgtctccgccgccggtgtccgccattgggccgaagaactgggcgcggaacaccggcgaccgcgccgagagcaccaccctgtgcgcgtcgtagtcgctgcgctcgacctgaaaggtcacgtcgcagccttccttgctctccagaagctgctcgagatgacagcagatggctggcggcggcaccgtgatgaagcggctcatggttgctccggtcttcaactccttgacaacctccacgtcgcagtgcatcgtcaggcagtcgttgatcaggtactccgactccacggtttctatctccataaatttctggtacccccatgttttgctgctaagtgtgaagtcgttaaactggccccacgagctcgcggtagcgccattgacgcggaatctgaaccttgcggtaactttctctaccacagtgcttcccagctcgaggaacacggacacgtgtctttcttcttcctttgtgctgccagcagggtagaatcggatcgcccagctgtatccaccgacctcgaatgagccggacctgacgaagtgtccggtgccgttcctcttctgcaggctgtagccggcgacggtgaactcatgcgagcccttgacaagctcagtggagtgagtggacatggtggtggtgtgcggtgggctggtggtggaagacgcagttgaggcggcggtggccatcggaagagaaaggagatgctgaatgcttcccgagctagagaactctcttcgtaactagggatgttcacgcatacggcatgtatacacacacttggctaagctctcggaagatgaaccatctcaagagtagtggagtaattgtgaagcattcatgcgtggagtgggatcgaggggccggggtggctggcttacagtatcccatcgttttctggcataatttatcgtagatcgatgggttggaatgttgaataaatagtaccgcatgtattggagtatgtacttagaaatgatcatgtatattagtaatatcc

SEQ ID NO: 7322 - DNA, 1061 bp, Oryza sativa
  ref <308>: DATABASE ACCESSION NUMBER: AK064449
  ref <309>: DATABASE ENTRY DATE: 2001-12-06
cgatgatggcatgaaatctttgagacctgacattcttgtgatgacaaacataagcatatttcctgaggggctccaattcgtaaaagccaccatagtgtagtgctcatcctccatccacccaagtccatcgttccgcccacagctccacaccatcaaccatggtccaaccccccgccgccgttgtccaagcccagccggtttcggaggtcgaggcgggagatcccgtcctggtccgggatttcttcaggcttctttctctggggtcggaggcatccgttccgcgagacggtgtcgtctgctgttatatggacgtatccgctctgttcctgtactacaggaacatgagcggcgttctggtgctggtgccgcatgtccgtccgatgtgcgacgccccgctgatggtgcagcagctccagaagatggagatgcggtcggattgggaaatcccaaatctggccgccctcaaggacgtcgcgaccgcctcagatgctcttgggcgcatgggcaagatgatgctgcaggcgcgccgcgtcctcaagactctgaagaattacccggatggcgaggagggattggagatactcttctacaacactcttctgggggaggcgctcaccagggcgcgcgaggccataccagccgtgataacctccgctgacctgctcgtgttcgacaacggggaggtgcggctgatggcgctctccctcgctcaccaagcgatgagcaccgtcgaggcttgcctcggtgctgtccacgagggaaagggcttgactgggcgtgagatgcaccgcctcgttaagaaggtccttcgcccgctgagctacctcaggaaggtgaaggtcatcgacctcccaaggttcaacccctttgacgtctgagttctgtcttggatttatctttatcctgcaatccagctagttttttttcttttgaggggaactaagaagtggaaacaagaaatgtttgagctagtatgtttgcctttcatgtctcgttctattttagttgtgatcctgagttattgttatcaagagtgcaagatcttctgatatttatcgacc

SEQ ID NO: 7323 - DNA, 1768 bp, Oryza sativa
  ref <308>: DATABASE ACCESSION NUMBER: AK064450
  ref <309>: DATABASE ENTRY DATE: 2001-12-06
tagcactagtgggactgggaacagctatggtgaaaaagacaaacattcggtaatgtatcttgcaggctttctaacacaaataaaataataagtgaagcctacgcatgcataaggattgaggagtcatattacaggtatgagtggaatttgaccatattcccacaaggacttataataggtaaactaggtatggagtatgttttttttaacggtgtaagttttccgtttttaactcctggtactgtgcaaatccagtaagttgcctacatccacaagttttttttgtcaagatattgttttaagtgtggtgtcatagtttgatggtgttgcacctaagcatgatgcactgctgatgcactagtttggttcatttgttagaccgctctctatatgcgttcaatgaaagcaggatcaccgactctatgccaagttctcaaagtgttttcttatatagaaatcaccagaaagccccgaccgacgttctttatttatagaagtaatagtagccaaaagtgggatgataacctttttcgacaccaatcgggctctaccttccttctttccctcctcggcctccgcctctgccggatcgagatagatgcccatcatgccctttcctttccttcaccagtaaagtaagtacttcccatcctcgtccctgagcctggtgtggatgattgctcttcaaaaagagagtgaaaaaagcatcaatatgacacatcagccaatacatgaaagcacaaagccccacgatcatttagtgaaaaaaatatgtatcagcctcccaaaagaagttgattttgtcgagttaagacaaagaaaccgaaagatttacagaggaagaaaaagcatatcgacacgggctcctacctattctggtgtttacttcatcatagcttgaaaagatgagtgctgaaaacaagtcgtcttccgtacacctggtatacagtgagtacagactgagacgtcatacgcagagactgatatggccggtaatagacaacaatgagaataagacgtaagagagagaacggaaagaatgagccgcccccaccgttcacattattcaccgctcgttacatgtcttgaacttcctcattcgaagcctgaacctataggttcgttccatgtcttccactttatacaccactccaggccgccaaggttttacttttcacattatttattatagggaggccttgtgggatctttcaattggtgtactgctactaccttaattcaacaaagaagcccattgcaaccaaaaatacatcggtgcacgagcttttttcatttcgaatagagcttcgtgagatgagagaaatcgaagttgaacaagcgtatcacgtagccacagatgatcttgtctctgccacatatcctttcttggaacaaggcgcctcttctaactcagtcggctagcgtgcctgggagggaggcaaagtcgtacccgaagaaagtctattgaagaaacttgggaagtttgccgttggacactaacgggaaacgcaaaacaactctagatacttgaatgtgaagaccaaaaatgccgaacatgcattcttttctcggttgcggtgtacttggagtgaaaagagggaagaagccggaagaagaagcccccgaagagatagatggaaagctgtgcatgagatgtgctttctaaagattgttgggtatgtcttgatgagggggttaaccaaggatgtcaatcacaggtttttggggtggaaaaagtgaggaagtgtgtggggcggcggcacctcct

SEQ ID NO: 7324 - DNA, 1842 bp, Oryza sativa
  ref <308>: DATABASE ACCESSION NUMBER: AK064451
  ref <309>: DATABASE ENTRY DATE: 2001-12-06
ctgaggatagtgattgatggtatagagttttgatagaaaacaggtatcaaaaatataccaaaagaaagaagagaaagtcgagccttgattccagagagagagagccatctctctggactgcactcttatagtcgacagctctgtgtggcttgtcaaccaccggaccgtagctcctcacaccgagaaacccagtcttcccccagaagactgtcttcctcgactatacattctcctaccccaaacactctaacccagacagggattagttttcaataacacctagttcggggcatgatgactaaccttcctaacaaaagaaaagagagataggaagggaagacccacctatccatatagaaagaaagcaccctatccctcgttctgcccagccagggcatagatcactctctgtttactcctacttctgtgaagaacagaggcatccaaaaagagacgagaagaagcccgcgcctttgcctgcttccttagctacgtcagaaggtagggcctgattgacagacggctccgaagtagcaggggcctgtttgacagaaggaagggcctgaatgaagagcggaccagactcttctttgtttcagctgctcccacgcacgcagaccggaagatcccagttgtcctggactagacaagtacgtagagatcttcgtggaaccggggagggagtctcaatcgatcttttctaggattccaactcacgccacgcacgaagatttttctattgatagagttaagggctcggctcccccgactctaaaaggttaggttactaccagcttgcctctacggaagaggtgtactttgtattgtctgggggtcatatagatcggaacccggagcgagttgaacgaaaaccttacccacagctacaactactggcgcttcaaagggcttagattctaaggtaggggtggaagccgtgaaagcctttggtactttagtcaggcgagcagcccttaaacaaaatcaaaggcgcgaccatccccccttcccctattttttgcatttcattctctatttggcccgcctcatgaaaaatgataggcctattgattcgaagtaaatacgaaagggtcggtcaatagcatagctatttttttttttctcctttcgaaggaaaggccttcgcattcttaatctggtagggccggacggctttgtttgccctagcttggcgaatccgcgcccctgaccgttctcgcgaagtctttgcaacggctgggaaaccagtctacgaagcgaagcctattgccacgccgaccatcaaatacgagattgggccccttctcaaagatggaatggcccagcccaataaaggaaggttaacgtacgcgatgccttccatttgtacgaatgcgaacatacccgaccggacgtagagccaaaattcactggcagaccgagtcgggcgcaggtgccagatccttaaagtaaagtctctatcagcctagtgtaccaaccacgtggtacgacgggcactcaaagacctggcgaatgagggcccaccccacccaagagcgcttatgtcatatgggaactcttggctggaaacaatccttatgattttgatatccggttagaataataagaaagaatctaagtccaggttggttggtgagcctagtgataggagactatctagcttggttcggagagcacttgttgggtttaagattagttttttgctaaatgttacggcctaaatgctgaactattgactctacttgttcggatgggtgtttaccccaaagtgttcttggattgcatgcatacatccgtaagtaacttagtgcaacatggcaaatttcattgagaggaattagc

SEQ ID NO: 7325 - DNA, 1735 bp, Oryza sativa
  ref <308>: DATABASE ACCESSION NUMBER: AK064452
  ref <309>: DATABASE ENTRY DATE: 2001-12-06
acaatatatgaaagaaagcttgaaaaattgaaataacaaaaataataaatatagagaaaacaaaacaggatacagaaatagtaacattcacaaaacccacagagcacatttcatgatatatattcactagtttcaaaaagtttgttcatttgtcatgagatgcataaataacataacacctgtgacaagtgaaactaagctatttcttgaaggatatactgccaactctaaaagataattcagtacttagcattaatacttataaacttctgtcaaaatttggacgatattaccaaaggtacaaaaacaggcatttaagtagacaattcataaacctgtatgaatagtctactcaaacattgttgatagacaattgatccactttggatattacataaagttaaccaaatgaaagaaaatgtgcagaaaagagaagaagctaatgaacaaaagacatgaatagtttatacagtcagaaggcatacaatcagttcctttgttctagggtgcttcttagtagtgaaaagaacgcctaaacaataaagttattactcagtgtacgagaaaaacttcaaaccacagaacagtcatttaaccaaactattgtaccatgagtaataactttattactcatacaggcaaatagcaaaacataccattgtgattacacaggatgattgatggtctaatccaataagggcatctaaatgcttattgtctttgacattgtaccaaagcaatacacgcccattgttttactatcaccctaaggaataatacatgatcaatcaatcaccaagttgtatggaaacacaaaactgccatccacattttgatgagaagatgaatgttgaatatgtatagactgcagaggaagaggtaacaactgctaacacagatatatgcagacagaatacatataacatgtataaaggctttccaagacaatgttctgagaagatctaataagtcatcagtgcagcatgctaaggagaaataaatataaattgaacaatcttcatgatgaatgctggaaaatttgttatcaaccacacaacgcaacagatgaatgcgctaatcatgaatattctgcaataatcagctagagactgaactatgaagaaataaaagttcaatcaagcttaagataacaaccatataaaatgcacctgatatcatcttttactctgtgagaccatgtggtgagccttgacttgcactgccttaacagcattcttagaggaatccacgatgcctttagtaaaagagccaaaaacgccagattgtgctgttgttggggttgtgctgccttcagcactctcatcttgctaaggagcttttggagacaagcgcaacccaaggccactcgtgaggcgagaaaatgtattcttccccgttggtgattcttgacctgaagaaggctgtggtattttcaggttttttgcccaggaggataagccagatgtagaaaatatggaggattgtgcctcgcgccctgcagcatcttgtattggaacagcatttgaagtagcctgagaaacagggtcaggagttctgacaggaggtgcggttgaatcctggctgtccaccggagtagcaggtggtggatgtgaatcagagggctttacttgctgttctaccatgatcgggtaacagatttaataaacctctttgaagcactagtaaaatttgcaaaatcattatatacagatataaaacatgcagtttgaccagc

SEQ ID NO: 7326 - DNA, 2218 bp, Oryza sativa
  ref <308>: DATABASE ACCESSION NUMBER: AK064453
  ref <309>: DATABASE ENTRY DATE: 2001-12-06
cagattttgcacctattaactctgagatgaaactggtatgatggcttagatttggagatgtttttaattctggacttcatataccaatcacttagattttactaaatttggtttatattgttactaaaatatgttgatacagtgagtcctgaagactaagctgaagatcacaaatcatctactgccataggagtaaaataaactatattgctccatattgctctatatttgattatatcaaggtaggtttccaaaaggaacacaatgggtactgtttctttagggaataaaaaagcagtgctttctgcagttcctatagaaatagctcaatatatcttattgcctctgtcaggcatttcaattcagctaagatataatatgtagcatccacaacaggttgaaacgagctgattactgacggatgatcagtgtcaagtgagctatacaaaatataattttcaattccaacaaattgtgaaactttaccatttaaatttgcagacaaacaagttacatatgttatacatatacagctatggcaatgttatatgtttggattaattattttttcccatgtaaatctaataatggcctggtatatatggatggttgacagcaggggagagcagcaaagctgctgcacctgaccactgcacatctttggctcttcctttctgaccactctaggagatggattacaagcggggcaagggctccagatcaatatcatccagaagaaagtagtactaattttaaaaaaaacttgttattttatatattgcactacttataatttataatttacagatgcctaaatatataggatgttgatttattaatgtttttatcaccgaactactcccgagctaaatgccagagaggatggatttctcagcaattgtctccacaattctgaagcagcgaccatacttataaaatagttcatgtattgataaattggatatatgtcaaaatgttcactgagttaaatgctaggagcaagttgaatatattaaagttttcaagggaatcacatggaactatctcttgacaaagcttaatgtcaagttcatgtcataatgcaagcacttattatttgagttccttgggatgatcatgccaacgggtagactaagctggcagttgtggttggtcacaataggttttactttttatttttagtctaaattcagtcttctaatgatttatcatttgcccatcattttctgatattgcgtccacaaaaactgatattcaggtagctttctatgccaaagcaatttctaaaattgatgtgctttttactatgtttttttagttggatatattttagaagttggattttactgatatttcataaatatttgtaggtttgatttgaatttaattttaatttgactactgcaacaggttaaactgaataaattggataaaaggagtgccttagtcatccggaactgtaagtaaaccaagttttcaaaattttcagctagatgcgttgtgtattgttggcgattctgaatgtctcttcgatttccactgcccattcaagatataatataatggatggattgaatcgctttgcttatactgtgtccaattgaaatgtggtttaatccttggccttaatatgaaagcttggcttggtactattgctatactatgaaatactactttataaaataagttgcttttagtattcgtcctcttatcgggctgcagttttcttttaaattgaagctggaggacaactctgttgatgacaatgccatattttctttttttgtaattttctctattatttggttttcatacattcacacatatttttcttgtgatccattccttccagaaaaacgagggatataataatatagcaccttccaaacagtataaataatctcatccatctttatttttcttcatattagctgaaatagggtgtactcaattcttagtgtaaaaccatgaatgtttaacgtgcacacttactagtcaccagaaatgaaacagagtctcttacagaagtttagaaagaaaagagaagagaagagcagcttacagactaaaagacagacaagagatatggaacaggaccagtttttaaaggctacaggagagcttcaaacatcaaagagacaaaatggccttccattaatccgaagcaaaagagcactaaacaaactaatcagtaatcagcagatcatgcagcaccacc

SEQ ID NO: 7327 - DNA, 1331 bp, Oryza sativa
  ref <308>: DATABASE ACCESSION NUMBER: AK064454
  ref <309>: DATABASE ENTRY DATE: 2001-12-06
aaaccacccaactcctcaacatgcctcaaattggggcaaccacctgcacgcagctctcttacttggggaaggttggagatcctctccaggccttcacatctttcaactaaaaggcaaccagagaggaacgggaggtcttccaccgtcttcaagtatcttgtgtctcttataaagagtttcttcaagttggtggcctgctgtccaagctgtggagggagagccctcagcttggggcactccacaagttgcaactgcttcaaacaaggcagcagccacgacgaccttggagttggagacggggcttcctcccccttttgcttcgaagcagcaattccatcctctcccccttccttggctgctgcagctgcttcctcctcctgcacttcttcttcttcaacaaaggaccactcctcccagttgggcatctccttgaagatcaacatttcgagcttggggaaagcaaccgcctctgtggatctgagattaccctcccagcagccaacaaattcgggtccaatcttggtgattgcacttgctccattaattcttaggtatttcaagtttggtagctgtccgattgggggaagatgcacacaagatttgcaatctacgaggatcacagatttcactgaagacaaatgggtacaaccaagccaggtggggaatctacaaccaaagaaattcccaacaaaaagatcttctaagttgtgtggaggtgttagcttctcgaagatcttttcaatgtttctagcattttcctctgaatatgcttcatctgtctgttcagtgcagtctagattcagaactttgagatgctttttctctgttagtagaaatgggtctgtactgctgcgtggagtacctctctccaattttatcataccaagctgcctcaactgtggaagataagccaactcttccaaattccatccatcttgtatcttggtattgtcatttccaccaccgataggaaatccttctaaatcattgagaaatttcagtcttcctatcccttttggaacctggtttattggagtaccagcaagaccaagtcgcctcaaattgcacagctgagtggttgccaaaggaaggcggtgcagagatttacacctctgcaagttcaatatttgaaggttttgcggggaaccaatggactccggtagatgagaaatgtctgtcccatcaagatcaagcaagcgcagatgaatcatgttttcaatgtaatttgggattctttgtacatgtgagttagtcaaatccaaaacacgaagatatgtaagtttctcgaaaagtgaactatcaacttgcagtgccttctgataggaggttct

SEQ ID NO: 7328 - DNA, 1944 bp, Oryza sativa
  ref <308>: DATABASE ACCESSION NUMBER: AK064455
  ref <309>: DATABASE ENTRY DATE: 2001-12-06
ataatgcttctccgtctgaactacttcgtgattgtttgattatatggagaagattgaagaaagataattgtgctgaagctgaaaatgtaaaaaaaaccaatacaaatcggacagtgcaaacaagcaaggtatctgtgagcgaaagattgagaaatggaagacctagctcaggatttgatgatgaaaacagcagcacatcagggagtgcttctgttagctcagaaagcgatgatgaaagtaatagtccatctgaggactccaaacaatgtagaggtgtaatgtcatccagtgaagcacaaaagtgtagcaaaggaagaactgagagagagtcagaggaacccttcaaatcccttagtggcgacaatcgcatgaaaagcccacaaaatacaatagctgagaaaggactaatgttttatcaggatgttccaccagaaacaaatcctagtgaagttatgcagcagaaagaacaagatgacctttcatgttgttggaatggctgttctgatactagcacgaaaccagttgctgattctcatccggaaagtagtgtgcatcagaagttttctcagcagggagcaattgaaggtcattccaacgcaaggagcagacatgaattggttgttggctgtgacattgaaaatacactggaagctgatggtgccaaatcaggtgagcaatcaactgttccggaattgctggacaaaaaagctgctgttctttgctcaatggatgatgatagtgtgaaggtagtaaatgtgtcagcgtgttcaaatcaggacagtgacactactccgtgcggtgtgacaaaattggataaaggaactgcaaacaagttcctagagaagcctgtcaatctttccacaggaagtaactttagagtcatccaatggggcgccgtggattgcaacattgtgagaatcaaacaagagaattcacaacatgcagactctgaacaggatacacatcataaagagagtggggaaccatcacaagctctcaaagtggcatcaaaccaacaaataccccatcagtttgattctgacagagataatccttgtactactagacaagctgattgggattcatgttcctcgataccagacttaaattgcttgcctaatatgaatacagatgatgagctagagccagttgagaatgtgacttttcaggtaaatgaggatggtacaaatccccagaataatatcaagagtctttcagcttcctcttgtaagcccactctgcagaaagaacagtctaagcaacctgagccaattgaacttactggaggaatttgcgaaaggaaagatggaaataggttccagtcacctaattcacatagtggaccatctcagcaaagcatagttgaagaaagtagcatgtccattgatgtattcaagtgtaacctctgtgaattcataaaaaatatcataaagccattgtgggaagatgggctgttatcccgggaagtccacaaaattatagtgaggaaggctgtggaaaaagtgaccaccgtgttgggctcaaaggtccctctgacagagatagatgcctgtagatttttgttagaagaatctcagaatctagagaaactcgttcagggttacttagatttatacgtgggaagggaagttcttaaaaagaagcacgaccgataattctggatcagtcctgcaaatcacagaagctaacaagtacagtaggaagcaacttttttttttcagtttagatcggtgaaaggaaagatcaagtgacaaatcttctatcccttctcatatggggcatttttgaacaccctatcttattccttgcttctagttcccacttccatgcacctgctaaacatatcaatatctaatctatgaagtgcataatgctatgttgtactaattctgtaaatgtgacgcaccagcttttggtgggtgaatgatggcgcactttcttttc

SEQ ID NO: 7329 - DNA, 2990 bp, Oryza sativa
  ref <308>: DATABASE ACCESSION NUMBER: AK064456
  ref <309>: DATABASE ENTRY DATE: 2001-12-06
taagctagatgcacctgctgccccatttcagagacttggaaaacccctaaagcgtcctgtctctcccagttcagatgagcaggaaaagaagagaccaagaaataagaccaaaagaccactgcctggcaagaaatggaggaaagcaaactcaattaaggaatcatcattggatgacaacgatgttggagaggcagctgtgtcagtttcagatgatgatgaagatcaagttacagaaggctctgatgagttaactgatgttacccttgaaggaggtttgagaattcctggcacactttacacgcaactatttgactaccagaaagtgggagtgcagtggctatgggagttgcattgtcaaagggctggtggaataattggagatgaaatgggcctgggaaagactgtgcaggtcttgtcatttcttggttccttgcataacagtgggctctacaagcctagcattgttgtttgtcctgtaacccttttgcaacagtggcgaagggaggccagtagatggtatccaaagttcaaggttgagatcttacatgactctgcaaacagttcatctaaaaagagcaagaggtctagtgattctgacagtgaagcttcctgggatagtgatcaggaagaagcggttacatgttcaaaacctgcaaagaagtgggatgacttgatttcacgtgttgtgagttcaggatcaggtttgcttctgaccacgtatgagcagttaaggatcctaggggagaagttgcttgatatagaatggggatatgctgtattggatgagggtcaccgcattaggaatcctaatgctgagattactcttgtgtgcaagcaattgcagaccgtgcacaggataattatgacaggtgcacctattcaaaacaaactttcggagctttggtctctctttgattttgtgttccctggaaaactaggtgtcctgcctgtgtttgaggctgagttttctgttccaattactgttggtgggtacgctaatgcaacaccattgcaagtgtccacggcgtatcgatgtgctgttgtcctacgtgacctggtcatgccgtacctccttagaagaatgaaagctgatgtcaatgcacagcttcccaagaaaacagagcatgttcttttctgtagtctaactactgagcaacgtgctacttatcgtgcatttcttgctagttcggaggtggaacaaatctttgatggtaacagaaattccctttatgggatagatgttctaaggaagatatgcaatcatcctgatctacttgagagagaacatgctgctcagaatcctgactatgggaatcctgaaagaagtggaaagatgaaagtggttgagcaagttcttaaagtatggaaagaacaaggtcatcgtgttcttcttttcactcagacacaacaaatgcttgacattatggagaacttcttgacagcttgcgaataccaataccgaagaatggatggacttacacctgcaaagcaaagaatggcacttattgatgaattcaataacacagatgaaatttttattttcattctgaccacgaaagttggtggactgggtacgaatttgactggtgcaaaccggattattatatatgatcctgactggaatccttcaactgacatgcaggctagggaacgtgcatggcgaattgggcaaactagagatgtgacagtttatagactgatcacgcgtgggacaatagaggagaaagtctaccatcgtcagatatacaagcatttcctcacaaacaaagtactgaaagaccctcagcagaggcggttttttaaagccagagacatgaaggatttgtttacgctgcaagatgatgacaataatggctcaactgaaacatcaaatattttcagccaattgtctgaggatgtgaatatcggagttccgagtgacaagcaacaagaccagctatatgcagcctctgctacaccgacaacctctgggactgaaccgagctcatccaggcatggacagggtaaagaagaccattgccctgaccaagcagatgaagaatgcaacattttgaagagcctttttgatgctcaaggcattcatagtgcgatcaatcatgatgccataatgaacgctaatgatgaccagaagctgcgcctagaagcagaagctacacaggtggcacaaagggcagctgaagctttacgccaatcacggatgctcagaagtcatgaaagtttttctgttcctacatggactggaagagctggtgctgcgggggcaccatcctctgtccgcaggaagtttgggtcaacactcaatacccagttggttaattcttctcagccatcagaaacttcaaatggcaggggccaaagtcttcaggtgggtgctctaaatggcaaagcactgtcctccgctgagcttctggccaggatacgtggaacccgagagggagcagcttcagatgcactagaacatcaactcaacctgggatcagcttccaatcacacatcgagttcatcagggaatggccgtgcatcaagctcttctactaggagcatgatcgtacagcctgaagtcctaatccgccaattgtgcaccttcatacagcagcatggtggttccgccagctcaacaagtataactgaacacttcaagaaccggatactgtccaaggatatgctgctgtttaagaatctgctgaaggaaatagctacgttgcaaagaggtgcaaatggtgcaacgtgggtgctgaaacctgactaccagtaatattagctatagctgcaaagttttggctaggtgtagcgaacagcataaattaatttcattcagattggagacgcaaaaatcgatgagggaaatgcctctaatgcctttttgatgaagactgaattctttttgtaggcaatatacaacttttgtagggtagatatacaaatctgaaacaaaaacatgtaggtgacaggttgtaaatgcatgaatacagacatttgtcgctggaagc

SEQ ID NO: 7330 - DNA, 2237 bp, Oryza sativa
  ref <308>: DATABASE ACCESSION NUMBER: AK064457
  ref <309>: DATABASE ENTRY DATE: 2001-12-06
aagctaagcagggagtgcgcttttgtcttggtcattgatcatttccacgatgagatcctgaaaatattatcagagcttcattctgatcaccacagcctctttcttttcttgaaaactgcgattgaagtgcacttgtcaggaaaactgaatttcagtgaactcaatgccagaaaaaatagcacagttgaacttcaatactcatcccgtgaacttgaattttatatacagagactttcaaatcttcccaagttgttggaccgcaatcctgttattatgactgatgagattgttgaactctatctggagcttctatgtcagtacgagcgaaggtctgttttgaagtttctggagacttttgacagttacagattggagcggtgtttgcatctttgtttagattatggggttacagatgctgctgcattcttgcaagagagagttggtgatgttgggagtgcactggcacttattctagcaggtcttgatgagaaaatcaacctatttatttcttcagtggaaaatgctttctctgggattgcatcaaaaagtatatctgagatagagcagccagacattgttctaaaaatgagtgaggctcatcctgtgcttgatgcattacgtgctgccatcggattgtgtcaaaggaattcacaaagattgaacccagaggagtcccagtccctttggttccaactgcttgactccttctcagagcccctgaaaaaattgtatggaagcaaggatgtaaatggaaaaggtgtcaggtctaatgggagtgaaacatcgagtagacagccaaaggacaaaggattctcacgaaaaacaaggatttcagcttatcagaggtgcttgaatgcactgcggagagtattttcgcagtttgttggagaaataatcgaggcaatggctggacatatacccttaccagcaatcatgggaaagctattatctgacaacaggagtcaagagtttggtgattttaagctcgttatacatagaatgctgtctatgtatctttatgaaaaaagaatactggaaacagccaagtcagtaattgaggatgattcattctacaccttgagcttactaaagagaggggtttgccatggacttgctccacagacttttgtatgttgcatatgcaactgctctctttcaaaagaaagtgctgtttcagcaatacgagtattcagttgtggacatgcaactcatctccaatgtgagtctgaacaaagtaagtcatccaatagggattccaaagatggatgcccaatttgtctttcaactagtaatacacaagcccaaaacaaatcacctatatcagagaatgggcttgggaaacattttggggctgaaagcgaggtatcacatggtacctatcatactcatgaaacagatcatgtcgacagatctcgtgggcttcagcagatgtcacggtatgaaatactgaatcatcttcagaggccacagagtttgcatatagaaactgtacctccattgaggctttcaccaccagcgatatatcatgaaaagatacagaagagaacaaccacgatgggagaatccagcaagcattcagttagaactgaaaaaccccagagaatatggcaaatgaaggaaccaagatcaaaaagatcagggaaccgagttctgccaaagtcaagcatgttgagttctcagaataatcaagtgcgatagtgtaaatataatatggtatgaatttgacaattcttaaaatgattcgaactgatacaaactgatttggatcgagccatcatgtttcaactttcaactgatcattgatttgccagtgtggttgtgctgctcttcctttgtactcaattctcatcttggtgatgcattaaggctgtttggagtagtgcaattcttctcccacggtacttctgttgaagctggggagatgaataccagatctcaaggcaaaggcgggagcggagaagggcaactagatcaggtgaccctgagaagctttaacttagaacacaaaaaaactaatgcgatagaaaattttttggggggcaattcatcatgaagtatttctgtacagagcgaacacgtgatgacgccatccttacacttagcattacatgactttcttgcgtttcgacttttctttttgtgtaaaatgtgaagtacacaggaactctgcgatgtatagcatatgagacattacatgattttgatcaactgagcaatgatatcaacactggtagtac

SEQ ID NO: 7331 - DNA, 1480 bp, Oryza sativa
  ref <308>: DATABASE ACCESSION NUMBER: AK064458
  ref <309>: DATABASE ENTRY DATE: 2001-12-06
gtgccaaattgagacaacggtggagccaaggaggctgcttcagcgcgtcctgctgctccaggtccaaatgctgctgcgtcgtcccaacaccggggccaccagcaacaaccttcaccgccgacgacgaccccaaccgagatggccggtgcggcatcaccgccctgcagttggtgctgccggactccgtcgacgacgacgagttgctcgtcctcgagtccacgctagacgacggcgcctccttcttggtcgtcgtcgtcctcccgatcgctagcgtcaggtccagctcgctctcttcaagaacactagtgtgagcctgtggcttgtcattgtcgctcccagggaagagccggcgtccatcagtagcttctgtactcggtacagccggtgcagctcctgaacctgaacaaagctgctgttatttgcttgaggcctgaaggttcggtactggataaggaagcaagagtttggaagtttcagtatggagtggtgttcttatcttacctgctgcttgaatgtctcctcctgcctcaacatggccatcttcatgtgttccttctcgtactgcttcaggtaccttgacatcttcttgtggccggagaattagaccttttttggctggctttgaagccaaatcacagctgcaaaatacagtgcgagatcaacagattgctctctctctctctctctctctcgatggatgcatacgctcaatttttttctgccatggcagtaacaaaccaaccatataaaattttgcaccctagctatctttatagatggatgcaaggaaaatggaaactatgagaaaggaattgagtggcttttactcacaataggtggaggccgaccagttcgaacgcttatcgggatcgaagcctcaaagaaccttgcaacaggggcacttaactttctcaacaatccacaagagcctattttaaaggcggagagagagcgagagagagatactagcaatggggattacagtgtggattgactgaaatctgaagcatttgagagtgaaagggacgatgcccccaccacaaaatgtcaagcagactagaaaagcagggagacatagcaacccccacttgctataaatatgtgtgcatccatcttgtgttgtatctatccagaaatagatttaaaggaaggcactacaccagaaaggaagaaagaatcacccgaaccaagagacaggaacagctaaagtaaccaaggcacttcacatgtgtgcatgcctgcctgccctggaatcatgctcctcgctcctaacttgttgacatcacagacctcccctcccccactcaggaatatactacaacagtacggacccccttttttctttcttttatttctcaatctagtagaatgacatgactgattaataattgccacccaagattgtttataaccattgtggatctggggatcttgtcgacttccatgagtaaatgcagtcgtcctggagagcttaagcttc

SEQ ID NO: 7332 - DNA, 1493 bp, Oryza sativa
  ref <308>: DATABASE ACCESSION NUMBER: AK064459
  ref <309>: DATABASE ENTRY DATE: 2001-12-06
actagtgaagtgttgcccgttgggtttggtggagtttgaagagctctgtcgccgtcttcactcctcgcagtcagacgggagtggactactggagggagagagagggtgagcgaggggatcttcactcctccagttcctccccatttcttgcatcccttccggatctatcagccccgtcaccaaccttcttccatccacgcttccatctatcggagcaggatgatgggcgatttcctctccagggtcctactgttggcctttggttatgcttatcctgcttatgaatgctataaaaccgtagagctgaacaagcccgagattgagaagcttattttctggtgtcaatattggatattagtcgcgctactgacggttttggaacgatttggtgatcttgcaatatcatggctaccactgtactcagaagcaaagctgatgttctttatatacttatggtgcccaaggacaaagggaacctcctatgtctatgagactttctttaggccatacatttcacagtatgagaatgatatcgactgcagtattcttgatttgagagtaagagctggggacatgcttgtggtttactggcagaaggttgcaattattggccagactacattctttaacattttgaagtatgcttctgcacagtcaccagctcattcatcaaggtcgcgctcaacacaggtttgcaagcagaatgttttatcttctagtttgttgaatgataatggaacagcattcatcaatcaatgccttttgaacactcctacgtttggttcacaattcatatttatgcacaatctcttttgcctgctaatacctgagttgcaggtgtcctgctatcatagtttcgtagataagtgtcatgccgtagtactccaaactttctgtgcaactactccaactttgtgttaagttccatgagaaatagaagtttacattgttattgtggttgtttgtttgagatgattgtaatactcgaaaatagaatgaaccaaagatgttccataataacttgcttcaatcctaaactcttagcaagataatgtcacgaaagacgatatttaacagcaccttcaactatgtttgcgataaaggcattaaattaacaaaagtcaaaactaatcaaattaaagcaagataatgtcacgaaagacaatatttagcagttccttcaactatgtttgggataaaggcattgaattaacaaaagtcaaaactaatcaaattaaagcgagacaatatttaaattgctctgtatatttgtacaaacattatgtaatagaaaaaaacatccacgtgtggtatctaatagcaagacgtttaaggtgccgtatgaggttatagtgacccgttacaaggtgcatagggttgtagaaagaatgaccagccttcagttccacaaggttggcagccatccattgcatcactaaaagaacatagtgggggtcacaacagccaccaagacaaagcagcaagcctggtcc

SEQ ID NO: 7333 - DNA, 1505 bp, Oryza sativa
  ref <308>: DATABASE ACCESSION NUMBER: AK064460
  ref <309>: DATABASE ENTRY DATE: 2001-12-06
gtacattaaattgaattcttcagtgttgttcttgtgaagttaaaataatttctgaacattcacccctctataatcatttgtctatatagaaaaagcatgaagcaattctaatcacaaaaatgcatggagttgtctagatcaaacaattaattaatcaatcatcaatcaaaccaaagacgtgtaaggtcatataatacaaatttaacttgacaagttaatgagtagaagatgtatgcaacgatattttccccgcagcttatactactgtcgatatatgcgtgtgaccatagttcacaagccctgtattttatgatttcaaatgttcgttcatacatatacactactacaaaagcccttattgacaccgattgagaaccgaccataaataccgatcgattttccagccggtgtcaatttaacggtactaagggcacccacaatggttatctataggctctctataagatatccatgtcagcatattttcctacttgaaagagattaaatgaagagagagagagcaaagctatctactaacctggagatagtctatagagaaaaacgagacaatgtattagaaagctatagatacccatgtagacatactattgagatggtttactattaatctagtctattgctgagatgtacatgttttatagatagcaccttactttaccattgcgggtgctctaatgcacaaccatataggtaccgattttagaatcaacgcctatagagattatctgctatttgtgactatgtgctatttgctatttttgaaacatggagcaattaatctgttataataatcggatcggatgaacaagttgaaacaaaaagggtccaaattaagccatgcaggtttttgctatatagtcgagctgtgttgatagttgtaaaaaaaaaactgtgttgaaatcgtgaaagtacccaagtttgatctgaaaaaaaatcgaaaaagaagcccaagttggggcaatgcaggcacacgcacggcggatggatggtccggtccacatgtgtgagaagggaagctccacgttcctccggccaattcaggaaaatatttcttctacttagcttcatctgggcttcatccttttggggcaatctctgtttgagccagcatctcagctatgcatgggccagcagcagctcagcataaaattggtccctgaaaagtgtaaaagttacaagtggttaaccggttacttgtccagcagaaatggtttggtttggtttgccatcatgtcgaatgtacttctggttcttaaatagtactctctccgtttttttaaattataagtcattttgttttttaattttttatttgataaatttatagaaaatattagcaatattcacaacgttaaattagcttcgtcattacatgtaactttgataacatttttgttttgtgtagaaaatgttgctttgtttgattaagaaaaaagtcaaatcaacttattatgatataaaatagagagagtgttcaccctctt

SEQ ID NO: 7334 - DNA, 1390 bp, Oryza sativa
  ref <308>: DATABASE ACCESSION NUMBER: AK064461
  ref <309>: DATABASE ENTRY DATE: 2001-12-06
aatgatggaaaatgcttgtcttgttaaaacttttgaacatgcctgtggataatttgtaattctgttaaaatgcatgaagaataaagatgtgaggcagggagaaaatgtgtgctgaaggcatttaagatgtctattgagttttgatggaacactctgatctgtgaatctctttccctaggaaggttttggaacatcagatacatattgcgcatatcttattatcttatctgcagatgtataatgtatttcagctgaagcatttcatttaccatactttaacttatctaggattctaggatactatgatataaaattttggttagtgcgaacttgtcttctgcttatgtcagcattataggcctataggattctatacttggcacttcggcaatatccatatactctgcatccttatatgctgtcagtagacattgccataacaacccctctttagcccggcagataacaaattctctttactgtgtgctcctttaggttgggatatatctgccctcatacgatctattgcgcaattggattgaagaatattcagatcatagttttcctaaactgagaccatatgctcctcttattgctggctctgttgcccgatcattggcatgcataacttgttcccctattgagttggcaagaacacggatgcagttcggtcataccaccttctatggactggtcttggagcacaacttgcacgtgacgtccccttctcagctatatgctggacagttcttgaaccaactagaaggcatctgataagaatagttggcgagcaaagcaatgcagctgttatattgggggcaaacttctccgcaggcttcattgctggagttatctctgctggtgctacctgtcctctcgatgttgccaagacacgcagacaaatagagaaggacccagctagggtattacacatgaacacaaggcgcatattgcatgaagtatggagtaaggaaggcatcagcgggatattcagaggtgcaggtcctcgaatggcacgggcagggccttcagtgggcatcgtcgtctcgtcatatgaagttgtgaagcacatcatgcaccggaaacacgcagagttatgacctgattttaactcttcaaacgtagaattcaactgcagctgaggcttttaaccattattttttctagtttaccctacacggactagatcgctttagtgaaagccggtttttattctctatctatatgccttgcctaccttatcaggaaggtgaggccgagtgtgtcccttctaataaaagggcagaatgccctagatgtgaacattccttgttacaagaattcattgatccattctccctgtctgctaaaagtgagtttgggttgaaagataaaaaaaataatgaacacg

SEQ ID NO: 7335 - DNA, 1787 bp, Oryza sativa
  ref <308>: DATABASE ACCESSION NUMBER: AK064462
  ref <309>: DATABASE ENTRY DATE: 2001-12-06
catggatgctgttctaaaggacatacctaaaactgggaaggtgtcaatgaaaactatctttggccggaaaaaggttagaaaagatggatctgaagggaaaaccatatctatcgagccagtcgaaaagttacaaagggaggatagagagttgtggatttgctattcctcactagattcaatgagtacattgaagctttatgaaagcttgaaaaacaagcttgaagcaaaggaatggattttcgatgattgtcctagaggaacaatgtatgatttctacgaagagtattggcgtccctttggtgctcttcttgtaaagatggaaacagagggagtgcttgttgaccgtgcatacctttcggagattgagaaagctgctgttactgaacgagaattagcagcggataagtttcggaaatgggcatctaagcattgtcctgataccaagtacatgaatgtgaatagtgataatcaaattcgccaacttttctttggtggcatcgaaaatagaaataagcgtggtgaaacttggccacaaagtaaaacttttaaagtgccaaatgatgaaggcatagctacagagggcaagaagactccaaagtctcgcacaatcaaacttttcactattgtggaagatcttaaaattgatatgttcaccccgactggttggccttcagtcaatggggacgttttaaggagtttggctggtaaaatacccacagatcatatatataaaattgatgatggccaagagtttgatgaagatgggagcagtttggaacttcctgagcaggatatagaagacacttccccatatggaactgcatatgaagcgtttggtggaggaaagaagggaagggaagcatgtcatgccattgctgctctatgtgaagtcttttctattgacaaattgatatccggcttcattgttccattgcagggagatcgtatatcatgcaaggaagggcgcattcactgttcattaaatatcaatactgaaacaggacgcttgtcagcaagaacaccaaacttacagaatcaacctgctcttgaaaaggataggtacaagattcgccatgcttttgtcgcagctccagggaacactcttattgttgctgattatggccaactggaactgaggatcttggcgcatcttactaattgtaaaagcatgctggaagctttcaaggctggtggtgacttccattctaggacagccatgaatatgtaccagcatgttcgtgatgctgttgaagaaaagaaagttctgcttgaatggcatcctcaaccaggtcaagacaaacccccagtgccattattgaaggatgcttttggcgctgagaggaggaaggccaaaatgcttaatttctccattgcatatgggaagactgctgttggtctatcttgggattggaaggtttctgttagggaagcaagggatacactcaaactttggtatagggatagaaaggaagtttcagcttggcaaaagaagcagaaagcctttgcgcttgaaaagtgcgaagtctacactttgctcgggcgatcacgccaatttcctaatatgactcatgcgggtcctggtcaaaagggtcacgtcgagcgtgctgctataaatgcaccagtgcagggcagtgcagcagatgttgctatgtgtgcaatgcttgagatagaaagaaacgctcgccttaaggagcttggttagagaccacagtagatactgacctgtatgagactttcagatacttgatcatgaaggaagtgcagaagcatgctgtcttcatatgacc

SEQ ID NO: 7336 - DNA, 1786 bp, Oryza sativa
  ref <308>: DATABASE ACCESSION NUMBER: AK064463
  ref <309>: DATABASE ENTRY DATE: 2001-12-06
ttgcaagaattactaacgggttgactcaatcactgaaattgtttaatggtagagcatttacctgtgagtacaagtatgatggtcagcgagcccagattcacagatcaaatgatggatctgtgcaaatattttcaaggcaaatgaaagagtcaacctctcgatttcctgatctggttggcatgatcaaagagctgtgcagcatcgaagtatccagctttatacttgacgccgaggttgtgggaatcgataggaagaaaggaaacaaactgatgtcattccaagagctgtcttcaagagagagagggagcaagcactcctcaattgcaattcagaacataaaggtagacatttgtgtgtttgtttttgatatcatgttctgcaatggacaaaggtaacactatggagtatttcatatacatagactacctatataatataatatcaaacttgacacttttttaaataagaaaaagacaaggaaagtacttttgcaaccacccctctctgatgggtcgatgtgagagcttattgctttactcacaaacataattttcttatggttgttagtttaatttagtttggctgtgccacgcttcaactaccaagctcgtgaccttctagttttaagtcatcagtgatttaatggtacacacaaatgagaaaaccttgtgcttagacggtaaatgactcagaaagcttatttcatgttggtcaaaggttatatatacattgtttggtaatcggaaacgcccactattaagctgcaaaagcaattacacgctgcttgcttggtgtaaaaatgttttacatgcatatcaatatgaattatttgttgaatttatttacaatatcagaaaacttacggtgtttttctgcagcctattgaactgctcacttcggcaaagaagaaagtacatccacgacttgttccaggagaagccaggacattttgagttagctcagcaacttactgtagaagcagatgaagcttctgtggataattctaccactttggagagaatgaacacctttttcaaaatggcatgccagtcttcttgtgagggtattatgctgaaaatactggatgttgatgctggatattctgcttccaagcgctgtgattcatggttaaaggttaagcgtgactatgttggcttgggtgatagcccgggcttggttccaattggtgcatggtatggaaatggtcggaaagctggatggtatagcccttttcttatggcgtgctacaaccctgaatacgaagagttccaaagtgtctgccgcgttatgtctggtttctcagatgagttctataaagagatgaaggagttctattctggcgacagaatactgcccaagaaacctgtttactacaaaacagacgagcttccggagttgtggttttctgcggaacaggtttgggaaatccgaggtgcagacctcacgctatcccctgttcaccatgcggctattggtctggtccatccgtcgcgtgggatctcagtgaggatgccgaggtacatacgctctcgtccagatcggagtccagaggattgtagcacggctactgatgttgctagcttgttcaaagctcagacccggaagatggaggtcagcagcgatggccaggacacaagtcactaagccagagctgatccgaccccgctttacagtgtttttgtagatgtacagatgcagaatagtagcaagcaaacgcctttgttttccaccttctatactactgtgtaaataaatggcactagcttttcaacgtatttttcactag

SEQ ID NO: 7337 - DNA, 1391 bp, Oryza sativa
  ref <308>: DATABASE ACCESSION NUMBER: AK064464
  ref <309>: DATABASE ENTRY DATE: 2001-12-06
atggccggccaagcaaactcagttctctacattgaacacttcaggtttgagtagacatggcctctcggtgtcttgttaccacaggttttgaggatgagtgcagagagatccatgatgcgtgcaaccagccacgccgtttgagcgttctcttggctcatcggagcccatcggagaggcagaaaatcaaggcgacttaccgtacagtgttcggcgaagatctcgccggagaagtgcagaaaatcctcatggtcaaccaggaagatgagctctgcaagctgctctacctgtgggtgctcgacccgtcggagcgcgacgcgatcatggctcgggacgccgtcgagaatggcggcgccacggattaccgggtcctggtggagatcttcacacgccggaagcagaaccagctcttcttcaccaatcaggcataccttgccaggttcaagaagaacctggagcaggacatggtcacagagccgtctcatccttaccagagggtagcccttgcttgttgcttaccattctacctcagtttccaattgtgttctttaccttttagccagctgagctcaactcctcccctgctttctggtgacaattcaagcagctattggtagcacttgcaacctcccacaagtcgcaccacgatgaacttagtcggcacattgcaaaatgtgacgccaggaggctctatgatgcgaagaacagcggcatgggatcggtcgacgaggctgtcattcttgagatgttcagcaagaggagcatcccacagctcaggctagcattctgcagttacaagcacatatatgggcatgactacaccaaggcactgaagaaaaatggcttcggtgagtttgaacaatctttgagggttgttgtgaagtgcatctacaatccttccatgtatttctccaaggtgatggcagctgaaaatttgcagtttgtagttggtacttcatatcatgtctctgacccatccttctatttctttgtctcgtcagctgctgcatagaagtctgcaatgctcagcgaccaataaaaggttggttacaagggctattttgggcagtgacgatgtcgatatggacaagatcaagtcagtgttcaaaagtagttatggaaaggaccttgaggatttcatccttgaaagcttgcctgagaatgattacagagactttcttttaggtgcggccaaggggtcaagggcctcatgaagtctgtggagagagatccttgaattatctagggaaagtaaagggtgcatatactgctttgcatgtaagagcaaattgaccatcaaaaacagcagttttatgttatctgagaataggatttaggtgagaacatcatgctcattttgtttattttgggtgaaaaaagttatcagttcaact

SEQ ID NO: 7338 - DNA, 1994 bp, Oryza sativa
  ref <308>: DATABASE ACCESSION NUMBER: AK064465
  ref <309>: DATABASE ENTRY DATE: 2001-12-06
atttgcctgaagtttatcataagaaactcaagattgctgtgccactgaaacatggctttagagcttttgtgaatgtaactgaccaaggtgtcactggctactgcattgatctcttcgaggctgccgtgaataagttaccataccgtctgatttatgagtttgttgtcttcgaccgttcttatgacgagctagtacagagtgtatcttcaggggtcaacgatgcagcagtgggggatataaccataattgctgatcgagctagccatgtggagtttacaatgccgtacaccgagtctggtgtttcaatgcttgtgcttgcggagaatgaatctgaataaaaaatcgaatgggtattcttgaagccactgacaaaagaactttggtttgccactgtgatcttcttcctattcaccgccttagtaatttggataatcgaacatcccagaaacatggagtaccaaggatcgaacacaaggcagttgagcactgctctctattttgctttctccactttgacattttctcatggtcaaattattaaaagtcctttgtcaaaaattgttgtggtaatctggtgcttcgtggtgctggttcttgtgcagagctacactgctagcttttcatccattctaactgtaaagaggttccagccctcagtgacagatcttgaccagctcctaaaaaatggtgattatgttggataccaagagggatcctttgtgaactcatttttgacaagacgaggtttcggtgaaagaaggctaagatcctacacaaagaaacaggaatatgctgaagctttgaggaaggggtccaagaatggaggtgtgtctgctatcgttgatgagatcccatatttaaccgctattgtctcggaccctcattaccagaaagaattccagatgcttaagcgcatatataagactcccggatttggttttgtgtttcctcctggttttccactggtgcataatctttcaactgccatgttggatgtaacaagtggggatgaggggtcacgtatggaaacgaaatggtttggtgcagaggctgtctctccaagtaatgcaattcccaacacagattcagcacctctcactttgcggagtttctctggtctttttatcatcactggtgtatctcaactctcatgctgatgattaggttctccatgtcaattcttgccaattacacccaaattagagattctgatgtgcaaagtcctgatgtgggtggtcgaaacaatgcacatgaagaatctaatcaagcacagaacagcatgggttgcattgtggctgatatacacctccatgaagttcagaattgacagttcccaggatatccatgggagtgtcgaacgtgctgatggcgaagagcctcgaccaattcagaatggccctgtgcctacaaattccacccagacagtatgaattacatggtcatgctgagcgtgctctggaaatataaaaacaagaatgctccatctcttcatttattgtaggattgatcaatacccagatttttcttactatatgtatgtacctgggggcatcacaaactggtcagaaagtcagaatcagaactgcaagaacaagtctatagacctgaccatggaactatagaccagaagtctagagattctgagaaattgcacacacatgtccagtgcctgcgaagtcatgcattcagtcagtcacctatgaaaaccaagacttggttatgaagaaaagtttcagggaagacagactgctgaattctgattacttcttgctattctttgacagttcgaatcttgatcaatattatagacagataaaatcaaactgggggagagagattgaatgacagatcatgagatgtggaacctgtcacggtcagatcagattgaccaatgagatgtggaacgtttttattttagcttcatagttgacattactggatatatttcggaactagaataagagtatataaaacagttcttccaattatttgac

SEQ ID NO: 7339 - DNA, 1714 bp, Oryza sativa
  ref <308>: DATABASE ACCESSION NUMBER: AK064466
  ref <309>: DATABASE ENTRY DATE: 2001-12-06
aagggtttagaaactgacatagttataaatggacataatgtatgtcaagtcataaaatgtactgtggattaaattaattaacattactgctcattttctgggataattagtgaggggatgcaattgaaaggggatgttagttttgttgaaatatcactctttgcgatagttatctcaaattacagctcactagtaatatgcccgtgctaaatgctacggtccaattttatttgtctttaataattttcaaaacgtcatgttagccaaaaaataaaaataaattatatgatctgagctttacgtgcatcaaacaattttcacacataacacatcagtctcctttagatgtagataactcaaaataaacacataacacattagtttcctttaaaaagaataggcaatcgaagaaccatataatatagatagaattccttgatatgccaaaggacaaaatagctgaaagaatatatgttggctagcttatgaaatgccacaaaaacagaaatctaactttagaatcaattaaataaagtttgcatatagtttgagccagaaacatcaaatagtaatactcccgcaaatcctaagatatcatttgaaaaggatgtgctcgagtgaatagtgatacaggccgccctccgaaccttctaaatgaactcaacaaagcaaaattacttagtggtttcatatttaaccatacaaatagttaagccaaggcactgtcatgttctaatattcagattagcattcaagtgtccatataagccctaacaatttattccacttatacttaaatccaacccattcaactcacgttatacattggaaggaggaactacatagagtagagctctcagcgttggtgggagattacacaggaaaagataaagctaccaacaaaattcagcaaccttaggggttactgaaatgtgtcactctcgccatcctccggcatccaaaatctgctctgaaatcctctgaattagcttctaatagtgatctcctcatggaaaacccaccttttagaagcagaaaagagctatcaaagtgaaaagagtagtagttattttctgtcaagtacagataaccaagaacatatttgttaaaattgtaagttttatccatcgagacagaacagaaacataaataactgaaaagttggactcttgtgcatctgtaagatttgagtgaataaacactaaggatggaccatagcagcaacttgcaaagcacaggcttttttagctagtttatgcaaaggtactcaagtgtccatagaagccctaatgatgcattccacttatacttaaaatggaaaatgtcaactaaaccaaaaccatcgccaattaatgtagtcctttaattatccatgctaatccagttcttccataattatgcctactaacataagatgccataagtaattacaggaggcctcccatctggatgacaggagagatagattgcttttagcaagaaaactgaataatattttttaacacaaaaaatcgcaagatacaataaaccagtccaatcacttaacccaaatgagaaaactgtatgccagatggataccttgttggtctggccacaatatagaacactcaagaaatctagaacgctaaagatgtgctcaatgaaatgcgtctgtgctgccaacttcacggtcgcaccagagctgctcccctacatgaaaaaaagaacacaaaac

SEQ ID NO: 7340 - DNA, 1612 bp, Oryza sativa
  ref <308>: DATABASE ACCESSION NUMBER: AK064467
  ref <309>: DATABASE ENTRY DATE: 2001-12-06
atgaaatggagaaatctagcgaggatcaagacagtgtgacttatttgaacacattgctagcatgtagccactctggattggtggatgatgggatgctcgtctttagaagaatggttaatgacaagggaataattccatgcccagagcatgtcggatgcatagttgatatgttggcaagagctggccgcttggaggaagcagcaggagtggctagcttgactcacaataaattaggagcaaatgcttggaaggctttgatgggaggagggcatttgcatggtgacatgaaatttactaaagttgctgcaaagaaggtgctcaccacggaatcatttgattatgggcatgttgtgttactttctaatgcttatgcatcatctggcaaatatagagctgctgaatctgtcagatcctgttatgcaaagcgaattacaaggaaaactttagggcttagttccattgagatagtgccgtacagcagaagatagtagaacaactcttacctagggaagagagaagatacatcaaacaattagtattcactgtctgtctgtctcaagctattggaatctatctcaggcataagttgagtattcactttcaggttgccaagtctcctgtggaaaaagtaaagcatcaagcatgattttcaaatgcaagttgatgaaatagatgattgccttggacctttttctttaaaagaaaaatatgccttggtctatggaacatgaccaacgatatcacatctcaactcactattgctccaggaatctctaacacgtgaatatggattctaatgtgagaataatgtatgacaaaaactctggaaggtcaagaggttttgggtttgtgcacttctcaaacgagtatgaagctaagtgcgccaaggatgctatggatggaaaggtaatgctaggacgaccattgcggataagttttgctcttgacaaggtccgtggtgctccagttgttgttccacgactttccacggtgaaatgaaactactaagagagatggtttggtcatcatatggacataccaggaggctggcgaagcatccataggctagtgttttgaaccttcccaagtagacgtcggagatgaaggcgcctagcaatggcgcaaagttaagcgtaccgaagaatatgttggtaatattagctgcctcaatttgcccaatgttgaagcgcttcacaagatagaccgtcaaatttgctaccactccaattgtcgcaaccttttcaaatgtctcagttgctacatagatacaatcagaaaagggcatccattcagtacattataatgagcattttgatttgatccgcttgaagtacaacataattcattcgtgaatccctttttgctttgatttgaggcagggtgtgtcctgtgcagggatcaccgggttagagcacccatgttgtcatgtctaaatttagacaaagaagccaagccaagccagaccaaatcaacatatacttggtctaggctcagagtctgaaaatactcttatattgaatggatattagtatatgatttacggtagtcatgtagaagtattaatgagatgattcacgaatacgagtgattaaaagagtcttccgtacgtgct

SEQ ID NO: 7341 - DNA, 2006 bp, Oryza sativa
  ref <308>: DATABASE ACCESSION NUMBER: AK064468
  ref <309>: DATABASE ENTRY DATE: 2001-12-06
aagctacacagcaccctgcagtctccaaaaaaatcattcgacaccatagctaagaagatgttcatgtactcttacaatgatctacctaaagaatacaagtcatgcttgctgtacctagctatcttccccaagggacagaagattaggcggtcaaccttgattgcaaggtgggttgcagaagggttgacattcaaggaagattggcccagctctgtgtatcaggcaaatcgatgttttgatgccctcatccgtcggtggcttgtttatcctgatgatattagtgccacaggaaagatcaagagctgtgtggtaggcgatccagttcatgggttcattaccgcaattgccagaaaacaacatattgtggagacacgcctatcacatcacttggctcgccacttctccattttcaatgatcttcgactccgcagctctgatagaattggcacgttcttccaaggcctctcacgatcatctcgagtatccctactcaaggtgctagatctagaaggttgtcagtgctttgctagtaagaatcagcggtacctcaaggacatctgcaacaagatgttactgctcaaatatctgagcctaaagggaacagatattacccagctgcccagtgaaatcaactgcctccgcgagctagaggtattggatatccgagaaaccaaggtgcctgcaaatgcaacagtaaatgtcctgctcttgaagctgaagcgtctacttgctggtgctagtcagattgatccaactccaagaaattttgtcactaacgtccggattccttccaggatagacaagatgataaacatagaggtactatctaatgtcaaggccagcaccatgataatttggaagatattgggaagctatgccagttgaggaagctaggtgtggttattgatggtaagaaaagtcaccttgggagtttgcttaaagcgatcagtgacctacacgcaagcctccgttctctgtcaatcactattcccacaaccacactcgaggttactccttcaagcccagagttacaagatattgcatctcgcctaaaacaccatcctgagtttcttgagagtctaagcatcagtggagccaagcatctttttccattgttgaccgaaggtggtaataagaaacttgccaaggtaactctaagcaacaccccactgaaccaagatgatctgaagttctttgcccagctgcccatgttacagtgtgttaggctccgacacatttcatgcaccgagagtgtgctcaacttcaagaaagatgatttcaaatgcctcaagtaccttcttattgagggctcaaacttgactaatattacttttgaggatgaggcagcctgtgagctcgagaagatggttttatcttccacttgcatagagtctatttctggagttcatgggcttccaaaattcgaagagcttgagttgaacagcagcagctgcggaaggttgctatcatcatgtttttacaatgttgaacgaatagccaagctgactcttcgtggtacattgctgaagcaaggtgatctacgaatcatcgccagggaactaaatatatgctgcctagtgctcttggaaaactcttttgacataagccagaaccagattaccttcgaaaaagaagagttcatatggctcaaacttcttagtgttgattgctctaccatcacaagattaacttcatcactggatcagctcctaggctcaagaggatcgtctggtcatctttcacctctctctctggcatcaacaaccttcctaggttgaaggagctcgagttcaatggatactcagtcccaaatgatgtggaagaagccattaaaaacaataaaagcataaatcttaaacataataaaccataagctcaagacaaagcaaaatggagatgaataagaggatgaagacaatgctgggacgttcccattccgctggaagaaacaggtttgtcaccagaggagcatctccttttatcccatggtgtggtttgtgtgtgct

SEQ ID NO: 7342 - DNA, 1813 bp, Oryza sativa
  ref <308>: DATABASE ACCESSION NUMBER: AK064469
  ref <309>: DATABASE ENTRY DATE: 2001-12-06
gactggccgtttatttttctgcaatcttccatatgcaactactgaaggtgatttagtggagctgtgtagccaatatggtgatgttgatcaagcacgtattgtcgttgataaaaccacaaagctatcaactggaagaggttatgtgctctttagccttccagactcagcagtcagggcacttgaattggacaactcaagttttcaggggcgacttttgcgtgttaaggctgctaagccactaaataataaaaagattgaatctagttacgaagagaagaaaatgagtctcaaacaacaaaagttggatcagaggaaagcttctgaaatcagtggggatacgagagcttggaacagcttttatatgcgccaagatactgttgctgaaaacatagcaaggaagaatggaatcagtaaaagtgaattacttgatagagaagcagatgaccttgctgttcgtattgctcttggtgagacacatgtcattgcagagaccaagaaatatttatcaaggtctggagttaatgttgctgcactggaagagcttgcttccaaaagaaatgagaagtttaaaagaagcaaccatgtgatattggtaaagaacttgccatatagttcttgtgaggaagatcttgccacaatgtttcgcaaacatggaagcctggataaaatcatcctccctccaaccagagtgtttgccttggtagtttttgttgaagcgacagaagctcggcatgctttcaaaaagttactgtacacaagatacaaggatactccactgtatttggagtgggcacctgaaaatattttatctcccacctcagcacctgtggaagatgatgagaaggatgttgttggtgacaggattgttactaaagcaattgtagagcaaactgtggaaggagtgagtgctgaagagattgatcctgacagggtggagtcgcgatctgtatttgtcaagaatttgaatttcaagacatcggatgaatccttgaagcagcatttcagcacaaaattgaagagtggaagtcttaaaagtgcaacggttaagaagcacattaagaatggcaagaatgtttcgatgggatttggctttgttgagttcgactcagttgaaactgcaaccagtgtctgcaaggatctacagggaacggttttggatggacatgctttgatcttgcaactgtgtcatgggagaaaagatggtcagactaagaaaaatgaaaaggataagagttcaacaaaactcctcgtgcggaatgtagcatttgaagcaactgaaaaggacttgcggcaattatttagcccatttggccagatcaaaagcctcagactgcctatgaagtttgggagtcacaggggtttcgcatttgttgaattcgtcacaaagcaagaggcgcagaacgctctccaagcacttgcgagcactcatctctacgggcgacatttggtgatcgagcgagctaaggaaggagagactcttgaagaactacgagcgaggaccgctgctcagtttgttgatgaacagagtggtttccagaggctatccaagaagagaaagcaaaccagccttgtggacgaaggctctgttaagttttcaaggatagtagaatagtgttgtgtgtggatcgcgaggtaacaaaattttgatcgtgttgtagtagtattattgtagaatgataatcattcgtataaggtaatgcaatgcaagtgcgtcctagataccacttagaagttcaactgattcagttgttaatgaagtgatgccacaaatcaggcgttcaagattcaaagttattaggaagattgttgatct

SEQ ID NO: 7343 - DNA, 685 bp, Oryza sativa
  ref <308>: DATABASE ACCESSION NUMBER: AK064470
  ref <309>: DATABASE ENTRY DATE: 2001-12-06
actcagccatggctgaagccgctgctggcgacgagcttcttcggccaatgcaagctgcacgcggactcgcacaagagcgagtgcaacatgtactgcctcgactgcatgaacggcgcgctctgctcgcagtgcctctcctaccaccgcgaccaccacgccatccagatacggaggtcctcctaccacgacgtgatccgggtgtcggagatacagaaagtgctggacatcaccggcgtgcagacgtcgtcgcgatggtggtgccgttcctgagggggaccgcgtggcagcagccgccgccggacctggcctcgttcctgtacaagaacaggatcgtctacctcgggatgtgcctcgtgccgtcggtgacggagctcatgctcgccgagttcctctacctccagtacgacgacgccgagaagcccatctacctctacatcaactccaccggcacaaccaagaatggcgagaaattgggctatgagacagaagcttttgcaatatatgatgctatgaggtatgtcaaagttccaattttcaccttgtgtgttggcaatgcatggggagaagctgctttactcttggctgctggtgctaaaggtaaccgtgctgcgcttccatcgtcgacgataatgataaagcagccaattggtcgctttcaaggacaggcgacagatgttgacatagc

SEQ ID NO: 7344 - DNA, 1629 bp, Oryza sativa
  ref <308>: DATABASE ACCESSION NUMBER: AK064471
  ref <309>: DATABASE ENTRY DATE: 2001-12-06
cgtaggcttttgagtggaccctgtcctatgacaaacttttccagattaggtgtaattagtttgaggtaatgcaaacagcgaacattgcttagagcagcaagaacatccctgttgagcttatcagaggatgatagacacagctcagtaagacctttcagcaaggttacaaatggaggtaatatgtttattttgccttttagcttcagagagcttaagtagcaggaatcttccagggaaaacttcagcatattctcttggtcttggaagcaccccccaaaattcagagaaagcgagcggacatcgttcatattggtgcccctctggatgaaaacttgaatggcctttgaaaggtgaatagtgttgctgctagaattggaaggggtctcgctctcgcaccatattttaaccttggccaagtttttcatatgatcaatgagttgaggaaatccttggtcattattggcaaaaaatcccgctagtgtctccagcttacttttctcagacagatacttctgtagcttgctaattttctggcctacatcttgaagtttgaaatttccaaatagatgtgtcaagcatggcagcttgatgacttgtatgggcagaacttttatctttgttcttcgtacatcgagtgtctccaaaaatttcagttttgtgatctcctttgggagcattgtaacagtgcccccaaggcttaaatacctgagcagtaacagcttgcatatcttcctgagatgttcatctttcaaattttcacattcttcaagatccaaaactctcagtagttcataactggagaattctaaaacagagtcttctgcctctccgaagattgtcaaagaccgaacatgagataaatcaatgtctgagttcattctgccccttctggtgctgttatgttgcatagtaaggcaacgtattttgtcaggcaggcaagcttgatcatatagcaacgtaatgaagtcatcgcacatggacttatgcaggatgaactcaagcatcatgccgtgagtttggcatgtcttcacctcagtgttactgctcgtagcaacaggctgaatgatgctccggttgatcagctcgttgaagtagtctgtagcaacatccagagaacttcggagagggtctgcctcaacaagcccttcagctgaccatcgccttatcagttttcctctcctgaccggatggccactggggaaaataccaaaatagagcaagcaggccttgataacatggccaggaaggctggtatagttgtgaacaagtacatgcttcattctttctaaagtatcctctctttccagatgcatacccagattgccacacaactttgcatattcttgtggtagctgttgacctttacttttcaagaattgggctgttgatacaagggcaagtggtaaaccatcacatttagtactcagcactgtttctgaaccagagctgcaggcatttgctatggaatggatggccgtcgtcaccagcactatgctgcttgatcctgtatctacagggaaagcatcttttatagtactgttccaatattccctctggatgtcatcaattacaatgaagaacctatagagatgtatttagaaataaggtaaatggatcagtgcttagtag

SEQ ID NO: 7345 - DNA, 2847 bp, Oryza sativa
  ref <308>: DATABASE ACCESSION NUMBER: AK064472
  ref <309>: DATABASE ENTRY DATE: 2001-12-06
tcaagcaaggttaaactaaaaaagagaaaaatgtcagatttaggtcctcaatggagcaaggatgagcttatgcgcttttatgaagcctaccgtcgacatggaaaaaactggaaaaaggtcagtgcatctgtgggtggaaaatcagcagatacagtagaagccctttacagtgtgcaccggactttcttatctcttccagaacgtgaaggtactgccatgggatttgttgcattggtaactggtcatcacaatgtttcgcaggatgaatccaagagtcataaaggaagtgatcaaacagttagagcatctgggaaggtacggaaacgtgaagctacagggcagaaagagaaggaagcacctcatgctcaccgctcctatcatgaaagaagaacttctggattatcttctttcaagaaaagatactatggagaacttgtcaagaacattccaagacatccttcagggaaacgtactcctcgtgtaccagttatttttcctgcagacatgaatgttgctcatgctggcataccagaaacagaaaatgccatcaactgtaccaaaaaggctagtggagctaccaataatgagcttgaatgctcatctcatggaagtcctggaatctcagaatcagccaagtttgttcaaggccagactttcctggaagctaaaggaactggaagcttgaaaaagagaagaattgagcagagtatggaacaaggtcagacaattaaagatgagcataaaaccgcaatggtggctaaagaagggaatgaccttactgaatatcagagacttaccaatctattttccccagatgagatgttggtcttagatgtcttggagagtttagtgactgtacccagtaaaatatcagagcctaagattaatattccttcaggtacacttggaagggatgattctgcattgtctcacagaagggaggaaggtccttcagttaagagatccaaacaagggaagcaagttggtgaatgcagtgcctccaagacaaggaataaaaggagaaagaagttaatagctgaagaggtgcctactgaaggagtcacttctaatcatttagatttgccagaagagcgtcaagttgatgccactgagtgcgccttgaattctgatctggaaaggggaacagttgatttacctgaatcaactgcaaatatttctaccaaaatccctgatttgccatcacaattaaaacctgagataaatatgtcgagaaggagcaaaagaaaatccaaaagtccttgtggttctaagtatgtcgtttgcaatggagcagataatttacaggctaggagattgcagcattgcttgtcatctgagtcacttcgtagatggtgtacatatgagtggttttacagcgcagttgattatccatggtttatggataatgagtttgtgaactacttgaattttgcgaatttgagccatctgtcaaggctcactcggtccgagtggagcacaataaggagctcacttggcaaaccccgacgtttttctgatcattttctggcagcagaaaaagataaacttgaaaattatcgcaaaaaagttaggcaatactatgctctactaagtgaagattcgtgggattctctaccaccagacctagctcgaccattttcaattggtcagcaggtaatcgttcgtcacccaagtacgcgggaactttgtgatggtaaagtggtgatgatggaacaggatcgttataatgtccagtttgataggcctgaccttggtgttgatgaagtaaaggacactgattgtatgcctgtaaactggttggataatctgcctgatgacctcaaaaagaggagcttcctttcaaataattcacacaacagagtagaggttgagcaaattccaaagtttacttcaaaagagaactgggatcatatcagcggagaggccgagccatccaaaaccatgcacataacttcagatgaacaggttgaaatcgctgtggatattgaaagactatccaacaagagtacatctggtaattgtggaccattacagccgctccagtctgttgatgacaatgtacggagtagaggtttgtcagagcacaggaatggtcacaatgatgagctagattcttatattacttcctttgtccaaatgtcattggcacaagccaagcagatggtcgacgaagccatgaaggaaatctctgagaatggtaaaagttctctagaagaaacaggcatatcaaatgaagcgacggattgtacaggcccagaaccggaatctgctgctaattctgaacttccgcgcaacctgatattcaactgcattgccacgcttcttgcaatcaagcattttagcgagggccgacatccacctcctaacatagcaggcgtcctggagcgtgcttgcttaatgctgcgaccaagctgtgcagagaacctgcccatctataacgaaatagagaattttatcgctgtcataaagaaccagatactagctcttgtgccatcggcatcaagcaatgccaggctacccatgtacatgtaaatacttccaggcttccagcagacgaagaggcggtgcctggttgcttgatgtcgagaagaattgatgaatccatagcgtctgggggaggtttgaaaatgtatgagcttggatctacagcatcagaagacggcgggtcatcgttgactgtccagctctcttctaaactgtgtataaactctttagaggaataagctcttacagtttttagtttcatagatttctcaatatggttttaggaatggaggaatcgacattccagttgtagttaataataacgattcctacagtcatgaatacattgtccagttgattcac

SEQ ID NO: 7346 - DNA, 1849 bp, Oryza sativa
  ref <308>: DATABASE ACCESSION NUMBER: AK064473
  ref <309>: DATABASE ENTRY DATE: 2001-12-06
caacttgcacgtgcacatgggaagaacacatatcatcattgagagatttaaagtttggaggatctgagtcaatgaggtcaacacaacaagatttatactctgaacttgaatatgaacaagatgttggagaagatcctgaggagagacaaatggtttctctaaatagactatttgaaaaacaccgggatgtttctttaaatagacttctggaaaaacaccgggatgaagagatgcaagaatcttgctctactgataaagaaggcgaagaagatgagaagattgatactctatcatttgaacaatccatactaaagataactagcatgaaattagggaatctttggaacaatcctaaccagctctcagaggagatggttcgttgcatgagaaacattttcctccgtctatctgaatcctcgaagatgttaccaaaggaatcttctgattgttcatcttcctcagcagaacgtctttctggttctacactggcatccttctcagattcatccatcattccctcaatgctacgaagtccttcagttgactcgaatcgcaatgatgagatgacaactgaagccagcaactttgatccatataaagttaatgggaaggaaagccgaagagatattggaaattatcattcagcagctgaagtatcttggatgtctgttggaaaggagcaacttgaatatgcatctgaagctctaaaaaaattcagatttcttgtggaacagctatcaaaggttaaccctaatagtatgaactgtgatgagcggctagccttttggattaatttgtacaatgcactgattatgcatgcatatctagcatatggagttccacgaaatgatatcaagcttttttccctaatgcaaaaggcctgttacacagttggtggtcagtctttcagtgctgctgaaatagaatttgtgattctaaagatgaagactccagtgcatcggccccaactttccttgatgctagctcttaacaagttcaaaatactgaggagcacaagaaatactcgattgatgggacagaaccccttgtgttgtttggactcagctgcggaatgttctcttcacccgccgtgaggatcttctctgcagcaaatgtccgtcaggagcttcaggaatctttgagagactatgtccaagcgtctgttggtataagcgaccgagggaaactgctaatcccaaagttactgcagagctatgccaaggggaatgtcgaagattctttgctcgctgactggatctgccatcaccttacacctgatcaagttgcagtcatccgagattcttcttcacagcggaagcagcggcttcttggagcacgcagttttactgttgttgcattcgactcaaaattccgctatctgttcttgcctgacagcagtggctcccagaagccagaacccaaccggacttcgtgagctgtgttcagaaaacacatgctatgagcgagtatgtttggtcctagaaccatttcttgcatactggacaatggagtagctagttgtatatgatgtaaatttttggaggaagagtatatgatgcaacaaagatgagaagctggagggtgatacaaagagctccagtaaggatacaggatagttcatatgtatgatcagattatctcagctgaattggcgatgaaggttcatctggatctcattttgttctgttactgtctttccataatgaagataaccttttgtaatttttgttttcgacatacctttttttgggggtatagttcttgatcttggtcaattgatttgtaagttgtgctctaaataatgtatagtgcttttacctctttataataatgtgagttactttgtcac

SEQ ID NO: 7347 - DNA, 1517 bp, Oryza sativa
  ref <308>: DATABASE ACCESSION NUMBER: AK064474
  ref <309>: DATABASE ENTRY DATE: 2001-12-06
ataatgagaacacaatgactagatttttcagagggcttaatttcaatattcaggctgggcttgttaatgtgacatataatcatataggccaattgttcatgcttgcttgcattgttgagcgcaaaattttggagaatccaatggagcaacaagatatgcttgtgcctcctatcgctgatgttttgcaggaagttcagaaaagtctccaaaatgagaagaacgatatgtttgagatgtcacttccatcactcgcgaatgaggagaaggctgatgcagctacattatctgaagaaagttcgcaaggtagattaaatggtgctgagagaaatgaaggtgagtattctcaaggtgagctacacttgtccacttttcatgctatattagagcaaccattagtggaatcaattactgagttgcctttgtcacaagttgatttacttgctgttccttgtgataaagaagagttgtgtgataatgtttcacttatatccatgccacaactagtgaatgaacatgttagttctactatttctttgtgtgctgattctaagcatgttgttcacattgctaatgaagtagaggaacgtgaattgctatcttctttaaatactttgggctatgttcagtttgatgatttttgtgagctcggtaatttgaaggagaaattatttgctaaatctgatttgccatgtccaactaatgctatttttcatatctttggcgaatataatgatagaggaatatttttggtgcatagagtttacatttgttcagatttagaacatcttgtagttccggataaaatatgcaagctagagaaaaatgttattgctaaccaaattgtctcgagtttgccttgttttgattggaagaaacaggttgttgtaaatggactacgcaaagagcaccatatggaaaaaccgaggacggttttccgtgaagaaggggaggatgatgtgaccatggctaccacggatgcaaccattgctcacatcatggatgaacaagaagatatcgagatcaagtactccaagtgctggaatccgattcggccacctactacactgctgacttcaaacggccaccgaatctgcatacgacctccgttttcggcccgtgagtacttgatggaaagctctcggagccctctttctaacggatccagcctcttctctgaattctatctcgtgtggccagaatcacaggaactaggtgttgcatcacctataatgggcctatgggcttgtaacttcatttgggaccccggcccaggtggggcccatgtggggtgcgccccaagctggtggagcacgaccctaggcacccctaggtcgtcctcccacccctatatatagctagttaccccttcagggtttctcgggtttttgttagattaaagtttagccattgctacttgcttgcagcgcgcgtgtcggctagaccgtccgtctgcttgttcttcggaaccccaacttatcatttgtattaaattcctatttgcaatatcagattgcttt

SEQ ID NO: 7348 - DNA, 2091 bp, Oryza sativa
  ref <308>: DATABASE ACCESSION NUMBER: AK064475
  ref <309>: DATABASE ENTRY DATE: 2001-12-06
atggagtcacttagacaagaagcaccaaataaaaagtggccagcagcttctaaatctaaaaaagagtgaaagcggcactgctgttgagacttacaagtatgatgaggctgttagcttgaagaaattttacttggcaatcattatgcatgaatatccctttagtattgttgagcatgagtactttgtggattttattaagtcattgcaccctacctttccaatcaaaagtcgcataactgttaggaaacatatattggatatgtttttggatgagaagaagaaaatgtatgagtactttaaaactcttgcatgccgctttagtacaaccatggacatgtggacctcaaatcaaaataaaggttatatgtgcatcactgtgcattggatagatgatacgtggtgcatgcaaaagagaattataaagtttatgcatgtagagggtcatcactcagggaaaaacttgtgcaaagagttctatgatagtgtactggattggaaccttgataggaaattgcttgcacttactttggacaatgcatctgccaatgatgtatgtgctaggggtttagtagaaaaactgaatgatatacaacccttggtttgtgaggggatctttttccatgtgagatgtttgaatcatattttcaatcttgttgctcaagatgggttgaagcaaatttcatctagtgtttcaaatattagaaacacaatttcaattttgaactccccactgcagtggtcagaattcatgaagtgtgcttctgagtgtgatggtttagacactacttgtgggctgtctttggatgttccaacaaggtggaattccacatatatcatgttaaagcaagctattcactatagaaatgcttttaataggctctttctttgtcatagaagcaaatatcataaatgtgccccaaaagatgatgattagattatggcaaagtcattgtgcatatgcttgaagagattttatgattctactttgatcttctctggcattagttatccaactgcaaatctgtttttttagaaaattctgtcaaattaagatggcagtagaagaatggtgccgtagttctaatacaatcatagcaactatgggcaagtcaatgaaacctaagtatgataaatattgggagaagtccaatatggctctttctgaagcttgcttgcttgatcctaggttcaagagaacacttcttgagtattatgcagataaggtttatggtgtggtagccccaaaacacatggcggatttcatggttgttattaataagctatttgatacttatgcatctagtcaagcaagttcaaagagtccagcagctacaaatgtgcagaataatcttttagtgagtaaagactatgatggggagagcgatgatgagcttgatgcagatgttcaacaatacttgcgtgctagtactgcccctggaataggcactaagagtgagttagaagtttacttggaacagccactattggaatggtacacatcagacaaaaccacatttaatattttgcattggtggtcactcaagcaacatgagtttcctattctcagtttctcactagacttgctcgtgatgttctggctattcaagtatcaactatagcttcagaatctgcattcagtgtcggtggccgtgttattgatccattccgtagcagtctagaccctgaaattgtgcaagctctgatttgcaccaaagattggactgcagcatcaagaaaaggtggaaatgtggttgggtctatcttactgagaaggacatggagaacctggagcagaacttctgtgccatgttgtccttggctaatggaacagagcaagagacagagacagtggaatgttctaatgaggatggcattgcgccaatggatgtttgaagaaaatgttggtcaatttaattttcaagttacatctaatttcaagtttccatttcaaattagtgtactcctgctgcacaagtggatgagatatgttttgtgatgaaccatgtactgatgtgttttgtgattgaactatgttttgtgatgaactatgtatttatagtgtgatgtgttttgtgattgaactaagtactg

SEQ ID NO: 7349 - DNA, 1539 bp, Oryza sativa
  ref <308>: DATABASE ACCESSION NUMBER: AK064476
  ref <309>: DATABASE ENTRY DATE: 2001-12-06
catgcttatgtaggttgttttattttgcctcgctttgtatggattagtttctttgatttattcatcctagcattgtttgccacatccattttaacttgttttgccttatttttattattgacaaatacaacagccatgtaaccaatttaagatttagtttcctgttagctttgagatttactaaaaaataatacattacctcctgacaactaatgcatttaggcccagtaatgaatgtatcctaggggcactgatgtgtcctatttttcatattcactgtcaaaataaaaaaaatgcctctgttctattttttggttgtgctgatggtaatatgcttttataacatagatatgctgcatttgtgcaaaaattaattgttttggaaggtatcactgaaaaaaggcatttcaaattgcaggtttgaactactgccctctgattgaacttactgcattttgttattaaacacctcactctgagttttttttgtagaattttccagtctaaacttagatatctcttgctctaattagcgaagatagttttagttgtgattctgttaggtttttgtaatatacaccatgaggcaactctaggctgtgggaagaccaagcagtaatacattttcttttgataaggaacgttcagtgactcaattttaaccagtgttgtgacctattattcgttataggggatgaaattgttaccaatgggcatctgctagaaagaaaccagcgtgtaaactctgtggcgttgcactccaggtgtttgtggttttgccttatgtagtagtttgaattttgctttgcgatatggtgcttgcaggggctgatcactggaggtgtgattctgtttgccagttgagggaagaattcacacgcttctgttcactgaggacatcttctcaacctattgcttccaccgatcatctttaatgatagcttcggcgattccggtaatttttgcgttttgtatatctatcgtagcttgcatcctcaccaaaatttgattagcaaaatgctgcagttaagaagctcaagaaaagacatgaccggtaactgaagaaaggtggagatgttcttttccttttggcattggttcagattagcaaaatgctgcagttaagaatctcaagaaaaggcgcgcgaatgagttcgcacctactattgaattctcttactactcacccatccgaggtgattgtttggaagtggcatgcacaggagagattaataaactgccagaagaggagatgacatatatctgattgatagaattgtctttagtgtaccataattatacttcgtctttagaatgttgctccgcctatgtgggccgttcgtccccatagggtcatgccaattgccaaaattgatgttgggcgttcgttttaggctcatgttgttagtgtaaatgtggtacactgatagagatgcagaaagggttattctgtaaaaatgggagtatgggttggtcctgttggacagggttagtaccatcagagaggattctggcagtatgtcaatgtaggcatcattc

SEQ ID NO: 7350 - DNA, 1523 bp, Oryza sativa
  ref <308>: DATABASE ACCESSION NUMBER: AK064477
  ref <309>: DATABASE ENTRY DATE: 2001-12-06
tgacttgttttatcatcaaataatatataatcttaacttatacttttacatattatatactaagtttttgaataagacgaatggtcaaacgttgtacacaaagtcaacggcgtcgtacattttgaaaagagggtagtacttctgtaaattcgtagcaaaacaactgcaatttctgtactgtatcaattttcgacttcttttgaccaaacaaaatttaaagggcaaccaaagcagcactaaggttgtgttcttttggaggggttgggaacccctcccctacgcatggaaaacggagcaatagattatcatatgattgattaggtattagctataaaaaacatgaaaaatgaattaatatgatttttaaggtaactttcctacataaactttttaccaaacgcgtactgtttagcagtttgaaaagcgtgcacgcggaaaacgatggagagtagttggaaacatatgggaaaggacacagccttataattaccttgtccacttcaccacggctttcaggtgttgggttgtatttacctccatgtgatcgctccagctcacaagtgtcgacatctgcattcaataagtttttaaagtcttgatcaggtccctctaatttcagtttttcataaccgagaactttaatttgatgaaactgctatatatggtggacaaaatgctatatatatggtgaaaaatcttactatactttgttttgttcatatgtaatgctatttttgtatgtaaacaagttcaaaagatgtgtcagaagtctcatgtccagaagtctgtttttacaggaatttcaacataattttacatattacatatgttaaaattgcacttcattttcttctgcaatttttatttaaatgctgagctaaatcagtgggtgttttttcaatcgaggttagcatgcatatatatatagatcaaaccatacgctattatctgttctatttcaaattcagaaacacaagaattataggtgtagaatgcaccaatcctattattaagtccttacaaatgcatgcagcaaattgaaccatgtattcttgatattgagctgtgattttaatcaagaagtatggaaacatcaagattaccagaaaaaaattgtttctttcttccagagctaactagagaaacatcaagattcatggcaaagattgatcccggttaggtgcaaatatcatttgtttgtttgtttgaagttcagtgtaattaccgcatttactttatcgctgtttgcatatgttggagcgtcatctgcccctatccggctcaggttcacaagggaagacatctgcaataaaaaaggtaagttgcgtgttgtgattttataaaaccatactgacttgttcagtatcgtattgtttaagttgcatgttgtattatttctatgctgaattttcctactttgtgtagcatatgtgtgttctcttctgacatgtgacctcaatgtaagaaaaaatgacaccaccatgaacatctaagtgctctttctggcctgtgaccataatctt

SEQ ID NO: 7351 - DNA, 1768 bp, Oryza sativa
  ref <308>: DATABASE ACCESSION NUMBER: AK064478
  ref <309>: DATABASE ENTRY DATE: 2001-12-06
taagtgaataactatggcttccatgtctaccattcttccattgtcttggcctccttctcttcttccaagtgtccatggcacaattttcatttgggggaagcccacttcagagcccacgtggatttaggggagaccaagatagtcgtcatcaatgtcgttttgagcacctcaccgcccttgaggcaacacaccagcagagatctgaagctggattcactgagtactacaacattgaggcaagaaatgagttccgttgtgccggagtgagcgtgaggcgcttagtcgtcgagagcaagggcttagttttaccaatgtatgctaatgctcacaagcttgtctacatcgtccaaggtcggggagtgtttgggatggcactgcctggttgtccagagacgttccagtcagttaggtctccctttgagcaagaggtggcaacagctggtgaggctcaatcatcaatccaaaaaatgagagacgagcaccagcaacttcaccagttccaccaaggtgatgtaatcgcagtgccagctggagtagcccactggctacataacaatggtgattctcctgtggttgctttcactgtcatcgacaccagcaacaatgccaaccagctcgatcctaaaagaagggtatgcgtacatatgctccacacaagcataatgaatattccatatcactattttgatttcaatgataacaaaatgctaatgtgtattgtatactatgaaatgataaatgggttaggagtttttcttggctggaaagcctagaagtagctggcagcagcaatcgtactcataccagacagaacaactgagcagaaatcagaacatctttgctgggttcagcccagatttactttctgaagccctgagtgtgagcaagcaaactgtgttgaggctccaaggcctgagtgacccaagaggtgccatcattagagttgaaaatgggctccaggcactgcagccctctctccaagttgagccagtgaaagaggaacaaacccaagcttacttgccaaccaagcagctacagcccacctggttgcgaagtggtggagcttgcggccagcaaaatgtcctagatgaaattatgtgtgcatttaagttgaggaagaacatagacaacccacaatccagtgacatatttaacccccatggtggaaggatcacaagggccaatagccagaatttcccaatactcaatatcatccagatgagtgccaccagaatcgttctccaaaataatgccttgcttactcctcattggacggtaaacgcacacacggtgatgtacgtgaccgctggccaagggcacatccaggtggtggatcaccgtggtaggagtgtctttgatggtgagcttcaccaacagcagatcttgttgatcccacagaactttgcagtggtgtgaaggctcgacgtgaaggatttgcatgggtatccttcaagaccaatcacaatgctgtcgacagtcagatcgcagggaaggcctccattcttcgtgctctacccgttgacgtggtcgccaatgcttataggctttcaagggaggactctaggcatgtaaagttcaaccgcggcgatgagatggctgtctttgctccgaggcgtgggccgcaacagtatgctgagtggcagatcaacgagaagtaaactaaatgtgtaacgatcttactgtaatgaataatgtgaagaagattgcctacacctcttcttccataaaaatatcaataagcaattactaagaacatgataatactctc

SEQ ID NO: 7352 - DNA, 1966 bp, Oryza sativa
  ref <308>: DATABASE ACCESSION NUMBER: AK064479
  ref <309>: DATABASE ENTRY DATE: 2001-12-06
taaacaacatgaatacattatgtccataatataaaaaacagctacgtaagtataatatgagacggtgaaagtctcatattaagaaatctaggttaattgatgaattagaccattggatggaccaacttatattatatgtaatagatagagtggttacatgtgttaataatttcgttatccggcaaacgttctatcggataatccgatagaaaagtcagataatccgcatccatcggatttcagaaataccatatccgcatccgcatccatatccgccggatttctaaaaactcctaccatatcctcgttacggacggattcggagcggatcggatcggatattatccgatccgttttcacccgtaattttattttatggagaaatttaacaatattccatcttttatgttgctttgaatcgatcgctagtcaaatttctttaggtttgataaaaaaatagtaacatctataataccaacttagttttattaaatataatataatattgaatatattttgataatatgtttattttgtgttgaaaatgttactatgcttttttttataaatttggttaaactcaataaggttttgatatgaaaagttaaagcgacgatttataatataaaacgaagggaatattacataattaacgtgctgctgtattcttaatctagatcgagcatgattctggaaacgtcactctcagtctgagatatggttcggcctgtaaggaaattaagagatgattatgcactgttaggcacctgtaatttggctctctctagctccaagttgcagaaagctgggcgttcctattcgtaatgcagcattagttttttttttaaggaatgatgcagctttagtgagcagtagtactagattctattctagttaagcctgcatgcagtgatgcaggtcaggtcagttgaactaaagaattcaaagcagccgccctaagctagcttgaagcccgacactcgaataatgcacatatcattgacgagagtgagaggagtgtggtgctatatgcctttctttctttttctgttcctcgctttcagatcgccgggcgtgctttgcatcgaccggtttgcaggtcctttcccaaggtcgcatatcgcatcgatctctcaaaggtgagagatcaaatataatccaagcgtcatactactagtcaaagaacgcgtgcacattcttaaaaaggaagagatcttaagtggtgatgaacaagttgggggcagccagtgaccattggcttcctcgaaacggctaagggcccctttgaatcgtagggtagaaaaaacggaagaacggaaaaaacacaggattctgacaggaattgaagtgtaaaacagaggattgcaaaacacaggaaaaacacaggaatggttatttaattggagcacaggaaaaacgcaggaatcggatgagagagatagaatcaaaggaaatttttcaagagattggagctcttgctaaatttcctccaaaatccacatgcaatgtgccattccatagaaatttcataggatttgaaaagtttcaatcctttgaatcaaacgatttatgtaggaatttcatagggcataaatcctttgattcacagggcctaaatgggcattggctatgatatggcgcatggaaggaacattggccaggatccgtgtgcgcgtggacggcccaatcgccaatcggccgatcactcaggtcgttcggctgcatatgtaatgcccccgtttgcagtgacggcgtaatagtcaccacgtagaaacataaaccagcttccgcggcagcggttttggagtgaagagactcgtggaggtgaagtcgtcctctttcaaggggtgaaattattggatgaaatgcttatgattccctagcttccaaagtgtgctaaaaaggctttttatgtagaagaatgttttaaattcattttcaactttatggtatttatttcatttgt

SEQ ID NO: 7353 - DNA, 2822 bp, Oryza sativa
  ref <308>: DATABASE ACCESSION NUMBER: AK064480
  ref <309>: DATABASE ENTRY DATE: 2001-12-06
tcttttgcttggtgggattgggagcgctgggagaaggaaattgactggatggctcttcaaggtatcaatttgcctcttgctttcactggtcaagaagctatatggcagaaagtttttcagaggtacaacattagtaaatcagacctggatgatttctttggcgggccagcatttcttgcatggtctcggatggccaatatgcatggatggggcggacctcttcctcaaagctggcttgatgatcagctagctcttcagaagaaaatcctttctaggatgtatgcttttggcatgttcccagttcttccagccttttctggtaacatcccggccgcactaagagcaaaatttccttcagctaaagttactcaccttgggaactgttgacagcaaccccaggtggtgttgcacatatcttctggatgcatctgatcccttatttgtagaaattgggaagctttttattgaagaacaaatcagaggtataatgcatgatttccactacttaattaatggtgcttcagtatcagacctaaagtcgtgttttagttctgaaactaaattcctaactagaaaagttcacagcagatattcctaagtttcactatttttcactggttgtatttctaacttgtgtatttttgtgctgagaataactgaattgtttgtgataattattcgagggtacaaacgaattaattaaatattacaaagttgaaaaatggattttaaacagctttctaagaaattcatatatagaaagtatctgcaaaaatcacacagtttaggagcttgggaagcgtgcgcatttatcccccattctattccttagaggaacacaccgtaaccaatcagttttgtttaatccacaagtgttggtttttcatttaagtagagagtagtagtcatcagcacaagtgttgatgtgcagtattcacctattattcattgaataacttgtttcattaatcccttccacgacattttatattccatggtaaaatcagaagaataacacaaaattgttaatattaacatgtacgagaggttctcttgttctttgcagaatatggtgggacaagtcatgtgtacagctggtatggtttctataatctgcattattagtgattcccattttatgcatgccaatttttattttgatgacatcttcaatccatctagtgatacttttgatgagaacacccctccgctaagcgatccaaattatatctcttcgttgggtgctgcaacattccggggaatgcaaagcggtgatgatgatgctatttggttaatgcaaggttggttgttttcttatgatcctttctgggaacccccacaaatgaaggcaccgctgcattctgttccagttggccgaatgattgttcttgatctatatgcagaagtgaaaccaatatggatcaactctgatcagttttatggtgtcccttacatctggtgcatgcttcataattttgctgcggactttgaaatgtacggtgttttggatatggttgcttctgggccgattgatgctcgactaagtgcgaactctacaatggttggagttggcatgtctatggaaggtattgagcaaaatcctattgtttatgacctgatgtcggaaatggcctttcatcacagacaagtggatctacaggtgtgggttgagacatatccaacaagaagatatgggaagtcaatggtggggctgcaagatgcttggaaaattttataccaaactctttataattgcacagatggtaaaaatgacaaaaatagggatgtgatagtggcattcccagatgttgaaccttttgttattcaaacaccaggattgtatacaagtagtagcaaaacgtattcgacaaagttatctaagaattacattgcagtggatgcatccaatgatgaatatgaacatccacatctatggtatgacaccgatgctgttatacgtgccctagagctttttcttcgatatggagatgaagtatctgacagcaataccttcaggtatgaccttgtggatttaactcgtcaaactctggctaaatatgccaaccaggtctttgtaaagatcattgaaagctacaaatcaaacaacgtgaaccaagtgagcaatctctgtcagcacttcattgaccttgttaatgacctagacacactgttggcctcccatgagggatttcttcttggcccttggttggaaagtgccaagggtcttgccagagataaagagcaagaaatgcagtatgagtggaatgctcgaacacaaattacgatgtggtttgacaacaccaaaacgaaagctagcctgcttcgtgattatgcaaataaatactggagcggcctgctgcgagactactatggaccaagggctgccatctacttcaagtacttaatattgagcatggagaaaaaagaaccttttgctctggaggaatggaggagggaatggattagcctcacaaacaactggcagagcgattggaaggtctttccaaccacagctacgggagacgctctgaacatctcccggacactttacaagaagtacctgcacgacgctgacttaattcagccagaaggtattatacgactgcgaaatttgaagaatacaccttggtaaatgaactggggttgttgcagctgtaatgccttctttttcatgaacatgaaacgaaacagtgtcgtcgatactagtctatttctatttgtactgtatccgtatttggcatggctgagacggtaaatccgctgtacctactacgctgaacatgtttctgcaggctcggtatacatgatattcagatttttgt

SEQ ID NO: 7354 - DNA, 3054 bp, Oryza sativa
  ref <308>: DATABASE ACCESSION NUMBER: AK064481
  ref <309>: DATABASE ENTRY DATE: 2001-12-06
tatgcaacagatttattttataatactgaagatgtgcgttccattcttggtagtgtggcaccatatgctgtacctcaggtatgcagcagatcacttgggaaagatattggattcaaaataaaggtatcacatagtgatgctttgatgatcctcaaatcctggattgcttcacagacttcttttagtgcaagtatggaccagatgtgcaaattctacacctttgtgtcagaaggttttgccactgcaacgattgacattaaacgggagtttttgtcttgctcctctatatttacaccattaaaccgtgctcgatctaatgattttgttcctggaaaattcttgtccccaaaagatctgtattggcatgacccaacaggctgttctgaaataataacagagaaagtcatttcaatgaagaataagattagtatgttcccaagaaagatgctatcttcagcctatcccagcctttgcgaattctttactgaggcatgtggtgtaccaaaggttcccaagacatctgactatgttgatatacttttagggctgtcgaatgctgcattaccttcagaagtagccaatcaggtctttcatgtgtttgcgaggtgggctaatgatctccattctgcaaatgacaatatgaatgatatattgttcttggaaggatctcttcaaaagttggagacaacaatactgccaaccttgggtgataaatgggtctctctccatccttcttttggccttgtttgctgggtagatgataatgagttgatgcaacactttgaggactacaatggtgttaacttcatacaatttggagaactttcttatgaagacaagcaactgctgtatggaagaattgctgcattgctaaaaagcctaggcatccctgcactttctaaggttatttatcgtgaagcaatattttacggtacagtggataacagagaaaaggttacagtaatttcttggctattaccatatatgcaacgctacatctataagatgcatagagatacatatgtaaactttcaacaaaatgaaatcacgaagcttagcaatctccaagttattgttgttgagaagttattccacaagtataagctgaaagaacgtgagagttcttgtaagagaagattcaaatgcaattgcctattgcaggttagtatctacctttctattaactacctgctcttcatttgtttcttattcttataagaaagagaacttctggagaagccctttttgctagaattccacccacaaacaattgtatttcaagttctgattattttgatttatttttttccacatgtggaggcctgtagggtagcattatttatcgacctccttaccttctaagcttcatgccttttgaactttatgctatgcaaatgcatgcataatgtactcattactcaacagtaaaattttactctgataaagtcagctctgatttcccaaatccatttgttatgttccttatttccagggaaataatctatatgctacgcaagaagctgattcacattcactgtttctggaactgtctagacttttctttgatggatcccctgatctgcactttgcgaactttctgcacatggtcaaaaccatggcagattctggcaccacagctgaacaaatagagtcttttatcgttaataatcagaatgtgcctgatttgcctgagcatgaagctgtttggtccttttcttccttgatcatagcagaccaagatgttgattgccaaagaactgagttccaatctatatgtgacagtcagaaaactgaaatccgatctacatgtgaactcaatatttccaagcatcagagaacgtctggagttgcttcaagttggccaccaaacgactggaaaacagccccagatttcataacatctcacaatagccagtttacacccaatcaagagacaaacttgaacaatgttgtaccttcgttagacttaaccaagactcagtgtgaaaactcagaagatattgtgggtcctgttgatcttgaaggggattggattacagaagatgattttggatcagaaaatacagtacttgcagaacgtataggggcaactggcgatgagcctcatatggtgatgtcgattaactctgccaatttgccggcttatttggatttagaaaccggaagctcagcaaactcagtggtggatattgagctaacagaattcaatgataaactggcaaatgtttcggagaagagggataggctctgcataaaggctccagacagagacaaattattgagaattggcaagcaaggggaagctgcagcccaccaacattttgttgatcattttggatccaataatgtcaggtgggtgaatcaagaaaatgaaacggggttgccttatgacattgttgtcacacacaaatcgggtttcacagaatatgtggaggtgaaggcaacaacaaattcatacaaaaattggttctacattacattgagggaatggcagtttgcattagaaaaaggcaatgcctttaccattgctcgtgttgttctgaaggattcaaagaaagcaaatgacaaatcaaatgttctcattttgaagaatccatacaaactttgcctgaacaaatcagtgtatcttgccctcataataccacagcaatatcaaacaaaacgccgttactttgaaggtaactcggatttgcaaagtgaggtaaaccattgagatctgcaactttggctaagcctttactcaataggaagggaggttgtggggattttgccactgcacctttacttcaataggtacaatctgacatacgctatatcagttttgtttggctccatatttaccaacatagggttttccatagtaagctcattctatgctttctggatatactacttgtcgcgatggttctcggccatgtcataggacatcacctcgtctaacttgtaattttagctgttgtaactattcatccaactttgtggcctcggttttcagttcgaggttcttgatacatgaacgtgcctgatcataatgaaaagtcccattgcaattgt

SEQ ID NO: 7355 - DNA, 1476 bp, Oryza sativa
  ref <308>: DATABASE ACCESSION NUMBER: AK064482
  ref <309>: DATABASE ENTRY DATE: 2001-12-06
taattttatgcagaggaagaggagagacgacgacggagagcctgccaagagatcgatgggaaggcgttgcggcggcggcggaggcggccatggttggcagctcggcctgtactactgcctggtggtcgcgtgttcatgtgttgtagcaactcaggctcaggctcaccaggcaccgagaactgatcctgtcgaaggtatatgctatgtactaccccatcccataatgttttgatctaaccaacatcataaaaaaagaaatggagagatatgtacatacaagtgctgcaaacatgtcagcttctctcttcttttttttttttgtttctttgagtcttcagagagatgggaacagatcagagacgtgttttgatgtttgttttcttgttttgtcttttcgccggaacggagactgaacgcttatcgattcattaagattaaaaaacaaattagctgagaataaagcgcctgctaccaggcagaaaagcagaggccgccgcgtttgatgtttgtttcttgcgtctagcagtttgaagacagattctcctagacaagtttaaagacaaattagcaccgcagagttgatcctgttagcttgttaattataatcttcttttcggtgatagtagaattcttttcttcttggctgtttcttgtcccttctttcaattatttttttggaccaaattccagaagatacctcctttttctcattgaaaaaataaagaatcatcttttttccctcttcaaggaaaggtcacttaaccctgcttctattgaaagcagagctagccagatcgatagtttcatgattttcttctactctataacgtactaatgcattacacacagttccggaagaaaattttggacgacaaagttccattattatataagggtttaaaataccacccccctcccccacacacactattatttcggtcaaaattttggccatattggtgcccaaaactatagattaaactctattatgaaggcgatgaacaacttgtgtattttagtactagtacaccttttccactgtaagtgactaaaacatgtcctattatttcacttatagttgattataagccgtaacattaaaaagaatattttgtgaatattacttttgtatactagaaaaaatgttcatgtgtcgtaaaggaataaaaataatattatgaagattatgcgttacgtatttaaagaaaaagcttgttgtgacctgcctccttgaaccgtgttggaaccataacacaagccggaaacaccgactcttgttgcgtgccttacctgcagaacaaatgaacagaaaattagaaaacatacccaacaccaaatgcattatctcgtataagcataaaacaaattatgtattctaattgattcgattggcgtaatggcattctcaacagcttgaacccttcgaaatcactaagaataaccccccaatcggtcaggcacaacacggttgaatcc

SEQ ID NO: 7356 - DNA, 1591 bp, Oryza sativa
  ref <308>: DATABASE ACCESSION NUMBER: AK064483
  ref <309>: DATABASE ENTRY DATE: 2001-12-06
aataaaaggggcttatggtcttcatccactccatcccaagaactacatcatatgttcccaaatctatcaccctcaagtctacctgaaatgaatgaccttgcaattccagtttgaccccgacacactttccttcactgcacactttcaaacaaaagcttcacttaggttcttatcttagattccctttatacggagtctagaccttttcttcttttacttcacacacaaaaaagaaatattgaagaatatataatatattagaataaatgggcaatagttaggagaggtgcgccagaaggtaaggtggacagaccagaagagtaggggtgcttccgatatcaccatgatcggtaatggaacgctacgcccttgctttctttatgcctcaagggtaattgaatgaattgaggtttagtaaaattcgattgatcagaaaggaaggggaagctggtgaataacttaacccatcctcgctggctggagttagagctttcttaggttaggaatccacataagaaagaaattctcatcgttgaccacgagccattctagacagtgcggacgggaaagcactttttaatggttttggtagttcaatttcagtaaattagccaaggcataaggtatgtttagacgaatcggccctatttatcactcttgctaccagttgcatagaacctatcataagccgttgtaaacaaaggattttcctattaataattgggccaacctaccaaatagtagggtttttcgcacggtacgggagtaggtctctccatctaggaaaagcaaaagctggacgatcgagagaaagtaggctcatattccggttcaagtacaagtagaggatcacgcccaagcctacatagttccattccaacctccgagggtctcaagaaatcgacaagaaagcaaagtaatcggaattcttaacttcgctgatccaacaacaccagttcctcgatcttgagagtatttcagtactggtacttcggaatctggagcaagcaggtttcattcctggtaaaggtgattggtcggtactcccctctgccaacccacgagctaaaggaaaaggaaagaggagaaggaagtagacaaaagtcgtgatttcttcattaccggagccttctcgggtagtctacttatgacatggctcgttcagagggctcttcgcgctgtcttcaatattactatttctccaaaccaaccagtagtagaaattaagaaatggtaagatttgagactatgaaagacccgtttgtttaccaattcgtcaactataaagaatttgttacgaaatgaatgagcaaaccagcagaaccaagaaatgggagggatggggtttaaggatttgaattatttaacctcctagcgagacaagcgtggagaatgctgcaagaacaagaaagtttgagcgcaagggtgcgaaatgtatttccctgatgaagacttcctaagagcagacttggttcaactgtattgatgtacagaatcagcggatcttgcttgtgtcacaagagtgttgtcctctatatttacgtaataaaaggagatccctctggccaaaccgttctacattcttatatct

SEQ ID NO: 7357 - DNA, 1704 bp, Oryza sativa
  ref <308>: DATABASE ACCESSION NUMBER: AK064484
  ref <309>: DATABASE ENTRY DATE: 2001-12-06
ttattagtttagagctccagcgattgtttccgtcaatacctctggtggcagaagaggattcagcttttctgaggtcatccaatactgatgataacagtagtaatgttcttgttgagtcaatttcaagtgctgttgcagaaaaagtgagtaacgccaattcacttttaactcatgatgatgtgctgagagctattgatagaggaggcaagaatgctgtatcctttgattcaaatcctgctagttattgggtacttgatccaattgatggcacaaaaggtttcttgggaggggacgatgctctgtatgtggtggggctggctcttgtggtaaatgaaaaggtagtagcaggagtgatgggatgtcctaattggtctaatgctaccatagccagcagaaaagaagacagcgctgctgcccaacctgatcatgggatccttatgattgctcatgtgggctgtggaacttggtctaggcatttgtctgtcgatattggccagttcactacggcacagagcacttggaatagatgcctagtggattcttgttcagttgtgaacatggcacgcttttgcattcctgatagccaaacctggaatatgataccgctatctgttctcttcaactcaacaatggatgaatccaatcctagagatgagaatgaaattctcctcttatctgtttactgtggcagcttgtgcaagtacctaactgtagcttctgggagagcctccgtttttgtacttcgagcacggacgaaaaatctcaagtcttgggatcatgctgtcggagtaatttgtgtacaggaagctggaggtcagattagtgactggagtgggaaaccgttggatcttgcagctgacctaactgggcgcagagacatttacccttcaggtggtgttctcgtcaccaacggtgctctgcacggcaagctggttgaaatgatctcagcaaatcacaagtagcggcaaattttgcataactgcgcacataacacagatttttcttttgttaacattttacctcatcaaccatcaaaatgtatttggtctctcgttcgggagagaaaccttgcaaacatgttcagattacttccagtatcattacaacatacaacacaacagatatacatgacagaaggcattgttccccaatgaacaatagtacctgattacctgaagatacatgcaaatatgttgctggtctaagtcatccaacaccaaattgcttgcagaattatacaatcttttgccttcacaatgtgtgaatctgttgcataatcctgaaagtttgcatggttgcatagcatccacacacacctgaagcttgtgaggaggagaaaacttggaccaatctgacagcagtgcaccatgcagtgaatcaggatgctttcggtttggccaccaattcaagccgaagaaaaggacacccaaaaggtctgcatctttgcctctttggctccatttcaagataacgaccttcatgtcctaatgcaagaattggcagcttctaatcatgattagcccaacaaattccatgatcagcacgcactttactgcttgcttacatcctgaagatcttgctctccattgacacgtcctccagctacgaatttcagtagatggcctgtagttggattcttgttgtaatctatattgactttttttttcttaagcattaataagagctactgatctactcgagaac

SEQ ID NO: 7358 - DNA, 1139 bp, Oryza sativa
  ref <308>: DATABASE ACCESSION NUMBER: AK064485
  ref <309>: DATABASE ENTRY DATE: 2001-12-06
catctttactaaagaagatggtaaaattttagataagcgtgtcacagaccttcagttggaagacttcctgctatatggcccacaaaatgagcagggaaagggtggaaaacccttgctacggaaactgaaagatggtcggatagtgaattggaatgtgcagtcagatgaccctctttgcacacttcaagaagctttcgagaaggtcaatcctagattgggcttcaatattgagctcaaatttgatgacaatcttgaataccaggaggaagagctcacttgtatcctccaggccatcctgaaggttgtttttgagtatgccaaggatcggcctattattttctctagcttccagcctgacgctgcacaggttatgcgaaaattgcaaagcacataccctgtttactttttgactaatggaggcacagaaatctacgctgacgttaggaggaactcattggaagaggccatcaagctatgcctcgccagcggcatgcaaggaatcgtgtcggaggcacgaggaattttcaggcaccccgctgctgtaccaaagatcaaagaggctaacctctccctactgacttatggaacactgaacaacgtaccggaggcggtgtacatgcaacatctgatgggggtgaacggtgtgatcgtcgacctagtgcaggagatcaccgaggccgtctctgagctcatcaccgtcccggagcctgacctgaacgccgataatttgagcaatggggcagcaaaagacgccgcaacgccacatttctcgcagtgtgaaatctcattcttgctgaggctcatccctgagcttgtgcaataatcgatccagttgccttgctggtctgcagactttagtgactgatctgtatacaggaagaagaggagagaccccttgtggagggttacaagtttacaaaacttttaaataggttgatgtactagagctaagccctggtcctgttttttaatttgccctggggacgtttggattcatgatggatcatggatgatgcatcctgtagcaaggagttgaaacagttgttgttactgttgtatctgtaagactgtaacgacgacctatttgggtggagttgaattgcaatgcggaatttggcaaaaaaaaaaaaaaaaaaaag

SEQ ID NO: 7359 - DNA, 1738 bp, Oryza sativa
  ref <308>: DATABASE ACCESSION NUMBER: AK064486
  ref <309>: DATABASE ENTRY DATE: 2001-12-06
gagaaaggaaacaccggaaacaaacttggaaaataatattttaaataaatgtctaactcgacggttatatttttagagaaccaaagcaaactaattcggttttaaaaagttgtcaaattttagggctgttacacccttcattgatgaaatgttggaacgactggcaaatcattcctttttctgtttccttgatgggtattcctggtatcatcaaatttctatccatccggaggaccaaagtaaggctacattcacttgtccgtacagtacctatgcgtatcgtaggatgtccttcgcactgtgcaacgctcctgcatcccttcaaaggtgtatgatgtctattttcttggacatgatcgaggacattatggaagtcttcatggatgatttctctgtctacggaaataccttcggtcattgtctgcagaatttaaacaaagtcttacaacgataccaagagaaggatcttgtacttaattgggaaaagtgccatttcatggtctatgaagggatagttcttggtcatcgagtgtccgaacgatgaatcaaagttgatcgtgccaaaatcgatgtaatagattagcttcctcctcctatgaacattaaggggatccgcagtttcttgggacatgccggcttttatagaaggttcatcaaggacttctctacaatcacccgacctctgaccaacctcttagctaaggatgctccctttgagtttgatgacgcgtgcctaaaatcctttgaaattctcaaaaaggcactcgtctctgctccaatcattcaacctcccgattggactctgcccttcgagattatgtgtgatgcaagcgatttcgatgttggtgtggtcctgggccaaatcaaggacaaaaagtatcatgcaatctgctacactagcaaaactctaaccggagctcagttgaattatgcaactactaaaaaaaatgctcgcggttgtttttgctatcgataagtttagatcttacttggtgggagctaaggtgatagtttatactgatcatgttgttctaaagtacctgctcactaagaaagatgctaaaccacgtctcttaagatggattttgctgctccaagaatttgatttagaaattaaggataaaaagggagtagaaaattccgtagcggatcatttgtctaggctgcaaatcactgacacgcaggaacaactgataaatgatttcttgagaaatgatatgttgatgacgatttgcgactctaacccgtggtatgccaacttagtgaactacatggtatccaaatacataccaccgggagaaaattaatggaagctgaaatatgagagccgctgtcatatatgggatgagccatacctatatagggtctgctctggtggcttactaagaagatgcgtgccgactgaagagggacttaagattatagaacgatgccatgcctcaccttatggtggccattatggtgcattccgcacccatgccaagatttgacaatgtggtttcttctagccaacaatgtacgaagattcaaaagaatttgtcagaagatgcccaaactgctagaggcaaggaggaatcactgcttgcgatgcaatgcccctcacatacaacctgcaagttgagatattcgatgtttggggtattgacttcatgggacctttccctaagtcccgtgtcacgccctgataaatccatcccaaattaaaaatcattctctaaaagaaataatataattaatt

SEQ ID NO: 7360 - DNA, 2436 bp, Oryza sativa
  ref <308>: DATABASE ACCESSION NUMBER: AK064487
  ref <309>: DATABASE ENTRY DATE: 2001-12-06
tcaagaaagacctaataagcacatatcgcttgaaaagataggagaacagtatgtaagcgagctattgggaatgtcctttcttcaatattcaagtcttgtccctgattacacgggactacgggaggatgctaagtgttctatggtactcagcatgcatgatttgatgcatgatcttgctagatgtgttatgggtgatgagctacttctaatggataatggaaaggaatacaactctggagaaggcaattgtcggtatgcattactaatcaattgtgtcgggcaaacaaagttctcctattcatctactaaattaagagctatgcgttttttcaactgtgatggaattcagctacccttatttacaaaatctttgcgtgtcttggacataagtaagtgttcttgtggaaaattaccttcatctattgggaaattgaagcaattgaagttccttagtgctactggcatgcaacataaaacaattcccaagcatgttatgaaactttcaaaacttatttatttgaacataaatgggtctttgaacatttcaacattgccaacatcagtgaacaaactgagatgcttgctacacctggacctatctggttgtagtaacctttgttcattgccaaactcattcggtgacctgacaaatctcttgcatttgaacctagcaaattgttatgatcttcatagtttgcccaagtcttttcataggctaggtgaactccagtatctaaacttgtcacgctgtttatcattaaatttaatggttgacatcaatgctgtgtgctgccttacaaagctacagtacttaaacctgtctcgttgctcaagtctcatccacctacctgaaacaattaggggtctaaaagatctccacactttagatatctcaggatgtcaatggatagagatatttccgaaaagcatttgtgagatcaccagcctcaaatttctgctaatacaaggatgctcaccctggttagagaagcgtgtgagggagtctcagttcaagaatgatatgctagcattgcccaagtttattgttcaaagagcagcttttggcatgtgtagcaatatttcgcggcttcaatctgtacatcctgctgagctagaaattgaatgccttgagaatgtaacaagtatcggagaagtggatgttgtaaacttgacgtataaatcagcactatcaaaattggcattggcatggactcctgcagctgagcgttttgtggaggatgaagatttgctgcggaagttacaacctcctgacactctaaaagttctccagatacaaggctacatggcgacatcatttgctagctggatgatgaacttggcatcacgtctgccttatctagtccgaattgagatggtagatttaccaaggtgtgaatatttaccaccatttggtcaattacaacatctggaactgttgattcttaggagaatccttagcctcaggaaactgggaggagaaatttgtggtggtaatggagcattcaggaaattgagggaatttacattggtaaagatggataacctaaatgagtggatcaccaaagtatcggctaatggtgaattcatgttccccagtcttcacaagctggaaatttctcagtgtcctattttaaggttaaatccatgccttcctagagctcttgaatggagaatagaagcaagcgatcaaattatagcagatttctatcacacaggctcgtcatcgtctttggtactatcgaaaatgcatattagaagctgccgcctgctgcccaatgactggaaactgcttcagttccttcctgatcttcaggtgttggaacttacacactgttggttttacgaattgccaaagagcattgggtacctgacgacactccgatcactgcggatagatggctgcgatagcatgacgaaactatcaaaatggttggtcagtctgtcattgctacatgaattaattattactggttgtttgaatctggtatatttgccggcatttgtacaaaagcttagtgccttggagaaattggaaattaatgataatgatgcactgcagagatggtgcagaaacagcgacagctggatctcagagaatggcataaaaaacaagatttattttgatggtaagttgatgagtactaagaagcaagaggacacagcagacattgacagaactgacgtccgtgattacagaaatccatgcgatgaagatgaatatgtagactgttttgcgatgctcgaacttggtgagtcgtcacggatggggcgatgaacccgtcgagaagtgttctgcaacagttgtttgtatctgatagagatttgtcttgtgagggtttatattaccggttgaccactaaatttcgagcctcatcggtatcatgttttttgataaattttgatcggtttcggataaatttcgactgaatttcgacc

SEQ ID NO: 7361 - DNA, 1852 bp, Oryza sativa
  ref <308>: DATABASE ACCESSION NUMBER: AK064488
  ref <309>: DATABASE ENTRY DATE: 2001-12-06
cagatggttgctcaaaatattgagccacagcaaatgcactatgcttgcatggttgatcttcttgggcgtgctggacaactgtctaaatgtgctgaaattatcagagacatgccttttcctgcaaattccgatgtttggggagcattgcttggggcttgccgtatacatggaaatatcgaattagcacaatgggcagcagagcatttgtttgaattgaagccagagcattcaggctactatactcttatgataaacatgtatgctgagactgggagatggaatgaagcaaacaagatcaggaaattaatgaaatcgaggaaagtacagaaaaatccagcctatagctgggtacaggatcaggatggcaacaagttgcaagcttttcttgtgggggatgggtaacagatggtgcacctctgtggtggtacaaaacttttcacctgtaacaaattcgataaagcaacagagtatggcaaatggtcccatactgataggtgtcacactgtcaccgtattaacaaaatctcgcactactgtaaataaggattacagtggcatgcaggcataactagttcagtaatcatcagctgcatattagaaattttgcggcttgacctgacagcaatcagcattaagatgagtatatatcagtctattatgtctgtcaattaggtatatttggtcatagactctgtcccggaaatggatgaaatggtgagcctctgtttttgtatcgacatattttgcagagcaatgttttcattctactaagacatcacttcttgataacttgtctttctacagagatagattggagtagttctgacttctgaaatccatactcaaccttctcgaccatacagggccatcatatttatgtacgggtaaagtttaccttatgctagctcttcaaatttgcagttaggatgaccaaaaagtgaaaactataacttccaatatttatctagtgtgccgagatgttatcatgttaatctgtatctggatagtatctatatgataagttacaaattgacaaatttggcaaaagtattataactacgatatggatctgtacattctttcgtggaatctatatttgttctattctatattttattttacttttatctgtatggctgtgtcctgtttcaaaaaaaaaagaaggcagtacttctactccacagttttgggttgttccatgctttgaattgacttcagcatcaacagggtgacaaactgacatcacaattgcagtggtgaaagagaggtccagctttccaggctataatgctccaaagttcatgtttgccacaaccatattctggattcttctgctaaagaagatgttctacagtgagagagcaattcttgaaagttgaactttggtgacgatggagcacggctggggcctactctggagtttaaactatcttaaggcttgaactacactcatgttggattatgcaaattgattggggtgctgtgatgcatgcaagtcctgaagataacttgccagcaaaagaaatcaactcagattgctgaccatggcaaccactcaatgcaagcttcttttggattttccctcggtcttaggcacctaatgttgatgcttcagaaggcagtgcatttttcaaagacattatttcctcttgtaaatcgagtgagggccaagtcctgcaagatgtaaatttatacttggacgcaagtgtgtagatcttctattctctggacacagtatttgtattccatttgctacggttgtttttatttatgtttggcaccattttattttcttctcatgatccatgtaatagtttgaattctatttgaacaggagctcgatttctttacac

SEQ ID NO: 7362 - DNA, 1942 bp, Oryza sativa
  ref <308>: DATABASE ACCESSION NUMBER: AK064489
  ref <309>: DATABASE ENTRY DATE: 2001-12-06
aatgcatttcatcgaacaccttgcgatcaccctctcaccaccgctagagatcaccattgtgaggctccccggccggagctggacgttggagggagtggaggaagagccgtgctgccgccgtcgccatgggggaagccgggtagccgctagacatcaagaaacgccgtcgagcaccttacgtcgccgccgtctgcccctgtcctgtaccgcgtcgagctccacttcgctgcgtttcgccgtctcgccgtctcgcggagtacgtattgatgaaatctgatcccccaattgctcaacgccgatctcctcgccagcacaccgttcagggaagtggagggccgacaatcaggtcagacccgcaacctcaaacctccaaaccggctgggcagacaggttctcgcaagagaaagctggtgcttaatgacgacgaaggcgatgacagcaacaaatctggggacaagggcacgcccaataaactcccaaagcataccatgcccaggaaaaaactggctggccgtcaaatgccaaagattagaacatcttccaggaaaccgtctgatatagatccaactagaaaaaatcctgatccgactgccacagagtcaaatttatccaaagatgctgatccgactgccgaaaaccagtcgactgccgaaagtcagccgactggcgcccatgcttcggatgacaaggccaatccgagtgaccagccgccgactggaaaccagtcggcagctactgaaactgcaacaacccaagagcccccgactggaaaccagtcggatgtgggtctaaatcaagagattcctgaagctgaagcacaggcgacaacttctcaaggaccaaaagctggtaatgactcggtgattgggtctccggataaagagcaaagatcacctcacgctcagctaggcgcatcctcaggtccattaggtggcgacgaagaagaaattctccgcataaaggcagctgatgactctcgtcctcctatcttactcaagtggtgggacgagaactctcaagtttccggcattgtcataaatcgccaaaaagaagatgaggaagtgtgccagctgaagaaagtacttggagaagctactcgcattgtgaatagaatccatcttcgcaatgaggccaagactacaaccttagaaaagctggttccacatttgggaactcttgaagccgttagggaacagctacatgaggccaaggagcacgcaaaaaagacggagaaagaattaagggagcgaattgctcagctccaggattcaaacttcgagctgagtggttcatcaaaagcgcaagccaccagaatggctcagatggagaaacaaattgaagccttgaaaagagacaaggtagaactggctgcggaaagggactcagccttgaaggaggttgaagaccgtaaaatcaaatctcaagctcagtttgatgtcctggttggtaagatcaagaagcttgaaggagcaagagacgaagtcgccaatgtcgctacaccactcgtccaagctatgttccttaataacagtggtccgagtgcacttgacgcaaccgaaatctttgacaagctgagagttgcaccggatgtatatttcaagaatatcaagaaagctggaagtatgggagctagtatggcattggcgatgactaaatccttgtacccgaggattgaaattgataccattgatggctttgcagacgggacaagtgaagaagctgctcttgatcttatcagtaatgctcaaagtgcggctgacaagattgcaagtgatgttgtagagcaattccgcaacaacgaccttcagccgagcaataataactctgatgatgaaaggactgattctgactgagtgtaaatgtagcaaatggaggcttaatttgtacaatactggtgtatttatgctgtgcttgatagttctaaccaagtctttgatttctt

SEQ ID NO: 7363 - DNA, 1487 bp, Oryza sativa
  ref <308>: DATABASE ACCESSION NUMBER: AK064490
  ref <309>: DATABASE ENTRY DATE: 2001-12-06
actgctcgccaagtccaagaaagggaaacaaaaaaaaaggggggaggagagacgaagagagagacaagaacaagaaagggcaaaggcaggggaagaaagcagcgaaaggattcaacgcagctcgcgaaggccgcgatccgccgcctcgcctatccttcttgacagccgaccttggggcggatttaccgaacatatttgatcgttctttgctggagtttatcaatggcagcgggggtcacttttaactggattaaaaccccacttgacatccggagatttcatgacttttctagtttaagttttcgatgccgaaatacttttggatcaatccaaccttcctggctgacaacagaccaggaaccatctttttccaaagttcgagtggctgcagattactcagattctgttccagattcaaagtacacaagagatcggggttaccatcctcttgaagaagttaaagaacgtccaaaaaagaaggacctgtcactgacagatgtggaaactgctagaactgtagtagaggtaccctggtgcatctatacatttgtttagttactgatgcatgtaaatcgttataattttgcataggaatgacttacaagattcctcaatcactcaaccttaggctgagtaaatatctgtaaactgtaaaagttaagcaataaaaaattattcctgttgtaaaacaattaaactggtgatcttaccttgtgtatcgaatccctatcatactctggataacttttctatcttgtctaggccaatagcaagggattacttgtgttccctgcaagagtgcataatgaacctcatgggcatgttgcttggtcagactttcagtatattgtagatgactatggagacattttctttcaagtacccgacagtgagaacatcttggaagatgatgctgcaaacaatcctgtgacagttttgattggaatggatggccctattattggagaaactagtgtggtgactagtgattttagcgactacatggatgttgaaaattttatagacatgcctgatgagaacgacagcaaggtttgccaaataaatcatcgcctgctttcagttggttttatgacaagttttctatcagcaacaattactgtcattagttgttgatatttcctttgtgatatgtcgcagatcgatacagaattaactgacattcttatagagtgggggatgccagcaacaatgcgtgcaatacatccaatttattttgcgaagtgtttgacaaaggtaaaccgtcaaaagttattgcaagcatcagcaaccattgaaatagtggagcagatgaaaactttaactaggataactttcataaatgtattggcaatgtgaacaatgaatatactgtgagtgattagttaattccaacctacatcatattcttagaaataatgttgtgaagggtgcaaagtctttatcttctggtaacaaaagtaagagcctggatctcaacttgatacttc

SEQ ID NO: 7364 - DNA, 1714 bp, Oryza sativa
  ref <308>: DATABASE ACCESSION NUMBER: AK064491
  ref <309>: DATABASE ENTRY DATE: 2001-12-06
acgttctttccagtgccgccgcttcctaggcagcgccggcgacgccgccactctccctagcgccggctaccgcgccccactccggcgacccctcaagcagatgtcccgcagccgcgaatcggtttcttggctccacgcttctctgcccctaagctaaacctaacttccaacctcctcaatcctaaatgcagccgccggcaaaactccggcgaggtaaggattcagaggaagttcccaggcccctaccgctgctaccacttcgattcctcccttctatctccttttccctgatctctagtgtgttatactggtaaggtgttctttcccttatgatttatggttgtgatgcactgatgatacttggagactaatcctaatgatcaacttgatgactctatgctattgattgtatttactagttttagggttctagatcaattcatttgctagattggatgatgcctgtatgcccatgatgaatgaatgctcatatgaatatatcttatgaaaatgcaggactgaaattaaaagcacactaacatgatcaagtccctatggatattactgcttcctgataattcgtaagctactactaattttgcacttaaactgaaaaaaatgaagatttacatatgcacattttacacatataaatcccatagaattagtaaactcatgcattgtttatccttgatattactagtgtccagattttcatctctatatgcttgtgtgattaataaccaaatttatacattatttaattacagtggttgatgaggacatggattaagctattggtcaactaattatatacatatccacttgattcagatgctatgctctaacctcttctctagattattttctgtaagaacctatggttttctgtttggtatccttaattgctcagttctattctttttactaaaacctgctgctacatgatcttctatattttaatctgaaataccagtgcttcctgaacttggtattatatataaatgaatgtttcaccctaaatccaattatatggtgattctatacaatctaaaatatatactactgtttactaattgaactagcctaattgatagagttgttatggtccttatgtttcttgataaattgaatatgtgctagggttcagatactaatttccaagtccatggctaaatctaaaatctgattttatctatatgtcaagaatatcaatatttgtactatgaataaagatctgcagttactaaatttgataaagacataagactgatgatatctttatatacattctactgtttcttgatttatcacctgagcacctgtttatctatagtaaaattttagttacacaaaccgttctgaagatcaaactattaatgtgaatattttactgaatcagagatgttctggttcagcttctaatggatgcaaatgcaacacccaaggcctacacatactagtatatgcacagatcaacatagctgccatctcctgaggttcatttttcaggtttaatgcatataactaaattaccttatttgatggttctactgtggctgtggaagactaatgaccgtgtgactctcctctggttctacagcttcttttgaaattggtcagggtgttgctcctcctcttgtttactgctgcccttccggatctgctacttgtttctcctctttaaattgaaaccccttgctcttcttgaaac

SEQ ID NO: 7365 - DNA, 959 bp, Oryza sativa
  ref <308>: DATABASE ACCESSION NUMBER: AK064492
  ref <309>: DATABASE ENTRY DATE: 2001-12-06
aaaccctctccccacctgcatcccctctcctccacggcggcggcggacaccaccgcacaatgaggagctcccctgcggcgagtggcaccacgccgtcgaacatggacagcgggagcgaatctgacagcgcccccgaggagctcaccgccgtccagggggttgagaagcacgacgagatcagtaaagttgagaaggacagtgccatcagagtatcgcagcaggagaaagagcggaggagaaggtgggcccaacgaagaacatcctcaaaaccagataaaaaggagcctctggaggtagaagataaagacatcaaacagaaggcagagaatgaagaagatgaggagagcgaggagacccatactatgcctggcatgctccctaccaatgttatcgaaatgcttgcagcacgtgagaagcaaaccttctcatctgactccgaggaagagataacaaatcagaaggttcagaaaaggaagaagcggttgaaatcttccgggcctgaaacaattctgttgaaagacgttcgctcgacacagcatgtgaagaatgcccttgctttcctggagcaaaggaaaaaccaggtgccaagatccaatgcagttttaaagaacgcgaacaaagctttgcgcctcctttcatcgaagggcaattttttgagttgaatatggtaattgcgagagcaaaggattttctcaatttgctgttaggtatgtgcttcggaagacattatgtttcagagggatggtcttttttgtgcttttatttgagatgaattggctttcacatcccaggcgcacaacgggcatatcgatgagcatgaaactgtacaatacgaatgtttgcaaatgtaatatgtatggtgcgtcagtatttgacaattctttgggcatgagtaatttcttatatggaatattattgttcattacttctttgctaaagaaaatgggaattgttcagtt

SEQ ID NO: 7366 - DNA, 1576 bp, Oryza sativa
  ref <308>: DATABASE ACCESSION NUMBER: AK064493
  ref <309>: DATABASE ENTRY DATE: 2001-12-06
aaatttgttgcaggtatggcaagcctggttggcattgacttcagtgccaagatccttgcttctcttgcaaagttgtttgaggatgagtactcaaaagaagatggtctatctctgaggaatcttactttactgctctgttatttgtgcatatttgatgtcatttcaagtgatcttgtatatgatctgctatcagtgctgagcaagcgcttgacagagctggatgtctcgactgtattgaccatcctacagtgctgtggaatgaagctacgtggagatgaccccagtgcaatgaaagactttgttctcagtattcagaactctgtaaaccagttgaaactgaaagcgcacccagctggtcaagataatggacaagcagagatgcatagcaaaagaatggaatttatgctcgagacaatatgtgacattaagaacaacaaaaaaaggcccaaagaggatcctgcacaccacactcgcataaaaaagtggcttcaaaagctgaaagcagaagatgtcctcttgcgcgggttaacatggaataagcttttggatcctgataagaaagggcagtggtggttgtctggggatgtttcatccactgtaggcaatattggagaagttgcggcagttataagcaaggaggttgttgaagcacaaaaacttgttcagcttgcagctgctcagcggatgaacactgacatacgaagagcaatcttctgcattataatgagtgctgaggactatgtagatgcttttgagaagctcttgaggttggacctttccgggaagcaggatcgggaaatcataagggtcattgtggactgttgtctgcaagaaaagatgttcaataagtattacgcagtcctcgcttcgaagctatgcagccatgataaaaatcacaagttcagcttacagtactgcatctgggatcattttaaggagttagataatatggagttgaatcgatccatgaatcttgcaaaactagttgcggagatgctggcaaattttacactctcacttgcaaccctgaaggttgtcaaaaacctggcagtggaggtgattccaaaaaggaccattcatttccgaatgctgtttgagaccttactacaaaaggatgatgcggtggtgtggaacgtctttacacgcattgctggacttccagagcttgaaattttgagagatggcctcgtgctattcatcaagcagcatgttattgctaaggacaccggtaaggacttggctagcaaattcaagatcgcaaagaaagcgcttgataatactgctggagttttgatgtaatttgtctgacatttcaaggtgttacctccctgtacccatttttgactctgtgtccctccagtttacctatacaactagcaatcatgtgacacagctctaggttgtaggttcattattgtgctctgagaaatcagaggatttttttctaagttacccacatgaggaatttgagagaatcttcatgtgtgacactgatgcattcgcaattagaaagcttgtcctgagagaccttgatggggcttgaatgttaaatcaaaatttctgggagaatgaacac

SEQ ID NO: 7367 - DNA, 732 bp, Oryza sativa
  ref <308>: DATABASE ACCESSION NUMBER: AK064494
  ref <309>: DATABASE ENTRY DATE: 2001-12-06
tgtgcggagctgagcatcttctattcgctgggatcaagcttttcctctgcaggggccttgtgcagtaaaccccctacgggcggtcccccgtcgtcgtaaagtagtaaaggtccccgcgaagctttcgggaagaggggtagtcttgtgtgtaagcatagcatttctggtcgaaccaccgaaccacacatctttttttggtgggagggtactccgagtagtgggtacctcgtaggacctcgacccgcctactcaggtcttgtatggatatgcaggaaggggtgctcctaggtgtgtgtagggggtgtgtttgttcgcgagaatggattcctcgtcaggtcaggggggggtgtggacacacttgcgcgaattcgggtaacggctacaagggataaaaataaaggaaactgtatccgaccagggatggacgtaaactcgtaagctaccgagggtagggataatcgtccaggtcttattgtttaaaaaaaagccgccccgccacagcaggcaggttagttcctctgtcgttgccggagagttcttggcgaagagaccttaggataagttgctaaaacaaacggggggggggggaggatcgacccattcagtagaattccgaagaaagactgttggcagcaggtggagacatttctttggcccccttccaaataaatgcgggcagggtagagctcggcggagggttcgagaatagggtagggtcctgtcctaataaag

SEQ ID NO: 7368 - DNA, 1561 bp, Oryza sativa
  ref <308>: DATABASE ACCESSION NUMBER: AK064495
  ref <309>: DATABASE ENTRY DATE: 2001-12-06
aattgctctgggaacttcttcttcatcttggcaacaatattctttgcctcagccaccctgccagcctttgtcaatccctcaaccaatccactcattgtcctaaaatctggcaccttgttgctcctatagctctccttgaagatcaccaatgcaccgtccaaatctccatgggcacacagctgtgccatcatatgcttgtacgtggcagcgtttgctgagcaccccttctcgcctagtgatctgtacagctccttggcagtctccatcttaccatgcttgcagtagctagtcatgaggaaattgacttctggtgtaacgcaaaatgatcaatgcaaaactttccgtatgaaaggaaacaacttccactttattgtaaagagccttcagtcgcagaagttaatcgttaggcagtcaactattataaaggttaaagatcatggagctgatgccgaagatgcttcccagaataaacaaatcatcaatactaactcattgtatctctcgcgatatgccaaaaacctgaatatgaattcacaacagagaattgagatcataaagcctgaactactgggcagcaatgaagagagcaatggagatgttttgcaagaagatggggcttttggtgtaaatgacaaaaatgatatatctattcatgattatcttccagcaatgaaagccatatgcgataaactagaagaagctagtggaaagactcttgttgtttcggatataaaagtagatctcaattacaggatgacatatgggcacagagcatggagaaatgtactgcataggctaagagacgcacaacttattgaagaatttgatgccaaagttgatgataagtttattcgctgtttacgtctgttgaagaaattcgatccaaatgaatttcagccaaaaagtacaacctcaaactacaaacttggcaagaaaggccaggcaactgatcaagtcatggagcttccattagagaactgtatatacgatatgatcaacgctcaagggccaaaaggaataacccttgttgagcttggcaaacgtcttgggcacaacaattcaaaaaggcttcataagcgagtgtcatccatgcttaaaaaatacaatttgacttgggaagctgaagttcaagacaagacatcacaataccgagtttggacttcaaaaaacttttcacactacaaagctggtgctgctctgcataatttggaggcactcccagatgaccacgagaagtgttctgatttgtggtcattagttccatctaaaggatcagaatctccaatctcacgggttgatttatttgttgataataacaagcttttgttggaagaagaatgccacaataaaccagcaggacatcccctccagagtaaccatgaagcttgcgttggggtttctcaaattgttgaacaagagaaacttgctttgggtcagaggaagaggcgtcgctgccctccattgacttctgatgatcgacggcataggaggattcttcacatgctaaagaaaaagaaatttgtactaaaggtggagttacataaatggttagagggacttg

SEQ ID NO: 7369 - DNA, 2205 bp, Oryza sativa
  ref <308>: DATABASE ACCESSION NUMBER: AK064496
  ref <309>: DATABASE ENTRY DATE: 2001-12-06
caagaacgaaaggtggggaggtatatgaaagaagggaacgaataagtggattgaggaataaaagctcgaagacaaagagaactgggcacagttttgttatgataaatcactcgtgggtttgagatatttcataagtagtggccaactaccacacctaattggtgttatgattggttaagatgaatgagaatacaaccaaataaaggttgttaatccaccttcaatagggaaagaatgacaggatataataatattgcggagtccctaaatcgcagggaagcactaagaaacagcatgccatttgaagcactcggatgcccaaccacagctatcacaatcactcgaatccggtgaagaaaagtaccttcatagcgtaggagggagagattgttttcatttcgattttatggcctggcagaaatgcgtgtccctatctagtgacatcgttgagagggaggcagtgttcagcttctcacggggatagaaaaggagattgcgtactccttctaagacatgaactcggaaaagagattgaatggcaagtgaactaattcctgaaagatcgagtttcaagtagactgacaaacgtatcttactcgttccctcaactgctcgactgaaagaactctgcatacgagtccgcatctccttatcgaaaagtaaagcctcttccataggtactccagcttcagaaaaaaggaaacccatctatgatactaatacaggcctcaggattgatacagaaccacatcatatcgaagcacttactgccaattagtttatgctgccataaagcaaaatcaatccaggggagctggttacgatggagcaagcaacatgcgcggtgagtggaatggtttagaagctttgattcttcaagaatgtccttacggatataatgttcattgtttagcccaccaaaaccaacctgacggcctgttgcggcatcaagagaagtgtattagatccagtctttcaatatttaaccggtgatacaaggtggagttctcaataggaagggctggatctatgttggcgagcagggtgatgtcagaaataacttgataagagagatgcatggcacaccaggaggagggcactctggcattctagccacctaccagaggaagaaaaggggtacgtgtattggcctggcatgaagaaaggcgtgtgtagcatagtgaaagagtgtgaaatctgtcaagtgaacaaacatgagaatgttgcaaaccttctaggcccgggagagtaggcgtgggtcgcgttaagtatatggaaagaggttaggtgaagaccatacttcgagactgggtagaaaggtatgatcatgagaacaatgggatcttgctctaatgtaattgttcttacttactgaattagactctctaataaccgaggtcaggcttcctcattcaatgagggactcatccccctaagcaatcacttccttttcgtactttatttaaacgttaaaactgcaagtagtagtaactattctttcataagaaaagaagtgtttctcaagtagtgtactttcatcaaagtcagtcagtctcaaattgccgtagtttagtgtctcacttatctataacgcttttacctttcacaagatagaaagaagtattgcacacgtcaataaaatagagataggaaaagcataagaaaaagaagcaagaaatgtaagaatgaagcaaggccatggaaagtccgaatgtcgtggatggacgttggaatcggccagctggtaatggcttcgatcttcgtggggtcagccttgatgccttcgtcagaaacgatgtaccccaaccagactcgaagtcataaactcgcacttctggaaattgacatagagtttatgctctttcctattacattactattctctttctttcattctgtcttttccatttgtacagttagaaggaaggatggtgaaggaacatgggagtacgttcttcagggtatgccgacgaaatgatcctctcaattgactagttaagtttcgggacttccccttaagaatggaccaatgaaaccaactgtatcaaagtttgaatctcttggcttggaatagcttaaactcgatgtcatcaagtacattcctcgcggctacccgccaaaaagaaaggtaggcagcttcaggatcccaccccccaaagcaagaagggggggaaaaggagttgctttttcttcgctggattgagt

SEQ ID NO: 7370 - DNA, 1295 bp, Oryza sativa
  ref <308>: DATABASE ACCESSION NUMBER: AK064497
  ref <309>: DATABASE ENTRY DATE: 2001-12-06
aatccaaccacacgcctgcgctgtgcttctcttcccggcgctgtccatttctactaccaagcttgtaaatgaaggctcggcaacaaacggagcggcaggctcgccggagcagggtgaaatccgatctgcagatcaagcaacccaagctgaagcaacagattcagccaaggagtccgagctcagcctgttcttccaatctcccctctcagctgaggaagaaccgcgagaatatgggaaaaggcatacgtagatggacgaaaaaggaagaagattatctggtgcaattaactaaggatcctgagatggctgaactgtttgacggtgggaattatgaagctgtggtgtccgaattgaaagtccacaacgagctgcagaaggacaaagctgcagccatggacacctacttgggcaggcatgacaagaagaaggatgatgagatggcacgcacgcgggaggtgaccgagcgcatcatggcattgagtagagagtgctgggtcacagaggagaccccaaagctgtgggttggtatgttgaagatgctgaaggatcgagatgcagtcaatgtctttgagctgtccaatcctgaaggaagaaagtccctccttgaacaccttgcacgggaggacgtgcggcctgaacctgcggatacaggggatgaagatttcgaaaaagagttggatagagttatgatggagtactttatggacgattttgcggacaccgtgttcctgtacggtgtttgctgctgcatggaagtactatctggtggactcggggtacccaaaccggattggttacctggcgccctacaaggggaccaagtaccatcttcaagagtttcaaaacgccgcagaaccagaatgtaaacaagaggcaagcagattggtggagacaccttggcgcgatttggcggacacacctccaggggagcagtgatgtcttcctgccggtgcatcttcctgatgatggtctatgttgtgatctttgtgattgcctggtggtgtatcacgtctagccgtctaggattcccctgaactgatgttggcgtagttggtagtagtgattttccttttgtgatgcatgttggttcgatgaactttgtctgtaatgttggtcaagtgctgaacttgaactgatgtaggtctgtagtaaactttagttatccgtttatccttgccagcagttatccttcctagtaatccttccgatgtccgttgtttatctttcttggtcaacccacttatccttcatggttatccttgtaacttccacacatttatccttcttggttgatc

SEQ ID NO: 7371 - DNA, 1468 bp, Oryza sativa
  ref <308>: DATABASE ACCESSION NUMBER: AK064498
  ref <309>: DATABASE ENTRY DATE: 2001-12-06
attgcagaatggctccaagaaaccgcccttgagcaactctcaagaatatctaaatacctttatgtccttgttgaagatatgaaattgttgaaaggaaatgttccattgctaacttcagtgctaaatgtgattgcatcaacgatgaggttgtctatgaaaaggaagatttaccaaccacatttctctttatccctccatggcatacataaattgtgccgaactattggtggcatctcaagaagcatagaagttaagcttgcaatgcaacttggcattgatgtcattcttatgaatggtcctctgccagttttgtctgaaatggataagtcgatgacagcaactgttgtttcatgggcaacttctaacatcttctggttgtgtgatgaacaaagatctgtactgaaaatgccacatgaagagccactaaaaaacgagtgcctactttctaagatgctgcgctggttagtggcttccataattcttgggaaaatctcctgcatctctcatgaaaagtgtggagaccttacaagggatgccaacaattttggatctcttgaatctttcttgaactatacatatgatgaaaaggttgaaactgttggcagtcacagtgcagatgaggcactagctataattatactgtacctgcaaaaacatctgaaaatgaaccgagattttttgccatctgtggtggctgctctttgcttgttgcttcttgacagatccaataaacaagttatcagaaacttcattggcgattatggacaaatcgaaatgctgtgctcacagatacaatgtccggctgaagctaatcctgcatggagatggcattattatcaaccttggaaggatcctgctatgcatcgcaatgaggcagagcacctagaagaagagcaggcctgccaaagcctcctggttatgttttctaacagcttcagtgctgggctttcaggttttcctgtgttgtcacttggtgatgttgagaagtctggcctatttcagtgggaaagacattccatacttaaatagacgtaaacttcagtttgctgaagttgaaacggttctttaatttcccagagcccaatggcaatcaactgaccaactgactgaacggttacgctaggaggacttggtgtgtttgcgtaactcaaaacagaaattgggataatgatttatttcatcagtcatcactacaggactctatatgatgatgtggttcagggaatccaggtcgataaatgcctggaaagatttccaactctcagttttgaagcaagcatctgccaatacgaacctaacattggtatttgctgcataactgacctgtgtatacatatataatcaaaagaacgcctggtcctcaattggatcgtaaaggttgattgtgcctttttttttcttccttctataaacggctgagtatacctgtaccgagctcatcaatgcaatcgatctcttaatttgtgac

SEQ ID NO: 7372 - DNA, 1984 bp, Oryza sativa
  ref <308>: DATABASE ACCESSION NUMBER: AK064499
  ref <309>: DATABASE ENTRY DATE: 2001-12-06
actcgacttccgcggcaccacctcttcccctcccctacctctccgtcctccgcccctcccatctggcctggacgccggtggaggctctggaggaggaagtgaacatgagcaggagcacgcgcaggcgcagatggatgtcaggagcaggtcgcacggaggcggggccggcgtgattgaggaaatcggccagcgacaggcaggccacatccgctaccctaacctcctcgttccggcgagcccttgatttatgtagagcaagcgtctggcagatgaggagttgtttgtttgggcgacggcgctctagctaggaccaaatctccagcgctagctagctgctgcgtctgcatcgcagtacgagccctcgtcggcgggggacgaggtgcgccggctccacctgtatctgcatgccaaagaccatcgcggacgccaggcccgctattcgatccgctcattcgcagctcaagatccagcgaggagatggtcgtcgccgatgtaaacatgaacccggaatcatcttctcaggaacatgaagaagcaggcaaacagaaacggcaaaagagagagtgtcaagctttcacacacagaagatatcagcttgatgtctatgaggttgcaatgcggagaaacacgattgcgatgcttgacacaggagctgggaagataatgattgctgtgatgtttatcaaggagtttggaaagataaatagaacaaagaatgctggaaaagtcatcatatttcttgcaccaacagttcaacttgttgcacagcaatgcgaggtgactgaaactcacagattttgaggtggaacaatgtcatggcgcaaagggggttgatcaatggacaggtccaagatggcaagagcaaatctcaaaatatcaggtcatggtcatgacaccacaggtgttcctacaagctttacgcaatgctttcttgatcttggacaaggtgtctcttctcatttggattgtgaaggtcagttctgtgaattggaaaacctgttagatgccaagatctacagagtttcagatagagaagagatagagctttgcgttccttctgcaaaagaaatgtacagattctatgacccgaaaacaatttgttttgaagatttgagtgaagaattgggagttttatgtcccaagtatgatgcattgataacagagttgcagaataagcaaagctacatgtatgaagatgctgatgatataacaaaagaatcaaggagacgcctttctaattttagcaaaaatttgctactgccttgatgatgttggtcttgttttagcaagtgaggtatttgttatattcattggctttagctacttatgttacagctgctcgcgagcgccaagacggtgccttcgcttcccacatcgctgccaagtccacccccaagctgctccactgcctcgccttacgcctcacggctgagcagatcgtgtggcccgataaagagataagtactgtctgtttccttgatctgcttcagccgccatcaccatcaaccccttctagcttccacaggtgactatgcatcttgtagtttctaaggtctgcaaaaaagcatgcttcagatacagttggggatatatacagaacatcaaaatgggaatatgggatgcattccttgatgcaagacagatagaagtgtccaaccattacgaatttctaaatcaaagaattcagcacagaaagataggatgattaatgtcgttgaagcgatgactattatcctggcttgcctacgatcttggtatttctccctttccattttatgtaggtgctcatatatgtagatatgttgtttattcttggcatccccatcttctttgaggtatctagatggatatcataccaatagttgtcgaagagtcatcttttagggagatatggtttggtgtgcctatgtaagtttctacatgttgcatatatccgacagaatgtcaatataaatttcaagctaagaataattctatattgttt

SEQ ID NO: 7373 - DNA, 1339 bp, Oryza sativa
  ref <308>: DATABASE ACCESSION NUMBER: AK064500
  ref <309>: DATABASE ENTRY DATE: 2001-12-06
acctcactcatcacgcccgcgaggagttcttccgcaaggagcgcgccgcatcggccgcagcagcagaggagcagttgcaaaaggaggaggaggaggagaaggcggccgcgcaagaagccaagaaaggagcattggagacattggaggaggaagatgtagcggaactggaagggagcagcaaagtgagggcgctgaggaccaaagtgatgaccaaggagttgagcagcgtccctgattctggcgctggtcgtgtcaagcaccttgtgcaggccttcgagagcatcctctccatctctggagccacctctgacgccgacagggccggtgaggggtcctgggcgctccccgggttacaggcatggaaggaagattgcgagggtaagatagggatgccgccggtgtcggtgtcctcttctgctgagttcttgaatgcaggaccgaacaggctctgttcttcacttgatgggaaaagcgacaggttgagttgggacagccggacatcggcaggggggtgcaggagcaggcgaaatacatcggagtcgctaagaagcagttggaacaagaaactgaaggtcacaagccagcatccgttcaagctgagaaccgagcaacggggaagggtgaaggagcaacagtttattcaaaaagtacaagaaatgcttatggaggaagagcagcaacgtatacatattgcacaaggacttccatggacaacagatgaacctgagtgcttgataaagccaccagtcaaagaaaccaccgagcctgttgaccttgttctgcacagtgatgtacgagcaattgaacgtgcagaatttgatcaatatgtgtcagaaaggaacaagttcgctgagcaactaaggctggagagggagcggcagcagaagctggaggaggaagagatgatcaagcagctcaggaaagagctggttcctaaagctcagccaatgccgtactttgatcggccgttcattccaaaaagatctgcaaaaccagcaacagttccaaaggaaccaaaatttcatcctcggccggaaaaacagtcatgtttatgtcgacagcgatgcatggacaccggaatgctgatttcatcatgtcttcatgatcagtcgactgtacttgctgagaaatccaaggcattgccacgcatgttctagattctttgaactatctgaaccggaaacaaaatcacattaaatttttgtatcttcagttgtcccctcgagttctttttatgtacatgccttatcagtagctctgtgcttcagatgcaaccacaccgaggttgagaagttgtacaaggaacataaaagtggaaattcaaacaagaatttctatg

SEQ ID NO: 7374 - DNA, 1870 bp, Oryza sativa
  ref <308>: DATABASE ACCESSION NUMBER: AK064501
  ref <309>: DATABASE ENTRY DATE: 2001-12-06
atatgtttttacagatttctgaagcataattttgtttctgtataaatgtactaactggtgccctgctcattttgctgcctgtgtaaatactttttatggtctcatccgaacacagggtaaaatgccccatagaaattgaacagtttcctatgaaacttctgcagaaattatgtaaaactaggaaggaagcccgcgcagatgcgcaggcatctaatttattgttttatgatttatgaaataatgctaaaagatgtcatgtctcatcttttttatgctgtgagataaactgactttaatatacttagtaaatgataagaatgtctccaagattaaaagaaaatcagtctgtcccgattacttataaattctcctattgtcaccacaacttattattactgttttaaaagttatgtatctataaatagataaaactggatatgtaccaataaaataagcctaatacatcattgatacactaaaatattcactacttatctaagtgttcatgtttcacttttccgaatcaatatataaatattttaaaaataccacttataccaattaataaaataacaccgttaaagataaacatgaatgcccctctaacgggtgaagcccatcgtaaccactaagactttctttctctgttgagttttctaaaaaattgaaaataaaatttttgataaattaatccaaaaaattaaaactaaatcggatttacttaaaaaatagactaaattgtgtttttatcattttttacatttgtagatttaaattagtgttgtatatttatcaagtgatattagaaatcctaaaatataatgtgaaactatttaaaaattaccacaacattaattattatatgttggtcccatgtgtgtatttaggaccataatataccttttataagacataagtatttcatttaattaaagcatgaaactaatcacaaattgaatataaatataaattaaaaagatgaatgtttaaagaccattgatttgatatttgatatttatattatagatctagttttatttgcttatatttgtgaagtaatatattttattttacattatagaaacatctgttttaaaatccgtcgatatttttcccattggtactccgtacatttttttttgcctttatcttttttatcctaagtacgtgcgtatatttttctttgtaagctctaactttttttttaatcatacgtacactacttatgcttttctgcaacagttaactatgtacatgtagatttgatctaatgtcctaagagcaagtttaatagtatagctcactattagctccaattcatctatagtcaatctaatagccaattcatacaatagttgcttactgtactattaatatatggtcccacctgtcatacgcacattgcgtcttgtagtccgtgctgcagctggctacaaatctgtagtccgctgctcttctctctcatcgtttatctcattaaaatatgcttgtagctggctaatagcttgctattgtacttgctctaagataacagtcctaccaatttaaataaaaattaatgatgagattagacaaagtcacatggtggcctacaagagttggtagaaatggcacataagataaaatatgatattgtagtaaaaatatagctaatatagctctggaattggtgatttaattaaaaaaacctacagctgctaaagtgtatgcgtagatcgtctataaaaataattgtttatttacaacaccagatcacttctattgtaaattcctagcgtttgcgcattcacactcagattactctctatgaaaaaactgatctaataatttatgataataaattatgatgtacatgtatcatgtaatttgg

SEQ ID NO: 7375 - DNA, 639 bp, Oryza sativa
  ref <308>: DATABASE ACCESSION NUMBER: AK064502
  ref <309>: DATABASE ENTRY DATE: 2001-12-06
aatgaaggcctctctccggcgagctcccttctccctctagtaagctttcttcggcaaccaggttagccttctttttcgacgctgatccccactgtgtcatcgtcctagcctcaccaacaagatctttagctttggctagccagcatcaacaggaatcaacgtgtcgccacacccctgcccggcacagccttcccctcgctttaccctgccaccaacaccagccctccaccggttgctgacccccgtggctccgcgacagcgccaccgcattgctcgcccttgtttgccacccaacgccggtccgccgcctcacaagccctccctctaagcccgatccccgcttacctctctctaatgccactttccctccaccacactctcgaagttctaaccctaactatagcttgtcgtcatgtggtcgaaaactgcgtgcgacgttcctccctagcgagcacgcgttaattaggattgcttttaaatactccctccgttttacaatgtaagtaattctagtatttcacacatttatattacatttattgatgctaatgaatctagatatatattagatatatattgtgaaacggaggtagtacttaaatacatccacttgtggcgtgctactaatttattaccact

SEQ ID NO: 7376 - DNA, 2265 bp, Oryza sativa
  ref <308>: DATABASE ACCESSION NUMBER: AK064503
  ref <309>: DATABASE ENTRY DATE: 2001-12-06
acctcacccacacccactgttcttggccatagctgcctactcccatggtctcctcgtccttgcccttgtgctcgatcgatcaccagccgagctgatttttctcttctgcttgatctctacctctgacatgcatctgaagaccggagagcatctgcatctgcctatatcatccggtcatggatatggatagatgaccggcctgttcatgtctgaagaaaaatcaaaggtttggttttgatcggcttgagagcgtgcctggctccctgtatgccactcatgtagcccaatccatggtgtgtttggatgctgtgggtggcgtgcaaggagccaagcatgcgtgccatgatctctctttctgccttaattcagtttcagacatgtgtagttggatttgtttcctctaggtgttcatgttaattacatatttcatgttgattttgcccgtttggatatgtgtttgtctgcttggtttcgaattgttttagcaggggggcagaactaatcaaggatactgcaaatcgttggaattaatttcttgttcaatcttgatccagataactatgagagcttttaatcacaacgagaaaaggtaatctctctctatcagctgcccctttttcttctactagtttatatttagatcgcattcatactcttgactagctcgctgcagtttatttgcatatgttttcccagcaagatctaattagatacttagatgagatttggactgtatggtaattttgttacttctccttgcgcatttgtatttctgtttatttgtatttattctctgctagtactggagtacttgttatgttgcgtgtaattaattaagcaatgttaattaagtaaattgttaatgtacatacatacatgaggtcatttcttggttttcgtcttgtactttagttcttgaattgttcactgggctggcacttagaaaaagcataacgatttagtttaattgagaaatgcctatgggtcttcccggctagctccataaggttgtcggctagatgacctggattcgaagcttcacaacttctaattatttgatattaggtcattccctaatattcacgtctttttatttagtttaattcttttttcaaagaaaaaactgacacgtatttaaatttctgctagaaatggccatctgtgggatagggatagaaagcttcagttactagtacacactagctagttgtttgtttgatttggccaagaaatctgaagagatatggattgtgttctttgaaattcattacctttcttcactgtacttatcgtgtgcggtcatccatgcttggacgaatttcttctctctttcttaagatcaaagattaagcacccatcatattgtgccttaagtacgtaatccaataaagttcaacattaggtttggctccttaatttgtacacttaattattacatatgcgcttccaatttttagatgaataatgattcttttgcagcaagataaacttaaacacacacaggtgaaacttttagatggaaggtacacttgctctgacggtagcaaaagttgatcatgccctactttagctgtaacatgagacatgtcagcatatgcttacatgcatgaatcagcagggctacagttttattatttgctttgacagctttctctcaacaatcattctcattatattttttatcctaggctccttaggaacatagtaattttacaggatttttgctgaaatcgatcagttcagttcccgcaaaattccactgaaaattaatcctctactccaaaggcctctctctctctctctctctctctcacgtaggatttgccactgaggtctcagcatcaatggtggcaaattctaggttttgattaattttttagataatgaggttttgaaattagaaaactatgcagtgcattgtatcagaatgacagatataacatcaattcatgtagataactaaagaacctcttatatatctatctctggggtagtactagtgatttaagtagtactgtaatcgggctttgctgatgcgaacttcctctgaaacttttgctagctaaaaccaaaatgcgggactgatgatcagcatggagagcagcctcaatttatttgtagacgctcaagattacttgcagatctgtcagaagtaatactgccacaatgaggatgttttatggttatataggctaaaatatatatgagtaatattccatgcatgtctatcagcattgtaactagctatacaggataaaaattcac

SEQ ID NO: 7377 - DNA, 2042 bp, Oryza sativa
  ref <308>: DATABASE ACCESSION NUMBER: AK064504
  ref <309>: DATABASE ENTRY DATE: 2001-12-06
ttttatttttttctttgtctcgaacttcgtgaagaactccattctatctctccaacaaaaaagtggggctgcgccccagttgtacacccccttcgttcggagaacctttgttgattctgaacttcgttcgcaaagtaagcgtccttttaacgggccagccctttttaatgcgccgcttgaccctgttttgaaaatgagctttgcttttctgggcgctgggcgctcccgtggttcgcgagaaggaaaaaggactaatcttttgttacatctggcacgagatgaaaaagagagagcttcgtctatcgatgaacagcagattgacggagctcttggcattgctttgtttttctcttttttcctattagcgagttccgatccttttgttcgaaatttcttcgtttgtaccgaaccgcttgcagaatcaaatcctgttccacaagatcctatattagctatacatcctccttgcatttatgccggagacgtcgccagtgctatgggctttgggttatgtagatcaaaaatgatgaatgggattgtggcactccactcgccgccaatgcggaaggatgccgccgaaaagaatggaacgctgcttcgctctgctggatgcgtcggatcccatataagaagctcgctctttacccgatcattcaaacattttgtgggcggcgcgcctgctctattgttgcgtagcaatagaagcctactcatgctgcttcggcggcgctttttcgccttctcttcgctctggacaggagcgctaatggacacggggagggagcaggcgaagcgtgtcgttcgtaatggaaagaaagacaccactacttcgcctctttgttggaccgccggcgcgaacacagtggtctctgaccaggaccaggaaccaattcgaatttggatcttgacatgttggttgtttttaaccgtaggcatctcgccaggaagttggtgggctcatcatgaattaggttggggtggctggtggtttcgggatcccgtagaaaatgcgtcttttatgccttgggtattagccacagcttgtattcattcagtaattctaccccttcttcattcttggaccttgctcctgaatattttgactcttccatgctgtgtctcaggaaccttttcaatacggtccggattgctagctcccgttcatagttctgctacagacgatacacgaggaagatttttatggtggttcttccttctaattacaggcatatctatgactcttttttaccagatgaagcaggaggcatcggtccgtagaacctataaaaaagagatggttgtggcgcgaagtactcttgtgcacctacgtcactcggctcgcgcgcaaccccgccccgttatgttatggaagaatttagcttattgctgggctggttattcagagccagcaactggctgccggatttcgtcccgtccgtagcgcttcggaagtcactctggcgtggcgctgctggatacttctgatcaataggaatagggggaaaaaaaagcttatgatgagcatctattggagtcgatcatttccaagatctaattctagtttcttattatgtagtggaaacgcctcacaatcttcagttttacgcttacgcttaagggaagaaatgttcttggtggatgcaggccttggtacccccaaaatttgtatgcaagatgagcttacaggactgccaatcaagcgagccaccaggtttgagaataaggtgggatccaagaatgtagtggctggtgaatcactgatcaaaaagcggattgaagagagattcttcatcgatctagtggccggtgaatcactgatcaaagagcgagcagccgccaggtttaatgattttgtgggatccctggatgtagcggctggcgaaccgcttcttcttccacaaagattcagacaaaaccgagcttggatagaactgaagaagatttggcaaacgaagaaaaaggtcaaagggtttcgtattaaaaaaatcaaaggaggttatttagtagccatcgcaggtttcattacttttcttccattcgct

SEQ ID NO: 7378 - DNA, 1511 bp, Oryza sativa
  ref <308>: DATABASE ACCESSION NUMBER: AK064505
  ref <309>: DATABASE ENTRY DATE: 2001-12-06
ttatttggaagataggataaggaggtctggaagcttgttttctgcatctgggctttgtggagaacctgcagatgctacccttgcttcagagaagagtatgttttcagttggcatggtaatttgtgatggggaaggtcatctaaatgaaaaatctatcttgctacaaggcagtgttgagcactccaggggacagcatgtacgcttagacttgaaggacgtagaccggttttccttgtttcctgggcaggtcgttggcattcaaggccacaatcctagcgggcattgttttgttgtgtcaaagttgaatgattccataccaaactttgttgatgctcaactgcctcgtgctaagaaacaagctgtggacagtgaaggcaaccaaagttctgacgttgtatcaagagtgctatcatcagtcattgcagcaggtccctatacaacgagtgataatctgttgtttgaacctttgcaagaattgatatcttatgccagtcgtaagcagcctcaacttcttatattgatgggaccctttattgattctgatcatcctgaaataaaaaagggagctgttgataagagctttcaggacatatttcttttcgaaattctgagaaagcttcaagacttcacccagtatttggggcacaatgttcgtgtgattcttattccatccgtacgtgatgcccaccatgactttgtttttccccagcctgcatttgacttgaatttaccagaagacatcacgcatcagattacttgtctggctaatccaagcctattcagttgtaacgagatacactttggctgctgcacaatggatatcctgaaacatctgagtggtgaagaaatttctcgcaagccacctggtgaaaagcatggtgacagaattggtagaatttgcacacacatattgaagcaacaaagctattaccctttatatcctcctcctgctggtgtacccttggacttttcactcgctaacggagcactggagatcgcatcagctcctgacgttctcctgcttccttctgaccttgctccatttgtgaaggtgctttccctcgatgaaagtagcgaagaacctaagcgttttatttgcatgaaccctgggagattagcaaagggcattggtggaggcacatttgtagaactcaactacaacgaggacacagacaagacaagcgcctcccttattcgcatctagttttccgaatgccgtaatttataggctgatgagaattaggaaagcttcctttcttatgtaacacaccccttactgctcaacagtaaaggatcgaaattcttcatggttctttatgtggtaagctttcctaattggtcaacgaaaatcagttcatttgcgttatccttgctgtgattattcttggagtagtgtacggtactagcattttctgctaacaaggtgattttactgtgaactaacaactgttctgatcttgttccacatgaccacatcccattgtgaataagaatcaggaagctacttgatc

SEQ ID NO: 7379 - DNA, 2433 bp, Oryza sativa
  ref <308>: DATABASE ACCESSION NUMBER: AK064506
  ref <309>: DATABASE ENTRY DATE: 2001-12-06
aacaaggtctgcacatcaccttcctggagtttgtttacagccaaagttgggaagaaagaggactttccctcctcccctagatcagcattccttctgcctgatatgagttcgaagagcatcatgccatagctgaagacatctgccttaggagtaatcggcacaccactgatccactcaggcgcaaggtaatttaggccccttgctgttccaagtgcaatttgataccttatggcccagttcagtgccgttgtctcaccatggaacagctgcaattccagggagccctttggcatgtactcatagacaagcagtcttcttgatccttcagagcagaaaccaagtaggcgaaccagattgacatgttggatggtcccgatggtgcttacctcagcacggaattgcttctccccctggctcagtccatcaagcctcttcactgcaatggctgttgaatctgggagcttccctttaaatactgtgccaaaggcacctccacccagcttctctgagaagttgctggtgacatgctgcagatcactgtaccggaaggcaatcagtgcgccccctgtagtcttggatatgcgaagagtcctgtctcggcggcatttctggaatacgatgaacaacacaattgcaaggattatcaaagctgcagcaactccacctacaactgcaccaatgatcattttcttgctctttttagagtctggaagttcagacgctgcaagcctgaggaagagtgtgcctcctccattcccattgtattggtcttggaggttaatcaagtccccatgccaaacaaagcagccactactattgtaagtgtaagcattacaggagcaattattcaggcaagcaacctgacaggcctgagaactagcggccactgcactctgagcattatcaggtagtctcacactaaccatggaatagaacttatcaggctgagtctgtgcagagcttgagttggtctggcactgcaacggtacgtttctcttgcacccaccagtaaaatcctggaggtcccaatcactctgaaacttctggctgaaccccttgatgcagttgcagaacggcaggacattgaggttgcaacttccatatgcgccgcagagcccgtacacctcacactgcgtccgtggctgggaccagaacaagatccaattctccgaggctggtacccatgtccactgcttgatctgcccattcacatcaatggtgaaccgcgagatgatcgagtcatccttcatggagtatatgaagtagctctccgagacattgttaatgaaccggaagttgtagttgtagccggccgtcatctcgggcacaagactgaagatattaccgttccaagggccgctggtccagtaagtgatggagtcgttccactggatgaagtactgcgttgtgccgttgggatccagctcaagggagaacagcccaggggacgggtttgcattgttcctccatggcacaagccgctggctcacaccagtggtcttgttcagccccagcttgccgcccggaagccaggtgtttgtcggatgatctatgctcctccagtagactatggatgaattggtggcatccatgaggtcgaggctaccgccgtcctggatgacggcaacggtggagttggaggccacacttacgttggtcgaccacagctgcctgttcttggattgatcaaggaggacaagattgccatcgctgccgatggacaaggatgcggtggtcgggtcagacaccggcacgtcgctgttggccgtccacaccgtcgtctgcaacggtatgttgttgtaccatatagctatgtagtagttgccggtgccggaggcggtgttgttaccttgtggcggggtgtagaatccaagggcgaacctgccgcccttggagacgatcttctgcgtcccggacagcggcgtggtggagttgatggtgtccactgcggtgcagagaaagatttggctgaagaggaggaggaagaagacaggagccatggatggatcttggcagagcagccagggctgagaacctgggacgaatggaagctgagcttggcctttggagtaatttgattatggtggttggaacctgagaggaaggtaagcttggtcttataactcatatggacagcaaggctccacttcacgagatattgcagaatgaacgctctttgacctggcacagtagagggttctgtggaaaaggaggggtgcagaaaattggttctacagttttgcttgcgaaatagtactgttcctagtattaattaattttgctgcctgttcaactaatcaacttgtgttctaggattgaagatattcgtgtcccctcttagtaatttattagtattcacatttgtgaacagagacgccaacatctgctatgatgctatcctcttagtaatttattctgttgcgaaataaattt

SEQ ID NO: 7380 - DNA, 1224 bp, Oryza sativa
  ref <308>: DATABASE ACCESSION NUMBER: AK064507
  ref <309>: DATABASE ENTRY DATE: 2001-12-06
agaagggttcgtctccatcctcgaagctagggtttaaggcgaggaggggtgaggtgacgagattggaggcgaaggctaggagaggcttgcgattttcctctggattcacagattcccgaacttttgcggaagtggtgagagaaggtatggatcgtagaccgcaaggggggtggcagccggtgaagcggcgatttggggaagaggggaggggatttcgtgacctcaccgaaggggagttgagggagagattgcagagggaaagggcgagagaaggggagagagagggaagcagggagcgaggtggtgaacagcgcggacctcggtgttttggatcaccggtgggacgccgggaggggggcaggggagctggtcgcggcgacgagaactggcaaggaggtcgtccagatgtggcgcggcagggcggcggtggagatggtggctggcatgggggaagaggggatgggggcagacttggaggaggaagagcagaagttatcaaatgcttcaagtgtgctcaagagggacaccttcaaatcgactgcccgaaccctccaatctgctatacatgtaagaaatctggtcatattgctgcagaatgttcaaatttccatcgcaaggggattcatctgtgcggatgtgggattgctggccagtgctttaatagcatgacgattgagactgatgggggagaagatgatcagattcctatcagggggatattgactgtaattagtggagaaggttctgtggatcagatagaatggaagctgaagtacaaattgtttaagggagttgtgggactggaaggtgactgcaatcagtgagaaaactttcctgatatctttcccttcaaaggaggctaggagagagctgacaaaatttgatggttttgatttaagttcctctatcaaagctaaggtggaggagaccaacaggacagaggaatcttttgctgagctaagagaagtttgggtcaaagcttatagggtgcctagaattgctagaaaggaggagttgaaagatctatcatatttggttggggagccaattgaggttgatgagacaagtttgagaggtttgggaccggttagggtcaaggtggcagtatgttcaccggaggaaattcagggaagcacctctgtgttcataaacagggtgggatatagaatcagatgggagactgaagaaggaaacatggagcaactgaatccttctccaaagaag

SEQ ID NO: 7381 - DNA, 1364 bp, Oryza sativa
  ref <308>: DATABASE ACCESSION NUMBER: AK064508
  ref <309>: DATABASE ENTRY DATE: 2001-12-06
catgtctcaaacatatccttagggttctccatctccgggggtccggggtcaaagtgaagaaaccttctattcgtttcaagggaccccatctcaagagcctagggctttgaaattcaaccaagaatctactttcccccatgctcctcgccagccatctccatccgtcgcgccagtagtagtgaagttcccactccacgtcggccggccgccatgaggttttccgaagctttgaccacaaggaacttatctatctccttctcaaacttgatcgccttttttgggagaataaaaggacactctttttccattttttctctctgggccggcttcaatagccttttcttggcacagataaacactttatgccccacttccctgcaaaatctatttcctgctgctcccttctgcattccgtggctttatgccctttctacctacatcgataatagtggattcagcaggaacttaaacaactcatcattcatttctcgatcaattttaaaccttagagtcaaaaagtccttccatgaatctagggaacacctctgacttcaccaactctccctttctttggtcgaaggcttcaggtcaagatcctttttcctatctattgaagatgcaaagagagatgcttcttcctcttcaagttggaagtgcaagaagaaatgcggtaaataggagttccatctaccacgcactccagctaacttcagcatccatactcagctaggaggaaggtgccggggacactatgaacacacatgtacttggttgacttcacgtcccgtctcacaaccgggtaagatcaaataaacaaacagcttgcttgcccaatccctattgagaggatttcttgagcttgaacttccttttgtagctccgctcacaaggacttcttttcatccgcaatgaagcttataccaccacttggtcagtaaggcctgattcaaaaaagatcaatcacccccttccctacttcaatggaaaagggggaatcgccctttcacagccgcccctccacaaaattgatacctatcctttcgcctaagatgatcacgaacgaagacggagaattgcgtagataggaggaggaaacgaaccaacccggggccccaccaaacaaacaaaagggaatgagagaaatgatcggaacgattgaggaaagaaagagaatggcggcccctttcctttcgcccagggggcatcgtcgtcggggacaggcttcgagggttcttccatatttagatatagagatagatgatgatagagatctagatctttctatagatagatcctttgataaatttctattgatccgctttcaagatctatgaacaagaagagagatcaaaaaatagaaaagt

SEQ ID NO: 7382 - DNA, 1942 bp, Oryza sativa
  ref <308>: DATABASE ACCESSION NUMBER: AK064509
  ref <309>: DATABASE ENTRY DATE: 2001-12-06
aattgcccctgttgcttgcttcacgtctcctcttcatgtgatctgaggcgctcgctttcggattcttgctcttctcggcggctcgcgttgggggagcggtggtggggaggagatggggtttttccgcactgtgctgggtttcttcgggtttggggtgggagttaccatggggcttgtgattgggtactacctcttcatctacttccagcccaccgacgtcaaggaccctgtaatcaggccacttgttgaacttgatacaaaatctctagaaagcatgcttcctgaggttcctcattgggtgaagaatccagactttgaccggattgattggcttaacaagtttgtcgaaaacatttggccttatcttgacaaggcaatatgtaaaactgcaaaggaaatcgctaagccaattattgctgagaacactgccaagtataagattgattcggttgaatttgagacattaacattaggttcattaccaccaacatttcaagggatgaaggtctacaccacagatgagcaagaacttataatggaaccttccatcaagtgggctggaaatccgaatatcactgttgttgtcaaagcatttgggctaaaagcaactgcacaggttattgatttgcatgtttttgctctaccacgcataacgttgaagcccttggtgcctagctttccttgttttgctaaaatagttgtttcacttatggagaagccacatgttgattttggtctgaaactcttaggagcagatctcatggcaattccaggtctctatgtatttgttcaggagattatcaagactcaggtagcaaacatgtacttgtggccaaaagtacttgaggtgccaatcatggatccagcaaaagcacaaaagaagcctgttggaattttgcatgttaacatcgtacgggctgtcaaactcaccaaaaaggattttctgggaaaatcggatccatatgtgaagttaaagctaacagaggaaaaactcccatcaaagaaaacgtcagtgaagcgaagcaacttgaaccctgaatggaatgaagatttcaaattagttgtcaaagacccagaatctcaggctcttgagcttactgtttacgattgggagcaggttgggaagcacgacaagattggaatgagtgttatcccattgaaagagcttattcctgatgaggcaaagtcacttacacttgatttacacaagactatggatgctaatgacccagcaaatgacaagttccgggggcagctcactgttgatgtaacatataagcctttcaaggaaggtgattctgatgttgatacaagtgatgaatctggctccattgaaaaagcccctgatggcacaccggaaggtggtggtttgctggtagttatcgttcatgaagcacaagacgttgaaggaaagcaccacactaatccatatgtaagaattgtgtttagaggtgaagaaaggaagaccaagcatattaagaagaatcgtgatccacgttgggagcaagaatttcagtttgtctgcgaggaaccacccataaatgataaaatgcaaattgaagtcattagcagaccaccaagcatcggtatacattccaaggaaaatcttggctatgttgtcataagtcttgcagatgttataaacaataagaggatcaatgagaaatatcatctaattgactcgaaaaatggccgcatccagttggaattgcagtggagaacatcttagaactcacgggctgaaatcttgtaaagtttcttgtttagaatgctttctacacttgtatgtatcatttggcagacatatcttaccttctgaattattccacttttaaaactatgcttttcattgtttcccccagattctcactggttggtatatatgattatgaacagaaaccaggaagcctgaactaattatggaattggtattctgtatgag

SEQ ID NO: 7383 - DNA, 1575 bp, Oryza sativa
  ref <308>: DATABASE ACCESSION NUMBER: AK064510
  ref <309>: DATABASE ENTRY DATE: 2001-12-06
agcatccttcgtcttcttcccaagccccatgttcttctccttcctcctcatcgccactcctctcccccacctgcaaagatctcccacccctaaacaaatccaaataaaagccccgaaaaaaaaggcttgctcatttatgtctcctcatttccgcgagctgattcgcaatcaatcgctctctcgctggttcggatgatgcccgcggtttccctcttcgccaccgcccctttaaaaccctccccctcgcctccgggctcccaccaccgccgccactgagccagtccgcagcctcaccgcaatgccgtcactccccttcccttctccttcgttctaggaggcagtggaaacaacagaatttctatccacggtgcacgccaagagggccagctcctcaatcccgtgatactccgccgaagagagacactggtattgctagtgagaaggaatggggaatcaaccttctggatgaagcagtcaaggagtctgggacaaatgaagatggaagcacctggtacagggagagtggagacgatcgtggtgataatgggtacaggtgtcgctgggctaggatgggaggacagagtcatgatggcaccactgaatggaaagagacgtggtgggagaaaagtgattggaccggatataaggagttaggtgcggagaagtctggaaagaatggtgaaggtgattcttggtgggagaaatggaaagaagttctttaccaagatgaatggagcaatcttgcaagaatagagaggagcgctgaaaagcaagcgaaatcaggagcagaaaatgctgggtggtatgaaaaatggtgggagaaatatgatgccaaaggctggacagaaaaaggtgctcataagtacggaagattaaatgaacaatcctggtgggagaggtggggtgaacattatggtggccggggttttgtattgaaatggacagataagtgggcagagacagacttaggcaccaaatggggggacaaatgggaagagaaattctttgctggaattggttctcgacaaggggagacatggcatgtatcccctggtggagatcgatggtcaagaacttggggagaagagcattttggtaatggaaaagttcataaatacggcaagagcacaactggcgagagctgggatttggtagttgatgaggagacgtactacgaggcggagcctcattacggatgggctgatgtcgttggagactcaacacaacttctgtcgatacaacctgtcgaaaggccaccaggagtgtacccaactattgacttcagcgcttcatctccagctccaccttcggatgatccaccaggcatgcctccttcgcctctggaatgagtcatacctgtgccagtacaaaagagaagcttttctgcataggtttccaattttgcctgtaaggggaacattctttgtaggaaggggatcaaccgcagtattgcgttcattggttcattcattctttcgtagcatgttttccttccgcggcttagcgttttatcgttccggactgctgtttgatcaattaggcgaaataatcagtggctcgcgatcatattgtctc

SEQ ID NO: 7384 - DNA, 1528 bp, Oryza sativa
  ref <308>: DATABASE ACCESSION NUMBER: AK064511
  ref <309>: DATABASE ENTRY DATE: 2001-12-06
cttttgttattccagcgagtttttgggttctttgtgtgatttggatggaaggtgggcttcaggactggtggtgataactggctgttggtaaggaaacatggcagagaccagaggcgtgggtgggcgccttgcggcattggcttctaaggtggactcgaagatatattatctcaaggatgtgttggttgagtacatggacatgaaaaatgtggttgctgaaatagcagaggagagggagaggttccagcttgaacagcgtggaaatgacgcacttctggaagcaatgaaggaggagcttgtggcagcaaacaacgagctcgaagcagcaaaagaggaaatctctcgaaagaacaatgagctagagtctgtaaagaaacagcttcaagagagtgaagcgagaaatattcaggctgagcagcagagcggcattgtggttgagcttatgcaaccaagaggggtgcaaacaagatcgatgcaaaaacgcaaaaggccattgcaaggaccttcgggctgtgaggctgatgaccaagagtatacgagtcaaatcaatgtccaatctccacgttgcttggaatcgatgagaactcctgatgtcaagaaaagatcggtgcagaaacaaaaacatttatctcaaggacttccaggtgatcctggtgagcttcagttaatggaagggcatctgagtgacccgaatgctggggaagcctcaggtgctctggtgagcaaagatgatgacctggaggcagttagagaagagttgatcaagggattccttgacattgataacggtggacggaaacttgggataaaggaaatgggacagttgaatgagaaggtgttccagattgcatgtcttgctaagctacctccagaagaagttggcgaggcatcgtatgaactatactcatcgtggcagaagcaactcagtgacctaagctggaatcccttcaagacaatcacagttgatggtaacggtaaggagattgtgaatgttgatgatgaaaagctgcaagagcttaagagggactatggagaaggtgctcacaaggctgtcatgaatgcactaatggagatgaaagaatataatgtcctagctgacagaagcatcgcgtatgagctgtggaactacaaggatgggaggaaggccaccctgcgtgagtgtgttgagtacgtttgcaatcaagtgaagcaactcacagtgaccaagcgcaggaagtctcgcaggtggtgagggctgagttttgggggcagtgtaggactaatccatgaagttcctgagcaagaatggaagtcttagcttgcttatgtcttttgtaaaaatgtcatgactaggaagtaggaatcctgaagaacctgatcgtatgaagcaacggatggaaaactatgaactactactactactactactagtacatctattttgtgttttgtaaaaccaagttgtggcttatgaccactgtactgcttgtgcacccagctcattacatgctatagtatgtatttacatgagacctatagttaatgtctg

SEQ ID NO: 7385 - DNA, 1569 bp, Oryza sativa
  ref <308>: DATABASE ACCESSION NUMBER: AK064512
  ref <309>: DATABASE ENTRY DATE: 2001-12-06
tctgaaagctgttgtcaatcatttgcggacagatgggaacatatcttgtattggtctgtggggccgctcaatgggtgcagtaacaagtctgatgtatggagcagaggatccatcaattgctggaatggttcttgacagtccattttctaacctggttgacttgatgatggaactagtggatacatataaatatccactaccaaaattcacggtgaaactagcaatacaacatatgcgaaaggttgtcaagagaaaagccagctttgacatcatggaacttgataccattcaggtagcaaagcggtgctttgttcctgctttgtttggacatgcgactgaagatgattttatactgccccatcattcagacaaaatctatgaatcctatgttggagacaaaaacattattaaattcgatggggatcacaattcaccccgtccacaattttactttgattccataacaatatttttccataatgtgctaaaccctcctgatgttcctgatgaccattatttcctgacacctcatggaagccttggtcagggtcattgggatacagaacatgacatagagtataggttcgctcaatcaccaacagcccgcacagctaccacagaagatgccattgcgcagttacgttctagaaggctcatgagtagaatggaggtcccaactggtgccactgcagaagacagggctgacagaaatgaggtaatggacagtgataatggtccttcctcttctagtgtatctactgcaactcctcctaatggccgcaatggaaggctcctgactccaacctctgatgatggcgagtatgtggagtactcatttgatagtctatcagatatgccctacactgaggaagatgaggatagaatgctaatgcaagcaattatggagtccttgaaggatcttgaactgtcaaatacaaaagctgcgcaatctgccgcatctgatgctgcatccaaagaaaataaagaaaatggttgcaatggtgcaaccgtgacagtattggagccagatgcatcttccacctcggcgcgtcccactcccacagatgctcctggcaaggatgtaacaacctgcagtactaaagcaaagtcacctgaagtgcaaagtgcaagcaaccacaccacaaacaacgccgcttctgtgaacacctctagttccttagagtccaatgcatcaacccatgttacgaacggaaaatccacctcgtcggaatctcagaaaccaacacagaacgccaatggggaggatggtacaagagcaaccctggtggtacagaagagccggacaggcagcctaatggatggactgacgcacaaatggggttccttgttcaagaacaatgactaagacaagcaaaagatatacgatgacgcccgttgacgatttatgttattgtgtgttaatatagccatagagctgccgcctctggccgcacatgtccagcttgattggtttaatttacgtgtaaaatgagaaaggaaaaagggatatactgtacaagtggtgtatatatacagctaggatggtagtgatcccattgattgtgtacc

SEQ ID NO: 7386 - DNA, 1732 bp, Oryza sativa
  ref <308>: DATABASE ACCESSION NUMBER: AK064513
  ref <309>: DATABASE ENTRY DATE: 2001-12-06
gacatcaaggttgtggcttgatgaggataactaagctgacacgccggagttggctgctggcacaacatggtggtgccttaccgcaccgcaggcgcacgcgcggtagcgttcgtggtggtgcttcaggattccaatgtactgcgtccaagatcagaacgagcttgccggcggaccactgccgtcccattctttagtgagctggagcgctgccatcttatccacggaaaacgcgtcaagctatcgcttcgggtcgaagcactaaaagaaaaggaccgggaaacgcggcggcataggaaccacgggaacccaggagggagaaagacgatgtacgggatacgggatcctcgtagtaggctggaccaaaatccagccgagagagggcagcctttagaagcaacaggtggggaaaccaagagaaggcttcgccttttcttatcttcttcccggcacaaaaagagggattagtattattgaccccatgagaaagcactaacaccttcctcgttggggctccgcgcactgggtccgcgacaggaaaccggctactagttaggaagtgaacataaggtatcaagaggtccctcacagtcaggtgcgatgcaattgccccctattagtcaagtacccctcttcctattttgtttaggggttaaggcgagaaatggcttgatgaacccttccgttcaccacgcaccggccccattcacttgcaactcgtagaggctgtaagtaaacagtgccccactaaattcaaagtgacggtggggttgaaagacgagagtgcctacctccgagccgagagtgcccgccctttctgtcaagtaggctactttttccggaacgcagtccggaataagcgttcctgtgtatatagatatcttcgatgctgtcatttcgaaatgtccgcttcaacccctctttcacctcccaaaaagctaagttggcttgacgagcgcagatgaggagcaataaaaccaagaatctctttcttttccaaatactttattaagttaaggggcaaagagaagcgcttttgctactgagaaagtgaatggtcagcgcgagggttcgacgacttagccgagcgttagcgaagcgtcattctcatagcgaggcgcttcgagttagcgaagcgctgtagtagcgtcggagactatgtgctataatgctgaactaaggacgttccgccttatctatagaagcagtcaactgagttctgaacgaatgggatccttggtgggtaatggctcaatcaatctatagatggaaagccctatgatgggaaactaccacgttaggtttggagagagatgggacctgttatagtttaaggggagcagatgcaagctttttctttctatagccggccaaatgactacccgatcatcggtctactctacctcaattcaccatttcgaactttatacagaaggtttttccgtaccagcttcttctacctataccgcagttgaagcacctaaaggtgaatttggtgtctttcttgtcagtaatgggagtaatcgtccctaccgttgtaaaataagagcacctggctttgcccattcacaaggactcaattctatgtccaaacatcacatgctagcagatgtagtcaccatcataggtactcaagatattgtgtttggagaggtagatagataggacgtagtcttgctcgatcaggaccctagctttattgcgagccaaaacagcccacagatccagaagcagc

SEQ ID NO: 7387 - DNA, 1774 bp, Oryza sativa
  ref <308>: DATABASE ACCESSION NUMBER: AK064514
  ref <309>: DATABASE ENTRY DATE: 2001-12-06
atcgaaatcgaagaacagtatcctctgtcaccccagcagatccttctcagagactcaaagcttcgcaacaccgagtatgtgtacggtgtggtcatcttcacaggccatgatacaaaggtcatgcagaatgctatgaaagccccatccaagagaagtaagattgaaaggaagatggaccggatcatctacttgcttttgtctgcacttgtcctgatttcagtcatcggatcggttttctttggcatcacaaccagagatgacctacaagatggcaggccgaaaagatggtaccttaggccggacgactctaccatctacttcaagccaaccaaagcagccatatcagcaatacttcatttcttcacagccatgatgctatatgggaacttcataccaatctctctgtacatctctattgagattgtcaagcttctgcaggctctgttcatcaaccaagacattcatatgtatcatgaggagaccgacacaccggctcatgctagaacatccaacttgaacgaggagttgggtcaagtggacacgatccttacggataaaactgggactctgacttgcaattccatggagttcatcaaatgctcaattgccggaactgcgtatggccgtggtatcactgaggtggagagagcaatggcgaaaagaaaaggttctcccttgatcgccgacatggccagcaacacccaaggctctcaagctgcaatcaaaggatttaatttcacggatgagcgtgtgatgaacggtaactgggttagccaaccccactctggtgtgattcagatgttcctcaggttgttggccgtttgccatacgtgcatacccgaagttgacgaagaatcaggcacgatttcttatgaagcagagtcacctgacgaggctgcttttgttgttgccgcacgggagctcggtttcacgttttaccagaggacacagaccggtgtttttctgcatgagttagatccctcgtctggaaaacaagtcgacagatcatataagctcttgcatgtccttgagttcaacagtgctcggaagcggatgtcggtaatagttagggatgaggaggggaagatctttctctttagtaaaggcgctgacagtgtgatgttcgagaggctatcaagtagtgattgtgcgtacagagaagtgacccaggatcacataaatgaatacgctgatgctggtctgagaacacttgttctcgcataccgccaacttgatgaggccgaatatgcgaatttcgacaggaagttcactgcagccaagaactctgtcagtgctgatagagatgaaatgattgaagaggctgcggatttgcttgagaggaaattgattcttcttggtgctgccgctgtcgagttcggccacgccctgcgccagttctccgtcaggtccaccggggttggcgtctccgcccgccgcgacgccagggacctccacctccctcctccttcccaatcacattcacattcacaaaccacatctacctagtaatagtatagtctagcaagcagctactgttcactaacagcaccatttttttttccacatccaaatcaatttccctttttcgtgtacaaaatttatactagctgaagcctagtactagccttgtaactgtacattaaccctacttgctcatctcatacgacaacatgtaagtacattggagcggacgcatacgtacgtaccatccatttttatcttgttttgttccttcatcatcacacattaatattcattcaggaacaataaagat

SEQ ID NO: 7388 - DNA, 1694 bp, Oryza sativa
  ref <308>: DATABASE ACCESSION NUMBER: AK064515
  ref <309>: DATABASE ENTRY DATE: 2001-12-06
ataatgtgttgattaccagtctgttaactctaggtacatatggagttattgtcctggacatggacaattaggttagtacaatcaaacaataattagtcatgtatatttctatgctaaaaaggccgaaattatattatattcgctctctgttcatgtctatttgttatatattgctgcttgtactctaaaaaactgtcacctaccaaacaacttttctatttgctactatttcaaatccaataattgtgctatatctgctatataaactctctggactttgtgccatggttgcttcctaattcaaatttatatgttatctacgccaaatgaccaatatacttgtcaagaataaataggccattttctaatatgagatgtgttgttttaggggtaacttaccaatgtgctagcataactagctgaagcacacttagatttagccagtgaaaaaacttggccagcaattacataacttctttagtttgagagaatacttgttgtttcagctctcgagtgttccctggcatatcttgagagggggagagcagctaaaaaggagctgctttggaagctgctgtgtcatcatagaattattgttgaattgaaggcaaaagaggatgttgcaagggtcttgatttggatggacatctgagatacacttcaaatccaacttgatggaaaatatacagttcctcaacactactcaggagagattctggcttgatgccaatgggttggataggaggaaaggacataaaaacccattgctaaatctgcttgttcagctatatgtgaagtgttggcactgcctatttgaaatataaaggaattggttttgttgtcgaaatgggtcaacctagacttaagtttttctttaacatgccttggtagttagtttctgaagtttgagagaagattagcatcaggattactgttgatttgtatgttcaacaatctcaatgaacaattccaaattgcaattaacctattcttgctgtattaaccactatataccattgggcatacgtagtaagaatgtaagatgcaacaataaaagtgcttaagccctgagcgggttagtatcgatttgctgcatgagtttataaactttgagctttgttttctcataaattgtccttagtaacaataatactaatagtgtcaaaataccttctcacatgaatcagtgtagtgagcagttctgaataagaattacatgtcaaaatatcctgtaggaagtcaacatgaatatacatagaatcgacaatatatttggcgtgtggccaataaattgagtttcatgttataatcacttcgttgcatctatcaatatgtaagatcttgtttttacctaacagaatttatgaatagaaggagacaaatgtatttgttcgctcaaatggtcaaatttgaaatcataagtatttttactaaaatgtagtttagcaaaccggtgaactttgttagctttaaaatatttttatccccgttgcaacgcacggacacttaactagttggtaaaacaattcatcgattcaactagtgtcgcatacagtgaatctttctatattactgactaattaccggctgaagaaaggtcgaaaaaagaaaagaaaaaacacagtgaatcaatcacggtaccagcattgtttaatcagcctttaatacacctagacaaaccacggaagaagagg

SEQ ID NO: 7389 - DNA, 1441 bp, Oryza sativa
  ref <308>: DATABASE ACCESSION NUMBER: AK064516
  ref <309>: DATABASE ENTRY DATE: 2001-12-06
tgcgaaagattagctatataggtgctcgaggcacttgtttatgcgaaagattagctgtatagagccaaaaaacagggggattaaaggtataatatctgttacatttgcttatttattggaccattgctgctgccttgatttaggaatattagcagttactcctagaacttttacattttagcagttatttaaaaaatgcataagtccctatgttatatgtatatgtgtgtgcttagacttgtgattgacttggtttgtctaaaggtagtacagcacctctagcttgctgcatgttgatgtttacgacaacactgtattgtaatgtgcagtgcattaattagttaacaattctataactatttgtcaagtgatggtcctctaccaggccaaatccttgcatgttttgtggtgtatatactttcagctctccttttgacaactccggttcttttgtggtgagccaactaaccattgtgaagaatatgtaatttgggtaggaggatttcttttggctaggggaagtatgtaattggcattatcaatagttcttttaaatagcatgaaaaatctatgtaattcacatttggcttttaaatagtgctggaaatctgtagtgctggaaacctcatgtatcgataaattagattagacattttttatgcttctctcgtgtggcaatatattgccaaatttttacggtgaggaactgattgttcttgttgtgataaatcataaatgagaataacttactacatttctttgatggtgttatgttctttcaggtatttgcttcctgtaatcaaagaactgtaacagtttccgtgatttgtggctcatgtgaggttcttcatgttgacaagtttagagaagaaactaagggaagtcagctgattgactgatcagaagatggatactacttaacaagtgactccccaatacctcagggagagattgtcattggtggtcctaatgtaatttcaagaatgaagctaaaacgaatgaagtattctagctcctccgaactgcaaaagtagcaagtatttgcttgcccaatcatatgagttgtgtattcatgtaatattaagaaagttcagtaaagtctgattaatttaggctgtgctcagcgaagtgagcatagctcaactggttaggttccttgtggtggaaccagcccacccgggttcaaatcctagatttgacacgggtgctcgcatttacggctaattattctttcagtggtaggcgacgtacccgtcgacagcgaggcgcctgtggtgacttcgtcaatctcaagatatgccggcccagtcttccggaggtgctcataggagtagggtgtgcgtgtgtgcgttcataggggtgagtgtgcgcatgttgtgagcgcctgcgtttgtactgtgtttctcaaaaaaaaaaattaggctgtgctcagttaattttc

SEQ ID NO: 7390 - DNA, 1343 bp, Oryza sativa
  ref <308>: DATABASE ACCESSION NUMBER: AK064517
  ref <309>: DATABASE ENTRY DATE: 2001-12-06
tggaatggttggattattgtggaattggattcacacctccccctctattcaaaaccctcaaaatggttttaggctgggctcggggtgcatggttttgatagtagcacctcggccatataaggaccggtcttcgggcctctgttgcaaagcactaccgtacttccacatgtctagtgggtaaggcttagtttgtggctcagtctggttataaacaaaagtacacggatggagatggacgaagtcgggggtcgatggacatctctagggcaaatgaaggctacacgagctgcggcccggtagtcgagatgtcatggcacagggccggtgtcctgctgctaggggctcagtcctgcctacctgtcccgggggttccggccgtaggtggggttgggtcggtactcttgtttatggctaggatgggttggaaactatgtcatgtcttccgtccgtatagcgtggtggtatgtggcacgtggttacacgtgaggaagatgtgtcttgtgggtaaagatgtacacctctgatcagagtataatatattcgagtagccgcgccctcggttatgggcaagccgagcaatgtacccaagttagtgtttttaattcttaaaacctgcttttgatccttgggatgaattggttggctcaattccaaggagtagtggattgcacaagacgcactatcactctataccaagggccggaacaaccggttgttttctttgcacccccaacctctgtcggcagttcagaacttcatcagataggactgtcagaaatccccatcgttagtgagttcggagatgtgcttccggaagaactacccggtatgccacccaagcgagagattgagttccggatagatcttgctccaggaaccactcctctgtacaagcgaccctaccgtatggcagcaaatgaactggccgaagtcaagagacagttggaagagttgaaagaaaagggatatatacggccgagcacttccccctggggtgctcccgtgatttttgtggaaaaggacaagacaaagaggatgtgtgttgactacagagctctcaatgaagtcactatcaaaaataagtacccttctccccggatcgatgtcacgtcctgataaattcatcccgaaataaaaatcattttctaaaaggaataatagaattaattaaaattcgaaaagaaattggcaaacactaaaatacgtacaagaaaatttcgaatgtggtccagagaatttttgttgaattctccttggtctaaaaggagccctcaaattttacttgaattttcagagcaccaaaaatatttattaaacaacaacaacaattatcaaagtttact

SEQ ID NO: 7391 - DNA, 1901 bp, Oryza sativa
  ref <308>: DATABASE ACCESSION NUMBER: AK064518
  ref <309>: DATABASE ENTRY DATE: 2001-12-06
taatatactatgtctataatcgcccagtacatatccttgctctaaggaggatatggtttctaactaacttaccaaattagtgtgaagccgttggaagagtggccgacatcatacaaattccagctttcctctgtcgtcaggtacaaatgagacaaatggattttttttgtagcgaattattgtgctaccagcagtataagcacgactctgtagtttacttcacattctgcattcctaacacatactatggtgttaacagactgatcttctagtggctgctgccaagactggaaaaattatcaacatcaagaaaggacaattctgtgctccttctgtaagttgtactttcagcttagtcttgctaaaaatggattcctagtctcctatgttggtactgtaaaggttctgttcctctgatttaatatatacaaggttaactgttgagagaatatggaagctattttttccggatcctttccttaatttcaggatcctacactgcatagcagcttagcttagttaagcagaaaaaatataataaaacaggaaaagtggattgtgtgtttcctttcaacctgtcaccatccagataaaccagttacctttcaagaagaatttatatttctcttcagataacttgtgttataattattttttttccagacagaagacacgcatgctaattcataagctgataatttatttatttttatggataaatgttggtccaaacatctacaattttaataatacaagcctgtaagtcaaaaaaaaaataattgttactagaagtctagaactttgaaacatgaaatatctgcaatcatttgagtaaagtccttttaggaattacctgctttttcaggcaaatccctttatcacatccagttatgttaattttcggaggcatctctagcatgtctgtcataataaacttgtatctttccaggttatggccaactctgcagagaaaatcagacttgctggaaatcaaaatgttatggtctgtgagcgtggcaccatgtttggctacagttaaggaatatatattcttttggctatcttttctgtacattgctcaatttaagataacacaaagtgaaaagtcatagatgtaaatatatgatattggataattagaaacacatacttactgtggtacgcagtgcaatggtctggaactaatggttgccatggagtccatagatgaaagatcaatctagtactaccagaatggccaaatgtttcttaacatatgtgatgtatctgtgtgttccctaaccgttgatggatattttatttcactaatacaaggcattgaaagccatgtcagggtagctgtaggttaattgccatgcaaataagcaatagggccacttaatggataagcacaagcttcagacctccttatttaggttctgaaggaaaacaaacaactggatgtttagccagcaccaccagctccctttcatcgcatgcccagttttagcattgtctgtttattaatatttatttttgcaccctctccaaagaaaattatgtttttgattgcttcatgacggttgaattctgttttcattccgacacagatgatctaattgttgatccaaggaattttgagtggctgagagaagctaattgtccagttgtaagtgttagcactttattgttgtgcaggagcagaactgcgtaatctacctgatgacttctgtgttgatttgtcctgcttgcttctgattgatgaaattggctgatggaataatatttggaaaaatcaacctaggattttacaaggaacctatgtttagtagttttattattctcttttcagtattcaccagaattccttgaggaatgtatgtttggattctgtacattcctaacaccaacagaattcaagg

SEQ ID NO: 7392 - DNA, 1236 bp, Oryza sativa
  ref <308>: DATABASE ACCESSION NUMBER: AK064519
  ref <309>: DATABASE ENTRY DATE: 2001-12-06
attccccttttcctcccttcccgggaaccccggccggcggcgaccggcgacctcccctccgagtcggcgactgggtgccatagaggaaggaggcggtggagacaccggcggtggcaagggcgacatcggcgaagagttcgcctccctcctcctcccatcctatcccacggaagccagaggaaaaccttgcaattttgcgggatggtgtggagccaaatataatctgctggagtccaaagtgacccatggaaggacatcatccgataggcatttgctgttgagactttgggttccggatttggccttcccatggaatctgatgaagatgctaagaaggggtatgctgattttgaggagagggtaaagagaacgatatatatcgatcacctttctcctcaagtcacaagctcagtaattgaagcagctatttcccagtgtgcacgcgttgtcaatgtggacttcattgttaattacacaatcccatatgatattccttctgctgcgttggtggaactagatgatgaaatacaagctaaggctgctatcgacttgatgaataatttccctttcataatcggtggaaagccaaggcctgtaagagctatctatgcaaagcatgaaatgtttctggatcggcctcctcgccctggaatcaagaaagagttccagtgggtgaaacaagaagatggaatagagtatgaaggaatgaacaaactgcggctccttgcaagaaggcaggaaacagaaaatatggcactcataaagaatctattggaagaggacaaggacctagcaaagcagcaacaggagttacttgatggaatttacaagaagtactgcatactagacagtgacgtgatgaatgatatcaagaacctctctcgccgttatggagtcaacctggccggtgactgatcagttttgaccatccaagagacggactgcttcaaaaggtccagatcagtccccagggcgagcaacatgcattggtgtgacccaataactgcatcttctatgtaaatattttttttgagaactttctatgcaaagattctgtagtgttactgttgttcccgcatcctgacccacccagcaacagtatgctcgttttgtgatgtgtataggagtaacttcttgcgctgcgcggagatgattcgctgctgtcggatgctgtctattatgcatgtctgaaattaacttgctgttgattaatcggaggttacattcataatgcct

SEQ ID NO: 7393 - DNA, 766 bp, Oryza sativa
  ref <308>: DATABASE ACCESSION NUMBER: AK064520
  ref <309>: DATABASE ENTRY DATE: 2001-12-06
aattcggaaccctttgttcagctgtgtgctaacaaaccccagagagagattctctaccccttttctcttgtgttttccttcgcggagattacagaagcggccgcgtcatcggcacccaatccgtgctcctgatcctcgagtttaggttgcgtaggttggttctttgagagtgtggttgggcgaatccttggttcaggctgccgtatagagacggtggttggctccttgtgcgtgtcgtcaggttgcactaattatcgctgcttgcagcaagttatcggtcgttcttcggctagttatcaagatcaatcttacgtcgtgaagatcgggacaacaacctcatcatctggtatcagagcctcggttgcaacggtaggatttttacccttagctacatatatatttgtgttcgtcctatccactgaaaaagccataaaaatattctgctatagccctttgtttcaatctgttattcttgtgagtttagttaattttcagtccattagagtcttgttttagttgctgatcatattctcctttgcgtgtcctttgagcttctttcatacatctgcaaatccatatatataaaaaaaaattcagaaaccggtatcatccttcgcgtaaactttgatcctatcaagttagaacgctgacggtcgtgtcttgtttctacaaaaagaaaagtgtataagtttcatatctgttcttgttcttagttatatatataaaaaaaagtttatcaaaaaaaaagagaagaaagaaaagttac

SEQ ID NO: 7394 - DNA, 1767 bp, Oryza sativa
  ref <308>: DATABASE ACCESSION NUMBER: AK064521
  ref <309>: DATABASE ENTRY DATE: 2001-12-06
taattgctggagatgatgggaaaagattgcttgcatttgggaaatttgctgggagagctggactgatagacttcttacacggtctcggacaacgtaagaatgctcgccttaatttctcagttcatgtactgacatgatatgaagaatgcttgccttaatttctcagttcatgtactgacatgatatgatattctagtgccacccaaatctgctatctgcacatactatcttaggtagcagtttttcgtcataagcaccatttagtcttcacaagtaattgtttggtgttgtggattattcaagcaggtcatttttcaccttaaatttcagggtacttgagccttggatactcgaccccatttctctctctagggcaatcacatatgtatccttcactcgctgcagccaaggctgcagtcattgccattggtgaagagatagcaacatttggacttccatctggaatttgcccaatagtatttgtattcactggaactggaaatgtttctcagggtgcgcaagagatattcaagttactgccccatagctttgttgatgctgggaagcttccagagctttctgcggctagaagtctgtctcaacatccacaatcaagcaagagagtattccagctgtatggttgtgttgtctcttctagagacatggtcactcccaaggatcccaccagatgcttcaacaaagctgactattatgctcatccagaacactacaagcctgtttttcatgaaaggattgctccatatgcatctgccattgttaactgcatgtactgggagaggaggtttccacgattactgagcattgaccagttacaacaactgatgaagaatggttgccctttggttggtatttctgatataacttgtgacattggaggttccatagaatttgtgaacaagagtacttcaattgagagacctttcttcaggtatgatccttgtactaattcatgccatgatgatatggaaggaaatggtgtgatctgcttagccgttgacattctccctacagaattttccaaagaggtgggctcttttatagaataagtaagggtatctttgttttaagcacaaaccttttccattgactgttgtcctactgaacttctatgctgtaggcctcccaacattttggagacatattatccaaattcgttgctagattggcctcagctaaggaactgttggagcttccttcacacttgagaaaagcttgcattgcgcatgctggcagactcacttctctgtatgagtatattcctcggatgagaaagactataatagagttgccaccagctccaacaaatctattacctgataagaagtacaacagcctggtgtctctcagtggccacctctttgataagttccttattaatgaagctctggatattattgaaacagccggaggttcttttcacttgattagatgcgatgttgggcaaagcattgatgatatgtcatactcagagcttgaagtaagaacacatgtttctttttgatgcacagttatttagaattaaaatcaatattatatggcgtctatagtttgggaattaattattgctatttttggaacaatctgctactcattgatggcatgtcaaattcagagcttgaagtaagaaatcattttcttttctatgcacacttattcaggataaaaaacaaaattacatggtgtttctagcttgggaaattaattgttcctgttcctaaaattatcaatctcctgctaccactcatt

SEQ ID NO: 7395 - DNA, 1515 bp, Oryza sativa
  ref <308>: DATABASE ACCESSION NUMBER: AK064522
  ref <309>: DATABASE ENTRY DATE: 2001-12-06
atgaaaatgagcaggtcattgatgctgcttcaactgatgcaagctcacccttgccatatcaagtatatggcaatggaaagactggatcagagctgtcaacccgcggaacatatgaccagctactggaaagacagaaagaacatgttcagcaattcttggccacagaagatgctttaaataaagctgctgaagctaaagctaaaagccagaagctcttgcaacgccttcatggcactagtgatgcggcaggaagtaaaaagatgcctactgggaacacctcacagaacatgactaacagcagacacttggagctcgatgtttgggcgaaggaaagagaagttgctgggttaaaggcaagcttgaatacactgacttctgaggtacagcgtctgtacaagttatgtgctgagtggaaagaagcggaagattccttgaagaaaaagtggaagaaaatagaagaatttgatgctcgtagatcagaacttgagtgcatttacaatgctcttctgcgggccaatatggaggcatcaacattttgggagcaacagccattatctgcaagaggatatgcgtcaagaacaatcatccctgcttgtaatgctgtggtagacatgtcaactaactcaagggatctcatcgagcgagaattgtctgcgtttggtcagagcttggataacagcttatgcaggttgccagcaactcctcaggctcttttggaggctttgggctccaatggtgctacaggatcagaagcagttgcagctgcagagaaacatgctgctttgttaactgcacgagctggagccagagatccatctgctgtgccatccatatgccgcatctctactgctcttcagtacaattctgtttcaccaggtacagaaggcactgattctggcttggcatcagttctaaattcactggagttctgcctaaaaccttgtggttctgaagctagtatactagaggatttatcaaaggctattaatttggtgcacacgcggagaaatctggttgagaatgatcgtgttttgctgaaccgagcacatcgtgctcaacaggaatatgaaagggtggccaactactgtcttaaattagctggtgaacaagaaaagatggtatcagaaaggtggttgccagaactgagaaacgcagttcaagaggctcaaaggtgttttgaggattgccgacgtgttaggggtttggttgacgaatggtatgaacaaccagcagcaacagtcgttgactgggtgacaatagacgggcaaagcgttggtgcctggatcaacctcgtaaagcaactccacatggaaatctccagaagaacgcttgccatatccacggcaggcgacgactaaggcagctggtcgttatctctgctgtttgattttttatttttagaggcttgattggttggggttttacgccagcatatctgcttgatagctttgtaccatagcctgtgatgtaattgtaaaatcttggtttgtttattagtttagtatatgttctttt

SEQ ID NO: 7396 - DNA, 2377 bp, Oryza sativa
  ref <308>: DATABASE ACCESSION NUMBER: AK064523
  ref <309>: DATABASE ENTRY DATE: 2001-12-06
ggacagaacaaagaaacatgccatagggataggctctggcggtggccgggcgaccgggagacgctgaccgatcctcaacctctgaattggctatggatggagtccttctccaatctgctatggaagtctgcaggggctacgcctgctatccggttgagccgggaggaatcaggatctgatacgagattgaactctgcccttgggttcttcgtgttctttctgagaactatatgcaactcttggaaagatatacatgggcctgaaggatttagcccttcttttgaagtccgaatcaaacttgatgtacctcagattggtaacctaaggttgttttggagttatgattggtggagatcggattggtctgatatcgtgcgggtaagggacttgttgctgaaactctttttaagggacggatcggtggtgcggcaaacgcaggttgcaatctcccagaagccaagttctctagatcgattctctgttcgtcctcaaggtttcggttctacttcaatggtgtccgcaggcggtgggggtgacaaagggatcatcaaggcgatgattacccacccgaagccgtctgaggaggctctgattgtgccgacgaacaaatccttagttctgcaggattcgatggtgagaacagatttgccacccggagcgaaagtggatcccaaagtgaagactattgtgcagagattgttgtcaacgttagagcatgaaggggctagatcccaatcctagccacagggactagaggcctttacataaggggaaattgaaggggaagaagataaggtggttgaagtgaatattgaggaagaggagttgaagcaggcagggcagtgaacaatgttggctcgtttctactctcttaaagtgccgaaacagagtgctctctttgatgacatgggtcgagcgtggaggctgcggtctgatatgagctataagtccctacgtgataacctgtttatcattacattcagcacggaaggggattataactttgttctccaaggggggggggtccctggctacacaaaggagatgctttattggtagctgcttttcctgacatgcccctcaaaagttccattggaagtggttcctatatggatcagaatatacgatcttccgttagccctgatgataaaagctagaggtcagttgtatggcagtcggtttggtcatgtgaggaaggttgatgtggaagaggatggtcgcaataggcatgatttcttccgtattcgtgtggacttgccagtgaagaagcctttgaaatccaagctagcaataaaaatcaatgcccagggcactgaagtagtcatacggttcgatgttcgttacaagtggattccatacttttgcttctgctgtggttttattggacactcggataaggattgtgagaaaaaggttgctagcagtgatgccccctaccagttctctgaagaattgcggtgctccttgctgaaggcatatgagaggaaggttagcaaagtcaaagcaacgcattctaccattgtacctcgtaagctagtttttcggggtgcagggagtgcaaactcctcttcgtccaggaatgctcaggaggagaagtgggatgaggctatcccaccaagggtggatgcacacgatgggtttgataccagggaggaagcgggggatgaacgggttgatgatcagttggctagccaggcaaataagctttctgtttctggcaaatctcagggatagcctgtacaggtgaaggatccaaaggatatcacggtttctgctagtagtctgaaaggagatatgattcctgcaattgcgaatctacatcaacctgcatccttttgggagacgtgggcagaagatacaaccagtatactcaagagaagaactccagacctagtagcaatcaaggaaacaggaagagttaagcaggctcttcttcaatttgggcaggaggatacagcctctaggaaggatcaagctgaacccagccttcaagggaggcagcttaagcgtttcaagcaggttgatacagataagcaggatttggaggatatggaagcaaccagccccggggttgttggtaaattggtgggtcctacgatgggatcccgccaggagcaatgagttgcttaagttggaactgtcgtggtaccgggaacgccacgacagttcgagatctgtgtgccttggctcgcgaggcaggatctaagcttgtgttcctttgtgagaccagacagaaagttgataagatgcgtcgtattcgtaataagataggtttaagggggttttgctggagttgattgtgagggtttaagtggtggtttggctctgttttggggtgaatcgtttcatgtggaaataaaagatatgaatgaaagat

SEQ ID NO: 7397 - DNA, 887 bp, Oryza sativa
  ref <308>: DATABASE ACCESSION NUMBER: AK064524
  ref <309>: DATABASE ENTRY DATE: 2001-12-06
gttgtgatccaactatgtatgtgtgtaccaactactgatccagggattggtacggataaacacagaagatttccgatttccaaaatcgagggtctgtagccgctcgcctcgccagttgcaggattgctagctcgcgcgtacgcgccagcagagaagctggcgcgcacgctagctgcgcctggctctagcgctctttttttttctgattttctttatgattttttttgttacacgtttgttccatatcacggaaaaaaagtttccttttttttattcttcttttcttttccagaaactacataaacaaacttttaagtaagatttgaaatcttttcaacttatattcaaaaattttcaattccagatttaaaagtttaaacttatatttaaaatctttcaatatagatttgaaaatttccaagtcaagattgaaatcttccagctaggatttgaaaacttttaagtcaagattgaaatctttcaacttagatttgaaaacttccaagtgaagattaaaaactttcaactcagatttgaaaacttccaagtccaaatttgaaactttaaacttagatttgaaaactttcagttcggatttgaaaacttttaaatcaagatttaaaactttctaagtcagatttgaaaactttcaactgaagatttgaaacatttaagtcaaatttaaaaactttcaagtcaaaattcaaaatattcaatttaaatttaaaaactttcatctcaaaattcaaagcattcaacttaaattttaaaaactttcaactcaaatttaaaactttcaactgaaattggaggtgaaagattcaatttataaaatatagcacggaaataaatcgcgcgaccatgtaaagaaaataagggagcgattc

SEQ ID NO: 7398 - DNA, 1737 bp, Oryza sativa
  ref <308>: DATABASE ACCESSION NUMBER: AK064525
  ref <309>: DATABASE ENTRY DATE: 2001-12-06
atcgccccccttcctgtgcagcgtgctctgctgtgtgtgcgtgtgtgtggcaatggcgttgatgcggcggagagtcgggggctacatttgctcggagctgtgtggctcggttatgaatcagaggctgtactcttcgagggtggactggaagcagcttcggcctatgatcctcaagaggataaagaaccgggcaaaggagtatccaatcaagcgcatgattccagtagcggaggaggtagtcaaggctagagagattgtcaccaaaggtgtctcgacgctgcttcaagttgttcccatacattcatgcaagttttgtcccgaagttcatattggagctgtagggcatgagatgcaatcctgtcatggtttcaagcgtatgatcaagaaccagccgcataaatggggtccaggatgcttgaatgacatccttatccctgttgaatccttccacctggaaaacactttccaggatgagataaaacatgaccagaggtttgatttccctcgtgtcccagcggtactcgagctctgccatcaggcaggtgcagatatacctgatgaagtttggcataggagtggcacgtcatctgcaatagtcagagaaaatgatgaaaaacctgctgcttttttgccagaagagcttagattcataggtcagaggacaatagaagcatgggaaaggcttagattaggtgtgacaaaactcctattggtttacccatccaaagtgtgtgagcgttgctctgaagtgcatgttgggctgtcagggcacaaggccagaatgtgtggggtattcaagttcgagggctggcgtggtaaacacaagtggaagaaagccgatgtggatgacctagttcctccaaagattgtttggcaccagcgacctcatgatccaccggttctggtcgacgctgggagagactattatggtcatgcacctgcggtcattgagctttgtatgcaagtgggcgcaagagcacccccaaaataccattgcatgatgaaggcgcaaggcctagcaccgccaattaaatgaggccaggggatctaaggagttgattgccaaattagatcagcaccatgatgttatacaggaattgtacagatcagacatcaaaagaccaatgcagagaaactccaaggttgcaaatgttgtgattttgcccaagacattagttctttgaagactgcatgttatcagaattcaggaggtcagaactaacacaattatttatacccattgatctgagtgagagccctcagatgataacaagggaaaattgtttctgtggacaacttcgtgcatggtaatttatcgactatcagcattgttaagtattcagagcgattactttgctgccctttcatttgttcatcctccatcatttgccaagaatacgggtggaagggctttatgagcctgctgtttggtcttcttctcctctgcttgactactgtaacatcattggtttctgctgttttgtgtaaactttctcacattacctagacatccttataggcagttctgttataagttagccatgtagagacgccttgttgcaagctgcaacatatggtgtggaacatcacagaggaatgtaatatcacttgctgtattgtaagccctagtcaaaatccctccttgaagctgtaatctgtgtacagatttttacctggggctccttttgctgtgccaataattacagccacgttggctgatttttcttttctggagat

SEQ ID NO: 7399 - DNA, 1325 bp, Oryza sativa
  ref <308>: DATABASE ACCESSION NUMBER: AK064526
  ref <309>: DATABASE ENTRY DATE: 2001-12-06
tttttgcatgttcaatctcctccagcccttcccctagctgagcagattgctacagatttcaagtcttgcatgatggcagctgtccagtcttcatcctgggcagacctccagccagagctcctgggtcttgtcctcacacgccttccctccttagctgaccgtgttcgactaagagcagtttgtcgcccatggcgctccaatgctcggctgcagccccttccccctccgctcccttggctcactctcctcaacgggaccttccttagcatttcagatggtgaaattcactgcatgcctttaccagatgatgcttcctgccattgctccattgacaactggctcttccttagccacgacgatggtgggttctcgcttatgaacctgttctctaaggccacattgcagcttcctaaacttgataccatttggtgtcatcatctatggtacgctgcgcccaagtttcctctcttttataagttggcagtgccctctcccctggacttttctccaacttccctcgttgttgcactgatcatgaatcgttctcatcaaaaggcattgtgcatatgccagcctccagttgccactgagtcattcagagtcgagggttctacaatggagggcatgcaggatttcaccttcttggatgggaagctatatgtgttaaataatttcaataaactcttcatcctcgagattgatgagagccacatagattatctcattgtgcggaggtactatctagttgagtctggtggtggcctgttgatggtgacacggtatgttggcattgtgctccctcttgcagagcccaactccttcaaacattcgcgtactctttcattcaaggtctttgaagcggacttgaccaccggctctcgcatgtggagaagggttacatctttggggggtcgagcactatttgtcggcacacattgttcctagtctctccctgctgcagaatgtggtgtacctcaggaggattgcatctacttcatgtgtgattattggaggccttatgctggtgatcctctttgtgactctggcgtctacaacatgagaaacggggtgaccacgccgttgttgcaggatgccacagcgccgaggctgcatcctacaggccggggggatcctgcatggttcttccctgctgatgttgctacgtaatctgaatgtaatccgtcgtactgtgtggcatgcggctgttgatgtattttgaagtatcctatatggacatattacatgtagataggctgatggatgatgcttaaataatgttagtactccctccgtattttaatgtataacgccgttgactttttagc

SEQ ID NO: 7400 - DNA, 2103 bp, Oryza sativa
  ref <308>: DATABASE ACCESSION NUMBER: AK064527
  ref <309>: DATABASE ENTRY DATE: 2001-12-06
attttaatccaacaatctatcatcttaatgactttctcagatataatgcgtgactctccattccttcataagattggctacatgtgcatcgagaaatgtaaatattaatgaatcgcttgtttatgagaaatgactggtagcatgtttaaatggatgataagtagaattacttatccttgatctgtgtgccaagatgaaacatgactatcaaaagtagatggatagagtaacatatatggctgagattctgatttattactccatatttctttttagatttttaccttatcaatctcatcaccgcatgattagcaactattacggtgtaggggtggagctgcctacctgccatagtgccatcaaatgctggtacgagatggaaatagttacgttagtttcgtgcttaggattagcacttcgcgcgattttgatacttatgattagtgatgcaatgctggtttagacaccgaagtcaacacacagtactgaaaaacatgatgagatatttggtcacaattaatcagtaaatgaaattgtttcagttttgcattgaaataatgaaattgttttgagttttgcattcaaatgaaattttagcgggttgcaaaatgaccaatgatttttcttaatgaaaatctggtgttgtggcccctttctctaaaagcaatgaggttgtttgaaataatgtgtaggacttctaaatccacttcacatatgtgcatgctctttacacgtacttagcgataattggaggcgcctaaagatccctcctgaaagacatgcacatatgtgtactcttaaaattattaattgtacggaatacagtgttgctgatgccatagatttggcattgttggcacagtgcacatgctagctatttggccacaagccaacatcgatcctagttaaatcacttacagtagatctttttttttaaaaaaaagaatactatcgccggtatggattctaaattgtacaattttttttcgcggacaaaagcttatataaccacccaaaaaccgcgttaaattgatttgaattggagtaaatttcaaggggaaaaaacgtgcattgccccatcttctcataaattctgtgttttttttggttaatttgatcttgtcattgcaaacgtgtgacttttacagtacaatatacaacaatagtatatactgcaagtatacatgatctaacggtgtagattgatttgattttttagttaattagattacagtataaaatttgaaagagtaattttgtcttttctttgttattctatcaaatcgtgctatcatcacgtgtttcgtcatcaaatggcggtcaggatgctcctcctctagtgcaccataagatccaggactaggtactctcaattagagtcgctcagtattttttttatgctttcaaaaaaaagtgtattttttattttctatcaaatttctaacatgtcattctatatactaccagtatatattgatagtatattgtaccataaaagttctatgataaatgccattacaaattacctattcatagccgtgctactcaaattttataaaattagaaccataccatcaccgtgacgtttttcatcttcttccccatctgcacgtggggtccacccctcagattcatcttcctccttttttttctttcttttttctcattccctaaacacatttgcaatggcacggatcaaatcaatctcttttttttttctttttgctctacattgtcttcagtacaattatctgttcggtcctacccgttgtcggtgatcggaccacccagctttccggtccttaaaacggagtagaagaacgggagatatcaacgtgaagtacggctaccggagtagtagcaagttgcaagctctccccggttgtttgaggctggccggatggccctggctcctcgcatcaatcacgggctgcgccgaatcgtcaagaggcgtatcgttgacggatttatgtctgatttgatcgagcttgagatcgcatgtatatttgtcgtaaaactacaaggccccctcgaagcttgaatgctatcaatgcaaagggaaggagccaacgaaggagaggcgagagcgttgagtttggtaag

SEQ ID NO: 7401 - DNA, 1336 bp, Oryza sativa
  ref <308>: DATABASE ACCESSION NUMBER: AK064528
  ref <309>: DATABASE ENTRY DATE: 2001-12-06
ttgaagatgatgatggtgtttcagaagaagctgtggctgacacagttggtgaggatatccctgaagaagatgcagtgcagatagatgaggacgagggtgatgatgacgtgcctccaccattgacaaggaaaggcggggggcgccggaagcgaggtcgtgcatcttccaaggctcaggttgtggtgaaaccacctgttaggaagaaggatgatgaggaagtttgcttcatttgctttgatggtggtgaccttgttgtgtgtgatcgtaggggttgtcctaaggcttaccacccttcttgtgttaatcgggatgacgagttcttcaaatcgaagggtcgttggaattgtgggtggcatatttgtagcaactgccagaaacctgccttccatatgtgttacacatgtacctattccttatgcaaaaaatgcataaaagagacaaaattcgtctctgttaggggaaacaaaggcttctgtgagacatgcatgaatactgtgatgttgatagagaacaaggaggaggctactgagcaaatggatgtagattttgacgacaaaacaagctggtggtatttgttcaaggattattggttgaatttgaaaacaaaattaccattgacgtttgaagaaatatcagcagccaagtctcaaaagaatggttcttccttggttattcgtgacaatgatctcagtgaaccacatgatacaaatgatgaagaagagggtaattcagacagctcatctgtgcgccatctagaaggcaattcaaagaggaaaggaaggaagcgatcaaagcaagctgctaacgatgacagttctgtagttaaagatagcactaggaaatctacaaagcgaggcctgacaggtggccgtgatactaaaagttctacagggagaaaggttagaaaattgtccaatcgtgctttgagcagtgaccatcgaccaagagaatctgaaagcgtagggacatctacatcgtcagctgaagagaccagttgggcttcgaaggagctcttggattttgtagcaaatatgaaaaatggtgacaaatctgtgctgtcccaatttgaagtccaatcccttttacttgattatattaaacgtgaaaacctccgggatcctcgcaggaaaagtcagataatttgtgattctatgctcaaaagcctttttgggaaagcacgtgttggtcattttgagatgctgaagcttcttgaatcccatttcctcatgagcgaggtctcgccagttgaaattgatgacaaccatggtggtgttgtagaccctgatcctagtctggatgctgatggcaacagtgaagcatcaatggtgatgagctc

SEQ ID NO: 7402 - DNA, 1831 bp, Oryza sativa
  ref <308>: DATABASE ACCESSION NUMBER: AK064529
  ref <309>: DATABASE ENTRY DATE: 2001-12-06
tcatgcacattattatatttgaattttaggtgaatattccatgcatcttttacgtatggtctctccacttccgttgaataccgcaacactttctgaccttattctcaaataaaacttcattcagccctgtttaagctttaattggaccaattgaaatgaagaatttccaatttccgacagagatctgtcgagtgcacaaagattgtgtatccttatcgtgtccacaatcaagaactaataattgtaattggtgaagggttagtaggccagctcctaattttcttatcagagtcaacattagcatccacaggcacttttgttcatgccatgtgttcttccctcacaatctccttatgattgatttgtccacgggagaattgccatcacttcggttcttgcttcatttcttctctgggtaatggaataaggtgtgagtgaaacacctcacatgatgcctttcttctccctccacttgagaaagcaaattgttcctgtaatttgaaatcggccggcttgctgagttgctgactgtgctggtaattaccggcagcatgctttgctcctagcattattgattatcttgttttttttttttttttccacatcacataaatgaaacagtgttgggagttaaatttactagcacaggagccaactaatcttgtaccaggcacattcatcagaattatatatatgcaggcttaggctacacaaaagcttgtactaaacagtactactagttagacttgtcatcatagtgaagttaacaaagttatcacttatcagtgcatcgtacttggcattagcggccgacagagaatccgccagccacactccccacctctaggggaggggagtgacagtcaagtatcccttcattctccctctacaatgcagctcatgcatagccttttgatggaaaagcagaaattccagagaggcagcaagagcataccattttgattagctcaccactggctctcctggttgccctaaagtaagaagtagtgtagtacacttttgtagttttgttgctaatctattcggctaattcctactatattgattttggaatcttgtgttctttggatttacttacctttgtattcctgcaagggtcaagtgctcaggggcggatctacagtataagcgtcagtgtcaagcgacaccgatgactttcggcaaaacctataacaaaactgcttatccatatactataacactatgttctaagtataattagcatactatgacaccgacagacacgttatgacaccaacaaactgattttctggatccgccactgcaagtgctgacagagttattgcagactcgcagtccgtcttcagttgcaaacagtttggagggtagttcttggtcgtccattacttcactgaagattccgaaatccaacaaaattcaggccgttcttcagaaagaagcaagcactgcagagctgaactctgcttcattggatggtcaaaaaggaaggctgctgaagattggctgcatttgggctcttaggaatcgatatgtgcctgcagaaagatcggtcaagattattcctcacggttaatgctgcactggctgttcatttggttaaattttgcttgatagcagtaggatgtttagagctgccagcttcaggcttccgtagtgccgtgttcaagaaatcagtgtgttgattctatgactgaaatagtttgcaagacatggatagtatatagagaaaatgtcgctgcttttgccaatcgcatcatcaaggcagcaaagctattccactatcttgattctatgacagttgaaagagatataagcatctacgtaactt

SEQ ID NO: 7403 - DNA, 1407 bp, Oryza sativa
  ref <308>: DATABASE ACCESSION NUMBER: AK064530
  ref <309>: DATABASE ENTRY DATE: 2001-12-06
agcccacgacgacgaggagttccaataaatagacacagggcagcgcgaagtgtatcggcgaggcagcgcgaagcactaggccactggctagctgctgtcgacgcgtaaagcactgtcacagggaaaaaaaatgctatcccacagtatagacagttgtaaggaagaccaagaacatctagctcttctagatcctaagcttgccccggtgctactgttggttgcttaccgcattattgatacagacgacaagggcaacaccgatgatgaatattgtcccatagatgatgaagaggaagaattagatcacggggatgaaaattcacatgatgaggatatcgttgataacgataaggatgattgtgaccttggggatgaagatgacaatcacacgtgcgaaagagattatgatggaagcgatgatgctggaacggaggaaagtgatgacagcgatgatcaggaggaagatgacactcttttcttctacagtatagctaaaagagaattgctatccaaaagagtggatgaattcggcatccacttatattggataacagcacaaggctggttgcttatggtgcaccttgaattgtatgaaattttcctatggagtcccatcacaaatcaaaagatcagcctacccttcgatgaagacaattttcttgcgaataataatgtggtcaagtgctttctatcacataaaccttctgatccaaactgtatcgtgctagtagtaaattgcagggacacaatgttctggtattgccatcctaaaggagacgtatggttcaggcatgagtaccaatcaagtatgattagtacaggagaggacagagaaaatgttattgcaactgtgaaacaccttacggctgttggggggagattccatgcatatttaaatcaggataaggcaattttgacacttgaattcctgccaaagccaacatttacaactacgccagttaaggatgcaccagatccaagttattggtgcacgttttctacttgtttcttgttagaatcaggtggagagttgttcacgttgtcatttaaacatccaattgaatgtgttgataaggttatgcaaattgaagttcataaactcaatttatctcaaagaatttggatgaaagttagcacaattgataacaaggcatttttggttgactgtactggctttggagcatcactcaatgcagaagatgttggattgaagaggaactgcatttactttgtaagacctaaagataagggattatatgtttataacatggaacgaggaattaccaccatacacaatccaggggaagatctaccagataacattgcacttgagattgtgatgcctccatcttgaatccttcatgttgtacatatgttatccttttcttaagataatgttttaacggt

SEQ ID NO: 7404 - DNA, 1413 bp, Oryza sativa
  ref <308>: DATABASE ACCESSION NUMBER: AK064531
  ref <309>: DATABASE ENTRY DATE: 2001-12-06
caacgaactcatactaatgcaaggactgctcgcaagctaattcggaaatgaaagaaggctaccgaaagaacaagcaacggatttcgcgctcatcccttgcgcctgcgcatacgttttcttgctccttggtacttgtctgatcactgttcaatagttcacttcgatgtcttgaaccacttactaatcacgtatacgtatagtaggccccccacgtctggcccgtcttggtctcgctcacttcgcccgcctatcgtatcggctcggcttcgtccgtcaagcgacagcttctgcctctgacggcttcactatcgctcatgactggtagttgtctctatgtagtagtcggcctttgttaagcttcgccagaagcgactagtcgcttcccgaatgcctctttcttgtactaattaatgtgtatggtctagtctttccaatgcctccttccttgccgccaacgcgcgctagatggagagtaagcaagctaccttgcttgcattcgttaaacggtagcttccgcgcccttcctgcctgctgaaattgatgtgaatgatcgtgtcttcgacatcaatttcagtctgattagatatgtcattgaaacaaatccgttttgtctctgttttcttttcggatgagccagccgatcctaacagaatttttgaggagccggacgacgaagcctcaaaatcagataaagatggctccgacgcgaccggacttcaactatattttttttaggggtcaggagggacaaaaaagatatgctgttttctatcagtcccaagcggataccccccagcttccacggtccgcttaccgaggaagagatgcgggaggacccagggccagagcaagttgggttggggtatagagccgtaagcgcggtgggggtgacagaggatgtgctcgtacggttcatagttgggtatgatattctcgtggattgttgggaacgtcttctatattcgaaatatgcctttctaggagcattacgatctgcagctcaaatggtctcttatgaagtctctattggtcttattcttattgtgcgccttgtgagcacgtttggatccgcgaaggcaatcgctcggatcttcccctaacccaacccgggaacggaccagagggaaccgcagcatgaggaatgtccacgtctcgtcgcaaggctcatttttagttttgggtcatagggcgggcagtgcagtccggggcacaagggtcctggtactacccaggtgcgaagaaccccggaggtgactgcaatgagcaaaaatgtcactcaccggcctaaacgacgagcaaacactcgaacgtgagagcaagggatcacccaacgaatgggcgacccccaaggaggggggagagagggaggcaagaaccatgctttcagagaagtggcggtccgaatccactctg

SEQ ID NO: 7405 - DNA, 1310 bp, Oryza sativa
  ref <308>: DATABASE ACCESSION NUMBER: AK064532
  ref <309>: DATABASE ENTRY DATE: 2001-12-06
ctctcacgcggttatctatccaaagctgaaggtgcgatggccgccgccgccgccgccgcgagctactcatctacttcttggagagtccgacccggcctaaccccatttcgctcccctctccagccacacccgcagggacgactccagcggatagccatcttcgccacccgcatccgcatcgcaacaccctcggcggcgatgcagtcgtcctcaacgcggcacaggcttgaggcagtgaatcatgaccatgaaacaatacctgaaaggcttgcagtagtcactggtggaaacagagggattggcctagaagtgtgccgccagcttgccctccaaggtgtgacagtcattctgacagcaagagacgagaaaagggggaaagatgctgttgagtccctttgccatgaatctaacctctccaacataatcttccatcaacttgatatcctagatggtaacagtcgtgcctcattggcccgatacatcaacagtagatttggaaagcttgacatcttggtgaacaatgcaggtgttggaggggttgcagtagaccaggatggcctgagagctctcaacattgatcccagggtttggctatccggcaaagcagtcaatctgatccaatcagtaattgtacaaacatacgacgaggcagtaaaatgcctcaacaccaactattatggattgaaatggataacagaagctctcctgccgctactgaaacaatcgccgtcaggagcaagaattgttaacaccacctctcttcggtcagagttgaagagaattcccaatgagaagctccgcgacgagctgcgcaacatcgacatctgggacgaagcacggatagaagcgatgctgaacgagttcttgcttgacctgaagaacgaacggcttgaggaggcaggatggccaacaatgctgccggcttacagcatgtccaagaccgtcgtcaacctctacaccaggatcctggccaagaggcacccggagatgcgcatcaactgcgttcaccctggatttgtcaacacggagatcaactggaatacagggatcatccctcctgaagaaggcgcgagaggtgcggtcaaggcagctctgctccctcaggatggaccaaccggttgctactttgatcaaacagagttgggtgaagcttggtagtaaaatatagcattataaaattattaagcatgtttaataatcatccttccatgctagcttagcgatcagagctgtgtaaacatataccactacatgattcatggatgtttcacagactaaatttgttatgcaaggatgcttaataatcaacc

SEQ ID NO: 7406 - DNA, 1424 bp, Oryza sativa
  ref <308>: DATABASE ACCESSION NUMBER: AK064533
  ref <309>: DATABASE ENTRY DATE: 2001-12-06
gctaatgaagagggtgttttgttgactatgagtactttgactgaaaatggtgtgatggctgtcaaaaatgctgcatgtgagaggcttcttgatcagagggtggagatcaagatgaaatcaaagaagatcaatgactgcctaaatagatttcatgttgctatgccaaagcctcgtgataacaaggagaggcctccttgcatccctcaggctgttctggatgctcgagcaagtgctgatgctgcaaaggaaaagaagaagctggaaaggaaactggagaaggacctagagaatgagaatggaggtgctggggtctattctgcgagtctcaagaagcattacttattggccgatgatgaatggaaggaagacattctgctgagatattggatgggcataatgttgctgattttctggatccagatatattgcagaggtgtgaagagttggagagagaggagggtcttcgcctcgaagaggaagctgcacaggaagctttccagattgatggccatgaactaactgaagagcagcgtgaaatcttgggtcagattagaaagaagaaggcattgctcatccaggagcatagaatgaagaagagaactgcagaaagtcgtcctattgttcctagaaagtttgacaaagacaggacattcacaactgatagaatgggtcgccaactttcatccatgggttttgatcctagtgcagctatggaccgagcccgcagccggtctagaggtcgcaagcgtgagaggtcactgagcagagctgccagtgatggtgatgatatggatatagatggccagcagtccagcaagaaattgcgcgcgttgtcgaggtccaggtctaggtcgaaatcaagaccacctgaggaggttgttccaggagaaggattcaaggactctgctcagaagaagaaggcaattaagaaagctaaggattctgtgaggaacaggaacaaggaggctcgtcgcggagaggcggaccgtgtcattccaactttgaaaccaaagcatctgttctctggaaaaagttctataggcaagacgagcaggcgataagtgattcagcacagctgctggtcatcactggtttcaggaagagcagcatcattgcagcatggtgtgggaaattaggcgaaggaaggcctgattatccaatctgctggacttgttgtgctctgtttattcatactgtctgatggattgctgtgtatcccgtctcatcctctgccgagacataattttgttagcttatgttgtagctttacgctacattaatatggtttcgctagtattagttcgttacatggtactatgaaatactactcctgtaatggtgactttgttattatacttgaattccagtcctattcgttataattaattctttataataagatatcacatgattatgttttgacg

SEQ ID NO: 7407 - DNA, 1831 bp, Oryza sativa
  ref <308>: DATABASE ACCESSION NUMBER: AK064534
  ref <309>: DATABASE ENTRY DATE: 2001-12-06
tatgcattagttggaaaacagggtttaacaggcttatcgacagagcaaaggaaacgtcttactatagctgttgagcttgttgcaaatccttccatcatttttatggatgaacctacatctggtttggatgcgcgagcagctgccattgtgatgcgcactgttcgaaacactgttgatactggtagaactgtggtctgcacgatacaccagccaagtattgatatctttgaggcatttgatgagctacccctgatgaaacgaggaggtcgagtaatatatggaggttcacttggtgtcaactcagttgacatgattaattactttcagggaattcctagggtcgttcctatcactgaaggctacaacccagcaacctggatgcttgaagttacaacacaagcatctgaagaaaggcttggcatagattttgcaacagtttacaagaactcatatcagttcaggaacgtggaaaacttaattgtagaactaagcattccagcttctggcacagagcctttaaagttctcatcggagttttcacagaatcgccttactcaattcatggtgtgcctgcgcaagcaaagtcttgtttactggagaagtccagagtataatgttgtgcggttatttttcacatcagttgctgctataatatttggttcaatattttggaacgtcgggatgaagagagaatccacagaagatatattacttctcatgggtgctctttatgcggcatgcctatttcttggtgtaaataatgcttcatctgtacaacctgtagtttctgttgagaggacagtctactatagagaaagagcagctaacatgtactcgtcattcccatatgctgcagctcaggtttaccacgtaccttttactggcctggttcccatcttggttgttatcctcccttaaaatctttcctacagggtcttgtggagatcccatatattgcagttcagacactaatatttggtctcattacttacttcatggtcaattatgagcggaacataagtaagttctttgtcaccagaaatgtttccaatccatatggtcttgcagagattctaatgcgcttccagtcttctacacataacgcaattggcatttctttatggtactttagtctttttcccattttgtaatatgataaagtcgatcttttgattgcaggaaaattggtcttgtaccttatttacatgttccttacttttacctacttcacgttttatggaatggtggcagtaggcttgacacctactcaacacatggcatctgtggtatcctcagcgttttactcattatggaatcttctttctgggttcttaatcccacaatctagaattccaggatggtggatctggttttattatatctgcccagtggcatggaccctgcgaggcgtcattacatcacaattaggtgacgtggacacgaggatagtgggccctggtttcgacgggacggtgcatgaattcctccagcaaaacctgggatttgaacaggggatgacaggcgccacggttgccgtcctcgttgcgttttcggttttcttcttttcaatttacgccatatccatcaagatgattaatttccagagaaggtaaccactctactggacaccctggtggcagagctgatgtttgggtgttgcctttattgtggatgaagcaccagttaatgtgaggacaatgtttgctgatgcagctaaaagaaatatagctaattttgagagtagcattccaaatgtatatatcgaaagaagatagttgtgcaatgtatatatttcttttgctggttttggagagggatttttaaaactcac

SEQ ID NO: 7408 - DNA, 1450 bp, Oryza sativa
  ref <308>: DATABASE ACCESSION NUMBER: AK064535
  ref <309>: DATABASE ENTRY DATE: 2001-12-06
taatcgtatcggcgccaccgcccaccgctcatccgagtcgacgagatgctggttatccctggagtcgacaccgccaatcgagtcgccggtgatgcatccacctgaaactgcggcgtcgccgagatgccgagatgtcgggcgtcctcgctttgtcggctgcaagtttcaccgcggcggactgaccatgtcggagtcgtcgtgacgctgctctgctggggcacgccaggatcgccggaggcccggagccaccgtcgactgccaagactcctgcttccaccacgcacagcgtatcaaatcatggccgcagccctttcccccgacgcggccgatgttcggcgctgctactgttctcacgacggcgatactatcttcctcacgatggcagcggcgccgcgtgcagatgatggtggttatcgatctacatcaacaaatatcgtcgggctacagatcagatcggcgatcggcggcctcatgtacacacatcgcatggcagcaacacaagccgaagcaaagcagcagcatgccgagtcaactccattcagcaatacatggtgtggcaacgtggccgaccaaccggagggtgacacatcatcaccatgcttcagtgccatgcataagaagttgtcaatgcgatggctaaacaaatcctgttgatttcaagctttttcaattcgatgctgagctgtggttaaatggccggctgccgtctacatcaaccacctcgtcgggcatgctaatttgtaagaggtcgacatcatgccaccccgccggagcgcgcagaatgtcatcggagcaagcatggttactactgagccgtgcccgacagaagtctcattcgaactgccggaatgtcgctgaactacccgcatccgcggacgtcgtcaagtcgctgagccgcccatgccatcctgatagatcagagccatcgtcaaccaggagatcatctcgtccaccgtatcggcgacgcccagacgctcgctgttctatcaagctgctggtagcactgtccaccgagtgccaccccatcaaagcccgccgttgtgccggcatcatcgcaccgacgccgagccctaaagatgcccctgttgtgatcactattgtgtgaggacgtctcactgagactccactggccggcgacgccttcacactcgtcgcggtctctttagtcaccgtcaatgtctacccaatcatcttcgacggtcctgccactttcctcacactcatcgccatgccgttcgaggagaaagccggagcgccattgcttggtgcccgcacaccatcatcaagtccgttcgggaagacttcacctcgtctaggcggaatcgtcatcaagttcttccatgacgcctgcacttcgccaagccggagttgtcgtgccgtccatccgtgacatctctctctctacaccacatgaggagacgctatctgtctacaatgctttcacttcatc

SEQ ID NO: 7409 - DNA, 1881 bp, Oryza sativa
  ref <308>: DATABASE ACCESSION NUMBER: AK064536
  ref <309>: DATABASE ENTRY DATE: 2001-12-06
ttgatatgggaatataatcagcacatctttgggaagccattgtatcaacctggtgatgtggatgtgaatgacgacgcaaagaatggtttgcatgtaattcctctctgtgtttccttgtggagtttccctgacaagacagaggagaatatgaggatagctggaaaacatggccatttaaatgttgggcacaaggcacatagtgtcatgttgaaggattcttctgtggacaaaggtgctaagggggataacgagatcttcacagttggaaaagaagacactagcgagagagaacaaacatctgagcactgttcaggagaacgattgataattcccaatgtagttacttttcatgcaaatcaagagcagaatgatgagctacaaagcttgtataaggagaaacatgctaatggaagtggaggcggaaataacttgacatcaggaaaagagagtgatgtgcatcggggagagaatgcatgtgggcataactctgcagcacgtcaaaagacagagatctcgaagagagaaaacagaatgacggatagtacacatgaagagaacatgagatcaggaaaagagaagattcccagggatggcagcaacaaggggacagtgaagccagatcttgttgatggactacctccagataagcatgtagatgttgcatttgtgcacaagacaactaccaacagagtagatactcagcaagaatgtggatacaatgtggctgtagatgttgatgacaattatgctcttcaacatgagccaaagagtcctcacggcaatgataatctcagaggaactgaaatggatacttcaggtgacaattcaagaaaaaccagggaacaaaaggaggtgactgatggtaagagattggacttggataggaaaagagaagccgttcgcatgaaaaacgcgcgagatggtcatcatgaagatgatagaactgctcatcctcaatgtgttgacgtcaaaagtccttcgcataatgatgatcaaagagcacgaggggcttcagtatgcaagtccagaaagagggggacatcaaatagaatactagagtcaagggataccgtgagcgaaaattcagctagacgccaggtaccagtggaaagaagaaatggtcatgctccatattcaagaaggcctgattatagtgctactgcaaggcgtgggtccccttcttatccaagaagacgtagaagatcaaggcatttcagctctgaaagagactggagcacagttcctcctcgtggtaattcacccgataccgagtacgatggtactagatacaataccgagtatgatggatatggatcccagtcagggtgcggctaccatggaatggacactcttcctgttgatagatattatcctcaggagcaccacaatggtgcatatcgacctcagacaaattttggtgaggaggaacaggcggcggcttatggtaggcgtaggaatgatcatggatggggaccagattaccgccgtcgagacagtttcgactgggaacacaggagttcagctagagggacagttacagataggtatgtccctgaccttgaacagactaaccatcagataccaggtcaggctagcctacaagatggctacttcatgcgtagaagcaggtcttttgtgaatatgcatgtgccctactagtagaaggttgttggccctcttgacccctttaatctcttgtagtcagccaacggaaagcctaaaggaaccaaagttgaaccctagtccgggtagttaactgatgtatgttaatgcatagcgatcaagagcatctcagtgactgaactgcagtcccattttgtacattcttaactaccaatttagccctacttttcatactttacttatttgaacttgcttttc

SEQ ID NO: 7410 - DNA, 1621 bp, Oryza sativa
  ref <308>: DATABASE ACCESSION NUMBER: AK064537
  ref <309>: DATABASE ENTRY DATE: 2001-12-06
attttatatgttatgtattccatatttgatcttctttttgaagatttccattttagtttttctagtcttttatcggatagtcctccccatagtacagatgttttcccttctaacttgttgctcctttcttatcactcttcccccagaagttcaagacccacaggctctagctcatttagaagggctaaacttctatctgagcctttacgagcaggatccggagtgggttgcgttcattcagcaggagctgaatcacaacacccctctggaggacatacctgggcggctgaggctcttcctaatggaagaaaggacatccaatgttaggatggatctaattcaagaatttctagctctatacgcgaggaacggagccgtacttccggtagaaccctaccttttggagggggcgcttcgttcctatcttgactctatccgagcaacggatgatttctctattctccaggcagcttatcaggatctgcgggatcatgaggaaggatcatttttcttccgtgatgtggtttcccacaaccgtgatttcctggaagcgcaaagcgcgaaaagaacgtggattgaggtggaacggaattcgctatattcaaagatagaacgagcccaagcaaggctcgaaagaaccgaattccaacacactctactgatcttccaattagaagatcgaaagagggggggggaataatatgccgtataccactttttttttcaaaagcaagcatatgtgacctaacaggacttttgaattaactctgcgattttgaagacggaggaaatgaaagctgaagaagttatcgaaacttggtttagtatcaaggttcttctcttccagccccgagcccctctctgataaggcttgaaagttttcaaaacgaaaatcaaatgacaaatctggttcgatggctcttctccactaaccacaaggatatcggtactctatatttcatcttcggtgccattgcaggagtgatgggcacatgcttctccgtactgattcgtatggaattagcccgacccggcgatcaaattcttggtgggaatcatcaactttataatgttttaataacggctcacgcttttttaatgatcttttttatggttatgccggcgatgataggtggatttggtaattggtttgttccgattctgataggtgcacctgacatggcatttccacgattaaataatatatcattctggttgttgccaccaagtctcttgctcctattaagctcagccttagtagaagtgggcagcggcactgggtggacggtctatccgcccttaagtggtattaccagccattctggaggagcagttgatttagcaatttttagtcttcatctatcaggtgtttcatcaattttaggttctatcaattttataacaactatcttcaacatgcgtggacctggaatgactatgcatagattaccactttttgtgtggtccgttctagtgacagcattcctacttttattatcacttccggtactggcaggggcaattacaatgttattaaccgatcgaaactttaatacaaccttttttgatcctgcaggagggggagacccaatattataccagcatctcttttggttcttcg

SEQ ID NO: 7411 - DNA, 1669 bp, Oryza sativa
  ref <308>: DATABASE ACCESSION NUMBER: AK064538
  ref <309>: DATABASE ENTRY DATE: 2001-12-06
ggttccagtcttcgccgacaatgccggtgccaccatccaccaccaccggattggaaccgcgcctgggcaccaccaccttcgtgccgcctttgtgaaccaatttcttcacattctttgcagctcatgaatgcctcatttcaaaacaaaaaaaacattatctattataccataagagctcccctttagcaattggttatatcttcagtaatgacatttgaacatggacagatagaggtacaaattatatgccctaagagcatgcaattactaaatttggtatggagtagggcaagtatatatatataaattagttgtacggagtagaacaggtatataatgggattcgtgtttaccatgcaattctgaattggtgatgaaatttcataggttttatatatgtgagtttatcactgctgctgctgatgttatagttaaatgaggaccactctgttaatgtactggaaattggaaactacaaatttatatcactgttacatgttgatatttatataaaattcgacttttgagtgtacaaccagaactccgtatattaaagataagactcgtatcaaaagaaaatgaggttgtcctcgaaaacccatgtgcaatattcactattcatatcctacaaattgattgatggtatggagggggctgggcttagaattattaatatggtcaactcaggcaatcttgcatctggttgccatcagtggggctttcattcagcagaaattgtctacaaaatgcaccctttatatgtacctgtttgcacatgcttgtaggtattccatgcatgggttattttagctgcacatgtaccgctccaatttgagctattttcaactaattaattatgtagttattctcttgattctctgatccctcaaatattaattattctttttgcaccttgtttttaccaatatagctaccttaaactggtataggaactaatatgctttttaatatttctatacatatgcgttaactcagatagttgccctccgcgtgttgttttgttagcaggggcaatatcaagataaacctcatatttctatccttttgacaacatcatctttattaatcttaaggtgcatacaagtggtgaaaatgtatatttagctcataagttgtgacggttggctaagtgtagtagatggagttggcagatagttattgacggttggctaagtgtagtagatggagttggcagatggttatttggaggtaactaaatgcattttcttagaactactgctttattgtataacctgtttaactccatggcctttgttgtaatgcatcctccagcttaatttgcttattcattgttgtcctgattgcaggtgcgcgaaaaggattccaaggttctcaacacataggctttcaactgggaaaacaagaacggctggaagaagcattgccgcgggttgctacttggtcttttaggtcacaattctggtgttgggagttgtttatttattaatgatcagcgagtctcttgttgctacaacagaatggtcttgtgatacagacgagaagtctccttccattaacaataacactggttgcacatgctctgtcttcctgcaaaagtgttgttggcatttgtgatttttgtagttgattttactgataaaaagtgcagatcatgcaatttattgat

SEQ ID NO: 7412 - DNA, 1585 bp, Oryza sativa
  ref <308>: DATABASE ACCESSION NUMBER: AK064539
  ref <309>: DATABASE ENTRY DATE: 2001-12-06
aataagatcagtgtccaaagaaaagggaaaatggaaaaaccactattaatcagcattagaaaagggaaaaacagtggtgtaataatatttagcagatttagtatcaaatagtggttagattgtctggagattgcatgtagctaagttgcaaaacatgtgaaatgcatagaaaatgcttcatgtactacacaacatgtatgcatcgtgtgttgcaaaacctcgtgctataaccttgggtatctgcgaaaggtgtgcactacacagaatggcagacgggcaattctccttgaaatgctaagcttcatggaaaggagtatgaatgtatgacgacaaacctcacaaagactcgtggctcagatattgaagtgacatccgtaacaggggacacatcaagaagggcagcagcacgtggaagcaaattcttcccgaacgaggttgatgacgctataacatgtgagtatccacctttgtgctgaacagaacgaagtagctcggcccaaggctcagccaatggatgcgcaaagacatctgaatcagcaacaagaacctgcagcgaaagcaagccaactgataagcacaatatcgaagagcagaggttatcaattatcatctccatccctgaaatgaatcaataataggcttctagaattcaatcgctcaagcacaacaacacataggaacaagatgtagcacatgaccatacctcggataccaatggatggctggacgcagcatgctcggcagccttgtgaagccccggcccggatccgcccaacagaagagaaaccctattatcatccttgccgattgcttctgcggccgccaatgcgctcagagatgagggcttcacgaacccaccttcgtgctccgctacgaccagcgtgctcacctagcatcatcagggcatgagagcaagtacgcggttaggcacagtcggagccaatcgtgggagcgcaaaagcgacgaatccgatgaaatcgaaaggagaaatcgtctcgaaacattcctccaccaaccgcttattaatcgaatcgaatgcacaaggggaagaagaagcttacaggtctagggagcgatcgggcgaaggaccgcgagctccccccggcggtggccgttcccctcctcaacgctcccaccaccatcgccgccatggcgcgcaacacaggtctcccgatctcctgctatgcttgctctctcagatcggagggaagccgagaagaagcgaagagcagcagcgcgcgggcgcggcggcgagaagaagcgaggagaagagggcggagacgtgacgggatcaaattgatggccacgtcagtgttgcatcggccttgtactactatactccggcgagggagaggaagacggcggcgagcccagcaaccaaccaggaggaatctaccagattcaagtgggcctagcttttctgccatacaaatgggccggattgttgcagaggagcttcagtggagtaagtcactttgactcccttaactagtggccaagtctgatttgtatcccttaaccacaatacagatatcttgacccccaaaattattaaaatcggtgtaattttttgttagtcaaattt

SEQ ID NO: 7413 - DNA, 1587 bp, Oryza sativa
  ref <308>: DATABASE ACCESSION NUMBER: AK064540
  ref <309>: DATABASE ENTRY DATE: 2001-12-06
tccgcggctccgcctccccaatccgtcccgtctcctcgcctgccgctggcatcctgctagcagaggtggcgccagcgttctcctgctcccgccgcattcgctcgccggtgagcatcctaatccatcccatccggcctcggcctcgagtttcttctcctcgcctgccgcttgcgccgatccccatcctgcgaggagaggtggcgcccggcgtcctcctgcttccaccgcatcgtcactcgccggtgagcatccctctctacccacacctcaacagtttttcctgttccacccttcttcctccagttcttccccaatccctcgctccgtcgctcacaacccgtctcctgctcgatccgagcgcctcacgagagagagagagagagagagagagagagaggagaaccgcaggcgatggctgcagcttgctccttccgctccgtcgcccgagctccgccgcccctgcggggtctcgccaggagaggggttgtgcactgctgcagcaccgctcctcccagcggcggcacctccacctcctcctccaagctcgtcttggaggtcaaagaacggctggagagggagcatccgggcctcccgacgggcaggaacgggagggatgatgaggagatgatcctctggttcttgaaggacaggaagctctccgtcgatgaaacagtttctaaactgaccaaggccattaaatggcgccaggattttcaagtctcagaattatcagaagaatcggttaaagggttgtatcaaactggcaaagcatatgtgcatgattcttttgacatctatggtagacctgtgctagtagtggtggcgtcaaagcatttcccttctaaacaagatccagttgaaaatgagaagttgtgtgcctttttagttgagaaggcattgagtagacttcccttgggaacagagaatatacttggcatttttgatcttcgaggatttcaggtggaaaatggtgatctccagtttttgaagtttttgattgatgtgttctactattactacccaaagcggctcgggcaagttctttttgttgatgcaccgtttgtgtttcagccgatgtggcagcttgttaaacctttgttgaaacaatatgcatcactggtgagattttgtgatgtcgagacagtgagaaaagaatacttcacaaaagagactgtacctcctgatttccgcaattaggtgccatgaactgtttatcatctctgtcaccactgggttgttgctccgaagagaccgttgaagtacctagtgacaggagagctccaaaccatcgagactgagctaaattgtattgacatgatttttggacttcaatcttgacagtcaggaccatctcgaaatcattagctagttgctcaagaatgtcttgggtgctgtcgttcctggatggacgaagaaagccccctgcagttgctcgaaaaggctttaaagaatgtatccccatcatccgttgctgtttcctttagtatttaaactgtaataggagtatgtaacttgactaaacagtaacaaaattttatgagttccaaacaaaaacaaaaggaaaataatacagttttatcctaaagt

SEQ ID NO: 7414 - DNA, 1424 bp, Oryza sativa
  ref <308>: DATABASE ACCESSION NUMBER: AK064541
  ref <309>: DATABASE ENTRY DATE: 2001-12-06
ttcttatgcatccaccagctctatcctctaactcccaatccttaggtgatcttactgagaatcccttaatgcaatcgcacacttggagtgcattgctgttgcagacagtgaaaggtccacatgtagcatagatatcacatagatctttaggcagagtatagatcgttgcccattcctgcttgttctcaagccagaggagctgtttcatctgaccagatatgtccaaaaagcaaacagttattagatctttttctaacaagttgaacacaaagtacttctcttggttgttgttgatgaacttgaagtcaaatagagttcgtcctgacatctctggtattgagttgaagaattggccattccattccccagtagaccaatagactatggaagagttgcaaaactctaagacgtattggttagcaccagtagggtctaattccaggcaatagaggccagcagctggatcagccaaactcttcttggaaacaataacacggttcagaccagtcaccttatctaggccaaactttgcaccaataagcatgacatcagtagggtagtcaaagctctgccatagtacgttggacgagttggatgcatctcttaagatgaggtttccattatcctggaggacaaccatggttttcttggctgtgatactggcatgagtcgaccaaaccgtcgatctggtggcttggttgaagatggcaaggttgccatcactggcaattgtgagttttgtcactctgtgatggcctacaattgggttctctctgtttgctatccatattggagttaacactggtatcttgtcgaaccatatgcctaggtaccagtgcttgagggtgtgccgggggaagaacttactgtcggtgtccggatggaagaagccgagcgcgaacctgccattgcgagagacaagcttctcatctttcgggagtgcttcaccggctgaaatcgtgtccgttgcagcagaacacgccggagaatgtatggagaagagcagaggcacaagaatgatgaaggtacgaagcatggtgaatgaagaggataagaacgaggaatgcgatttcggtgtttgggggtgctggtgccatgatatatgcctcttaacatggttgaagaatatacatgctgcatcattgcatcttgacgtgctttctttgagacatttttgcagccttgcactcacgtcaacttcaaaacctactttgctgccaattttggtgatcagccactactggtctactgcagtcaagcttggtatattggattgcactgtgttcaagactgtaacagaactcattttgctgacattgtagatgttctgactaaaattacttaatttttgaacatcagtcggcagcatggaatatacaatatgtttggtaaattaaaaaaaaaaggaaggtaaatatggctat

SEQ ID NO: 7415 - DNA, 1288 bp, Oryza sativa
  ref <308>: DATABASE ACCESSION NUMBER: AK064542
  ref <309>: DATABASE ENTRY DATE: 2001-12-06
acacacactccatgcatttgacatactctagagaatgccatccaagaaactgaacagttgccactggtctcgtttaggctgtacagcctaagatttccatcgtaatccagtgtcaacctcctcatgacatgatcgccaagatcagaggcttcaaacttaaaaaggtcacttgatacaaaataacctgtctgatttagaacaccatatcgaagactgtcataagttgtccttccattcttccatggctggtcaaaggaaggatttggccaatatatgctggcagtgtctgggccgttgtagacgagagtcaaaatattgttactgtcgaagagaaagttgtagaagcctgaatatagcagccccctggcagatgcatataccagctttacattcctagttattggctgcaacggcagaagtgtatctgttggcgagtcgaagctcctccatagatgctggccttcaggatccatgacaacaaggtttccattgttgagaagctctgctcggtcggctcgagtggctgttgtgttggtgctccatacaactttgccattgtagtcaagaagggccaaggtgccgtccttctggaaggtgagcctggaaccctttccgttcaccggagcatcgcggttcgccgtccaagcgaccgtcttctccgacgacctggagaaccagatggagaaggtgaatgcgttggtggccaccctgtagaatccgcaggagaagtcgccattgggggacactaggatggtggtggtgtcatcctgggttgaaatggatgaacgtctagcaatgaaggcttgggttgaaatggatgaacgtctagcaaggaagggttttctatgatttgcaagagcaattgttggcatgagaaggaagaatattgtggtgaaaatgtagacgcctctcatggctatgacaacatagaaagcaattgcctatgatcatctaacgcaaacgggaaccaatgtgctgtagtccattatatatctagtttccagttgggtcaaaaataaaaggctcgcgagcaaattcggtcagcttcacgacaactttgacggggctcgtgttacaacttgattgggctcgtgtttgctgtatagttcctccctttttttttctggctagttgctacatatgatatacttgatgtactagcttagggaaagggacctaaaattaagccaaccctttgtttcgtcgagcatagcaaatgttagggcatacacatgaatttcacaggattttcatagtttatttcatcaaaattcacgtgaaattcctc

SEQ ID NO: 7416 - DNA, 2112 bp, Oryza sativa
  ref <308>: DATABASE ACCESSION NUMBER: AK064543
  ref <309>: DATABASE ENTRY DATE: 2001-12-06
atgatgagagggaccaaactttaaaccagctgcttactgagatggatggttttgactcggacatgaaagttattgtcatggctgctactaataggcctaaagcactggaccctgctctgtgtcgccctggtcggttcttaagaaaagttttggttggtgtgcctgatttggaggggcgaaggaatactttggctgttcatttaagggacgttcctttggaagaggatcctgaaataatttgtgatctggttgctagtttaacaccaggattggttggtgcggatctagcaaacattgtgaatgaggctgcgttactagctgctcgaaggggtggcaatactgtggctcgggaggatattatggatgcaattgagagggagaaatatggggtcaatggtagacaagagaatgctgattctgaaaggcaaggcctcactaaattgtttccatggttacctaaacctggaaatagaccaacaaacccagatgatattggaggagttatgggatatcatacattaagctaactggaggctttgcaaggaagaaagaagttaagctgcaatcaaaatggtgtttgaattgccaacgtacatgggaacatgtcggttatagtcgtgtaggagcaaatatgcgtctctactgtacatgtgaaggatactgcactcttctgagttttggggctgcaaatttaggtgcttggaggagaaaactgccaccaaatcagaagaaatcaagcttctgaatgtgaaacacggaggtccaaggatttcacttgacaacaatcttgcgctctgtagtctttgctagaagcactacatctggttttgttccatagacaaattgttaatagaacaattagaattagattacaggataaggtcgctccagtgttctgctgtatacataccatcagccattcagctcattcgtgcaaaccagaagttatgctgctgctgggtccgcgacaatatgtaagtttgcaaatcacaattagagacgagcactccttaccatttcaaattgtgcatcgctttgctttacctaagcactagtctcttcacgttgttcatcatttttcttcaactgaactttctcctactgctacaattctataaatctgcaggtatcaaagtatgaatagattatacacctttcaactttcaaatttgaacttctctgtagtactcattgtcctgtgttatctatgtgccattttcttctgcatttgcttggtaaactctgatgtgcctgcatgacttcagcattactgctaaacctgatcacaaacaggggattactggtggattgccaagtgggttccatgacagttagtcggagaacgacccggcggcttgacccagaaaaaaggccatctgctgtcagagacacacatcccgtcctgaagacgacatgaccttaataattgggaagccatgcaatggctgcagaatcaggacatatacccttgagacaaagatgaagcttctcccagcaagaaaaaatgttgtgtaaagggcagagctttggcatgtagacctcgacctgtcatacaccggaatgaagagtgtggtttggctttttgtgttctttcttctgggctgcttaaccaaccatgcttatctctgcaggatcaggtcacagggatcaaaggggggaataaaatggaaactgatgggaataaaatggaaactgatttgtagctttcaatgtttcgttctcagctttgctattagctttctcctgatgatttagaggccatggtggtctcagttcatgcatctatgacctgaatgaatgaagcttgtcctgcacttcagatcgatcggagtttctgtgtgcatatctaaactgctgagttttgggcttttggcctgacactgttctgcctaaatttttcagaaatgccttcctagctactagctaggtcatgagctatagccatcaagactgttcgagtagtttagttagcaaaaaacaagactacagaatgcctactgacaagttgccacaaaatataatcatctggtatatataatcagcttcatgttaatatttgagaacgcacgcttaattatttagacgatgatgacaacggcgtgtaaactagac

SEQ ID NO: 7417 - DNA, 1781 bp, Oryza sativa
  ref <308>: DATABASE ACCESSION NUMBER: AK064544
  ref <309>: DATABASE ENTRY DATE: 2001-12-06
tcgctgacgatgttcgttctgctttccacattagaagagctgacatccaattcaccaaattccaccccgaagatttctttgttacctgctccaaccaaagtgatcgcgaggccatcctccgccaaccaaggcttgctacggcctctggccgagtcttcctctttcgtccttgggatgaaagtctccatggtgtcccagttcgctatcgctaccgtgctcgcctctgtatcgaaggtgtgccaatgcatgcccgtactgatgaaacggcggcaaaggtgatcggtcgcaagtgttctatccactatgtggaggagtactccaggcgtggcaattacaaccgcacatatgacatgtgggtttggacagatgagccgagagccatccctcggggtggttcctttgccatcacgtctgctgacaaggaaggcctccccactgacatccccctccccgagctggagccactccgcaatcctcctccttctgagccaaagaagggctggtcctacgacgtcctcattcatgtggacaccctcgaagatcttcacgctcgcaaagcctgggcgtacaagtgggactataaagtccaggacgacggcatcaacttcagagagtacccgcttccctgcagggctgagccggacccagctcgtggcccggatgatgaagacgaagatggaaacgatccttccaggggtcggtatagaagccgctccctctgggatcggctgagcgggcgctcccacagccgaagcagagatccgaaccggcgagacacccagcgacgtgaccaagaaaggaggggcagatcgcgggacagagagcgctctgatcacagataccgaggtcatcgttcccgcgagccaagcgaggggcgtgtggacatcctcgacattttggagagccatctcgacccaatgcttcatgaagcagccgtgcatcattccatctattctccagatacttcctcccctcgtgtctcttcccctgtttttgtgcctacttctacaggacatgcaggagcagacacaccttctgcgtgcaaggcaatgaagattgacagcttcatcaacggccttgcaactccagtccagccgcctctcctgccagcccccgacgtcaatgcacggaagccttcccgtgcaaaggtgaaaatccctgctttagtttcggcgcaacgacacagcgagcgtctgctttgcaagcgtcgtgctggcgcgaagcttgaaaactttgcccaagaaatcctctcaaagaaatttggtatcattgatgaatctgcttcttttgatgataacattaaaaagttgtatttacagcggtacaagaagcctctctcgccagcatcactgaagataatcgccgacttggttgaaaagggagggtgcaagacgatcgggatgaagaatttgaagaaaaatgcggcagtggcgcccctgtgactgcctccgaccggcttacagttcaagcgaagcagattttgtctccaatgattccactgccaaggccgatgtcccccgagtgtagctgccatgtctttcgatgtactctgtttcgtctgcttgttagtgatcctgaaatgtgtatctgtcacctatcggagccccgtttcggctctgtctcacccggccttttaaagcatatccacctcaatgctagctgtgtttcttccagtttacctggttgtgtttctgctatgcggagtgtgtttagatgctttttagattatgtcacaagataatgtagccctgttcaattggaatgtgagaggtatgaatgcc

SEQ ID NO: 7418 - DNA, 1110 bp, Oryza sativa
  ref <308>: DATABASE ACCESSION NUMBER: AK064545
  ref <309>: DATABASE ENTRY DATE: 2001-12-06
aactctcacccattcgtcatttcgcaaatctctctctctccctctccacgccaatctctctctcgaggagggcgatcaagccctaaccctaacgaagccccccgcgacgccgccatccagatccccggagccagaggcattgctcgtcgtgccgggagattcgccgatccgccagatcggcctgaccgagggttccgatggagggttccgaggcagcgcagcagaaggacagcgtgaaggtggtcgtcaacatccgaccgctcatcacgccggagctcctcctcggctgcaccgactgcgtcaccgtcacgcccggcgagccgcaggtccaaattggcccacatgtcttcacgtatgaccatgtattcggcagcacaggctctccttcctcgttaatatttgagcaatgtgtgcatcctctcattgattcattattccgtggatacaacgctacagtcctagcttatgggcagactggctccggcaagacatatacaatgggtactaattatactggtgaagctaattgtggaggaataattcctcaagttatggagacaatattcaaaaaggccgatgcattgaaggatggcacagagtttttaattagggtgtccttcattgagatcttcaaggaggaagtctttgatttgctagatgcaagtcatgctgccctcagacttgattcagggtctgtagccaaagcaactgcacctgccagagtgccaattcagattagagagactggtaatggcggcattacacttgctggtgtgacagaggctgaggtgaagacaaaggaagaaatggcctcatttttggcacgtggttcttcctcgcgtgcaacaggaagtacaaacatgaatagtcagtcaagccggtctcatgctatctttacaatttcaatggatcaaaagaagacctcgagtgcctctgacaagttatctaacgatgactatgatattttgtcctcaaagtttcatctagttgaccttgcgggttctgaaagggctaaacgaacaggagctgacggattacggcttaaagaaggaatacacataaatagaggccttctagcccttggcaatgtcattagtgcattaggcgatg

SEQ ID NO: 7419 - DNA, 1471 bp, Oryza sativa
  ref <308>: DATABASE ACCESSION NUMBER: AK064546
  ref <309>: DATABASE ENTRY DATE: 2001-12-06
acagcctctggccaatggaacaatgtaggcaagggaagtcggcaaaacggatccgaaacttcgggaaaaggattggctctgagggctgggctcgggggtcccggccccgaacccgtcggctgccagccgactcagaactggtacggacaaggggaatccgactgtttaattaaaacaaagcattgcgatggtcctcgcggatgctgacgcaatgtgatttctgcccagtgctctgaatgtcaaagtgaagaaattcaaccaagcgcgggtaaacggcgggagtaacctaaagaaagaaataaaaagaaggatgtggttctcttggatgatgaagatatggaacctgctaaatcaattaatgttgaaatggctcataaatgggatgagtcaaagatttactatccttcaaggactgatctcgaaacttttgagctgatctgctctgatatagaatgccttgagcctgaagaatatttgaaatcacctgttataaacttttatatgcagtacctcaggaaatctagaacatgtggagacttgtacattttcaatacatatttctatagcaaacttgaagaagtactatccaggatgggtgaccatgatgattcacaattcagcaagttaaggaggtggtggaaacatatagatatatttagacaaccgtacataattctgcctattcatggagagatgcactggagcttgataattatctgcatgcctgcaaaagaaacagaatctgggccgataatacttcacttggactctctaggactccattccagtcgtgaagttttttatgttattgagagcttcctcatagcagaatggcaacatctacagaatgattcttcttatactatccccttttcagggagaatatggaatcatctatcaaaaaatataaacaaggaaaaagttcaggtgccaagtcagcgtaataagtatgactgtggtatctttatgcttcattacattgagaggtttattcaagaggcaccagagaggctgacaagagagaacctttgcatgtttggacggaaatggttcgatcccaaggaaacttctgggctgcgggacagaattcgggcactaatgtttgatgcatttgagagtgctcggatggatgatgaatcgtcgcagtccgagtcacattctgatgatcaatctggagatgaagataaagacagggatggagtcatggttgtggtgattgactaacgatggatgaatggcacctagctttacattatgtgatggtacagtttcaggctttcagcaatatcggctctcaaatgtcacgctgtttattagctgaaaaatgtctgtgctgctctggagactgtactagaaaaggatgcgccagtggtgcttagcgatgcaattataaagtactacacaacgcacatttcttgtagcctggtagtttatggggtttcaagatgaaagtttagcgtttaggagatgt

SEQ ID NO: 7420 - DNA, 2393 bp, Oryza sativa
  ref <308>: DATABASE ACCESSION NUMBER: AK064547
  ref <309>: DATABASE ENTRY DATE: 2001-12-06
atatggcgatgcagtacccaattttatttccttatggagaagatgggtatcatcaaaacattgcatatagacagtgtcgaagatcagcagggattaaacggaagcgtgtcacagaggtagaatattatgcctataggcttcatgatagaggtgatgatttcaacaccctaacgcgttgcaaaagaggtacacaagcctatgttattgacgcatattgttgcatggaagaatctcagttgagtcactttaggactaaatcatttcaacagaaatatagaactgctcctctcaaagaaattcatgatacaatacatagaggcattatagaagggtctgaagcaggccaaagaattataaaaccttcttccacatgtccatattattttatggctaaaaactggtgcattgactgctgatgaggttgataagttcatatcagcacaattacctgatccttctgtcgatccaattggttttgatgctgtatctgcatttatgattcatggtccttgtggtgagggacatccatcatgtgcttgcatggttaacggcgaatgctctaagaactatccaaaagaatattgtgagaagacaacaatcttacaaaatggacatgttagatatgctcgaccaaagaatagaatatctaccaaaaagaatggtgttgctgttgataatgcatttgttctcctgcataatgtggatttatgtgtgaagtaccaagcacacataaatgtagagagagttagccgtgatgggatggaaaaatatttattcaagtattttaccaaaggttttgattgttcagaggttggtctccaacgtaaaagagcatccggtgaatcatctacctgtaccaaaggtgttaatgagatccaagattacctagagtgcagatgtatagctcccaatgatgcagcttggcgcttgctccagtttgaaattcaccacactaacccttctgttgagcgtcttcctgtccatctaccactcggaaacagtgtagtatacaatgaggatgacagcctagaacaagtattgcagaacccatggaatcaaattacaaagctcactgcctggtttgaagctaacaagacctatcctgaggctgtgtgctacacatatgcagagttcccagagcacttcacttggcatgctgatggaaagtattgggattatcgacgtggtactggtaacgtcggaagactagccaatgtaggccctaaccagggggattcctactatcttcgtatgttgctatagtgaaggtggcaaggtcgtactcagagatcagaacaattgaaggccaacagtatccaacattccaggctgcttgccaggctcctggtctcctaggtgatgatcgtgagtggttgtccgctatagttgatgcagcgcattgggctcttccataccagctccgcttctactaactgcaagcatttcccttttggtttcatgtacaactactgcccactgtttactgaatgactttcttcctcagttaatgatgcttttattgattcactgcttattcagactccatgcagtccaacctatgaaatgtgcctgatttccctgttttgtgtacaacaatagaagtacacccttctttcctcttgacgttgggaaacaacagcgttttggctcaatcattcactttccttctctctagatgatcctggaggtgtcagctggtactgttcaggagatcaatggcgtcagactgcgtgttgtcagcattggtgccgtgtaaatcatgcatgcctgcctcaatttcttcgttggctccactgacaaacagctgcacatgatctgcaacctctgttgtgtccaccgtcgcctgtacttgagctggagaacctgctcccgagattgccttgcctgctgtgtctgcacggtccgcgaccttggagtggattcttcatcagaatttctccgtgtacatcctcctgcgtcccagcactactatctgcatcatcttctgctacattttctccagaaaaatcatcagatggctcattaggcgcagtattaagcatatgatcaataccatgttctcccccttgatcagtacagtgtgggacaagggagctaggcaacaaagatatctcagcacggagacgagctccagcattagagtgaagttgggagaaaggaaaaacattttcatcaaagataacatcacggaatatatatactctcccggtagatatatctagacatttgaaacccttgtgaaggtgactatatctaaggaaggcacattgcttagagcaaaattgtagtttatgattgttgtatggtcgaaggttaggccagcaagcacacccaaaaacttgtaaaaattggtaattgggttttcgatgaaacaatttttctagaggtgtctc

SEQ ID NO: 7421 - DNA, 1772 bp, Oryza sativa
  ref <308>: DATABASE ACCESSION NUMBER: AK064548
  ref <309>: DATABASE ENTRY DATE: 2001-12-06
aacgggagacggcttgccgcctcttctccttcccgctccgcgccatccacctccccctcctctccctcccctccgccgccgcctggcagcttccgcatcggggggaagcgcggtagcagcgctggtctgtccaactcgaggtggtgttatccccaagatcgagaaggtgcatttggggtggtgtttccgctcggagatggtcagagggacatcgacccggcaatactgtttctagaaccaaatgtaggtgattggagagattcatcagtgattgctttagactagactgtactggggatttattggtgtttataaggatggatggtgctgttcgagggcagggatgcgtggggaggctcaggagcttcaacaaaacgaaaaagaagaaccggaactgcagtgatgacatgcgaaatggtgatgacgaagagaagaagtacagtcatcacgacatgaagaacaacttgcgaaatgatgccaacgaagagaagaggaagagcagcgatgacatgcgagatggtgatttcgaagagaagaagaagtgcagtcgtcacgacatgaagaagaacttgcgaaatgatgccaacgaagagaagaggaagagcagcgatgacatgcgagatggtgatgacgaagagaagaagtgcagtcgtcaagacatgaagaagaacctgcgaaatgatgccgacgaagagaagaggaagagcagtgatgacatgcgagatggtgatgacgaagagaagaagaagcgcagtcgtcatgacatgaagaagaactcgcgaaatgatgccgatgaagagaagaggaagaggaagaggaagtgcagtgatgacctgaagaagagtgtggtaaacgatgccagcaaagaggcgacgtcacacagtgactggagaaagaataggaaggctggaagcgatgctgagcaaagggggaagaagttgttgaatggcgacaagaaggctaagagtaggaaggtgaccactccattctttgaaaagatgcggaaaataaaaatgcagcgcacgagcaaccagaatggtgagaagaatatgaagagtgacggtgacagctataagaagacagtgccgctctcagtcaacaagggtaagatggagaaagatggaacgaacaagaggactttgtctaatacacttgttgcaaaggagaggaaaatgcgacctagtgacagtatggagatgaagatgaagaaaaagaagcgggatgcatcattcgttcaacctgatgagaggacagctcagacatttagcactaaaaacaaggaaaagaagaggaaggcgccatctacaccattgaagagggagcagaaggagcgagtggctagcagtgacaataaaaaggagacgaagaaggcttgtattgttgctataggaaatgagaaaaaaaattgtagggatggcaagaagaagaaaaggaaagcagccttcgcattcttcaaatttgtgcgcgacgagttcgaggaattactgttcataccaccagcagttgcacccagccttaaggatttaattgatcgccatgtatatcctgaagactcagaggggaagtgttcaaagatcaggctatcggtggtggatggttccctagctttttatgagggatggaacagtttcgtttcagaacattgtattaagtggggtgaatttctattatttgagtacacaccagaatcaacattttctgtgcgggtgtttggtattgattcttgtgaaagactacatttcagtgtcaaaagcggaggaaaaggtgctgtg

SEQ ID NO: 7422 - DNA, 1331 bp, Oryza sativa
  ref <308>: DATABASE ACCESSION NUMBER: AK064549
  ref <309>: DATABASE ENTRY DATE: 2001-12-06
tatgttagcgtcagctggggaggacgtggaggacccggtgctgtccaagcttgcaagcaactccttcatgtttgattacagctgtggtggtgatgactcggggactgaggaggagcaggctgctttcatgaaggaacttgagcggttttacagggagaagcttatggaattcaagcccccgaagttctatggtgaagggttgaattgcctcaagttgtggagacaagtgactgggttgggtggctatgatcaggtgacatcgtgcaaactgtggcggcaagtgggagagtctttcaaacctccgaagacatgcacaactgtttcatggaccttccgtaacttctatgagaaggcactccttgaatatgagaaacacaaaatcgaaacgggcgagtttcaagttgctgcatctaatttaacagagaggattacttctgaaagtcaggttggcatccatgcttctggttctggaagagctagaagagaatctgcaacccgagctatgcaaggctggcactctcagcgcttgcttggcaatggtgaaattgctgatccaataattaaagataaagggacggtgtctgtcttaaaaaaggataaaactcctaaaagcagcggttctgccaagaggaaaaggacaccgaccttggaagatgacaggattgtaccatataaacctgacaagctacaaaatgactcaatggttcttgaccttggccctccagctgattgggtaaagataaacgttcggagaaccaaagattgctatgaagtctatgcattggttcctggccttctgcgtgaggaggtacatgttcagtcagatcctgctggccgtttgatagttactggagagcctgagcaactagacaatccttggggtgttactccattcaagaaggttattagtttgccctcccgcattgatcctcatcaaacttcggcagttgtcactctccatggacagctatttgtccgtgcaccattcgagcagtcaaagtaaatggtgctctacaagatgaagcgcaacatgcaagtatgcccttgttccctaaagatgcgctgcaaacttacgtgttctgaagttgtcgtctgtatgaaagtaatgaaaatgaaagcatgttagtgaactggtaaaattttaagatgggcgcagaggatgttagtgaactgtaaatcttgtgtagtcgtttagatagtttcttgtggttgaatgccattgaactgttgtaatctgtttgtttcctgagtcataaatggtagaactcaacattgttgttgctggacagtagtaagttgcaatgggtttatgatttgcattctttagtgtt

SEQ ID NO: 7423 - DNA, 1906 bp, Oryza sativa
  ref <308>: DATABASE ACCESSION NUMBER: AK064550
  ref <309>: DATABASE ENTRY DATE: 2001-12-06
gatccattcgatgattcagcttatgttcttctgtcaaacttatatgctacaaatgcaagatgggcggatgttgacaaattacgaagtcacatgaaaaccatcaatataaacaaaagaccagcttgcagttggcttaagcttaagaatgaagtaagcacctttggtattggtgaccggggtcataagcatgcagagaagatctacgcaaagttagatgaaatgttgctgaaactcagggaagtaggttatattgctgacacatcatctgcactgcatgatacagatgaagagcagaaggagcagaacctttggaaccatagtgagaaacttgcgttggcatatggccttatcgttgtcccagaaggatctacagtaagaatattcaagaatctcagagtctgttcagactgtcatctggtatttaagctggttagcatggtttttaatagggaaattgtgttgagagacccatataggtttcaccacttcaaagtaggatcatgttcttgttcagatttttggtgagatagtcgtccacaaatgggctattggttcaatgtttaagtttgagcatgcctacagaagatccttccacaccccaaaggacacagaacaaaaaatgataaagatgagaaattaactcctatctccctttgcatgggaacagtgattgtcattactgcgcatatgtgagtgcctttagttctgtttccactttccagtacattgatttttatgttccatacttggtgcattgacaagtagtgtcagatgggagaaattgatcagctgattgcatggttcttttccacaattggtgtctttgtcagatttcatagtagagtcggtgcaatgacaacaatgggataatgttgaccacatcttttgcttttggacaatgttgtcacactgattcatgcaaggatcagcagttaacacctctagtagcattgatgcttgtttggaaccttcgatggtacttggctgcacgaatccttttaggatttacaaaaattatatcctggggaagtgttaactgacacatagatcaagattatgctaatttgatttcggaccctagctctgaggtgagacgcaactggatgaaaccactggatgagtgacagctctgatatatagtataatcatctctttggtgatctctggtcgcagcagaagcgcggcagttcaattatcctggacgagcgccgtggtggtcctggcagttcaatcaccgaaaggagacagtacgagcaagaaacaactggtttcatcaaaggtttgctactcagatttggtctgtccattacactagactacaagttttggagatctgattctaccagttcagtgtgggcacgcaagctgagcacacatgtatagtacataagtacatttggggatcgaaggagctcgtgctgcaacagtaataacatgatcatgaggagatcagacggcgaccaagatgtagacgaattaaacatgacatcacatttttgttctctcccctcgtaagtgcgtacaactcggcggtgcattaatacagtactactacactactactacaagtcaagtagactcctgttcgttgtactacgtggtcaccggaattagcaggggcaggcagagtccaccatgatcaggaagctcaagcatcgtaggctgatgaactctgagccgacatgaacgcaaccaagcaaagcagatcagtgtgcattgcaggtcgacgatcgacgtcgaatgcatgggtcgatggccgctgttttcattggggtcgttgtttgcttgagatagagtgtgatacatttacttcctttccctctgagataggcgtcaatctatgcatgaatgtcatgacagtgagaggttcttgattaattagttttatgctagaaaatgattgtgc

SEQ ID NO: 7424 - DNA, 1742 bp, Oryza sativa
  ref <308>: DATABASE ACCESSION NUMBER: AK064551
  ref <309>: DATABASE ENTRY DATE: 2001-12-06
tgttaatgctatttcaacattgtcagacttctttatatcaagattgtcagattggcaagcacttcgaggagcacttgttggatgtttggccttgttgcacagaaaacgaactgttggtagtatcatcattgctgatgtcaaaagacttctcgagactttcttgcagaatgttcaagtccagtcacttgcagctgctgaccgcaagctatgctttcaaattctgaactacatactggatcactaccctgaggctgtcaaaacaatggtatggtactaagtcagtatctggacaacagtagatcactgcatcatgctggaattatcttagcctagttgttattataacagaaacgacagtgccttttatcaatcctatctgtgcatagactatctaataatgatagcagcagcacagctttgcacttcctttgctttaatatgctatgttttattgttgtgattattccgcggtatgttggcacttccctcatctggcaatcatatattatcttttttattccgaaatatttgactcttttggccaatcatgaaacatgctttggacaaaacatgacaatccaataatactgcaagcataaacaacaaggtatttaagagtcatatgggtagttttgaagtatacgtgggtatggggaagtgccagctattcaagggtggaaataaaatcattattatgagcctctgacatgaaggctcagtttgtattgaactgtcgttttggtcacttgccctagatgcttggtccgttcttttggttttgtttggtcattagacttttaagcgtgcattgtattttccgactcttggggtgggattgtttttcccccttgcattcttcttctcttattaatgaaatgatgtgcaattctcttgcgtgtttgagaaaaaaaggtttgtatttcactgtcagcgtgtactttatgttccttagaattttgaatgtatagtattctcatttatgaattctgaggttttgacatggagccatggaggcacagtttccttttcactatcaatctgttagtaagtttatagtccacttcaattttcggaaagatgagtacaaaccaatacaagttcaattggtatcatgaatttctagggtgatgagcttctgtacggaatgtgtgaagcaattgatgaagaaaaggacccggaatgcttgaagctttcatttaatttggtcgaagctgtcatgaagctatttccagatccatctggtttggcagcacaatatgcaagcgaagtttttgagattctgagtaaatattatccgatctacttcacacatgtatgtcgattgaccgttttgacttttaaggcattttcatgtgctttattgttctattaatagctgttctcagcctttctttcttcaaagcagcatactgattgtgcattgtttgtgtatgtagggagtgggtgatgatttagatgctacaagggatgatctttctaaggcactaatggtatgaatatagacatataatatttcgctgatttgagagtgtttgatctttgtggtatttgttacccctagattctcttgtcatgctaattaatgatgaagtaaggcttcctattattgtattttgttggctaacaatctgtttaaatctatacagcatgccttttgttcaaccccatactttgagccatttgcaattcctttgcttctagataaactttcttcctctcttccattagccaagtattctgcc

SEQ ID NO: 7425 - DNA, 1731 bp, Oryza sativa
  ref <308>: DATABASE ACCESSION NUMBER: AK064552
  ref <309>: DATABASE ENTRY DATE: 2001-12-06
tattgataagttggcaaaattgcttgagtcagtattacttgatttggccactgtgagacaaaaaataaacaaaggtaaaaaacgaatttggaagatggaaggcaaattggaaaaggctcagattcaacatctgacagacttcaacaacaaatatggaccatctattcgacaatcagttgaaactgctgaacataataactgtgctttgaggtgtcttaataattatttggagttgatgattgaggaaccacggtttagttcaattgcctatgttcgtctggattcacaagtcaagaaactcgataaggagaacacgtctgcgatggatttatcatccagtttgcaccagatgcttcagaagttaaatttaagagtacaagatgaagaagtctgggtgtcacagttaggctcaaatttgcaggcttcattcagaaaaatcatggatacctcctcagaaataggaaaattagaagatgaagttttgcagctgaaggtcgatatagctgagtttgctccaggtgaagtaaccagttgtgcagtatatgaaatgatcaagacacttcaaattgttgaactgttcatgaataattccaccagacatttgaaacttatcgatggaattaattctgaaatgagagagtttggaagtatctttaatggcaaagtgagatgccttgttcgctttgctagatatcaacaaactaatatggagaagtctacacagataatcaatttccttggtgacatccgtgctaaagttgacaaaatgactcaaatgtatggtctatctgaagttgtgcccattgtctcaaaccagtttatagaggggagcttcaatgccgatgcatatgcttttgagagtttgaaagagcacagcactgatctctgttttagttggagaacaaggaagtttcataacagattaattctccctccagtgaggcaacaaacttctggtatgaaataaatgacttcttgatgaaaactttatgtatgtcataagaataaaatatgtcgttatgatgccatgaaaataattgaacgatcagcaaaaattgcaccttttcctgtcgcaatcagttttacctaataatttacttcctagactgatattttacatacatgttgattttactctgctggctcaccctttttatgtcctgcttctgatggcctcaagtacttcccctcacacctctttctagtcatttgatcatggttgatttgtctactagggcccacctcgacacagtttatttttgttcggttagcgccttgttcgagttactggtattcttggtctttcttcttgattggaacttatatgcaagcatagtaattcttgtcagggacgtgttcatattacgcgacactatcatcagttgagtccttgtataaaagagaatatgcatcataccctactatcttaaaagataagattggacagcctgatgaatttctggttaatctgtcaagagctcagttggaagatatagtagaagatttttataccaggcataaagtcaagggttcgaaaaggttgaatgtttgtttagataagatgaaaaatgaaggcgttatttcggaagaatcatatatgaaccctcaggctcagtttgtgcagtccacagaaagatacaaaatcaaacaatacgaagagctcaatcttgagattgcgatgagggaacgtgataaggaagaagtaagcattgttgacaagaagtgtatagg

SEQ ID NO: 7426 - DNA, 1971 bp, Oryza sativa
  ref <308>: DATABASE ACCESSION NUMBER: AK064553
  ref <309>: DATABASE ENTRY DATE: 2001-12-06
taataagacgaaatgatgacctcctcagtaggaatgatgacttgatcaagaaaattgaagattccggtcaagttgttgctgagctccaggcagccttagaaagaagggaaagcggccaacttagaggcagaaaatcaaattcttcgccaacaagcaattgcaacccccccatctacagccaagtctcaagctgcattctctaaaatcagtatgatccatagaagtccagaaaatggacatattttaaatggcaacgtagcatatgctgaaaagtccttgactggtccagcagaaacaagaccctctatggttgttaaccaaggtagcatcctcaatttgattaaccaaaaggattatgaaagtggagataaaatgcaaagagcacataatgaagtatatcagcaccagcagccccaggatgctcagcagttattgcttcagtacattacccagcaccttggattctctggtagtaaacctgtcgctgcgcttcttttataccaatgccttcttcattggaaatcgtttgaaacagcaaaaacaagtgtctttgacagtatcctacaagagataaactcagcaatagagccacctggaatccagaatcattacattgttataatattaactgacattcctcttacttcaaggctcaacatgatacgagaagcctggcctattggttatccaacctgtcaacattgtcagttctcctgcaactctcatttaaaaccaccagggcagcaatctcaaccccacatagacggagattttcctacgagaggatttttcaagctagtcaaatttcaaatagcggacttgcttatttcagtgctcaaccggtggatgggcctagtggattgcaacaaattgatgcaaaatatccagctttgctcttcaagcagcagcttgtggatctgattgagaaggtgtatggaatgataagtgacaaggtgaagaaggagcttaacccgttacttgagttgtgcatacaggatccaaggacttctcactcaaatcaagcaaaggcctcactatcatctgctagtcacttgggccaacaaagccaactcacacactggttgggcatagtgaaaatcctcaacaactgcttgcatctgctaagagcaaatcatgtcccatcaattctgatccacaagttgcttacccaaatattttctatggtcaatgttcaactatttaatagacttctgttgcgccgtgaatgttgttcgttcagcaacggggagtatatcagagctggactaactcaaataaaacattggtgcaatgatgttaatcaagagtttgcagattcagcctgggaagcactgaggcatataagacaagctgttgatttcttggtaatttcgctgaagccaatacggacatggagtgaaatatgcgatgatgtttgcccagctctcagcttacagcagcttgagcgtatagttggcatgtactgggatgatatgaatggcacaaacattatttcagcagagttcacatcaagcatgagaactatgatgaaggaggaatcaaataatgccaccagcttttctgtcctgttggatgacgattccagcatacctttttcacttgaagacattgcgaagtcgatgccaaccattgaggagacgacagagaatgacctgctaccttttgtccgtgaaaaccaaagctttgcgtttatattgcacaggagagattgagtggttccctcttcacagatcattcaccggctatgtgaaaaaggagcgcctctgtgtagcgtggatatcacacgttattcatgttgtagactagtaacccatttaggaatcaagagcaattgcagctgagggtttctaggcctctctggtttgaatggttggttaagcaaactgtacatgttttatctgcagtgtgtataacacacgttattcatgttgtagactagtgacccatttatgaattaagagcaattggacc

SEQ ID NO: 7427 - DNA, 1640 bp, Oryza sativa
  ref <308>: DATABASE ACCESSION NUMBER: AK064554
  ref <309>: DATABASE ENTRY DATE: 2001-12-06
tatcgccatcctttgaacacggattctcggacatgtgaagatgttatcactgagcttgggtacccttttgaggctataaaagttgttacttcagatggatatgccctactgctggagagaattccaaggcgtgattcacagaaggtggtattgctgcaacatggaatactggactcatcaatgggttgggtatcgaatggtgttgttggctcacctgcatttgcagcatatgatcaaggttatgatgtttttcttggaaatctgcgtggtttagtctccagggagcatgttgataaaaatatttcttcctacaagtactggaaatattctgttaatgaacatggaaccaaagatatgccagcaattgttgaagaaattcacaagattaaaacttcagaacttggcaaaagtagacctcacataagtgaggaaacagaagatcaaaacgataagataaaaaatttggaagtgcaggcttcacaggacgatgaaagagacaatcaaccatacaagctttgtgctgtctgccacagcttgggtggtgcggtgatgttaatgtatgtggtgacatcaaggattgcgcagaagccccacaggttatcaagattggtcttgctatctcctgctggctttcatgaggattctaatgtggtgttcagcatggtagaaaagctcattttgtttgttggaccagtactagctccatttatacctggcctttacataccaacacgtttcttccggatgctactgaacaaattggccagggatttcaacaactatccagctttgggcggccttgtccaaactcttatgggctatgtagttggcggtgacagttcaaattgggtgggagtgctcggcttgccacactacaacatggatgacatgcctggtgtatcattccatgttgcacttcaccttgcacaaataaagagggcaaaaaggttccaaatgtatgactatggaagtccagtagcaaatatggaagcatatggaacaccagaacccttggacctgggagctcattatggtctgattgacatcccagtagatttagtcgctgggcaaagagacagagttatctcaccatccatggtaaagaagcactataagctgatgcgcaaggctggtgtagaggtttcctacaatgaattcgagtacgcccacttggatttcacattctcccatagggaggagcttttgtcctatgttatgtcccgcctgctcttagtgtctgacccaggtaaaggccgcatcaagcagactagtgtccgccttagaaagctgaagaaagctcagtcagaaattgagaatgactctgacagcaaggagcacaatggcatagataatgtggttacagatgagcaaaatgggcatgtgcatgctgcgtgatgtgatcatgtggaatatgctgaacatttgttgttagtttgtgaatagaacacgtgctgcctctggcatataccttctgcaacatgtagaagatgtgaggatggatagagcccagttctttctagcagtagttgtgttgatggggattgttttttatgtatccctgtaggagaacaagacaagtatatgtaatacatgaatagtggctatagtgttgttcatatatatcaagaactgacagggag

SEQ ID NO: 7428 - DNA, 2393 bp, Oryza sativa
  ref <308>: DATABASE ACCESSION NUMBER: AK064555
  ref <309>: DATABASE ENTRY DATE: 2001-12-06
tctctctctcatccgttccccaatccatccaggagttcatggcggatcaatggcgaagcgaaggagctaaaccctagagctctccagcgcctcgttcacctatccaaaactaaaggtggcatccccttctcagtattacagcatgcacatgatgacttctgcaagcggatgtgcaaagttggattaccttagttcgcaggagcctggtgatgaatcacagatcaacgctattgacattgtggataggctgctagtagaagatgatatagaaacttatcagcaaataagcatcgaccagacaacgagggcaaagtcagcttctactttaggttcagatatagctcaatgcctggccaaaagggctaggtgcagttccccactaaaaaaggctggaaattttgactgggttgatacccccactgttgatgattgcagaaccagtattatttccatggaaaatacagtagatcgtgctaataatcaagtgaaacacggtggctgtggatcaagtaccagggcttggcccatactagaatgcattgatgaggacttgggtactaattgtctgaagaaaacggaaccattttgtggtactgatgatttataccaagaatatgatattgggccaaatactcagatggcagctgaagccatggaagcattgttcaatgcttcaactgtcagttatgatgtcaaggagaatgaacgtcctgaagattctgttgttaaaaatatgacaaaaggaaccaaagttgatatgacatgtgcagttcattcaccaattcaaaagagaaaggtaaacttcttgcgtcacagatcaggagtggcaacagaatacaagcaaatcaaggtagatgatacagtaagggaaaatggtgaaagttcagtctctcatacaaacacatcacaaaccaggaagtatacgaaacagatggcagggaaagcaaaaagaaacatcagcagtgggattactcaaagagacatagatcatgaggtgtcagaagtaatcacaagatctggtacaaatgactcaaatattcctctttcactagatacagatgctttaatccatcctaaaaggaggaggacatatatatttacctcgggaagctcaaaaattgagttcattgaagctatcaagccaacggcacttagagccaaaactacagaagtaaaacagctttcaacagctaacacagtaagcgtatctgatcaagataccacaagtggcttgagaatgagtcaacattcttcttttgctgatcatgaagcatcagcaggtagttcatacttcaatccacttgcagaaacttttactgtagggcttgaaaaacagtcaatacctgagaagaagggtcatgactctagtttgatgcccagtgtaccgctgagagagctaaatggtgcagggccccaagctaggacacgtacatcagaaacaccgaagagagtcctgaaatcaccaggttccagagaacttgctaacctctttagaaatgaagtatctccagtattgcaatctagcaggcgaaggagaaagcatatgtccacagtccgtgtactacttagccaaagtatgggcaatgaaaccctcaacgatcaaacaaagattttgatacattttgggttatcagtggcaacaactatttcagaggctacacactttgttgctgaaaagtttgcgcgcacaaggaacatgctagaggcaatagctacgggcatacctgtagtcacaccggcatggcttgaatgctgcagggaagctaggagtttcattgatgagaaaagatacattctgagggatataaagaaggaaaaggagcaaggctttagcatgcctgtctcactaagccgagcttgcaaaaaacctttgttagagggtagaagagtgctaatcacaccaaatgctaaacctagcaaggagcttttgaaaagtttagtagtgactgctcatggcaaggtgttggagagaaacgcaatgtccaagatgaagaatagaagtttaatgggatcttttgtaatctcttgtgaacaagactacaaaatatgcgtgccattcattaagaacggttttgaggtgtttgaatcagagcttgtgcttaatggtattgtcacccagaagctagaatttgaaaggtatcgtcttttttcaggataaaaccgtgtgaagtgtccgcgagtcttgataaattaggtactatgcaacaaagcgtattattgtacataaatccttattatattcctctagttactcgtattcgtatgtttcctcgcaaatttgcgaacgcttgttgcaagtatttatccctgcagcctcttcttggcatgactatttctgtgggtagacaccaagctcttgtgtgaagaagaatgatgatgtcattaacatggtt

SEQ ID NO: 7429 - DNA, 2026 bp, Oryza sativa
  ref <308>: DATABASE ACCESSION NUMBER: AK064556
  ref <309>: DATABASE ENTRY DATE: 2001-12-06
ctattcacatgctttgcgctacgtctaaggactaagcttagaagagcaaacccaaagataccgctctccgataagcaacatatgagagtttcttatgctcagttgtccaaagcaacaagtagttttgcatctgagaacctcattggagtgggcagctttggtgcagtgtaccaaggaagaattgggatctctgaccaacaattggtggttgcagtgaaggtgctcaacttgcaacaagctggtgcgtatcgaagttttgatgcagaatgtgaggctttgagatgtattcgccatcggaatcttgtaaagattcttacagtttgctcaggtattgatttccaaggtagtgacttcaaggcgcttgtatttgagttcctgccaaatggaaatttagaccagtggctacacaagcatcttgaggaagaaggtgaacctaaggtgctaaatctcgttgaaagactccaaattgcgatagatgtggcttctgcacttgaatacttacatcagcacaagccatgtccaattgttcactgtgatctgaagccaagcaatattcttcttgacaatgacatggttgctcatgttggtgattttgggcttgcaaggttccttcatcaagaaaacagcaatagttcagataaatcaactggttggaatgcaataagaggaacaattggctatgttgccccagagtatggattgggcaatgaagtctcaatccatggagacgtctacagctatggcatacttttgctggagatgttcactggaaaaaggccaacaaacagtgaattcggcgatgttcttactcttcatgagtatgtagaaacagcgctgccagaccaaacaactagtgtcattgaccaaagcctactagatgcgacatggaatagcgaaggaacagctcaaaagtaccacgacatcgaagagataagaactgagtgcattgtttcaattctgaaggtcggaatattgtgctcaaaagagataccaactgatcggatgcaaattggggatgcattgagagagttgcaggcaattagagataggtttgatacacatcagctatagtagcctatatcttgatgaagtggtgcagcatatcaaagtcatgcttgtgcatgaaatattctacttcgtactatttatctgttgagggtcatgcacttatcagtcaagtaagtctgcaagaagacactggaggctgaacatgctctactgaagattttaggagttggaagctaagaacggatatcgagtatcatggaagaagcaaaacatcttcagctaaggaaaaggaggaagttaattgaaataaactagggcaaaatgctgtactacattatcaagcaaaaatattgtactcgagcagctacagtcagcttatggccacacctacacaacactctgtaatggctgagaggtatactaaataagagcctatagcaattcgtattgcagggcatccaattagctactcattttcgctcttcgcacatataattcttgactgagcaattcataaacatgtcaacatggcagtgcctgacttggctaatactgttgacaactgttgcaataagcagcacaagatagcgacgtaagaacctccatctgtcatagaagtagacatgagaattgttaacacaacttttgttctgaatattggaatttcttgttcaaattcaacgaatctcccacaaagtaagagatgcaaccaataagaaaaaggtttaacagggatttgctccgagaatggagcatcaacccatgaagcagtacaaggtatttccagtgcaggtcatcttgaaactattgcacaactcaaaaaaggtcaatcttgatccaggggctcttggctaaggccctggatgtggtctattctactgtagactggccctccccttaagagttaggtttagaattttggatcgattgatcacagccgaatttggaatgcaggaatcttgtcttgtccatgcaaaagatttgagcatttatatgcacttttaagaaaaatcatctg

SEQ ID NO: 7430 - DNA, 2556 bp, Oryza sativa
  ref <308>: DATABASE ACCESSION NUMBER: AK064557
  ref <309>: DATABASE ENTRY DATE: 2001-12-06
aaaactgagaccacagtttgaatgggatggtcgaaaatggatgcgctgcatgacaaagaaaaaggatacaaaggcaaagaagcttgtcactagagggtctcaattaacctctcgaaaaaagccaattcctgctgacttggcatcatgtaatgacagtgatgaaatcagagataaaccaagctctgataaattgttggagactgcagatgtagtaccacgacctaaagaaactatgaagcaacaaaatgcagtgctggcattagcatctcagataaaacttcctttacagttatcaatgacaggatctggtcatttgaaatatacttcttcacttattctaggtagtcctattgaactaccatcttctcagatggatgtcatgccctctgtgccgcaaactgcagggctgcaagcttcactgtttggggtgtttgggaaactaagacctatcccacaggatccacttttagtaatgcaatcacctcatccagatctcagcagaaatgaaggatcaaaggcatcgactgatcaagaaaagcaatcaactgatgaaggctgttgtctgatttcaagtgctgcaaatagcttcaactttgtgtcatttgctggaattgatgtgtccagaaaaagaaaagaatgtgtttcttttcaagcacctgaggaactagggatgaagaaaaacagagttgacgaaacaattgagggaacccacgacattgcagcaatctctgaagaacagaccaagctgatttttagagatgaacataatgaactgcctaccaatgttattgctggtccagcaattccttcagaaaaaaatcagccaactccacttgaagacaataaaggtccacgagacagtagcattgttgataaaatcagccaaagtggtataaacgatgttcgccaagatgagaaccttgtactgcatgcaacttcaacattagataattctggtgatgtgaatttgttatcttctgtttcttcaactgaaaaccagaagaaaatatccaaatctgaagggtgtgaaataagtatggatgaagactctggtgaagaattttgtcggagcattttggttatgcctgatgatactagaatggatcaatttccttcagcaaagagtggtcaagctaccaggcatgatgacctcatttgcaaggaaaacttgggagcaatagttgagtgtgtgacgaacactccaacagagaatttgtcttttttgtctccagctatgtttgatgatggggtgccgaaccagtcaccagtcagtgagaattgtcaggataacaaacaagatggcatggacaatgtggatcatggagcaaatgtggtggagttagccagtattattcctgaaactcagcatgccagtgttggtggtccactgtcaaccatatctttagctgcactcgagggtaaaacagtcctttcacatagtttaacgtgggagtctgcacttaatgaacaatctggagtttcacaacagtatcacagctcagccatggtagagtcaccagaatgtgttgctgaaagtagccagtccatcgatgattcgacaataactcagttatgttcttttgatatgagccaatgtattgatgctgaacttggtaacagcttgatcgtttcaaacaacgctcaggatacaccaatatccaagtatgtagcaagaacacataactcttcctgccccttgatgcagaaatttcttcatgtgcatgagaatattatggttgatcagccatcagaatccttggctattattgaacttccgtttgtgaagacctccccgatgtgggcacaaattgaggcaatggaagtatttagtaaagtgccacaacgaccaaattttcatcagttacagcagcatcctccggagtttcgtgaagggatagcattgggtttgatgtactctttcaccaatttagcagaaagcataaacatgctgaatgtccatgacgataatgcagtatttgaacataagatgaggtgcatttctgtgttggaagcagacggcttcgatgtcaggcacctacgatctcgtttggaaactctgctcagtttaaaaaacagctggtccaaaatacaggatatgatgaaacgttcggagaagaagattgctcaagaagaaatcgatgatcaacaacgctgtgcagaaattagtgtgctaagtatggttgtccgccagcttgaacaacacgcccatctcttccgttgcataaagaaccgtgctatttcacagcagatgagccatgccatggagaattcaagactcaaagtagaagcaagccaacttaagcaatcatctatgtctaccgagcagcgcttcagtagtgtcgtcgctgcgccatggtaaggtttgtgcaaactaattggtatgcttgcgtattatttagttactgatggtatgtgaatattgctagatgttgtgagttactaatgctagtgctgctgaatctctttagtttgtgtgatggtttcttttggtatgaggagagcacccaacgtatgtaatgggtcgttgttgccctttatgcaagacatcttttgctt

SEQ ID NO: 7431 - DNA, 1921 bp, Oryza sativa
  ref <308>: DATABASE ACCESSION NUMBER: AK064558
  ref <309>: DATABASE ENTRY DATE: 2001-12-06
atgctcgcaatcgaatataagaaggatgatgatagcaatcaacaagaaggtgtacagtataatcatcagaatgtagtcaatgcagcttctcactacaatacacgaaatgatgatataactttgaagaggaaatgtcaagatggagaaagaggatcacctgggacctcaaaaaaaagaaactgaaggtggcaaacactggaaagcacaccggttgcagcaacgaggataaagcccaccaagatcaggatcatagtggttccaaaaagttgaagtcaccatgtatcgatgatgccaagaaggtgatgctagctgaagccgatgttaccttggagaaagagcagatatcaaagagggacaaccaaaccaagttgaatagcgaaacaaaggaggatgattgtaacactcaaagcgatattaaaagggtatctagaagtgctcggcgtaagaaactcaaaagacaacttagacagaaagccaaagaacaattgaaagagaaagagcactgtcaagaacaaccaaccgtggctgattgtccatcgtcaaacaaccgagatgttttgccgtccccatcaagcaatcaaaacaactcgagcttgccatttgtaaggcatgaagcagatgaggaagaatctgatacatcggatgatattgttccagttgtggttaggcctggccacattcgctttgagtcagcaggcggagaatcagataaatcaccggtgaaggaaatacagacaactttccagtggagtggaactacaagcaaaaagaagggtcagaagtgggaaatggacaactcaaacaagaaaagctctgatatcagctatcatgggaggataactggaactgacactgaagttaaccaccatgtggctggcaactctaagactagtgataatgattttggtttggccagtaatcaaaaggttggtgagagcagtcatgttggatcagcaagtgaaaagattgttgctgagaaagggaagtctagcagtgaacctttagattttgacagcctgtatcccctaacacgacttcccaaggaaggagatctgattgtttatcggttggttgaactgtcttcctcttggtgtccagagctttcttcataccgtgttggcaaagttcttatatatgatcccatatctttgaggatcattctcttacctgttcctgagtatccgttcactgctggagaaaagaatggtgaagacgagtcagagatgctggtggacatgtcaccttacaaggaagatggttccttggagatcgagtactcttcgcttcttgatattagactgctcaaggacactgattccgtgcaaccggctgttagtactcccctgacagaaacaggcattaaaggtggatcccatgcccaaaagccagctaatttagataatcataaaggtaaaattcacagcgaaaaactgccaaacaacaccaaagatccagaagccacgcaagaaaaaacacaaaacacggtctgggaggaaaatggagagatcgcaaatgacgagcctgctgttcaggaaaatggctggggaacttggacaccaaatgccagtacatctgcttggtcatatagagcactaaggagcagtgcccttggtccaacacttgcacatttgagaggaaaaaataccaagaggggtagaccttacaatcggaagtatggcaagtgaggttgctgtatgtaatcgccgcttggcctgttcttttgtagtttttgtttgtatgtaatggtgggctgagctaggattgctatgttactgcctgttcatggcgatatgggatctgaatctaagacacctaaattagtccctagagaagggttctaaactgttgagctctgacatttatgtgaaactggagttcaacaagtctgttaaagatggatgccattaggcacctggttggt

SEQ ID NO: 7432 - DNA, 1898 bp, Oryza sativa
  ref <308>: DATABASE ACCESSION NUMBER: AK064559
  ref <309>: DATABASE ENTRY DATE: 2001-12-06
cattaaattggaggcttggagctaagtccaagacttgtttttttcttttgggggcactatgagacaagagctgttacttattattacccataatcatcacctgagctttgtctttggcctgtagtttttacatcacaagattattattttttacttctgcctgattccttgcttatacagcagaagagtgtctagcatggtccatctgttctgaaatttagaatcctgcacttattttactgttaaatcttcagaactaaatcattcgtttcttctgtaacttgaagacagtaaagatgattctgtctgtactgttttaccctgaaaaaaagtgtgactttggaagtccaatgcagtacaacccctggtgtgtgttcatagcactagcctcacacactcacactccatactgtgtactgaactgaatttagtttagttgtcaagtccgttcacttactgcaagttgaaggtagtggggccaaggattaatattcctcactctcttgccttctcagccctcttttgggagaaaaagaatgctggtgctaccgaacaaatgtgtagtgtagcgtatttgcagtggggtatttcacctgcaaaggagcatctttctgtagccttgtagctttcactcccctttctttgtaaagatatttcaggtttccagataaatagatgcatctcatgctctgtttggttttcagtagcttgcagttgttgcctgtggcttctgagtggccagtttttgtggttgtattcaaccagtttcaacattcatgactgctgttgcacttcattagcttatgcctaagctcccttttgctgcatgatttgattgcatataatcattctgcattatttctgcagcttctgaactttgggaaacttgtcagacagcagggttgattcaggtcatcttcttgcttggaatgtgctcatcaccaaatgtcgattcttgtacagtattagaagttctgatccaagcatgacgggttcttgaaagttgaaactacacaaaggctttggagacatgggatgtgctgcttccaggttagaagatgaggaggctgtcaagatgtgccgggacaggagggacttcatcaagcaggcgctggagcagcggaaccgcttcgcgtcgtctcactttgcctacattgagtccttgaggcgcgtctcgatggcgctccagtggttcgttgctggggatgatcaccatgagctcatatttgaccccttcatttctcccttgaagcaacagaagccagagctgcttggcctcccttatggttcatatgagaagaggacaattcatgtctcaaagtacctgaggtcaggaccaaacccatcggtatcagttgaagagcaaccgagacccgtggaaacaatccgtattgagtcgcattaccccacagataactttggtggcatggacaggttcttcgcagcgcaatcctcgccaatgaggccatcttcttactacacaccaccttatgacaggccaaattatccacctccatcaccccaggagccagtgaggaactcttattacatgtcctatgacaggccaagctatccagctgcggttgcctaaaaaattgcctagtcttagtcctgtaatgaagaatgatttgcatcgctgatttactgtagctggtgattattgacttgaggagaagtattagttagagggtttaattaccatggtgattatgttcttgggtgtgattcttctgtcagtgagaggaaacttctgatattgttttgtaagtaagtatgaggttaacaggtaaaaagggtgtactggttaatgtttttccttgaagaggggagtgagtactgttttagttgattttgttaggtgctggtctgttttaggttgaatgaaatgtaaattactc

SEQ ID NO: 7433 - DNA, 1480 bp, Oryza sativa
  ref <308>: DATABASE ACCESSION NUMBER: AK064560
  ref <309>: DATABASE ENTRY DATE: 2001-12-06
cagaagatcaagagctgcagcatagatcaacaagttgtaattaatgatcatacaagcaggaaaaattgctgatcccctaaaaataaaagaaagaaattcctgggttagagtggccatgcattattgcatttcagatgttcttgagccattgagtgttgcatgcacaaaaatatttaaggcagctggaagattgtgatgggctggttgtcgtgaaggaaagattggcctagaaattttattttagtgatcttgagataaatacaggtcgtgaagttctctgggatcactacattagtattacggttctcgatcagatcaaggactgcagaattgcatactcattttaactttggtcaaatatcgtatggagaaatctgaaatacttggcatcaaatctttggtccaggaacatgacaatcttctccctcaaggaaaaggtaacataacagctacggactcagggctgacaaaagcatcacatatcttgcacatgttgccaaactatatcacctaatacctgtaatgaacaagagcaatttactcatgacagaagcccaaaactcatgggcttgagatgcagtttagacataatcactcatggaaacccaaattattttgctgaccaaggaattcatgtgctctttgtctagtgaaattttgggtggccgtaaagttaattgacgtcaagaggagcaggatagttccatgctgaatgcatggcttcagctttgggaataagaagtcctgtagactgatccccaaccagtgtgaaatttgtctgttgttggtgcaaagaaaaaatcagaagcaaacagtgtttgtgtgtgccgcgtagaaatcatccagcgccatcaaaatactggtccgtgctattttccccaccattgtttgaaggtcaaggatcactccaactgggaacccatctactaccccagttttgttagcattttgggctacagtgaaatggacaaggagtaacaggaacagtatggtttgaggtgctctctccattaccagtgctgtggctgtggaatgtttgtgaaagactttgcctcccaaggccttacactcttataaggctaggggcttgaggaattcaaacagtaaggctagcttaatttaaactttacgcgtgaaataatgtagtgccataggtgttattttactctatttcagttgtatttttggaacccttgaaggtcaaatgatgtgtccatagccatgcagtgcaccattatgcagctttgcatttctgcaagctactgacagtactacagtactaagcaataggcaatagttacttgcacagatgcaagcaatctttcgttagatcaattgagactttgagagagtagcagttgtttatgtaagtttcaaagcagttgccttctttcctgaagaaactgatttgtgcaggaggtttctgtagcttatttaaaagccaattgatgggatccttccggaactgctttcagttcat

SEQ ID NO: 7434 - DNA, 1906 bp, Oryza sativa
  ref <308>: DATABASE ACCESSION NUMBER: AK064561
  ref <309>: DATABASE ENTRY DATE: 2001-12-06
taatatttcaaaatgttagtggaagaactgctcatgtgcaagaattattctgaatatctatatggatgtaactagttattgtaagatgtaagtacttacctgaggaatagtgttattggagataaattgttcattattacagatcctagctgcaatatagatttcgcacggaaacacagtgtggtacaaagatttattttgtatgcttcagtacttcctaaatatcaaatgattttggattgcagtgatttcgaacttgcttgcctctgttatttgtttcgttgttaacaacatgcttgaaatttgttttgtggttcttataatattcccaatatattgaaatttgtgctaccctgacatgcccttttgtggtaattcatcaactttttacagagaattctcatctttaaataagaggataatttctgtttgtgaaactttttgcatccatagattattaatttctgcttgatatatatgagaacagcatcagataaaacaacaaagtcggtagtatctgctgaattttgatatctgaagtagatcaaatttatctactgctgtattgcgtgcttgcctagattagtttaaagcaccatttggtgcgtgcagatctctattctcgctaatcgctatctttcattgctttagcagaacatttattttactataaataggctgctctggcagttttgcatatatgctagaattaccaagacattgctgtgatccagtactagttctaacatactacttaattagagcctgatccttctgcatcactagccttcattgagaaatcatcttttgtgctatgccaaactattgaccgttaatgagattgtagtttcttgttttcacatagtagatattctttctgaaaacttgaaaatgtaccaattatttataggtatttattgagttgtttgtgcagggtgaaaataacatgaactgctttattgtgtgtatatgattctttcctttaatcatgtgctcgtgatttgatgtggtcgacactgtttgtagaatggctcaaaaagatggcctgagcgatcttagaaatttgtctcctcatgttcttgtgagaggcagttttccttctgtgcagaacatgattgcttcatatttccaacacgctgctctgtctttgcaggccatacttaacatgtgtgacaatattggcggtaccttaatcgacatgaatggacctctgcctatggcatactaaatgatcatggtggcactgcacataatgaactgccacggtttgccttcagcggcgtcgtctactcatctgtgtgcttcttgtgagttgtgaagcatccatcctgacattgcgccatatttcgcattgtggttattagtaatatagaagaaaaaaggggtcgcagctcgtgcatacagcattcggaggagcaaggttaaaccgttcgatggaatcatcatggaaattaccagctttctgtatcatcatggaaattaccagctttctgaataagcagaacatgaagtctacagttgtacggtgtacttcataaagtcagaagctgcgtatcgtttgttaggtacagtgccatgtcgaggcatttactaagaagtggcccaggtcaacactgatgagagctttcttgaaaagtggaaacgcgatggttactccttggccaaaggaccgttcttccatttccatcacaagaacggcgccaaccatggagatttagctctcgagtcatgtggactgccgtccattttacaatggacggcgagcccttcgtcgatgccttctgtggtctgaaatacttcatgccctgtcaggttccccaaattatctgaattttggctgtgtacgatccgttttggatgtagagaccggtttaacccatttctttaaaaaaactgaattttgatt

SEQ ID NO: 7435 - DNA, 1976 bp, Oryza sativa
  ref <308>: DATABASE ACCESSION NUMBER: AK064562
  ref <309>: DATABASE ENTRY DATE: 2001-12-06
tattcgattgttttaaaagaatgttgagccgggcccgggtatgtaagttcagcgatgtacaaacaaggattgatttgacttcccgcacctaggttgggggttctattttggaagaggaatagaatctcattcatgtgttcatgctaacagaagagcggatccaatacacataagactcttttctcttgaaattccgaatgtaaatgattcaaagaaagggtggactgcagcaatagcaagagatcagcgaacgaagcggagaatgatcacaattaggtcgatcctaccatagccgagtctacatccaagacctgacacgatgaaaaataagattctttctaaaagagctaagaaaaggagtacgaggactagctcgacgtatacccgcacgaaagacttgaaagagctcacgcgtattatgcctaccttggctactggtgaagatggagtcgtaaattgacttaaccaaagccatacctgattgcctacgaaggtcttaagtctccgcacgcccaacacctacccctacctgtatccttaacaaggtcgggatatccacgcataatactatctaaaaaaagattaatgatttggatggcaaggcggatgtactagtaaagatatatctttccttcttttccatcttaaaaataagacttctggcgaaaagagtggagttgagtacccttgcttaataactagttgcaggcatggcttattaggtttctgaaaaaaattgagagctctttatatataaccaaagaaaatagaaaaaagcataaaacatttatagaaaaaagtaaaaaaatcaaacattgacgacccagacgaaacaattagtgaaatcgttctatttcctccatatccccaaacatatgcctattcccgcacatgttcttactcgcatattggacttacgaagggtaagccttattcccagctatttaactaataaaaaactcttcacaatgcttaacgcccatatgttcattctttctttgcttctcatgtttccatgctcctttctggtggcaggaggcaaagaagagacataatggagataatgatggttcaaatccaaccattccttgggcgtggttcgagcgagaattcaatgatcagtatttagatgtgatgtctcgggaagcgcttcgacagcaattcgttagcctaaaacaagggagtggtactgttcaggactacaatatgaaatgcgacaacttgatgaggtatgctcccgacattgtggcagatgacttccgcttgcgacggcaatatctggaagggcttcatcccagattgacacaaataatcgaccttcctggtacagtgagactagtggatctgatggcacatgcgctacgagtggagtcatatgagcctagcaagggtcagcaaggctttgttctcaatgtaaagccacgagttgatgtatcatcaatcaaggccaagtcagtcaatgaattccccgccatccgcaaatccagctaagccaaattctggcgttgtgaattacgagaaggtttggtgtcgatattgtcaagggagacatcatgagtcaacttgctacaggaagaatggcacttgttacaattgtggtgggctcggtcatttcgctagggggtgtcccaagccaaattcaaaactcatgcttgggaccgagcatcaaaccgacgacacagggagtagtggcgagaggtggcggtacacaacagccgagaggccgtggaggtcccatctcccagcgggacgtgagatttggaggcagaggaggtagttttaatgctgcaatggtgtgattcctttgaaataggtagtcaagacctagtaagtcctcaaattgaaacacttcttcaatcttacacggatttattccaagaaccaactcaactacctcccaagagaagtttggatcattcgatcccccgaaggtactgaacccattaacttgcgcccctacagatattcacaccccc

SEQ ID NO: 7436 - DNA, 1952 bp, Oryza sativa
  ref <308>: DATABASE ACCESSION NUMBER: AK064563
  ref <309>: DATABASE ENTRY DATE: 2001-12-06
atgtttgttcacttgttcagggaagtgtacaggttagattctaaaagttttcaacaatttgcacagggatttcttcttcagctgcaccgcgaagaaacatggataagctcgatggctctgcccgtcttatgatagtttccgatcttgaccagacaatgattgatcacaatgatccgaagaacttgtccttgcttaggttccaggcgctatgggagtccgagttctcccaagattctctactggtcttctcgactggaagatcacctatcagttacaggggtttgagaacacagaagcctttgatcactccagacatcactatcatgtctgtgggcactgtgatagcatatggtgaagagatgattcatgatgttggctgggctgaattccttagcaacaaatgggatagggatatcgttgtcgaggagacagctaagttccctaagctgaagcctcagccagagaggagtcagggtcctcataaggttagcttttttgtcgacaaggagggtgctcgggaagttatggattctctccctgagacgttaaatcggcgtgggctagatgttaaaataatcttcagtagtggtgaggcccttgatgtattaccacaaggtgcaggaaaaggccaggctcttctatatttgctgaaaaagttcaattcagatgggaaaccaccaaacagtactcttgtttgtggtgactctggcaatgatgcagaattattcagtgtcccatctgttcatggtgtcatggtcagcaatgcccaagaggagctgcttcagtggtatgaagaaaatgccaggggcaatcctatgatgattcatgcaaccgagaggtgtgctgctggcatcatgcaagctattggacacttcaatttaggacctaacgtttccccaagagatcttgaattcccttacccgaagttagacgccatcaaacctgcagatgttgtggtgaagttttatgttctctatgaaaaatggcggcagggtgaggttcaaaaggccccattcattatccagtatttgaaaaggattactgtaagtacattcctcagctacattcttagaataactcagtctagctttgttcataaacccctctttttgaaatcaatcataccttttgtcgactgctatagttaggttatgaaaagaggtaactatataatttgtgtcagcatgttatctataattttgcaaaagtaatttcagaccatatgataccacttgtctcttgtctggcgaaatgtacatatttatgattctttttttttggcgaggatattactggttcatattggcttccttgagcaacatttaaaccgatcttcttcttcttcttttatgtgtgttagcatcctaatggaacaactattcatccttctggaagggagtgttcacttcatgcatccattgatgcactgagttcatgttatgctgataaacaaggcaagaagttccgagtatgggtggatagaattgtcgcttcatcaatcggtacaattaattggctggtgaggtttgacaagtgggaaatggaaggcaatgttcggtattgctgcctcacaactcttctgctgactatgaagcctgagactgaagatggcttcgagattacacacatccacaagacctggcttgaaggatactctgcaggaaatgagcatgcatgcatcctgtaggccatttaaatacaggcaacttacacagaaacatgaggaaattttcatcaggagtcaagatagaataacaagtgtactcactgttgcgtggatttgatcccaaatactcgtagtgttatactggggtactcacaaatggattgatgctcttgctgattcatgtacagttcatgaaattaagcaaataaactcactgtaccagaaattttctcgatgtacatggatcttgatactttcttaaagctcattttaaggttgtcatttt

SEQ ID NO: 7437 - DNA, 1377 bp, Oryza sativa
  ref <308>: DATABASE ACCESSION NUMBER: AK064564
  ref <309>: DATABASE ENTRY DATE: 2001-12-06
atatagatgtgatgattccatgaatctctgaaaaggtaggggtcaaggaccttatgggactgcaatcgtgcctgccaattggggaaggacgcgggcctggcaaccgctcggctctagtaagggaaacaggtatgtctcacatcattgctcgaagactggaaaaactgcaagttagctcagttggtttaaaacggcatatgtgagtgacgcgaactagcattttgaattgagaaagccggtggccggggtggtctatgttgttatggtatctctctttaaaatcgagattgtgtgggtgttcagtctaccgctcatgttcgacgctattatggaccgagaagaggaatcaacgaaaaacccaggaatgagctgcgaaagaaaagcgtgacgagcaaagtcaagtctccacgactcgacatgttagaaggagctaaattaataggtgccggagctgctacaattgctttagcgggagctgctgtcggtattggaaacgtcttcagttcttcgattcattccgtggcgcgaaatccttcattggctaaacaattatttggttatgccattttgggctttgctctcaccgaagctattgcattgtttgccccaatgatggcctttctgatttcattcgttttctgatcacatatttcttggtgtagatatctctctttgcaaatagagataccgaggccccccaacctactagttgttggtgggggaaagaagagtgggaacgtgggcttctttcacagtgcgtacctctctttctcttctttctcgctctgttttggaaactaactacttctccggaagcaacgtcaacaacttatgcaagactcctttcgtaactacttttcggtagaaatacggacttcttcctatcaaactgcttttgcccagcaataataggcaagacttgattcaggtcaatacaatactcttcttcgaacttgtaagcttgggacacaagcgtaaactttttcaaaagtaagaccaggtacactgctaaacataagtataaagaggtggaaggccggctgtgcttgtgctcacctacaggtctgtcctagcatacagtatagaaaaagactgtctcttatttgtgatttgtctgaatcagcgtatattaactaatactactttatccagtcaataattaattgaaaggtcgtctttaattaaaaagtgcataagcaagcaaggaacggaaggcatgctaactacactactagagtcaatacactacaaaccaaactacttgagtaagaatctattctttttgcttattcgtaagcgcatgaagaaacttatttcactctagcaatgagcataaatagttgacaacatagttgtattaattcttattttcctctt

SEQ ID NO: 7438 - DNA, 1382 bp, Oryza sativa
  ref <308>: DATABASE ACCESSION NUMBER: AK064565
  ref <309>: DATABASE ENTRY DATE: 2001-12-06
aacacgcacgcacggcttgaattggctagtaattaattttgcagcaagcatgcatttgtcaccggcgatctatcgatgcatgcagtggaggtcgtggatgccggcgacgccagcgggtggttccggtggcggcgctaacgacggcggaggtgatggagaagacaagaagaagagcggtgaggtggcggaggcggtgatcagcgtgccggtgcactgcgacggctgcgcccggaagctgcgccgctcggtgcagcgtcttgatggtgtggaggaggtgaccgtggattgccggaccaacacggtgatcgtgaggggccccaaggcagcggtggacccggctgggattgtggaggtcttggacaggaggaccgggaagaaggccctgcttttgagctcgttgccgtcggccaacctgaagccaccgctgtcaccggagaagaggagttctgagacggcgaagaaagatgctgcagagcaggacatgggcaaagagatgtcagaagaggacatggaaatggtagtggtgatgaggatagacctgcactgtgaggcatgctgcgaggagatcaaacggaggatactcaagattaaaggagtggaggaagttacgccgcatatgaaatcgtcccaggtgatggtgagaggaaaggttgagccagcaaccctagtagggctcatccacaagtggacaggaaggagagccgccattttcagggcagaaccacagcatccgctgcccccaccatctgagtctccgccaaaggtcgacgatgacaacgagcctccaaaggtagccggaagtactgagccggccgaggaggaggagacaaagcaaggaggagacccatcaccatcagacgatgcgcaggagaagaaggaaggggaggaagcagatcagatgaaggatcagaaagaagagccggaagagaaggagaagaaggaagaaccagatgagaagaacgaaggaggcgaagctgatgacctgaagcccctaacggaggacgacgcaagctacaatggcgtcgcggaagagagccacagcacgaaggatcacctgttcagagttgctctcccgagatcagttgtcgcggttgcgccgccggagagtgagaagatggccatgaacagcctctgctacagctactactactacccggtatatccgtatccgtgtcatcagtattatcaatatccgcagcagaacatatacgccgctggtaattatcctgcaatgtatgggtactatccacatcatgtgccagaggacttcagtgacgcgaacccaaatgtatgtaccgtcatgtagcacataaatgtgggacttttggtgtgtaattaagctacaaggcattaatatataattgcaataaatcacgtttgtc

SEQ ID NO: 7439 - DNA, 2339 bp, Oryza sativa
  ref <308>: DATABASE ACCESSION NUMBER: AK064566
  ref <309>: DATABASE ENTRY DATE: 2001-12-06
ggagacttgataattcatcttctagttgtgcaacgagtggtgattttcggaaagattttgcagctaatattcgcaagtttgctgtaattggaactcacgaaccttctgtgcatatcatttcgttggaacctggagaagcatttcagcaacttgctgttgggcatatatcagtaaacaacgcgctcggcactcctatcagtggttgtatacctgaaaatgttaggtttgtagcagctgcaaggttctacattcttgcaggactaaggaatggaatgctactgaggtttgagtcacaaacaagcaaagggcattgtttccctggttccttttacaaggagtcctctaccccttgtgatgatacatcccttatgttgattgctgtacggcgtattggaatcactcctgtagttttggtaccgttgcatgacagagccaatgctgacattattgttctcggtgataggcctcggctattgcaatctgctagacacagcttggcacattcatccatctcatttctgcctgcttcccatgtgacaccagtgtcttctactgattgccccagtggtctgctgtttgtttcggagaactgtttgcatttggttgaaatggttcatggcaaaagactaaatgcacagaagttttcgattggagggactccaaggaaagtgttataccacagtgatagtagaacactgttggtgctgagaactgggttaaccagtgtatcctgttcttcagatattgttcaaatagatccaagtaatggggcattgctttccagattcaagtgcgaacctggtgaaacagcaaaatgcatgcaaattgcaaagatagggaatgatcaagtattaatcgttggaactagtaagtccaatggccgaccaatgatgccaaacggtgaagcagaaagtatcaagggtcgtctaattcttttaagcttggagactattgaaagtcctcgtgagagcggttcgtttactgcagcttctaatttgaattcatctcatgctggttctccattcccggaatttgttggatatgcagcagaggagctgtctagtaacagcatgtgcagcagtcctgatgaagtttgctgcaatcaaattcaacctgaactcatggcaggccatttgagatcactagtccaacatacattcaatggcgctgttcttgctgtacatccatatctagatagatatgtgttggcagcagctggaaatgtgctttttgtatttggattttttaaatgaaagtccccatcggataaaaaagtatactacgagtaggacacgatttacaataacctgtttgaagacgtatgcatcacggattgcagtgggtgattgccgcgatggtgttctcttctattcttatcatgagaatcttaggaagttggaactgatctattctgatcctgcccaacggctagtgggtgatgttgcccttttgagctgtgaaactgctgttgtatcagatcgacgagggagcatatctgtactgtcttgcccaagattagaagtatccgaaagtccagagaagaacctagcggtgcattgttcattttacatgggtgaaacagctatgagcatccagaaggttgcatttaagcattggcttccaattgatgatttgacagaaccagtgttggagtcggtatacaactgtgtcgtcgcaagcactctgctggggagtatctttgttatgattccactcacaagtgaggagcatcaaatgttgcaagatgtccaagaaagactttcggttcacccattgactgctccactcttaggaaatgatcatgcagagtttcgtcgccgtggtatcccgtcgggagtaccgcccattctggatggcgacatgcttgtgcagttcctggagctcaccagcgaacaacagcacgatgttctcaatattgtttctcctggaaagaagaggcaacacgatatctcggttttccaggtcatgcgagcattagagagggtgcattacgcactcaactgaggcgttcaacaatccattcaacccggtcactgttcttaccgacatggctgtctccaacctgctgatatttaggtggcatcatcgctgaatttggatccgagccgagcaccgagttgttgcagctgaagctgctactggagcacatacccagaacataccaaatctcagctgtagtgaggtgctgtgttttgctgtgggatgataggcccatctgatgtcgcaatagtgtgtcattgctctagtgcaatctttgtaaataacgaataatattttggcagaaggatgtggatacaaatccttttgcccagtgaaaggaacaaccctcgtgaacgcat

SEQ ID NO: 7440 - DNA, 1459 bp, Oryza sativa
  ref <308>: DATABASE ACCESSION NUMBER: AK064567
  ref <309>: DATABASE ENTRY DATE: 2001-12-06
tgtatgatggattttgtgcagtagctcgttatgcatccagatctgggttggaattggtgtgatgctcattatgtcccctctaaattaaaggagaatagaccaggaatgtggttaccatggttgccaagctccatttgttcctttcacgcgtttgattggtagggtcaacttaattcaaaacataggtcggaccatttaatttgcgataagtgtcggggcacttgcaagctccatatactttaggatcttatacgtcagatcttgcataaaggaaggacgagaggtcgataaatgctttggatttgtggtgtcaagcatctgactactgcagattcagcaatcattgcttatattatatgcaggcaaggttggaggcacttttcagttataagccccctgccgtgtgtgtgctacagatcagggtttctgttatccacttatcaattattatgctgttgctacagtaaagtttacctaatttgttctttgaaagtcaatggaggtcaaagttgaatacaaacaagaatcagctgtgaactaactcgacttatgaaaaattgtccaaagttctaatacaatttaactccctttttgttgatctttcgtaaaagagaaaaatatttggctgttattttgtgtgtaatattcttctctgtccatggatgttgtatctttagtttcttggttggcaaatggtgttgaagttccaccaacttaagcttttaaatgaactggccattgcatgcaactcagtatgttattagagcccaaaggttccaagttcgaaccctagctagcgcagtttcagtttaatgatttatgcccacttatattcaacatctgaagccaaagggacctagacatgagggagagtattgaagtataagtgaattgtctaccctttctcgtataagtgaattgtctacttttctccatcaagctaagaagattttgagtgaaacaactggtgcatgcaccccaataagggaagtagcccaggacatctttattgctaatccagaacccagattattgtagccttacagaatgcttggaggaaaggcttcaaccagaaactacaaagaggttttgattccatagtgatcctagtggcttgggttctatggaaagagtgcaacaatcgggtcctcaatatcaaatcccgaaactgggtgcaactaatcaactctattgccgaagaagcgcggccctggggtcactgcagggatcaaactgccccaactggtagtttgagcgcggtagctctgttaggtcgcaaaagttgttgggagaaacccatgtaatttttctgtggcctgctagttagcacggccggatgttgaactatctccttgatacaaagatgtgcaagcctttgcgtattccctaaaaagagtgctagggtgatctattgttttagcccactaatcagaaagttgcacatgctattttagtgaat

SEQ ID NO: 7441 - DNA, 1763 bp, Oryza sativa
  ref <308>: DATABASE ACCESSION NUMBER: AK064568
  ref <309>: DATABASE ENTRY DATE: 2001-12-06
attttgtaaaaaaatttttcagggattttttcgttatgtctaccgttggtgttgatatgatttttattacttggccgaggaggattcgaacatttttatccattcttcacacgaggtagaagcagatctcggtttactgctccagattcttgtgaaccaacggttaagcgagtgtaggttacagaatgagttatgtttgtaaatgcacttttttttgttcttatatatgatttagtttctttcgaccttgtcctgaaactttctgtaatgttccactctcaggaaagcttccactgaaaggagagaagttttctttgaggctatgtctgagaaagtagcagatagttcttctgagagaacgactagtcctttagaatcagacagcgacgcattttataaaaatcttgatcccctcttttctgtattacatttttgtaagctgttaagttcaaaaaaaattaagaagaagagttaaaagattaaattgaattctgcagggtaaaccagattaaaccagaagatgtggttgcccagcgaggatgaggctgctgaaatgtgctactggtggttattatgtcaaaacattagttgattatgctgtaaataacattagatgtgctactggtggatagatattaacgtttacataacattcttcttctttttgatcaaattgatagggaaaaatggtgcaaaacgacgtacagtgtgattcttcataacacatgtcagagttaaacgtgcgagtgtggtttgagtgagtactttggcattctctgatgtcatgcgataagtgtcagttatttaccataatttttagtaaaacatcttgcctcacttgcaagtagaattaacttgactttcatcggaatggcaaaatgtatttttgcaggttatgctacatctgggcgtgcgtactattcctcaatgccatattaatgatgcgatggaccaagaaagctcgtgactctatcccagcacaccttgggacctttccagatgatgttgggatggcccaggcaagagtattcaggcataatgttttgcaaagcactgcgaatgagatagttaggctcggtgatcaggataaccaatcttttgagattcttcttcgttatcttggggaagcaaaggaggagattgccaaagccgcttccaagatgtctggtgctgcggccagttttcatttcatttcatttcagatgttttcatttcagatgtttcagtctcttaatggaatccatgcaactgtacctttcgagcttttctaatctaactaatgtgaaatttgcaaattcattaatttctgtagctttcgagcttttcataatattatgttgaactctttttcgtccatctaatctttagtttaaccacttacatccaggatgcaattgaggttgcaggggttgctcttgttttaatcggaccaggtactgttgaaaaaacagtggcagtggcggcgacgacgacgacggcgaggaagagaaagggttatcactacgcttgcaaaaatggcgtctcctatgccaccactgactctgatgtgttgttgaacccctttttttttttctagctgatctacaaagtgtgcagtacagatgcatctcttattcattgccatggtagtagccgtgtctggtgctgttgttcttcatctctctagcaaagtatatcttgttaatgaatttgggctcatcatgacaatacgatgaaagtaacatttatgatccacaaaatttatagaatgctattttaatatc

SEQ ID NO: 7442 - DNA, 1584 bp, Oryza sativa
  ref <308>: DATABASE ACCESSION NUMBER: AK064569
  ref <309>: DATABASE ENTRY DATE: 2001-12-06
tgggatatatcggtcgccatgccgagacagtataaatcacttagattgaaatatatattaataataagactatatatgtttatagcatagccgatcagatagatctagcatgtatcggctaatactccgatactactctatattaagatattaaagcaagcagaatatatcaaacaaaagcctaatacacttaaatgccacaaaatcttaatataaagggcagatttaacatgtcagtaaagcatatataacaagtatagttaaatcaggtaagatcggctgaaaccccgatactaccctaatcggcaaccaagaagcaggctagagattgagattctaatcacgactcataagatcaaacaactgatgcagctataagtatgaaaagaaggacaatatctagacaatcaagccattggaagtttcatagagtggtagatatcatgtacaatctaaaccaacatcgatatttaacctaatcggctgacctctactagtagatgttagctgattgtaggttagatgatgatattgctatagattatataagatatatgacaactcgacggattacataaacaagattagagtattataaagatggaagcactaatcctgagaacgcaagccgacaaaatcagttttacctcttgttgaaaatcgaaaccgatgcagctcaacccgaaagtaagaactcgtcgaaataaaacgaaagtaaaaagggtggcgatgcgccgagattgtattgaacgtgtgtgttaattgattacatggggtacggggtctatttatacccgagaattacaaactatgtccatatcggacacgactcctatctctaacaaactctaagatatcataagtctttgcagacttttgcccaaacatatctctaaggaaattacataaaatatcctaattaatagatacaattaccttctcaagactctatccatgcgtggcaatcatcttgaagcatatcaactcaacccgatgatgtacaccaagttgtattgttggatttagctaaatcggctaacctcgtccgactcgaaatccgccgatcttagccgtagccgattcggacttcagccgatcttactctgttccccgatcgatttccatctcggattctacttttattccatctctatctccgatacttagattaccaaatttggtcgttaacaacatgtagctaacattgttttttttcttaggtgaagggttccgcaaaatttcgtttcacattgtgaacgtcctgaaaaagttggcttgtttggtgaagctaaggtgcttttcgacaatgacaacgtggaatagtctatacaatcacatcatgaattgaaatattaattatttggatctttgtattattctcctaattctgtccaggtacatagaatgatgtcactagcttcagtgcacgacatcaactaattaataaatgtcaggctactttttaaaataatattgcacatataactttcatatttccttacctgtacatacaagtgtaaattaatttttgtgaaaactattatcaaactatagcaaaacaacgtatccaacaaatttcatcat

SEQ ID NO: 7443 - DNA, 2011 bp, Oryza sativa
  ref <308>: DATABASE ACCESSION NUMBER: AK064570
  ref <309>: DATABASE ENTRY DATE: 2001-12-06
tgaagggtggaatgcctctgcaccacctctccatttatggagccatcctgattggacaaggaagcacaggaaagtagctgaggagcataaccacactagcatagggaggatcgcttcccatgttgaagaagataatctatcagataacctccctatgatgaaagaaactgaatcttatggtatacataactctagatcagggaaagaggagaatgcaggacaaacttcatgcaatctcaaagggaccaatctatcagatctccctgtgaggagacaggctgaagctggcaacaaacgaaatgttggaccaggcaaagagaaagagactacagagaagacatcatgcgatgtcagagaggttattctatcagatgatcgtcctgtgaagacacaagctggatatggacaagtgaaagctaaagagtaccatagatccgatagccttcctgtgaagaaacaagctgagactaattaccagcaaatctctcaatcaggaaaggagaaagagcatagcatggatgaaagcaatagcactcataacaggagcaggaaaagaacccctgatcaggttgatgggagcctccctccagaaaaacaagtggaagttgcttatgaggaaagaatggctattcctatcaagaagagtactcaccaagaaaaacaactagatgcaggagacagattaaatgctcatagaggatcagagattatgggtgccaaattcacagaacaagcgaactctgacatgagcatgtcatcctctgactccagtaatgctcaaaacaaatccagaagcggttccccttttattccaattggacaccctgctgataagagtacaggtcgagatagttttattagttatcctccaaaagaacatcttgtctctaagcaggctacttatcagggcagatatttagcaagcaataatgaatgcaacaatgcatttgaagggaagattgatcctccaattcataccaatatcgatgatatctccaggaagttcagccctggtactgacttcgaagtgaacaggcagcatttcactgccccaactggcaacgtgtacagtttgcaatctctaagagatagtgacaggttttataggacgcagcgctcagaagacaggaacactaattctcttgagagcacaactggtgatgcacctttgcatggacaccccacaaggtacagtcgacaagttggtgatgataattatctacaaaccagtagggtcccatcaacattgcatgagcaggcacatccaagaacgcatgttggacatgctgatggttacttacagacaagtcaatactcccttggatcttcaggtgctacatatggtcagcaaacatcttcatatggactccccggtgcgagtacaccatatagcattatggacaagtatgctcctggattcttggctccaagtgcacaaagaagctcagttatggacatgtacgccctggttccaagtgcatctggaagctcggttatggacaagtatgctccacctttagaggatacaaactacagtgcacgaggggttccacaatacccgtaccgacagctaggctcttctggtgggggttggcctcgtagctgaccacacttcagtttacctgatcaccgttttgaatgtcattgacggctgatgcagcgcttgcttttttttttccttctgagagatctgctgccatgttatttctgcgttccatttgatgaatactaaagtggatcacttgtacaggaatagaaatctcaccctccaagaaaatgagcaagatcctagcttactaatgtagtgtacactgtgaccctagactgacgaatgcccagattccagtatgctggttgttgggcaagtgggtaatccatatggtttcgaatttttgtgatatttcagctctaacaatcctgcctgattttttccccctgaagtttcgtgtatagggagcgactttggctgagtttgcagcattttgaatggaatgttaacaggctttggctg

SEQ ID NO: 7444 - DNA, 1851 bp, Oryza sativa
  ref <308>: DATABASE ACCESSION NUMBER: AK064571
  ref <309>: DATABASE ENTRY DATE: 2001-12-06
caaataatgccgaaatggactataacagagaatctgaatcaaacttggctaacagcactgatatgaacagtgctgctgctccttctgttaatttttcaagcaatgaagtccctagtctggatatatctatgcccaactctggggatggctctaggttattgtctaactctaagccagagttgcagactgatactccaccatcgcagatcaaacagacaaatccttttaggagcattggagatgcaatggcggactggaaagaacgggccaaagtctcagctgatacgcaggatcatcaaccagaagctgaacaccatattgatgatgaaagtgctaccgaatttcgttatgtgccggacagtgagcagagcacctctcaggcactgggtaatgcaacagctgatcaaatcaacgatgacctgcaagtcaaacagtcttccatggaggatgaaaaccgtgtgcaaaaagaggaacacaatactgacagggcacctggagatgatcataatcttgaagtgccacatctgcaagcttcacaatcacgtaccaacaaatctgaaaatgccaacaaccttgagcatagagagattcaaactgatacatatgttcaggattcagttcaaggtgaaacagacgagacttttggagattttgtttcgttcaaacaacctccagcagatgaaaaaacagttatgcgggatgatttagccaatgacagggagttgtctactccgatggaaatcaacatcactgatgtagatatgaaaggtcctattgttgactggaaaagtgttgagctcacaactatgaagttgtcccaagaacttgctgagcaattgcgccttgtcatggaaccaactcttgcaagtaagcttcaaggagattacagaactggaaagagaataaacatgaaaaaggttattccatatattgcaagtcatttccgcagggataagatatggttgcgccgaactaaacctaataaacgtaattaccaagtggttattgctgtggacgactcacggagtatgtccgagggcaagtgtggaaaagtggctattgaagcattagttacagtctgccgggccatgtcacaacttgaggttggacagtttgcagttgcaagtttcgggaaaaagggaaatgtcaaagtgctacatgatttcgatcaggtcttcaatggagaagcaggaacgaatatgatttctagtttgtcctttgagcaagacaacaaacttgaggatgaaccagttgctgatctcttgatgcatctgaacacaatgcttgatactgccgtggcacggtcacgtacaccgtcagggcaaaatccacttcagcaactcgtactaataatatctgacgggaagttccacgaaaaggaaaatttgaagcgttgcgtcaggaatgtccttaacagaaagaggatgatcgcatatgtgctcctagatggtcacgaggaatctatcatggattcactggaagtatcctatcaaggtaccaaactaaccatggggaaatatatggactcctttccattcccttactatgtcatgctgaagaatattgaagcacttcctcgtacattggctgacttgcttagacagtggtttgagctcatgcagagcgctaatgaatgatcttttggatgctcatcaaagtaaccggaggaagaatgccctcgcgcccatcactgtaatttgtgtatagaatactaccaaaattttgagtcccctaggcttctagctgcttacacactttgggttaacaactgttccaaggcctgagctgtgtacaaaatataccacatttcgttgtaaactgcatttgagaaatgcaagcaattttgtagct

SEQ ID NO: 7445 - DNA, 1352 bp, Oryza sativa
  ref <308>: DATABASE ACCESSION NUMBER: AK064572
  ref <309>: DATABASE ENTRY DATE: 2001-12-06
caagagatgttacaccatttttgaaagtgagggtgacgggccttatcagcaaacactccgccacaaaatctggctgcagggaagggttaataacaatttggaaccctaccgagaagcaaaaatccgacctggtggagggacaaatttattctgtcacaggactgttggcttcaagctactttacagaagtatcctacttgagtggtagaggatcatctacagcatggacgcctttagcaaccgcacagactacaaattttgaaccatttttcacccctcgtaaagcagttgaattgtcacattttggtgaagtgccacttacaagcgaatttgacattgcaggtgttattttgtatgttgggaatgtttatttattgaacaaccagaataggcagtggctctttttgacagatggatctaaatttatctctggagaaaagtatgaagagcaagatgactgtcttctggcagttagcttttcttccaaaaccactggcgaggattctgcattcttcaattatgccctttctggacatatagttggttttagtaatctggtcaagcgagataaagaccagatgaggcacgtgtgggtagctgaggcgacagagagctccacctatagtctctcccacgagatacctaaaaaatcacatctcaaagaggctgccacttctgctgaaaaatgggcttcaaattctcatcctatgattcagcatctgaaggaaagagttctgcaaatagttggtgacagtggtggctgaagtactctgaatggtgctgctcgtagaacagttttgtttcaggactcgaccagaatgaagcctatggcagtggatgctcgttgtcgactagacaactgacagtcttgataaatgctgcatggcatacgaatgatggatggatacgacggacgtgattggcacgtggagggacagatcagcggatttggacacgagatatcctgctggcgaggaaatggttagactcccaccacgacatcatcctgctggcgtttgagcgtcccaagtttcaacatggagcgtcatgctgccctcccaatcccattgaacacgcacatctgctcgtcgttcgctatgagcctatgaattatagattacgagcatctggtgtctgctgcctatcctgacttgtaattatccggtgtataaagttgtgtatggaggcttagtttgatcattttgatatttctacagccattttacatgcgtttagggaaaaaaaatagtaatacgtgctatagctaagttattgatactcaattctcaaattggagaacagccctgacgcaattatatggttgtatttctcactccaatatccaattgggg

SEQ ID NO: 7446 - DNA, 1583 bp, Oryza sativa
  ref <308>: DATABASE ACCESSION NUMBER: AK064573
  ref <309>: DATABASE ENTRY DATE: 2001-12-06
taccttgctgtttgagcaagagaagaacatagaggcagcaatgacaaatttcaagaacaccagggctgtatatgaggagcttgggaaatatgggagtatagaaaatcaacttttatgccgtcagcgcattgaggaagtggaacctatgattggattttgctctcgcaaactaggcggatcagctttgcaagcacatgaactactagatctggaaaaggaggggcctgcttatgatcttttcaaggctaagattgaggctgtattatctgagacaagatcgcagcaggcagcttccatgaccgagtttagctggcttggtcgcagatttccaattactaatgcaaagacccgtgtctccattttgaaagctcaacagctggagaaagacttgaatggtgcaaacacagaatcagttccagcggacaaaaaacttggcatttttgacaaaatattttctgcataccatgacgctcggagctgcatccgcaatgacttggcttctgctggcaatgctgagaatataagagatgaattgaatggtcttgacaaggctgttagtgctgtcttgggattcagaaccattgagcgaaaccaattactcgttagtattgctaaaagcaagtttaccaagcaccgggatgagaagaatgagaaaatcacaaaaccagaagaacttgttcggttgtatgatctgcttattcaaaatacaacagatctgactgatttaattagctcaggaagggataaaaacaaggaagagaacacttttattcaggagtatgagctgaaaagtttggctttccgagctgagagatgtttctatttggcaaagtcatacagttcagccggtaaaagggctgaatcttacgcgctgttttgtcatgcccgttcaatcactgattctgcactgcaacagctgactaacagtcctgacaaggccttagtccaagatcttaaggctctttctgacagctgtagatccaatagcttcatagaacatgcgacaggtattatggaggaagagaatgttcctgaaagactttcgaaaggtgtctcaacattgtcacttggtgaacgaaaggctttccttcttgatatgctagaaagctatgaatcagcactcggtgaatcaaataccaaaacaccatgtcgcattgcgcgattcccacctccattccaatcagttccgtgtaatcctattgttcttgatatggcctacaatgcgatcgagttcccaaacattgagaacagaatgaagaaggagaagaagggtcttctcagcagattctggggctgaaaagaagggagggcgtagttcgacaggattatcttcctcttggattttgatacattagtttggtggtttgaattggtcttttcttttgccatgaactggaacatggcactctcgattggtggaatggttttgttgggcatccctttccccttaagaatgtcatactttttttttgttaggcaaaaaaatttgcgttttcaaaatacatcagttttgaatgtcacactaactcggttacatactgtatgaagagatgattagatcgcagttcagtatttaaattgtc

SEQ ID NO: 7447 - DNA, 1412 bp, Oryza sativa
  ref <308>: DATABASE ACCESSION NUMBER: AK064574
  ref <309>: DATABASE ENTRY DATE: 2001-12-06
cagaatttacaaatggggactagagcaaattattaagagtcaactcagcccatttttcaattccaagtttgcagctggatatatctgcttgcatcttgacttgcttggattgtgatggatgactaataacagattaaagagaaccacacctaattcatacatctatttaaactattctagtgtgcatacatcagttcatcccaagaagaagataacacgataggcaaagaagggatagccatagattcttgttgctaggtaagccagctatggcgcatgcacagctgcttgtgtttctgataccaatggccctcttcctgaagttggcaatgccggtggacggtgccatggcgatgccgggctgcccggacaagtgcggcaatgtggctatcccctacccttttggcattggagaaaactgctctgcgaccaacctaaacagctacttcaacctcatgtgcaatgacacctttcatccaccaaggccacaaatccgggaaccggaagcacacatcgaggtcaccggcatctcactggagcgaggcgagatgcgtgtgctcagccctgtcaaccacatctgcttcacgtcgaacaccacatccaccaagtccagtggtgtcgggtatgacctgagcagaactcccttcctcccatcgccgtcgcgcaaccgcttcacggtcatcggttgcaacaccctggggctcatcactggctacaggggtgcctcgggacaatacgtgactgggtgctactcctactgtgagggtatcaacagcacctctgatggggcaccgtgtgccgggatggggtgctgtgaggcttccatacctgccaacctcactgccttcgccgtgacatttgatctgaaccacagcaaggtgtggaccttcaacccttgcttctactctgtcgtcgccgaggtcgggtggtacaatttcaagaagcaggatcttgttggtcacctcggattcatcaaggaaagagcccagaatggtgttcctattgtcgctgactgggccattaggaatggctcatgcccaaagaagggggaaaaagaacctagcagctatgcctgcgttagtgcaaacagctattgcacggccgtgataaatagtccagggtatttgtgcaactgctcacaaggatatgggggaaatccttatctttcagatggctgccaaggttcagcaattactcaaatttacttgaattttgttacttattaaacattgatttagtaggctgaactgaactcgtattttgtttgattttattgagtggttatattgttcttggtatcttcagacatagatgagtgtgagatgcgtaagctggaccccaagtatgaagaattatatccatgcagaaaaggggtctgtcagaacacaccaggaagctacatatgcaaatgc

SEQ ID NO: 7448 - DNA, 2280 bp, Oryza sativa
  ref <308>: DATABASE ACCESSION NUMBER: AK064575
  ref <309>: DATABASE ENTRY DATE: 2001-12-06
agtcatggaggaaagaagggtaaggtgcgggatccacatgggaagggcagaagcaagaagaaaaatatagctgataacacctacggtttgccggctcagttaactgacctgtcagaacctcgcatgaataaacagagtgatcttattcctgctgctgaacttgtattcaagaactcttctgccgtatctgttgaattacctgcagttgttgcttgcaaaactgatggtgcatctgtaccaccagcacctgcttgggtttgttgtgatgattgcgaaaaatggcgctgcataccaactgaactggcagataaaatctcaaaagaaaatctcagatggacttgtaaggaaaacgaagataagacatttgccaattgctctataccacaagagaagacagatgatgagatcaatgcagagcttgggctttcagatgcttctgctgatgaagctaatggcgatggatcaaactcgaaagcttctggagaaccaaactttgcacttctcaggtcaaacttgtttctacatcgtaaccgcaggacacaatccattgatgagagcatggtatgcaattgtaagccgcctcacgatgaccgaatgggttgtagagatggttgcttgaacaggatactcaacattgaatgcaccaaacgtacatgtccatgtggggagcactgttccaatcagcagttccaaaggcgcacctatgcaaaacttggtaagttccatactggtaaaaagggctatggattgcaattgaaggaagatgtatctgaaggacgattcctcattgaatatgttggagaggtccttgatataacggcttatgaatcccgccaaaggtattatgcctctaaaggccagaagcatttctatttcatggcacttaatggtggtgaggtgatagatgcttgtactaaaggaaacttgggccggttcatcaatcatagctgcagtcctaattgccgtacagagaagtggatggtcaatggtgaagtctgcattggaatatttgctatgaggaacatcaagaagggtgaagaattgacgtttgattacaactatgttcgtgtatctggtgctgctcctcagaaatgcttttgcggtactgccaaatgccggggttacatcggtggtgacatatcaggtgctgatatgattactcaagatgatgctgaagcagggactttcgaacctatggctgttcaggaggatgctgaggaagtacttggtgcaaatggtttgtcctctcatggcacacatctagatattgtcgaccatgaagcttcctctaaaacagaagattcaaatgattgcccatctgtgaacccaccagagttagaatctgagcaacaaacttcaggaaccttatttgacacaagtgagccagaaaattccttagaagcattgagcccacaggatgatgaagatgtcgtccgcacacctgtccatgtgtcccggacagttgagagtacgtcgcggcagtttccaggatatggtactcggtcatcagaaattttgcaaagggctccatgcacactggatggaccaaaggttccaagcacgacaaatggaattccgcctagttccgatttggggagccactgggtaccaggtttccacgctaataagaaaaccaatgtaaaacatcatttgattctgaatccatcatcagctcctattgacagtgagcacattttgggagttgaaggaagattgaacagcttgcttgatgtaaatggaggtattagcaaacgaaaagacgcaacaaatggatacttgaagcttctccttgtggctgcagcggaaggtgacaatgctgggggcacgtctaaaagtgtaagggatctttcgttaattcttgatgcacttctgaaaacaagatccaattctgtcctgttggatatcatcaataagaatggactgcaaatgcttcacaatatattaaagcagaataaaagcgatttccataggatacctataataagaaagcttgtgaaggtttgcatttcttttttatgttatgtcttattacattagtttccaattaatatatcacattagagcaagtacatcccttaacaactgatctaggtgctacagtggacatatcaacccccacaagatccttgttatctactccctctgattcttttatgacttgtgcacaaaaatcaagaaaaaaaaactcaaaatgactattgtccttcatttatgctgcactggaaaagatgataatgtattttgtgagatggtggcacttatttggcaagggcaaacaag

SEQ ID NO: 7449 - DNA, 1893 bp, Oryza sativa
  ref <308>: DATABASE ACCESSION NUMBER: AK064576
  ref <309>: DATABASE ENTRY DATE: 2001-12-06
catagatggaataattgttgaagcaaacaaacctaagacgaaaaacaatggaaaaggcaagaggaaggtctaaagaaaaggttatcaatggaatggcagttggaaagaataaggaaaacactcttactgattatgaaatacgtcgcaaaggtgtcatagcagcaaacaatgagatgttacaatctctaaacctcccgcccatgggcagcaatacgcatgttcaacaacgacccaagaaaatacctaaggtaactgatggtagaaacatggtgccatgtggagatcataacttgcggtctaggtcaagaaataacctagaggaaaatgtagatgaaaatgttggcgatgatcctgaataccaactagaagaagatgccatggatgacaatgaagtagatgtagaagaaactcttgaacttgaaaaagttcagcagaaaaagaaggaaggaaggggtatcactcaaaagctcaacataatttcaagggtgggtgaagctaaaatcaaaattactctcaacgaatttggtcagccggtggggcttgattctgaggaatttgccactacttttgggacatttgtgagaaagaaaatacctgttgcatgtggtgattggagagatgttgacgtcaaagacaagctgaaagtatgggaagatgtacagaaacattatgagatcaatgaatatggtttacattttgtgttggagacatcacatatgatatggaaggattataaggctgatttgaagaagaaacattttgatgcaaatctgactgatgaggaacttatggacagacgtgacttaagagtcaacgaggcacaatggaagtggcttattaaccattggagatctccagaagctgtggcccgctccataagaggcaaggcaaatcgcggaatgttgcgcatgttacatacagctggtagcaagagccacgctcgtgttggccatgacatgggtgtgaaaactgggcgtcctcctagaagggatgaagtctttgttgaaacgcacaaacgaaaaaatggagaaattattccagaggctgcagaaacagttgaaatgctaaaagaggctgcagaagttaacccagagttgaagaacaaaacaatccaggagggcgatttgtattcacgtgtttgtggaaccaaggaaccaagaggccgtgttcgtgttttaggaaagggaccaactcctcaggatgtgggcacaccaggaacacgtagcagaatgccaacaagacttcagctagaaatagaatctcatcgacagaccaaacaagaagttgtatgtctgaataaacgcatggacgacatgcaacaacgttttaacataatggagcatatggttatgtctcaaggtgtgcagaatatagaaacaagttcccatcatgcttctaattctcgacatgctgagagcccaaggagtccagtacttgaagagctgcatcctaatgagcctaccaataggcacttgctggaggagcctcatgctgagcctaccagtaggcacttggataatatcctatcgggtgatgactttattatccgcaaaaaagctataacgccaagggtgccctcaagaaacacagccacaggaagccatgaagccaccattgctgaaggagaaaatcttgttggtaaagatgttatcttatatgctgtcttgagatctgacacccctgtggctaaagcaacaattgtatcaattcatccaagttccttggtgggaggtcaacctctaggtgttgaattctatgaagttgttgtcaatgtcgtgcttaaaagagatgcattgcttcctcgtccatatgatgatatgcaaactatgacatgggtgtgaaaactgggcgtcctcctagaagggatgaagtctttgttgaaacgcacaaacg

SEQ ID NO: 7450 - DNA, 2064 bp, Oryza sativa
  ref <308>: DATABASE ACCESSION NUMBER: AK064577
  ref <309>: DATABASE ENTRY DATE: 2001-12-06
tcctgaaagtgaatatgcactttgggaagattcatcagacgtaaaagaatctgatatgagtgaagatgaaaatagaagtcctgatctgcagaggacttcagatagttgtttttacaacaaggtctcaggagacagtttcagtagccactcaccattttcccaagagaagggcaacaacatgaaacgacactacgactgtgcaagagaggaatatttacccctcggtagatcatctatggagcaacatatttatgcgaacaaccagtcacaaatattgactccctctactcgtataaatactttggatatttccaattcttgcccagctgagacaaataggagcgatctccatgaagaaaaactgccactttctcatttttcaccatcaaatttgttggatctatcaggagatctggatttgcacttagaatgccttcgaaaagttcagtaccacctggagtccatgtttgattggttgattcaggaagcaagtttttctggcgcagtaaacaatgaccccttcaatattccaacccagagcagcttctcaaatactgatggaagggctctaaggccattgttagtttcatctgcttatacccagagagggaacctatctcgagtttactgttcgcatggcacaagagaaatttctcagaaatcagtatcacgcactgaggtccaagtgaatgcggtttgtcagcagaatgtggcattgccctctggaacaaataacagattggcgttgcctccatctcctgtcgctgattctgagaaatctccagtttctccgctccataacacagtggatattgttgggacgcatggagctggcatgcatactctcaataatgtatcattgctttctggaacagatgtattatccaatgcattcgcacagctttcatttcctgcagttaattcagttgactataaatattgttggtcttataccacaacaaataatcgtgcgacatcaagtcaaaaaacaaaccgtgggaagggtggaactggcacatacattcccagaatgaattatcatacttacaaggaacgcatattctattataatggaagaagccagagagaaatgttaccagatcggccgttcaagattaaaactaacccaattggctacattcgccggcgcagttcgcctgaaatgggatgttcaagttcaagcaatggcggtattacatttgaaaatacaagtcatacaccatcaaagaaacaggatcactcaagcgaaagtacagttacagctgaaggaagttttgctcaggagagagcaccagcaagccaggaatggaatatttgcacaaacatgaacatggttgacagccaaaaacctggtaatgatgaagaccttgtcagaccaaacaatgaatcaagggaactacggacactccatccatcagaagtgcgaaacagggaaatgacggcatcatcatcatctagtgtggagcttcctcattgtgttggcaatggtctccaagaatccaatacatctcagccatcctcacctgcaactgaggcttcttctccaatcaaaacatcactagtcgaaggtcttgagtttggatctttcgaacctatcttaggtactagttttctctgcgaaaagttttgcgaagaattcccacctctgcctgctagaaagtggcctgcagtagccgctgtttcaacgcctgtgactgtgagctcttcgcctgctgaaacaggaagcaagccagaagggctctaccaactgagagatgaagctgacttccctcctctcaaggctggtgctcgcaatggatttaatcatagagttggaagatgaaggatgctttactagcttgcttcaggagaagtctgatatcgtacaaagcttggatgctattccaatcgtaatagcatgctttcagctgtctgaaactccaataatccttagtgatacaatcattaggtctttaagtgttaactcctggtaggagccttaattgtaaaagaactggctcatctttttagcttttataacccgaaaaaaatgtttaaaaaataaaataatacgaaaatgctcat

SEQ ID NO: 7451 - DNA, 810 bp, Oryza sativa
  ref <308>: DATABASE ACCESSION NUMBER: AK064578
  ref <309>: DATABASE ENTRY DATE: 2001-12-06
acctcccaaaacctcgccccctcgccatggccaagaccaagcagggcaagcgggacgtcgactcctacaccatctccggcaccaacaaggtcgtacgagtgggggactgcgtgctgatgcggccggtggactcggacaaccagccgtacgtggcgcgggtggagaagatggagctggacgggcgcgggagcgtgcgggtgcgggtgcggtggtactaccggcccgaggagtccaagggcgggaggaggcagttccatggcgccaaggagctcttcctctccgaccacttcgacatgcagagcgccaacaccatcgagggcaagtgcgtcgtccactccttcaagaactacaccaagctcgacaacgtcggccccgaggacttcttctgccgcttcgagtacaaggccgccaccggcgccttcacccccgaccgcgtcgccgtatactgcaagtgtgagatgccatacaacccggatgatctcatggtgcagtgcgatgactgcaaggactggtttcatccttcatgcatgagcatgacggttgagcaggccaaaaaactagatcactttgtgtgctcagattgtgtcaaggaaaacggtgcaaagagaccttcacatgcatatgcaggttcaacaaagtatgagcctaaggctgagtcaaaaaggcagaggaggtgaaaactcttgactgggtaacatctgctgctgagggataccttgtgcttttccgtggcgaaggttgaggtgtacagtgcaagagaaccaaggcgtctgcagaattcggccttcgccgcctcctagcctgttcaag

SEQ ID NO: 7452 - DNA, 1569 bp, Oryza sativa
  ref <308>: DATABASE ACCESSION NUMBER: AK064579
  ref <309>: DATABASE ENTRY DATE: 2001-12-06
ccgatataacactcaaaaattttcttttcgtgaactaaacaaactcctagggttccaaacacagcccatgggtgtgtttagttccatgccaaatttagaagtttgattaaaattaaaagtttaaagaaaaaagttagaagtttacgtgtgtaaaaaagttttgatgtgatggaaaaattgaaagtttgaagaaaaagttgggaactaaacaagctcatgctcggttactcccgagtcccggtaagaatttcacatacgacctgtactaggcgttcacgccgttttcgggttggaaaccggtgaacagtagcagcacacgatcggcgggccgcttccgttcaaaaacgtagcgtcagaaatgcggccgaggacggcgacgcgatctcgggaaggaagaagagagacgagatggggtcgtcatggactcatacatgggtgagaaccattgaatttctccgtgcaaacggacgaaaacgtcgccggaaagttcgaggaaagtgacgccgctttttttgtttttgtgggcgcgtttacagccggctgagaacgacggatgcagtgaatttgaacgggtggatggatcttatctctggaagcagcagtcagcagttttgtccgggaccgtggctgtgcacaggagtacaggaggaaaagcgtcgatggcaggatggattagattagacgagatgagctagtatggctagcttctttttttgaaaaccatggctagcttactactcctggataaatccattgcgctatttgttgctgctcagttctacaggagttaggtccagtcagatgaaaattactccaacaaatttcatcggatttaaataaatttaactaagaaaaaaaagtcaaacgacttataatataaaatagagggagtaaatcttcggaataaaatctgcctaatatgacttgatttatatgtgctaatgtgcaatatacttacccctccgtcctataatatagccatctaggaccggacgagacatttcgttcattcatcgtattataaaatatctaatctagtcttaggttgttatatattgagacgagattataaaatgtctaatcaggctagattgttatattatgggacggagagagtatagcaggagcatatcctggagaacaggaatgggaacacgccggctaaccggaggcgataagcacgaggccgcatgtagaacgtcgtcaaccgcaccgccccatgaaccctcaaagacaaaactacgtccgccccccacacgtgcgcattgaaccgaccgaccactcatcgttcaatgcgtgcatatccacccgtctctcccatatgtcgtctacgcgcgcactccaattcctcacgtttttttcctcactccgcccagagcggcacgtttgatttccttcgcgcccaagcttattttgcttggtcgctcatctgatcgatcatctccagctgtagtgatgtgcagctcggttggaaaataaatgcgtctgttgtattaattccacgctttttcctcgcatggttccatcattttattttccattgctaacaaacagacatcagcatctacc

SEQ ID NO: 7453 - DNA, 1592 bp, Oryza sativa
  ref <308>: DATABASE ACCESSION NUMBER: AK064580
  ref <309>: DATABASE ENTRY DATE: 2001-12-06
ctggagagcaaggaatctcggataaattctatgcgtgcggcaatatctgagacatttcctgagcctaataggcggctgctacagagaattttgagaatgatgcacactgttgcttctcatactgctgagaatcgaatgactgcatcagcagttgctgcctgtatggctcctctcttgttgcgtccacttctggctggtgagtgtgagatggaagatgacttggacatgaatggtgacagttctgcccagctcattgctgcggcaaatgctgccaacagtgctcaaggcattgtcactactctcttggaggaatatgagggtattttttatgatgagcacctgaggtgttccctatcacctgattctcaaattgaagatagcggaagtgaagagtcaacagatgatgaaactgtggatatcaaggacagtggatttcatgatgcagagaatgatgcagatcaagaattagatgactctgagcgcatattgagtggaaaattaagtgaaaccagtgcatgcactgctggtgacctctatgactacaaggtagctgatgatgattcagacggtgaaccttctacagaagataaggctttggaaacaaaggtggatgtaaatgatgcccagcatagtcatttagctgaaaatgtttcagtgaatgtccagagatcaccgaatgaaaaagatccaccaaatatggtgtccagtcaggattccccgttgtcgatgggagatattctttcttctttggatgctggaatttccttacctggtcctggacctgaatattctgtagacaggcagtccatcaaatccaatggaactcagatgcatgtgaagcgctccaacttttggggacggaacaatggaagaaaaagtcaacagtcagaattggctgattcatcgggtgaagaagagcttgctatccaaagactggagatcacaaagaatgacctccagatcagaatcgcgaaagaggctagaggaaatgcaatcttacaagcaagtttggaaagaagaaaacaagcactacatgagcgccgtttggctctggagcaggatgtttcaaggttgcaagagcagctacaagctgaaagagatcttagagctgcattggaggttggattaagcatgtcttctgcacatatttctagttcacgttctatggattcaaagacgaaggcagagcttgaggagattgctcttgcggaggctgatgttgcaaggttaaagcagaaggttgcggagctccatctccaactcaaccagcagcgtcaacatcagtatggctctttggcagatgcaaatgatcgttatcaacatcttccaaaccatctcccacagaactttgttcaatcaggttttgatatgaaccttgctttctgtaatcaggagaagaagcaaaggaatgaggttagctaaagattttcccttaatcttctatgcttaaatttacgacaacagaagttggaaaatacagaaccaaccaattagctgatgttagctcattttctcattgcgctatcattatggtgtgcttaaggtgtaaagtgccccaattattttttgtgctatatttccaacctttccat

SEQ ID NO: 7454 - DNA, 1475 bp, Oryza sativa
  ref <308>: DATABASE ACCESSION NUMBER: AK064581
  ref <309>: DATABASE ENTRY DATE: 2001-12-06
atcaagaacgaaagttgggggctcgaagacgatcagataccgtcctagtctcaaccataaacgatgccgaccagggatcggcggatgttgcttataggactccgccggcaccttatgagaaatcaaagtctttgggttccggggggagtatggtcgcaaggctgaaacttaaaggaattgacggaagggcaccaccaggcgtggagcctgcggcttaatttgacccaacacggggaaacttaccaggtccagacatagcaaggattgacagactgagagctctttcttgattcatttcttctcaaccatgggcaacagaatcaatcttttcttgtcagtgcagcagcaaatattcaacgagcattggttgatgcaaagttatccaataaaatgaaagtagttgtaccttgtagctcagatgtatatctgaacacatcggctttgccttctaaagcttatttcaggccagaagttaacgagaccatagctgagcttctctctttccttgccaatcatagctcaccgtttatggttgagttgaatcccttttcgagctttcaacataagaagaacctgtcattggattactatcttttccaactaatgtcacatccagtaagtgatggccatatcaagtatgacaattactttgatgcaagcatggatgctctggttacttctctaactaaagccggattcagtaacatggacatcattgttgggagagtaggatggccatcagatggagctgttaatgctacacctgctattgcccaatccttcatgactggcctggtcaaccatctggcaagaaaatctgggactccactacgtccgaaagtgcctccaattgagacatatctcttcagccttttagatgaagatcaacgaagtatagcgagtggaagttatgaaagacaccacggcatttttacctttgatggccaagcaaagtattatgtcaacttgggacaaggttctaaagctctggagaatgctcctgatgtgcagtaccttccgtcaaaatggtgtgtgttggataacaacaaggacatatctaatgtttcttccagtttctctgcagcttgctccaatgccgactgcactgctctgtcgcctggtggctcctgctcaggtattggctggcctggtaatgtgtcatatgcgttcaacaacttctatcagcagcatgatcagagtgaggaaggctgcagcttcaatggcctaggtctgataaccactgttgatccatctgttgataattgcatgtttaatcttgcaattgacacatctaccgctgcttccttccatccaatattggccatgttgcagatattagttttgtttttctgtacttacaatttattgtgatgtggctatctatgaatgtatcacttctgatgtctttggtccaaattgtgatggctctatatgctctgttccttttcaaggaatggaatgatggatgaatgttc

SEQ ID NO: 7455 - DNA, 1704 bp, Oryza sativa
  ref <308>: DATABASE ACCESSION NUMBER: AK064582
  ref <309>: DATABASE ENTRY DATE: 2001-12-06
gaaaccagtattggaaagtgttcagtttcgttttccattctgaaatgttcatagtagtatagtatgttttccgttgggtcgacgccatgtgatcgctactaaagatagagtttccttggaaaaaccgaggccagttgagatcagtctccctttctaggagcagagcttaaaaagatgggaaattccaatgaatttcgatcacaatcatgtggtaataatgggtttgaatcagagagactcgatctggaaactcctcaatgattataacgtgaactcgttgaagagaaggagacaagcagaaatagacgctttttttgaaccatttgagagggcgcagcgtatccgtttcaataactggcagaacggaatagagttgttagatggggctgaatggaggaacggcgatatagttatccctggaggcggcggaccagtaatttcaagccccttggatcaatttttcattgatccattatttggtcttgatatgggtaacttttatttatcattcacaaatgaatccttgtttatggcggtaactgtcgttttggtgctatctttatttggagttgttacgaaaaagggcgggggaaagtcagtgccaaatgcatggcaatccttggtagagcttatttatgatttcgtgctgaacctggtaaacgaacaaataggtggaaatgttaaacaaaagtttttccctcgcatctcggtcacttttactttttcgttatttcgtaatccccagggtatgataccctttagcttcacagtgacaagtcattttctcattactttggctctttcattttccatttttataggcattacgatcgttggatttcaaagacatgggcttcatttttttagcttcttattaccagcgggagtcccactgccattagcaccttttttagtactccttgagctaatctctcattgttttcgtgcattaagctcaggaatacgtttatttgctaatatgatggccggtcatagttcagtaaagattttaagtgggttcgcttggactatgctatttctgaataatattttctatttcataggagatcttggtcccttatttatagttctagcattaaccggtctggaattaggtgtagctatattacaagctcatgtttctacgatttcaatttgtatttacttgaatgatgctataaatctccattaaaatgagtaatttcataattgaataaaaacgaggagccgaagattttagggggcgggagaaaaggtcaagtctaagcgacatatggcacgaaaaggaaatccaatttcggtaatccgaagcccaccttaccttaatccattttcttgaggatcttgcatttgttcgttctctgccgacctattgtttccatcactcctgttgcttcttcctttctctatccaacccgagctctatcgcccatggctgaactcttctctgcagcctcatcgccaacaaaaggtccacatccttcaatcggcatgtactatggaatggctttaatgtttctatatccggaagtagggaatctcgtgcttgcatatctaaatctaagttttgagacagacccttcatgggttcaaagaaaagaagagtacgagtgggtgatgtgattgactaataggaaagtgataggagttgtgatcgggtttctttctttttttgccaaggatattcttattcactgctcagag

SEQ ID NO: 7456 - DNA, 673 bp, Oryza sativa
  ref <308>: DATABASE ACCESSION NUMBER: AK064583
  ref <309>: DATABASE ENTRY DATE: 2001-12-06
aaaaaatcctgttctccaccattccatctcttctctttctgcctgagctgcatccccagttggcgaacatgaaagacaagtttcaccgttctggactttgcttggaagttcccatgtatattgacgacggcgagtattttggggatgaaaccggtacccagctgaaatgtcgtcatggcctccgcccgaagagaagaactgcatgggaatggaaggacaccggaagaaggtttcttggttgcccactggaggaagaggaccagtgcgacgctttgttttgggttgacgaagaatggcaaccaagaatacaaaaggcatttgagatgctctggcttgcattggaccatgcaagtacacgcaaccctaccaaggcgcagtaccaatggtcaaattttgtagacagaacaatagtcgaagaagacaaaatgaagttagaatttcagatggcttcacagatctcggcaatcgaagcaaaacataagaagagagtttccaggataaaaaaggaaacagaagacctcaaggcttggcttatgggttccctagtcgttattgcatttcttttatttaaaattatcgaaaatatgtatcagggatgttgatgcttcaaatatgtatgacgtgtgttgatgcggctttaaatttgtgtcaatctatttcattgctaattatc

SEQ ID NO: 7457 - DNA, 1900 bp, Oryza sativa
  ref <308>: DATABASE ACCESSION NUMBER: AK064584
  ref <309>: DATABASE ENTRY DATE: 2001-12-06
ttagtcggtgtaatatttcttttgttataacaaatttgttttgcgtggtttattgtaaaattagtgatgtaacaaataatgtgcccgcgcaacgcgcgggccgggcatcacctagttagggcacccacaatgttgtaaaaaaccaggtagtaagcattaaatggttgcttactacctggtattagtcattgtgggagtagttcattcttaaagccaggaagtagcgctgctgccggcaagaagggaataaaaaatgaaatgtgtacagtggagttctgacaaaaaattttaaattgcaagtagccgttgcttcttccaaccgttgctctcctccccagccaaccgttgcatggactgttcttcttgccatcttcatctcctacaaaaacagagatggctcataatttctttgaatcaacacaaacacattctgtgaaacttagctagctgagagcttgagatggatccctccaagagaggtttcatgaacttgttaaaccaaggctctccaagccaacaatctagccaaaactcccctcctactcaattcccctcaactttctcccaatcacaatttccccaatccccacattttacccaagcctcaccacctaatttccaaaccttcaacccttttggccctccagccaactatcacctatatggtagttctcctccaaactttcaaggttttctgcagcaagcaagctggttacaatctgcaccaataagctttcaaggttttcgtccccaagaaagttggatgcactcaccaaatcaagttgtcgggtccgcctcatctcatggatccaaatcagcctctcagtgccctgcaagacaggaagagaacaatttggttaacatcgaagagtcaagtgacaatagccaagagacagggagaagagggacacacgtcaactggaccgaagaagaaaacttacgactcctcagctcttggttgaataactcactagattctataaatggcaatgacaagaagggagaatactattggagggatgttgctgcagagttcaatggtaatgcatctagcaataaccgcaaaaggacagtcgtgcaatgcaagacacattggggtggtgttaagaaggacattgcaaaattttgtggagcttattctcgagctagaagaacctggagcagtggattctctgatgatatgatcatggagaaagcccatgcattatataaatcagaaaacaatgataaaacttttacattagagtatatgtggagagaattaaaggatcaaccaaaatggcgacggatacttgaagaggacagcaagaacaagaggactaagatttctgaatctggtgcatatacatcatcatccaaccaagaaactgaggaggagaccagccgaaaagagaagcgtcctgaagggcagaaaaaagccaaagccaagcttaaagggaaaggaaaaaaacctgcaccgtctcctttgggggaccagccatctcaagattttgttctcttcaacgaagctgtaaaattgagagcagaagcagtgctgaaatctgcagaagcaaccaccaaatcagcggaagcaaagaaggaacaaactaggatggagaagtatcagacatatttaaagttgttggacaaagacactgccaattttagtgatgcaaaactcaagaggcatgaagctgtcctcgaaaagctagctacagaacttgcagaagaatagaagatccctaagttatgtttgtacccctagtacttagtgtgtcactgtttcattaagtttaacttgctagtaatatttagacttgtgataggtttgtagggcaagtaattgttgtattgtgaacgcagtgaatgatgaatgtaatatttcactagtgagaaggcatatgaagtgataatatttgcc

SEQ ID NO: 7458 - DNA, 2011 bp, Oryza sativa
  ref <308>: DATABASE ACCESSION NUMBER: AK064585
  ref <309>: DATABASE ENTRY DATE: 2001-12-06
ttacccagctgcccagtgaaatcaactgcctccgcgagctagaggtattggatatccgagaaaccaaggtgcctgcaaatgcaacagtaaatgtcctgctcttgaagctgaagcgtctacttgctggtgctagtcagattgatccaactccaagaaattttgtcactaacgtccggattccttccaggatagacaagatgataaacatagaggtactatctaatgtcaaggcccagcaccatgataatttggaagatattgggaagctatgccagttgaggaagctaggtgtggttattgatggtaagaaaagtcaccttgggagtttgcttaaagcgatcagtgacctacatgcaagcctccgttctctgtcaatcactattcccacaaccacactcgaggttactccttcaagcccagagttacaagatattgcatctcgcctaaaacaccatcctgagtttcttgagagtctaagcatcagtggagccaagcatctttttccattgttgaccgaaggtggtaataagaaacttgccaaggtaactctaagcaacaccccactgaaccaagatgatctgaagttctttgcccagctgcccatgttacagtgtgttaggctccgacacatttcatgcaccgagagtgtgctcaacttcaagaaagatgatttcaaatgcctcaagtaccttcttattgagggctcaaacttgactaatattacttttgaggatgaggcagcctgtgagctcgagaagatggttttatcttccacttgcatagagtctatttctggagttcatgggcttccaaaattcgaagagcttgagttgaacagcagcagctgcggaaggttgctatcatcatgtttttacaatgttgaacgaatagccaagctgactcttcgtggtacattgctgaagcaaggtgatctacgaatcatcgccagggaactaaatatatgctgcctagtgctcttggaaaactcttttgacataagccagaaccagattaccttcgaaaaagaagagttcatatggctcaaacttcttagtgttgattgctctaccatcaccaagattaacttcatcactggatcagctcctaggctcaagaagatcgtctggtcatctttcacctctctctctggcatcaacaaccttcctaggttgaaggagctcgagttcaatggatactcagtcccaaatgatgtggaagaagccattaaaaacaataaaagcataaatcttaaacataataaaccataagctcaagacaaagcaaaatggagatgaataagaggatgaagacaatgctgggacgttcccattccgctggaagaaacaggtttgtcaccagaggagcatctccttttatcccatggtgtggtttgtgtgtgctagtgtggattgacattcactacttgtctgtttagttctttctgctgtgcgtgagcgtgtttttatgttctgcatgatggaataattcttgttatcccttgtttttccatcctgctctctgtttcctcctcactctgttttgctctgtttcctttggttcgagtcagtgtaagctcgaggcttgcttgttcaagccggagcgaatccttaactagttggcttgacttgcaccggcgtgtgggatggcacacgatgcagcgggcatggagggcaagttagccatgtcattggcacggcatgccccgacgtgcgggatggcgcacaaagaggacgggcgtgatgcgtgcagtagcatcaaaaccactattttgtttgtattcaagtttcaatacaatccagaaaatgctgccacttgacagcgccaaaaactctcttcctgttcgggttcttcctcatcaagttcatagcgacttcgtttgtttggtttgtttctgtcactgtgattgtttcaaccgagtgtctggttacttgcaatgcatgagtgccttgggcctctgattgagctaaaatggtggtgtctatgcccgaattcgaatttgtgtggttctcat

SEQ ID NO: 7459 - DNA, 1419 bp, Oryza sativa
  ref <308>: DATABASE ACCESSION NUMBER: AK064586
  ref <309>: DATABASE ENTRY DATE: 2001-12-06
ttgataatagagctgtggtggatctgcttcgatgaaagcatacaaaccattgtcaagtacagtgagatagaactgaccttgagtccagtttgttgccaaggaatctggagtaagcctcttcccttgcctcagtgactgcccaagaaggagcgtgtcagttgggtgctcaaatgattcccacaccgtcttccccattgcgtcgaagagaaccatattcccagtttcagcaagattcagaccgacaacacggctgtccgatgtgttcgtcgaccagaccagagaaccatcgaagtctcgcagtatgagattgccatccttgagctggagtgacgcattatccttcactggacgggacctgttggctgtccacatgatccgtggcatggacgaggtattgaaggcagggttgctcggatcaccaacggacaccgagaagatggcaaagagaaaatcattgcaaggagcggtgcagatgaaaccacatgcgaagaatggactataccatgtaggattctgcctaacaagaatcgctctgatcgttgaaccatctgggtaggttgcactgtatgggatggtggcattgttgttcgtccaaagagaattaatgttggcaatggggctgggataatcaaaggaccaagaatgggagaagggaatgggcagcgagaacaagaggaggaggaacagcaagctttcagcccaaggcatggttggtatgtgagttcttcttggatgggagatggggacagattatgtgatcttttgtttgagacgaaaggtttcagagcctcagatgagaggctaggagtatggagcttgttttgggaggcaacatcgtacaatggcaggtgctcgtgtatcaggttaaacaattggacaattggatgagtggagagttagtggtgctcaagtcccattatgctaatataatttgcacaggagaaacaatctgctgacggctgttgatacttgatatccactgccacctttcaatgtagttctgtgctacatgaagcagtcaatcatatagcttctcatgcctccttttgctaaaatgataggagtgtattaacccaggtaatttctgcaaaccaaggtgccgtttgatcagctgactacttactgcacaaactgggtcaggaatcagtgggcctttggtttgttagtatagacttaaacaaattgttggaaggtagtcatgtagagcactagttattagcagccaattgtagtcatgcagcgcactcatgcaaccgtgcaggttcaacttcttcaccgacatcagcaacctgatgaattttgcacgcacggtcgttcttcccgttgacatatttgataatctcgatgctggtgtttgcaaatcctacattttgtacttgtatatttcaacaagaaactgggtcggtgactacttactag

SEQ ID NO: 7460 - DNA, 1973 bp, Oryza sativa
  ref <308>: DATABASE ACCESSION NUMBER: AK064587
  ref <309>: DATABASE ENTRY DATE: 2001-12-06
atataatcacgcagtgcggacgcacacgaacatcaccgcaacctctcgctcgccgcgccgcggcgcccggccatctcgctcgttcacgcaggcgaagagagctgtaaacactagccaagatgggcgagggacatgaaaccgacaagaacattgaagtatggaaggtcaagaaattgatcaaggcacttgatgctgccaggggcaacggtacgagcatgatttcgcttatcatgccacctcgtgatcaggtctcccgagtcaccaagatgctgggtgatgagtatggaactgcctctaacatcaagagcagagtcaaccgtcagtccgtgttggccgccataacttctgcccaacagaggctgaagctgtatagtcgagttcccgtgaatggattagtgctctatactgggaccattgtcaccgatgacggcaaagagaagaaggtcaccttcgactttgagccgttcaggccgattaacgcttcgctgtatctgtgtgacaacaagttccacacagaggcactgaatgagcttctggagtctgatgacaagtttggtttcataatcatggatggcaacggaacactgtatggtacacttagtggcaacagcagggaggttctttacaagttcagcgtcgatctcccgaagaagcacgggcgaggagggcagtctgctgtccgctttgcccgcctgcgcatggagaggcgtcacaactacctgcgcaaggcggctgagcttgctacccagttcttcatcaattcagccaccaaccagccaaacatcgctgggcttattcttgctggctctgccgatttcaagaccgagctgggaaaatctgagatgtttgatccacgcttgcaagcaaaggtaatcaagactcttgatgtgtcatatggaggggagagtggcttcaaccaagcaattgagatgtctgcagaggtgctgtctgatgtcaagtttgtccaagaaaagaagctgatcggcaagtactttgaggagataagccaggacaccgggaagtatgtcctaggtgtgcaggatacaataacggcgctcgagataggtgctgtggatacactgattgtgtgggagaaccttgatgtcaggcgatacgagctgaagaacaccgccacaggagaaacagtgatcaagtacctcaacagtgaccaggaggcagatcagagcaactttgtggacgaggcaacatcaggagagtttgatgtcatcgacaagccgttgctgctggagtggttcgcggagaattaccagcagtatggctgcaccctggagtttgtcaccaacaagtcgcaggaaggatcacagttctgccgtggctttggtgggatcggtgggatcctgcgctacccagccgacgtcgctgccttcaacgatgacgatgacgacatgctggatgaggccgactatgaagactttgaatagcaatcaactgaaactctgatcaatcccggtccggaaggagcctgcgctggccctgaccgcgtcgggccgggacaagaccctgaaacatccaaaagatcggtgcaagaagattaaaatgaattggagaggatcccagaaatttgatgatgatgccatgggcatgataagtctgttcctcttcgctcaaagcttggaacttgaggatgttcttaagcaaccatggctcccttctgatgctcctatcagaagagcttaagtaataccatatccacatattattctctcattatctcatgttactacaaataatgagccagtttcagcgctggccactggcctgcagcatactctacttgaagaggctttcgtttgttcctttaagtctgtgtctgtggctctgctgctgcaccagccattttaacttcttgattaaacccagagtagtgtgatttgcagccgctacgcttgagttgcctgtatcatgtggcagtatggttaaagcgtcaatgatatttgtgaagtgtggttctt

SEQ ID NO: 7461 - DNA, 1652 bp, Oryza sativa
  ref <308>: DATABASE ACCESSION NUMBER: AK064588
  ref <309>: DATABASE ENTRY DATE: 2001-12-06
ggcaaatcgacccaatccagtggctgatgaagttaagttttgaacctttttttctaatatccgttgaaaatttgtgtgtttctgcttgagccgtacgagatgaaattctcatatacggttctcggaggggggttcgggttagttacctatctcaataaagtatatgattggtttgaggaacgtcttgagattcaggcaattgcagatgatataactagtaaatatgttcctcctcatgtcaacatattttattgtttagggggaattacacttacttgttttctagtacaagttgctaccggttttgctatgacttttgactatcgcccaaccgttacagaggctttttcctcggttcaatacataatgaccgaggccaactttggttggttaatccgatcagttcatcgatggtcagcaagtatgatggttctaatgatgatcctgcacgtatttcgtgtgtatctcacaggtggatttaaaaaaccccgcgaattaacttgggtcactggtgtggttttagctgtattgactgcatcgtttggtgtaactggttattctttaccttgggatcaaattggttattgggcagtaaaaattgtgacaggtgtacctgacgcgattccggtaataggattacctttagtggagttattacgtggaagtgctagtgtgggtcaatccactttgactcgtttttttagtttacatacctttgtacttcctctgcttactgccgtatttatgttaatgccctttctatgaagcaatggtaccaatatgcaaatccacttttttaaggatctagagctggagggtcgacctcttttggataagatagcatagggcatgccccgcccactcttaagactaggtacccgtagactagtttttactactcaaagaacttccctatgcaatggtgctttctagttcttatctgcacctacatttaggattaaccctattcttgataatgggaatcacgaacatatcataccaagcccgccaagcgggagaaggggcgaagcgagaactcaggaatgaatgaaccaagaagggttcaagacaaaagaattctactcagaatgttgatcttctgaccacgaaactgagcaagaagtccatccgatagtgggggagatcaaaaagtacttttttatgggcagaggtatagctatcaagtagaagtctttcgctgtgactagggatagacaggagatgatccctcggttcgtctgagccggaccggagtcgaatacttcggatcctgcatctgcttcagttgattaggtgcaaatgtgccttttggaccgatcctacgaataagaggcattaataaagcatttatgagacaccatactttcaataggcaagggccagcccgaagatcagcgggatctttctccaagctaagtttcgacccccgagggaaccggccacgatgcgtgggggtatcggtgctgataaacttgtctccgctcgctcccctgctcgttcaaagtattccactcgctaggatcttagtaaataagcttgctctgaccttcctagctttgagagcaatactacctgtaataacacaatgaacttatcctacttagggaacagactggcatcaaggagtccaaagcatcggtatggctcgagtg

SEQ ID NO: 7462 - DNA, 1764 bp, Oryza sativa
  ref <308>: DATABASE ACCESSION NUMBER: AK064589
  ref <309>: DATABASE ENTRY DATE: 2001-12-06
caggaaacaatgaagataaaaaggttaggactggaatttattgtaagagagattattgaccaatacaacaccttaagaaaacagttgaacaatgcgatcccttcagtttctatttcgaacagcaaatgttctgtaggcaatgagtgtgtcaagaatcagacctgttgcgtcactatggtagtacaggtggaaattaactccatgtcgcaattggacgttatcaaggaacgggtgattccaagcatcctggccacactgttgaaaggatttttggaatttaagaatgttaaggtgcaatgtcaagaggataatgaacttgttctgaaagtcggtatgtctgagcattgcaagagtgggaagttctgggctaccctacaaaatgcttgcatcccaataatggagttgattgattgggagcggagccgaccagagagagtatatgataatttctgctcatatggcatagactcagcatggaaattctttgtcgaatctttaagatccacaacagatgctattggaaggaatatccatcgacagcacttactggttgtggcagactgcctatctgtgagtgggcagttccatgggctaagcagtcaaggtttaaagcagcaaaggacttggttatcaatctcctctccattttctgaagcatgcttttctaggcctgcacacagttttataaatgctgcaaagcgggattcagtggacaatctttctggtactctagatgcaattgcctggggcaaagaaccttgtgcagggtcgtcaggtcctttcaagattctatattctgggaagtcacatgagacaaaacaaaatgagcacatatatgactttctacataaccctgaagttcaggctcttgaaaagaatgtaatggatacctacagaaaaaggactgaaaaaacttccaagcggagatcagcactcaattctgaaggcaatgctaccatcaatggtggtgccatatctttaatcagaagtttcttaatgctaaagttggtatatgggagaacatcattgacatgcgcacttccttgcaaaacatgcttcgggagtacacattaaatgaagttgtcacagaacaagataaatcatgcttaatggaggccttgaaatttcatcccagagggtatgacaagattggtgtgggaataagagaaatcaagatcggagtgaatcctggtcacccgagctcaaggtgcttcattgtactaaggaatgatgatactactgcagacttctcttacaacaagtgtgtccttggtgctgcaaattctatctcacctgaacttggaagttatatagagaacagacgatctaatagagcagttcggccacatcagttgtagggtgagcccgtcaatgctttacgaacaagtatcagaagcaattttcatggataacgatagattggcgaatgttgcttcttggctgcttcggttaacggggatggcagggtcttacactctacagggatgtgtgtcaactcaactcaactcactcgagctacagatggccgacctgagccttagtgtaggtttcatgccttcacttctgtagcacatacatctatagtaacccttaagtttgtttggacaagaggtagtggcacaaagtgcaataggtgtcgtcgttatccttgcatcaattgtatgcggaaatgatccatattctaaatgagaatcacaaaattttggtcgttgaatttaatctagaatgtgatttattcgtgaaaaaaaaaaaaaaaaaaaaaag

SEQ ID NO: 7463 - DNA, 1822 bp, Oryza sativa
  ref <308>: DATABASE ACCESSION NUMBER: AK064590
  ref <309>: DATABASE ENTRY DATE: 2001-12-06
ttattatattttgttgaggagtgccttttaaatgattattcttttatgctactttgtacttaggtgaatgatacagtggggacattagctctagggcattactatgatgaagacacagtggctgctgtgataattgggtctggcaccaacgcttgctacattgaacgcactgatgcaattatcaagtgccagggtcttctaacgaactctggaggcatggtatcttattttctcctttatctgtagtcagttcaatttccttgtcaaatgctcatcagcttatgtggagtaaaggaattatgatgcccatgtgcgtaccctaaaacatttcgttaatcaggtagtaaacatggagtgggggaatttctggtcatcacatttgccaaggacgccatatgacatcttgctggatgatgaaacacacaatcgcaatgatcaggtagcaacctgggtaaaattcaattattctggtatcttgtgttgtggtttagactgaacactttgtactaccatgattcagggctttgagaaaatgatatcaggaatgtatcttggggaaattgcaagattggtatttcatagaatggcccaggaatcagatgtttttggtgatgctgctgatagtctatccaaccctttcattttgaggtatgtccggatgtcaaattctactgatgtttgtttcgtacctggtgtatttctgcataaacacaattagtaaaaagaagttgttctatgtgttgtctgatttcaattttgcaaatccagcacaccgtttctggccgcaattcgcgaggacgattcaccagatctgagcgaagtcagaaggatacttcgagaacatctgaaggttagctcagaattattccagccatttcatcgggcaccattcttttttccattccatccatctagttgtctgatgattctctcttccagattcccgatgctcctctgaaaactcgacggctggtcgtgaaagtctgcgacattgtgactcgcagagccgcccgtctagccgctgcaggcatcgtggggatactgaagaagctggggagggatgggagcggcgcggcgtcgagcgggagaggtagagggcagccgaggaggacggtggtggcgatcgagggcgggctgtaccagggttacccggtgttcagggagtacctggacgaggccctggtggagatcctgggggaggaggtggcgcggaacgtgacgctgagggtgacggaggatgggtcgggggtcggggctgccctcctcgccgccgtacatccgtcgaatagacagcaacaaggaggtcccatatagtgagagagacaatgaagatacagctagcccctcttgttcaaatgtaaaaaagggacattgtttgatatctatattcatatatataaaaatctgggtcttgtgcagagaaatcccgttttttcttggcctgccattcatgctatgatagtcttacagtatttgccatctcttgatttctgaattctcacaggcgaggtgaataaggcgaagtgaatggaatgagagtatgagacgagttacgttcagtagcttggttttctactacaagtggggagcatgtagtatatgttttcgcatgcgcttttccattggcaacgcactggattcatgtagccttgttctttattatggcatatggcatgcaacgtagctagcttgcatgacagcatgagtgcaaaacgacgtgcaatggagtgtaatactaataaaacttatataaaaaaaagtgcactccacctttcagggattaaaaataaaaaataaaaataaaacggagccttctagaaag

SEQ ID NO: 7464 - DNA, 1460 bp, Oryza sativa
  ref <308>: DATABASE ACCESSION NUMBER: AK064591
  ref <309>: DATABASE ENTRY DATE: 2001-12-06
aaatgcaaaaatacgctagaagcgtattcccaaaaaaaaaaggattggcagaattctgagaagaagtatcagtatcatctttcctatgactttgttgattgtctccatgtttttcatttccttcctcttcactgtccacttcgatggggacatgttgtttggcaaattgattctcagtaacagcaacatcatcattacatatttgctcattactccaatcagcatcagatggagaattatacttccttttcctctcaatattagagttcatagcacggctgctgtcagagctatcacagagctttctccgacccaatatctgaagactggatgatcctggagcatttgtccctgctgatacactttctccagtcaaattctgcacagcgatggagtttggatcaggactccttggtaccaaagttccgggcatatcattgtcagcaggaggcacatgagatttagcttggctaatttctgaaaattgaactctgtcacttcttgtcaccaggcctttaccttccatgtcaccagcccagccatactgttttatggattcatcagtttcttcagtatctctggatttgccaaaatcaaagtctggataagggtaggcaatcactgaattgagatacttctgagcagcagtatcattaacatttttctgacaagtttgttggttgcctccatgtcttgcatttccttcctcttcactgtccacttcgatgggaacattctgtccagtagattgattatcaggaacagcaacatcatcattacatatctgctcattactcgaatcagaatcggatggacaaatatacttcctttgcctcttaatattggagttcataccatggctgctgtcagaggtaacatagagctttctcttacccaatatctgaaaactggatgattctgcagcattttcctctgcaggtgcactttctctagtcaaattcttaacagagatggagtttagatcagaactctttggtaccaaagttccaggcttatcattgtcagaagagcagatgtgagatttagtttgcttcattgctgaaaattgaatggcctcgcttcttgtcaccaagcatttaccttgttgatgctgattaccatgctgattggggacactacttcgttgaaatgagaacatttctgacggtgaaagctgagacctttttgcagcagttgataggattcttgagggcacagactgctcacgcagtttgattgcaaagaacttaccacaatcattgcagcgggccaaaaagttccgttggtagtacagagattgcttctgacaatgcggacatatctatctatctatctatctatctatctatctatctatctatctatatatctatctattattctattatattattaaaacagctttgagaaaaaggcactacgttcgctgtgggggctagaaattcccacattaatcggag

SEQ ID NO: 7465 - DNA, 1883 bp, Oryza sativa
  ref <308>: DATABASE ACCESSION NUMBER: AK064592
  ref <309>: DATABASE ENTRY DATE: 2001-12-06
tcatgactcaccaatgggaggccattcaggatttccagcaacttaccagcgggttaagagtttatttgcttggacaggaatgaaaaagaaggtacagtccagggtgcaaaactgtcaaatttgtttgcaagccaaaccagatcgagccaagtatccaggtttgcttgaacccttacctgtaactgctggagcgtggcaagctatttctttggattttattgaggggctacctaaatcaaatcattagaactgcatattggtgatagaggataagttttcaaaatatgctcatttcttcccattgtctcaccctttcactgctagcagtgtagcacttgaatttatgaaacatgtgtacaaacttcatggtctgccccaaatcatcatttctgatcgagacaagatttttactagccaattctaggagcaactctttgtgagatctggttcaaaattgcatatgagctcggcctatcacccacaaactgattgtcagaccgagagggttaaacaatgtctggaaatttatttggggtgctttgttcatgctactcccaccaagtggtcatcctggctttacttagcagagttctggtacaatacaacctaccactctgcgttgaacaaaactccttttgaagttctatatgggtactgtcctgggcattttggcattagtctgaatgactgctccattcctgatctgaatcagtggttccaacagaggaagcttatgcagcaactcttgcagcatcatttgaaccgagctcaacagcaaatgaaacacatggctgacaaaaagagaagcttcagggaattccaagttggagactgggtttatcttaaactacaaccatatgttcagtcttcagtggctgtcagggctaatcacaagttggcgtttcgctactatggcccttaccagatactgcaccgggttggcgctgttgcttacaagttgcttctgccagcagctagtcagatccatccggtgcttcatgtttctcaattgaagggggctcggggattttcttgtcctatgcaagctgaacttcctactgctctttccaaatttcaagttccccagcagtttcttcactatcgcgtatctcacaccaaaaactgtcccattattcagttactaactcattggacaggaagtgcagctactgacgccacatgggagcagctactgacgccacatgggaggatatgcaagatcttcactcaaggttccctcatgcaccggcttgggggcaagccgatttccaagcatgggggcttgtcaggcctcctctgaagactcaagactgccacaaccacaggaagcctgacgatcatgaactggacgggaagactgccgatcaaaccgctgatgaacaagacgatggcacggtggaaggaatccaggaggagggacaaggcgctggagaagcagaacaagatgctggaggcgaggaggggatcgtgccgatacaggaaacggcgccaagcatcggcccaagacgtcggaggcccaacccacgctacttcggcaatcagtgggccaagtagccaagctgtcatgtgagagagggagagccgtgtggtgttgtcctaactgtatataaaaaacataggtggatgttagaaggtgattaactggatacgtggtggcgtaggcggcggcagaacgatcctgtggatcgatacttgtatgcgtgaacaattgtccagtaaatttgagggagaaatcgttagagtacctaacatagggcatcatgtactcaggtggagcgagcttgtgaggctgaaagtgggtcaagggcgaagggaacaagtctggagtgagagaggagggtaggagattgggtgttatcgattttggacgattttcaggattt

SEQ ID NO: 7466 - DNA, 1711 bp, Oryza sativa
  ref <308>: DATABASE ACCESSION NUMBER: AK064593
  ref <309>: DATABASE ENTRY DATE: 2001-12-06
atgcttgagtagaatcacctctcttctactacttctcctcctcactgtaccaccgtagggttaggaggagaaaaaaatccccatcgatccatccatggctgcagcagcagcgaccaaggggctgctccaccttgtagatccggtggccgtctacttcctcttccactaaaatctggtgccatcagttggagctcagctctatgcgtgagagctactagaaaaaagagagcactttttcagatctgaaagggaatcaacttttcaactctccccttccctgtgcatgtgagattgcaagtctccactagtttttccacgatcttctgcagcaagctcataccatggatataggagaaagcaaaggcaaaggcaggggcaagggcaaatcaagcaacctagcagcgggtagggccaaacctataaattggccgctagcactctccgagttcctccttgattggtacattgaaaagaagttgcagctaccgccaaaagcagtgatcaagaagatacaccacactgcttgcacattagctataaatagcaagtatggcactacttacacggttgatcaagttcaacaccactacaggcgtcataaagaaaattggtctcttgtagctcgtcatctaaatgaaagtggtaatggctgggatgagactacaaaaatgttaactctctctcaagctactttggatgcacttttgataaatgatcgtggaattctttcgaagccaatccaattctttgacaagctgcaagaattatttagtggttgctcggctgatggtgcattcatggaagatccttcaagtgctgctgattttgatgacgaagatgatgaagatgataaatttgattttctgaatgatatgtcaacctatgctgatacaaaagttccacaaggtgaggactttgataaattggagtcagacagtgatgattgcaaggaggtggcagcccttagtgcagctactatccaagtttcatcgtctactaattatgatttgaagccaaacaagaagaatttcaaaaggtgtgggaagccaaagacgttgccccaatcacataatgataagtgtaacaagacaaaggcaaaatccacagctcaagtgcatgatagtgatgatgttgatgtgctgatcaacaataccttggttggaatcaaaaacactcttgagaaaccaatacagacagttgcccctcaagatccaaatattcctctatgggacatgcttaagaagattgccttagaccctgatgacaagttgagagtagggctgcacctttgtaagccagagcttcaagctaaccgcagttttcttattagcatgggtcaagaataccttgagcattggatctacaagtttctatctggtgatgatccaaatctcggctgacttattggtgcatattataagttagccaaagcttgtcatggtcgatgagggtctctttttgttgcacccttttggttatgcaattgctgcactatttgtgtttaaacagttgctaaatagtactaacataggtgctatggtggtgcatattatgacaagttattaaatatgcagacaatgctaatcttttggataattcgataacctggtagctttgtagtatccttggtttactgctatattgtttaagctgtactattattggctggacctatagccttggtttaatgttatgttatttaagttgtatt

SEQ ID NO: 7467 - DNA, 1286 bp, Oryza sativa
  ref <308>: DATABASE ACCESSION NUMBER: AK064594
  ref <309>: DATABASE ENTRY DATE: 2001-12-06
agcaaccaacctgcgctccacaagtatactccagctagtaggcgcaggtgatgcaggagcccgcaatggcagggtcgaccaacaccgtcgtccaaaccatcagcgtcaccgccgcggcaacaggggtccacgacttccggttcgtgcggctattccctcaccaaggcggtcgccggcgaagaggactcctaccagtccgaggccttctccgtcggcggccacaactgggcaatccgctactaccccaagtccccaaccgcgtcagctccagggtgtctctctaccccgttctcctgagcagaccggcggacgatgatggtcgcgtgcacgcgtcgttcgcgtgcacgctgctggacaaatccggcaagccggcgtcgccggagtccaaggacactgcggacagtgctcacacgcattccgctccggcgccggggcggaggcttgtttagatgggactaaaacttttaagtccctatcacattcgatgtttggataataattataaatattaaacgtagactttaataaaacccattcataatcttggactaattcgcgagacgaatctattgagcctaattaatctatgattagcctatgtgatactacaataaacattctctaattatggattaattaggcttaaaaaatttgtcttgcaaattagttttcgtttatgtaattagttttgtaagtagtctatatttaatactctaaattagtatctaaatacagagattaaagttaagtctctggatccaaacaccacccttagtctcaggaaggaggccgtggagaggttcgatgactgcttcgttgtgcggtgcacgtctctgtgctcaagaagcccatgtctccgccagggtttacgttaccgccgatagggttatcgggcttactgcgggggtacggtaatataaataccgcggtaacctccttaaattcaaataaatttaaaaaataatttgaatttttaataaatttttcacggttttgtatggtttttcacagttaccgcggtaaccgtgcttaccgccggggcacggtaaccccagccccggcggtttaggaaaccctggtctccgccaagcgacgaagaggcagtaggctagtagcctagtaaagtgtcaatgtaacaatgcagcggtggcttgcaggtctttgcagttgtgcattctgttgaagtatccggttatcatttcctcttatcgtattgtcgtcaaaaaaattgttactactattgtgctaaacatgatgctggaatatggatcaggttctggtcacac

SEQ ID NO: 7468 - DNA, 1428 bp, Oryza sativa
  ref <308>: DATABASE ACCESSION NUMBER: AK064595
  ref <309>: DATABASE ENTRY DATE: 2001-12-06
aatacgaatcggtttcggatttgttgccgcaaaaatcaaaataaaacccgggtggaggaggagggagaagatgaagcaaacgagagagatcgagcttgaggccgggtggaatcgcgaggggatgtcatggcgaagcggcgggcagagtccgagcttgagctggtggaggcggaagcggaagcggaggcggaggcggaggcggagaagaatgggaggcgagcagcaggtagtcaggacggggtgaatcgcgcgttcatcctcgagtgcagcaaacatagcgatggatcgatctacagcggcgacgatttttggcacagattttacaaggtcgccgatacccgagagactcgtatggaggcaatgatgctgtcaaacccaaccaattgccggccacacatgtgggcttgcaaggcgcacagtgtgcaattcatgatgcagatattctcgctcaagctatccaatatcactgctgctgttgatggcccagttcacttgtatggatactttgctgtccgggatcatttggacccgctacgcaactacatcttcaaccgcaccagggatgaccctttcatcatggggcaagacaatggcgttgattcggataattcattgataccaatgtcaggccccaagagaggcattggaaaccaagttcgtgtgctcatcgagttcgacatgaagatcaagaacggagagacacaagacgatgattttcagctcatcgatggtgccattatctgcagcgaattcgtgcttcccgatagagtgtttacgcaacggattgagggtgattgtggtgcggtcgacattagtcgagccctttttcacgaagcagtggaggccacaatacaagttagcatatcacaagtgcatgtcaatggcttgagcttatctttatattcttataccagtcgaatccctgaaaagattcggctctttgatggtgtcatttccaagccatgtgacctgaatagggtagttgctgtggtggagaatacacctttgtttttaatcttcagggctgttcatagggatggctcggattatgatatccctaaatactgtccattggtcttcaaggttgatcagggggatggctcgtatcgtgtctctgaatattgtccattcaaagctagaagacatggatatgacatgaaagagcttaaacttggtggcgcccgtgtactgttgaaggtgtcttggtcaactttgaagtgattttgaatattcctggggtatacataatctatgctaagcagaaatagcgatatttctgtgtattgactagtaggcaaatgtttgggccttattttgagtacatatttaagttttttatttgttgtagaagttcgacaggtgaaggatgccacactcttatctgttcttatttattgcatattaatgcagattaaatttggtattgct

SEQ ID NO: 7469 - DNA, 1523 bp, Oryza sativa
  ref <308>: DATABASE ACCESSION NUMBER: AK064596
  ref <309>: DATABASE ENTRY DATE: 2001-12-06
catgttcatggagaatgtggggcaattgctagagaaaacatcatgagacggcgcatacctgcaggagagccggcgagtcgaaggtacaggttctcaccaacggcactggctttctccgagtcgagaagctcccccatccataccaagcaccttgaggggtcacccgtcgtgaggatagttctcaagttggcataagcgtatgccgtgcacgagcagttgcggtcgcactcatcggcacactcctcaaaggttctgttcctgatgtacaagaacttgtccggcaccttcatccctggtaaggtgaagaaatggtcttggccaccgcatctcagctcctcctttcttcggcatcctctggaagagttgaggctaaatccatcggccggctcgaagccatcaaggcacttgcactcctggaagctgccggtgatgtcgcagtagccgaacggcccgcaggcgccgtagtggagacagccatggcctggtcgctcgaatgggctcgtccaagtcgatgatacgttgttccatgcccggaagctcacgttcccggtgtagtccagcttccagtgtgtcaaaatgccatcagctgcgttgtatatcgcgtagatctcctcgccattgtcaacgatctgggaccatatgtacctggtgaggccggtggccgtcgcgccgttccagacaccgctgcgccacgacgggctcgccccatgccagatgacgatatggagcccccactggtcagggtcaccgctgagggagaactcgcaggtggacgggtcgcgacgacccctccaagcaactacgcgcaccgcctcatggttcttgtatgttcgtccatagcttgaagccagggaggccagggaggatcgtgtccgtggggtgatcgggcaaccggagcacgaagttgcccgtgttctgcagcaccgcggtggctccaccacctccgacggtgaccgtgttcgccgtggtccccttggagtcggatagcacaagcccggaggtgttggtaacagccagcctcgccgtatgggtggtgattgggttgtcgcggttggcgacccagacataggtgcgctccgggatgttgttgtaccatatgccaaggtagagcaggcttggggttgagttggtggtggtcagggagaagaagccgacagcaaagacgccgccatccgagatgagcttgtcgccgccggggaagatgagtggctttgccggtgttaggcggtcatcggattggcagaaactaatcaagaacatgaagatgactacatgcagtctggtcatattctcttgtaaattccttggaaagcactacaatcctacatagagacgatagaacagagttgtgagattattgggccaaccttcttgtcggcagtatagagtaactagtgcagctagcttcgtaaaagagtaggattatactatcgtaattgttatatttcccaggccctgaaatagcgcaatagatattctgtattcctgtgttgagaatgagaaaattgggattatactaccgt

SEQ ID NO: 7470 - DNA, 2966 bp, Oryza sativa
  ref <308>: DATABASE ACCESSION NUMBER: AK064597
  ref <309>: DATABASE ENTRY DATE: 2001-12-06
ttgttgctgactggaagaattcgaaccgctaccctgctgtcatcctcttttatgtcaatgcttgcttctttgtgggcagcatcggctggctggcccagttcatggatggtgcccgccgggaaattgtttgcagagctgatggtaccatgcggctaggggaacccacctccaatgaaaccttatcctgtgttatcatcttcgtcatcgtctactatgcactaatggcgggcgtggtctggtttgtggtgctcacctatgcttggcacacctccttcaaggctctgggcaccacctaccagcccctttctggcaagacctcctacttccacctgctcacctggtcactgccatttgttctcactgtggctattcttgctgtggcccaggtggacggggactcagtgagtggcatctgttttgtgggctacaagaactaccgttaccgagctggctttgtgttggcccctattggtctggtgcttattgttgggggttatttcctcattcgaggagttatgactctgttttctatcaaaagcaatcaccctgggttactgagcgagaaagcggccagcaagatcaatgagaccatgctgcgtctgggcatttttggctttctagcctttggctttgtactcatcaccttcagctgccatttctatgacttcttcaatcaggctgaatgggagcgaagcttccgggactatgtactgtgccaagccaacgtgactattggactacctaccaagaagcctattactgattgtgagatcaagaatcgtcctagtcttctggtggaaaagatcaacctgtttgctatgtttggaactggtattgccatgagcacctgggtctggacaaaggctactctactcatctggagacgcacctggtgcaggttgactgggcaaagtgatgacgaacccaagcgaatcaagaaaagcaagatgattgccaaggctttctctaaacggcgggaattgctacagaatccaggccaagagctctccttcagcatgcatactgtgtcccacgatggtcctgtggcgggtttggcctttgatctcaatgagccctcagccgatgtctcctctgcctgggcccaacatgtcaccaaaatagtggcccgaaggggagctattcttccccaggatgtgtctgtcactcctgtagggactccagtacccccagaagatcaagctaacaagtggctggttgaggcagagatctccccagagctgcagaaacgcctgggaaggaaaaagaagagaaggaagaggaagaaagaggtgtgccctctggcaccacccacagagctttgccatcctgtacctgcacctagtgcagtgccccgcctgcctcagctgccccggcagaagtgcctggtggcaggggcctggggaacagcagagactcatcgacatggagcttggaccctggtctccaaccctctctgtccagagccaaattctctccaagatccatttctgccaactgcaccgggccctgcagcctgggctcaaggtcgtcggccttgtctagcccccattcattcccgtaccaacttgatggaggctgagttactggatgctgattctgatttctgaacctttgaaagcaggacctgggttgagggtgggggttgctggcaagtgggaagaagtaagactctggtcccctgactacatcaggccagggccaggagtaggcagcttttctcccttcccttttgcctgctccccaaggcatcgcctatccccagagaccccaaactcccaagggagttatttctctctggcccaggatagcaagactgtgggaaagagccctggctagctgaatttccatggtagaactgccctgcttctcaaaactgactgctccctagtgggtttttctttgggcggagatcaatagctaaaggccctcatttccccccaaccaagcaggaattgggctgaggacaaacagtgcttgaaagagggatgataatacatagtgcctagtatgttgacagtagaggtcccaagcaggagaaaggtaatggtgcctagaaaggtaggcctaagaaggaagcagagcctatataaggaccgctgaggagacaaaatcctactcagccatcttcagacaagaaggctgaagctaggaatgataataatgtgtcctggtcttttgtctgaaatggggcagagaattcccttcttccctttgtaggcatggaatggggaagagggttgacggctccattcctgtaaaagccagagtgccctttagcaagggccccacaggttttactgatgacctgtaatttaacttgttctcctccatctttcccctacccttctactccttccacacgaattcattcttttctcctctttgaattgttgtcttttcccccctccctgttatgtttgtttagcactcggagctatattctgaagctctgggtagtcacctcttcaccttttactttgtaagccccatctccaggagagacgttggttcagcattggggtctcaagctaggactatgaacgttggttcaaaaagggaagtggtgggttgtccttcatgtctccctaggacagataattcctctcttggcctgtctcttgagaagtggagccatcattctgagggtctgctatgggggaactacaacagaagggcatacattgcccttcccatcgacacaacctgagtacaggtgttttatctcccttgcttggttgttgtccttcattctcgaagaggatcaaaatgacatcactatgctagagtcaagttacagtgtgtctgactgtggctgttttaatctatggtactgttaattcccattccctatccaccttctttccaaaagtcaggcagcagaaagccttggaaccttgttggattctaggtcaggggcatggggatttgggtgaaggactctaaatagccaattaaaggttttgtac

SEQ ID NO: 7471 - DNA, 703 bp, Oryza sativa
  ref <308>: DATABASE ACCESSION NUMBER: AK064598
  ref <309>: DATABASE ENTRY DATE: 2001-12-06
ctcgtcttcacatcgctcatctccgcctcctccgagctcactgacaggtgggccccctccctcctccgagtcctcgccgtcgccgccgttgcctgctccgacctgacggacggagaggcggctggggctcgatcggacgccgccgccacgggaggccggaggaggggaggcacggcgaccggcgaccggccacgggtgggtgggtgcatgtcgacggccgccgcgtcagccgcgcgcggtaggtagatggtgagctcgcactccctcctggtttggattcgtttcctctcttctttttgtgtgtggctgctcggggatttcttagctgctgatgcggatgcggatgaggatgaggatgccgtgtgtgcgtgcgcccggagatcttctctcgttttggtcaatgaacaattgagaattgaccatgggtgggtgggaagaaatcctagtgttctaactattgatcgatccaatttgggcgcaccgtgttaatcgcgtctgaatcgagcatacccggatggagctcataactttttcttgcagaatctgacgaacagatgctggtttttaatggatgtaggcattgtagtgttcctcacttcagggttaccatctattgaattaaaccctcatgtactcaattacttttactcccatgtgccattcaatgttctcatacaaagaaaccaatgaatcttcagcttcc

SEQ ID NO: 7472 - DNA, 723 bp, Oryza sativa
  ref <308>: DATABASE ACCESSION NUMBER: AK064599
  ref <309>: DATABASE ENTRY DATE: 2001-12-06
atcgaacaccttgtgagcatgcttcatcatcactggttggagccgaagccggcgtagctgaccgcgggagctgtggctcgggccgcctctacttcttctgctgccttgcatcaacgccgggagccgctggacgtcggggagagtgcgtcgaacacctgcgtgcgctgccgacgtcgattcgcccctgcttcacccgcaccgtgccgcgcatcaccgacctatgccgttgctccaccgcacgattccgagggagtggttgagttgactgcaaaacaaggacagcaagacagtgagcaagatgagatgggcgcattccactctgcatgcatgcatgcaggctttaaatgtgtagctggtctcttcgttaaacatgcatggatttaattcctctcagcaaccgaacagtattcttttgcatgcatgcaaatccatccgttgcctattcgcgagcggtgggcgcggacggttgcggtgttgcacacacgcgtatcgtgcatcaaccgaagcgtcgcttcctctaaatccatgcagatgtagcgatggttaaatgcgtcggagagttccttggtcttggagcaaaacgtaatacgactgagacttttggaaggagggagtatatatgagtgagaccaatgtttacttgaactttatcttatttagtcttctttacattgagaacatcaacataatgaaggtttgtatttatgtgtctttattattgct

SEQ ID NO: 7473 - DNA, 803 bp, Oryza sativa
  ref <308>: DATABASE ACCESSION NUMBER: AK064600
  ref <309>: DATABASE ENTRY DATE: 2001-12-06
gaggacgagacaaaccctaaacccgccggcggcgtgcggcggcggcggtaatggaggtggatatggaagcggagggtgcgagcggcgagctcggccacaagagggcggatctggagaagcccacggaggaggagagagcttctaacggcggcggcgacgccgccaagacgccgtcggaggatcaccacgacagtgcccgccgccgcgccatggcgatggagaatgacgacgacgacgacgagtactacgacgaaccccttccgaatcccttggacgcctaccgccagagctgggcccgttcctacggcaccaatggcgccaccttcgaggacgagacggatctccctcctatgccaaacacagacattccagtgctgcccccttctgcgcagcctatggagacaatgcaggtcttcacggtgaaggtgacccagatcaccggcggcctccggtggccgctcggcgtctacggcgtggtcgccgtgcgagactccatggaccacaagcgcaacgtcctcttccgccgcggcaggaacgaatgccagaccctaacttcgctgcaggcatgtgcaaattgttcctaccccattatcttataaaagttgctcggtatcaaaatttacgacttaaacatgttgcgttggaatatatgtcttagaaatataagttaattgtttgtttggaatcacagtaaaagatattcatttggatgttaacgtgatattcgattaaagttaacattaacattcaggggtttgtccgccgctgactagtggtggtttacaggccgccagttcgacgac

SEQ ID NO: 7474 - DNA, 733 bp, Oryza sativa
  ref <308>: DATABASE ACCESSION NUMBER: AK064601
  ref <309>: DATABASE ENTRY DATE: 2001-12-06
gggtgcgcggcggcggcggggtggctgggccggcggcggcggtacgaggcgcgcgctcggggtcccggtcgcgaggaggaggaggaggatgaggcgcgcggaggggaaatggctgccgaaaacaagccggaagatgatcatgggaacagcaatggcagtcatgtaaaaatctttttaccgaaaaagctgcttgaatgtctaccgaaatgttcaagtttacccaaagagaggcaccgctggaacactaatgagagatcatgatgcagacgtccttttggatttctttttaataatgtgtgacccttcacctttgatcccttgacctgcattaccttggtccaggcattgagtagagcctgctccacacatcatttctgagtgtaatggacgctttctgaggcctttaagatacaaaggagataggtacagaagacagaccgcttaaaatgtccaaaatgattttatgaatgcaagtatccgtcccggccacgtgaacagatactcctgaggagatgacacagaggcgataagagcagatcaggatgaacagccagcgttacgtgttcttgcttctgattactgttgtttccctggaaagttacactgcatcggtatggcccatctaagaaccttaggatgtacacctgaccaccagccttttgtggaagtctctgaatgtgttcagaaatgtactctgcagtgatccttttaataaagcatacatgttctgtac

SEQ ID NO: 7475 - DNA, 979 bp, Oryza sativa
  ref <308>: DATABASE ACCESSION NUMBER: AK064602
  ref <309>: DATABASE ENTRY DATE: 2001-12-06
gcgtgtgcaccactgcctctctcgtcttcgcgctccgcccgtattgccgtcgcctccactggccaccgccgcctcctcgtttgcactgccaccctcccaccgcacctccccatccgcaccactgcttcaaatcgtttccaccgcagcgttttccgccgccgccgctgccgtgtttccccattgatccgaatcacagctgcaaagaacagaacaagatcgagatcgacgatggtggatcgaggtcaaaaatcagatcgcaaattcaagcagaagtactgcaacaagactgtcgccatctcttcctcccttgcccactgaatcccatgatcccatcccaggtatctggtaataagttacataatcaatatatcccatcccctcctatctgtcttcccacgctgtggcctaccactgcagatcggctcaaataaaagagacgatgccaaagatggagtgatgaagagcgaggcacaaatttctgtatggctacaatcatgggggaagaatcatgttctttgaattgcatctgctatcaatcaacaagctagggagctcataatgttctgatgaagttactcgcagaggtggagcttaccaacttcaaagaaaagaaacatgaactagattttctgaaactattattcagggcagaaccatcacttacaaggatgagaataacctgtcatcattcgtttgctgtctaggagaaactacctgaagatttacaaagttttgctttgcttttgcaagccaagaatatttttgttgatgcgaatttcctgaaatgaatgagttgtggttgatggcaggcctacagagaagagaaaacctccttggcttgggctgaaggatttttggttggcaataatgcataaatagacaaactactgtaattgtgatcactctagattttttactatacttcataaccaaattgtacattttcattttggaatgtttattatgttatcttcttgag

SEQ ID NO: 7476 - DNA, 1723 bp, Oryza sativa
  ref <308>: DATABASE ACCESSION NUMBER: AK064603
  ref <309>: DATABASE ENTRY DATE: 2001-12-06
aaccaccgccgcgtcccattcccaagtcccaccaccaccaccaccactcaccggcgggatgaggagtggccgtccccctccacccgctttgcccccacggcaccaccgctccgccgcgaacacgcccaaatcgaggcggaggacgcccagtcgctgcacctgctcgaccacttcgccgccgcgcctgccatcgctgctgtaggagcggcggcggaggagcaggaggcaaccccgacgctgatcgactccccgtagcaagcagcggccgcacagcctcctcctcccttcgccaagccgtcagatctggactccacggcgccgtcgcagccgccactccatgaacctgccgcgactacgaacacgacgacgggagggtgctctcctcgcgctggcgatgctgcgtcctacaggagcacatcgccctggactacttcccggcttcccctgctccgagctctccaccgcccctgccaccgcgcgctctcccacggcttgcatcatcgtcaccgccaccaccaacaccacatcaacgccgcctccgtggtgcgcatcatgatccgcgaggccatcgaccactacggcttcgtggcgctggccacgcgcgtcatgttcgccgagctcgagaggttggcgaacatgacactgttcgcgctggacgaccaggccatcttcgtcggtgaaggccacgacgactccgtctcggcgcgcggtccgcttccacgtcgttcccgggcaccacctcacccatgccgatctccagcgacgccgcggctgctcctgatttgcggcatctggcgcggcggcttcggcggcgctactcgcgccccgctggtcgtccaagggcgccacggccaccccgacaccccaccgtcgtccttggcgcactggatacccggcacgggcggggagaggcggtgcaccacccgcggaaccgcaacctgctctgctccacctcgacgcggcgggcggggcggggcgaggcgagagggcgtggaaggaccacgtcgacgtcgttggcgagggctacgccatgctgctcaggatcgcccacatttggctcctccaccggcggaccaagtctgccacgattggcgcgcgcccagccatccccgtcgatcctcgtccggcgcgccgcaccctcgccggctgcgccacccacgcgctccaggacgacgcacgcgccacgcgttacttgggctactacgacggtggctgggtcttcatctccttgggccacacgacgcgctcctcagtctccacaaccttcgccgccatcaaccactctgcacccatgtcctcccctatccgccgaagacgtccgcgcgcgttcagggtgcttggaatcgctgggtgggcggatgctgttcctgttcgtcgctgcagtgcagatcgtacaatgcggacgactatccggccgccgacttcaacgtggttgccagcggccaagttctttgccggagcaagtcccgtcgaactactcaccgccggcgtggcttctaccccgttatgttagtttgatcgatcgtcccgtcctggtacaggtattcttgctgtcaatttgttcaagatttgcttcaagattgcaattgcagtttcagtttcagtcctcttgctgccaaggataatgcagttacagtttcagtcaaaatttgatgtcataatcgtggattggtacagttgctacaaatgctggatagtagtattaatttctcccttttctacc

SEQ ID NO: 7477 - DNA, 586 bp, Oryza sativa
  ref <308>: DATABASE ACCESSION NUMBER: AK064604
  ref <309>: DATABASE ENTRY DATE: 2001-12-06
cgcttcctgtggtctctttctcttcggcgaggcggccaagcggcaggcgctgcgttgcagagatgcagatcttcgtgaagaccctgacgggcaagaccatcacacttgaggttgaacccagtgatactatcgagaatgtcaaagccaaaatccaggacaaggaaggtatcccaccagatcaacaacgtctgatttttgctggaaaacagctagaagatggccgaactctctccgactacaacatccagaaagagtccactctgcacttggtgcttcgtcttagagggggcatcattgagccttcccttcgccagctggcccagaagtacaactgtgacaagatgatctgccgcaagtgttatgcccgcctgcacccccgcgctgtaaactgccgtaagaagaagtgtggccacaccaacaatctgcgccccaagaagaaggtcaaataaagaccagcctcgggacccagttttggtttggctcccatgactgaaacgctcttgagtagtctgttgtaacaaggccttgttcctgggtttaatggggctgtgatatcaataaaatccccttttagttgagaagcagg

SEQ ID NO: 7478 - DNA, 2378 bp, Oryza sativa
  ref <308>: DATABASE ACCESSION NUMBER: AK064605
  ref <309>: DATABASE ENTRY DATE: 2001-12-06
aaaatccgcaacatgatatcggaatccgcctttgcgaagcgcggcggcggtgaggtggtgtgggcacgccaccgtcggcaacgacgaggcgagtagccgaaacggggaggaggaggaggaaacggaggcggagggaggcgcgcaggcgtctgcgccgatcaggtcacggcgccgctctggaccctccggagatgtgcacccttcttcagagcaacaagcgcccgaaggaaagaaccagaaaattaaatcgcgtaatggaggaagatgtccttttcagtgtttattggctccttgaagacaaacaagaagagcaaatccatccaacttagcaaagatgcattgttggaattgtaggagagcaaaagaagaatcattggcataagcatgaatataccacaatgctttaaaagaagatgcaaaagaaaaacgcttcatgttgcatacctgctcgactcctctagctgcagggctcctcccctcaaagctcccagccattgcagccaggaaagacgcagcaaaagaaacggagagcgatgccttgcccctgagctgagctcaagttcaaacctcctttgatcaacagtgggagaaagcaaaagatggcagcaaagtgacagaaagaaagaaccacgcaaggaaagaagcgaagcaagagagaggacggacggacgggggcagagcttgaggacggacggaggagggagaagaagcagcaccgtcactgaaggcgacctgcgcaattcaggggccccggaaaaggaaacggtggcaattttattaactgctgggtttaaagatgagagaggcaggcagtcagtcttcgttcgacacaacctgcagaggtaaatcctgttctcccttttgattctgcgcccctcgctttccgtatattttctcttgggtagtgctagtgcggcatctctctgtagtttgtgacttcgagtgtaccgaacagcagtggcatttagctttcctctgttagcgtgagtaggcgctcagaaatcttggatttcatgtcaaatctcaggatttgccacaactgcatgccacaagccccggaaaacctggtcactgccttccttttccctagcatctcttcatcagtcggtacattaaactacctcagttttgctgaaaatcttgcataattggatcatccgatctctgattaccatgatcagcatttctcaaagaatgcatcgaataacagaattactccactaccgtaacaaccttacattgtttaaaattcacgggcatccgatctgtctagggtggccagttaaccatccttggctccttgcccagctgtggtccagaaacgtggtactagtatcgtgatcatgagtttggacgttttagatagtaatgaggttggatttgcagaggcaagcatccacgcactgctgttaggattttgggacagcacatgatggtccgaaagaagagacgatggaggggggtagtgatgcagcacgtgtgcagcgtaggcaggcgctgcccccgttctggcctgcacaactgtttggtcactcctgtctgcaaatgatgccgtctcggtcgcttttgctgacttgatcttgctggggtacgttttttctctccctttttctccaacgagcagcgatcgtgacgtcttcgtagctcataatttcgtattctacctttcgtctccccagtactgtatgtatcagtatcactgcctacaaatgtactatgtctaccggtgctacgtgcatttatgcgctcacctttgctcacgacatgtctattcattgcgcatttatcctattgcagtcgtactgtgatcagttgtactgctggtgctgctttggtcgtgtgcatccccaaggattttctgcggtgtccactgatcagctggaagtgaaaagatggatggtggggaagaaaaggtagagaaggcaagtaggcatgtgaaagcaccaacgagacaagcatgacgggccaagggaaaagataaaacttgtcctgcctcctcaacagcagtaaatgtgttgatttgttccccttgcatttcccgtgtagcgtcatggcattggcagtaactcgtggacgatttctctagcgattgttacccgctgttcatgctcaaaatggcaccataatcttatacacagccctactcttgttctgcagctatttgcacttgttctgcacctacggtctcaaaaaaggcatatttgtatgcctcctacacgggtaaaaacaggtgcagcaaatagtaccagtaagtccaaattaacccttttattactgtggatgagacaaaatgtaggagctagctgtctgctggcatgtggagtgactggaaggcatggcatgtgaaacttgtgaagccatacagtacgaagtaggtg

SEQ ID NO: 7479 - DNA, 857 bp, Oryza sativa
  ref <308>: DATABASE ACCESSION NUMBER: AK064606
  ref <309>: DATABASE ENTRY DATE: 2001-12-06
atctctctctctctctcgcccctcctctcctccagggaggctctacggtgcggcggtgtagcctcgctagtcgcccctctcgccttcctctcctcgcggcggcgcaggtgaggtggagtccggcgccgaggctggtgcggcaaggtggcggcgacaacggcggtggtggagtaggctggccagcgcggttgctgacgactggaggagcctcgcccctctcgccttcctctcctcgtggcggcgtgggtgaggtggaggccggcgccgaggatggcgcggcgaggtagcggcgacaacggtggtggcaaaggctggccggcacggcggctgatggttagaggagcctcgcccctctcgccttcctctcctcgtggcagcgcgggtgaggtggaggccggcgccgaggcaggcgtggcgaggtggcagtgacagcggccacctttctcccgagggacctcgccccgcttcccttctcctcctctagcacgacgtggtgtggcgaccgacacggcgaggttgcgccgcggttgctggatctcaccgacaccctctctccccgggccccccctcctccagcgcggtgttgggtggcggccgctggcatggaggcaggcatggctaggtggtggcgtggaggccggccaggcgaggtggtggtggcggcggtggagaaggccggtggcactgtaggcgccatcaattttttatttttttaatagtataggtaccggttttagaaccggcagcaataaaaatgaggcaaaggtgccgaccaatggagccagttcctaaccggcacctatagggttttctgtactagtgatccctcaactataaataccggatcaatttacctc

SEQ ID NO: 7480 - DNA, 2709 bp, Oryza sativa
  ref <308>: DATABASE ACCESSION NUMBER: AK064607
  ref <309>: DATABASE ENTRY DATE: 2001-12-06
gcgggaagacgcggcgcggcgaggctatgtggccaccggcggcggcggcagtcgcggcggcgtgtatctgccgtcggggcatgcctccgacgaaccaccagggttctctgtttttttggttcaaaatccagaagctcctccaatcaccattacgtagagcatgtaaaaagtttacaaaagagagtcaattcctgctgtaatccaattgatcccggcttcttattcaagtgacagttgcttcactatgatatttggcaagctaggacactaccatgaaaatcttctggccgagtgatatagaggctggagatttaaatgcttccattatctaaagaagttgcgaaggaaaaaaaaaggcaagaaaataaagtatgtcgaacagcaatggaagtaccgtctactgttttctgaaatctccaacaaaaatgttactggtaagtgtcctgcagcccaataatgagctttacgagtgccattactgcacaaatttcttctatgatgtctgtcttcctcctgatgtcatgccagcgtcatccttctccaacatgctcctttatccctcttgaccatagttattatcaattattgtcgcatataccggccccaacaagtttcagagagttcagtgaagttgtggtaaagtacaaagagcgtcacttggagatgaagccactcgagttccttgctgctgcatctattctatgcacatgtttgcaaactgccgcgtcaaaatagatattcatcaatcatttcaaattattttcagagctcaatttggaggtattactattatgacaatgatttatgatagtgatactaagctgctgaataatttggtagataccacaccgttaagtaagatgttggccaattgataagaaggctatctttgctatgcataaaagcgtgtcattcgagagtgaggtttatattaatatagttttttgagttgttgagccattcaatgatatgctaaccactgtactcccccagtccaaagaagttggtaagatgcttatcttattgcagttatacaagtataatcctctgatcaccagtatcttccagccatgcaaagattaggctaagtccaccactccagacgagtgttgaggcggtggctggtgcagtggcgttgctggtggcggcagcagagcagcgatccacgtgggcatctacctaatccctgggacccgcggttcatacacaggtggcttatgtggtgtccgcctgcccggggtgacgtcgtgatgacgcggttctgcatccttgtgtcacaggaacattgagagggaacagctcgacatgctcttcaaatcaatggcgatctccccgttggcgaaatggacactccactggtcgctggtcttctgatcgacgatggcttgatcagttgatgtttgtgcatatgatgttgtcaccgttgaactgcttattactagtagctgctagctagcctatcacaagtgttgctgtctctgatatctttgctcccgtgtcagcagggcaaaagatgcgcctaatcgacgcacacatcaacgaccgaccgacgtcggagccaaactggcgtgagtagcaaaatttgaattttagattttaaatgaaaagtggattttgacgtattcttttatcgtaatttatttttcaccattgacttttaattcactagaaatatactactccatccgcccattttaagtgcaaccataagtttccgcactcaactaactttgatcatccgtcttatttgaaatttttttataattagtatttttgctgttatgagatgataaaacatgaataacactttacttgtgacttatgttgggagcgttcaaataagacggacgttcaaagttggaagcgaaaaaccatggctgcacttaaaatgggacatagggagtaaaaaaattttaggcttacagtcagctatagacaaaacgatgaggatgctgctaactgcaacggcgtcactgcgtcaaggtcctcgggctaagcctatctttttctctgctgagtctacttgtgtcctatagatctgaggctgaggtatcgttttcttcaaacctatgacggtgtcgacaagaactctggaagatcgctagcacagtaatactataccgaaaagatatgtcgacatccatttccttgagtatgtaggctattactagctttagaggtcgcggtgttggtttttcttcgccctgtccattgtctaatgtccattattttctaactgtcaaaatctctgcttccctgtggaaaagacggccggagatgttagttgaacgtggggtgtttggatgagcctaaacatgttatcggcgttgttacggcttgtttgagtttgaattttagaacttaatcgtgtattttcttttggtctgttttgttattcatagcatccaaaaatacctttgatcaggtaagctctaaaacgttggacgagtttggtaaatgatggtgtaaaatcctggagaacactggagggaccatatggaatcttttcagcacgactccttgcaacgctatgtcattagagaggtagcgatggtatctgccaccaccaccactatcactgacatgtgggccatgatatagcataacaaatatcactgacatgtgggccatgatacagcataacaaatgtgaatgttctgctctttgtatacttgcataggctgagaagaggacatttggattttggtg

SEQ ID NO: 7481 - DNA, 1702 bp, Oryza sativa
  ref <308>: DATABASE ACCESSION NUMBER: AK064608
  ref <309>: DATABASE ENTRY DATE: 2001-12-06
atggggccttcaaaatatcgtgggtcttgatctggctggaaatgctttgactggctctttgccagaagttgaaaatctgaaagcaacaacatttatgaacctttcttccaatcgattttctggtaatttaccagcctcacttgaactatttagcacactgacctacttagacctttcatataactccttctctggaacaattccaaagtcctttgcaaatcttagtcctctcactaccctgaatctctctttcaatagattggatgggcaaatcccaaatggtggtgtgttctcaaacattaccctccaatctttgagagggaacacagcactctgtggtcttccacgccttggtttcccccattgcaaaaatgaccatcctcttcagggtaaaaaaatcaaggcttctaaaagtagttcttattccaagcatattggctactggaataatagcaatctgcttgctgttttcgattaaattttgcactggcaagaaactgaggggcctgccgattactatgagtttggagtcaaacaacaaccatagggctatctcctactatgagctggttcgtgccacaaacaacttcaatagtgatcacctactaggagctggaagctttggcaaagtcttcaagggcaatctagacgatgagcagatcgtcgcgataaaagtcctcaacatggacatggaaagagctaccatgagttttgaagtcgagtgccgtgcacttcgcatggctcggcaccgaaacttggtgaggatactcaccacctgttcgaatctggacttcaaggcgttggtgctgcagtacatgcccaatgggagcctggacgaatggttgctgtacagtgacaggcattgccttggattgatgcagagggtgagcatcatgttggatgcggcgctcgctatggcttacctacaccatgagcactttgaggtagtcctccactgtgatctgaagccaagcaacgtgctgcttgacgcagacatgacggcttgcatcgcagactttggaattgcaaggttattgctaggagaggacacctccatattctccaggagcatgccaggaacaatcggatacatggcaccagagtacgggtcgacaggaaaagcatcgcgaaagagcgacgtgttcagctacggggtcatgctcctggaggtcttcacggggaagaagccaaccgacgccatgttcgtcggagagctgagcttgagggagtgggtcaaccgagcgctcccgtcaaggctcgccgacgtcgtacatcctggcatctctctgtatgacgacacggtgagcagcgatgatgcccaaggtgaatcaaccggcagcaggagctgcttagcgcagctgctggatttggggctgcagtgtaccagagacctgcctgaggacagggtgacgatgaaggatgtgactgtgaaactgcagcggatcaaggaggtattacaagcctagatagtcttgtcctgcagccctgcagatgataacccaaagctggcaaggccatgtgccatctgtggtggttgcaaatgctgaactgcatcatgaaagctgtagccttccttgaaaagatacctgtaacagtagttgagttgcaggtttgcagccatctaacaaaaagtaatatactacgtgttagagagttgtttagggcttaatcctccaataacctgccaaagaacgcaatgaat

SEQ ID NO: 7482 - DNA, 634 bp, Oryza sativa
  ref <308>: DATABASE ACCESSION NUMBER: AK064609
  ref <309>: DATABASE ENTRY DATE: 2001-12-06
ggaaggggaggcggagaaaaacacaaggctctcaaggagagagagaaaaccctagctagctaggcgccgtcgcaaccttgctcccgtccgtccgtacgtcggaacgcagctatggcggctgtggcgctgcgctctctcgcaaggaaggccatgcccgccccggccaccctccgccgggcgccgccgccatcgcgctccctccaccgccacagcctcgaggataagctgcgtggcacgacatctcccaagactacagctcctactgatcaaggtcgagtcagttattttgaagaaaatcctgagctttttgctgaattggtgaaacgagatgcagctcggaggatgttcaccaggttggtgctggcgggtgctgcttcagcgtacgctggtgcccttttcgttgtgtcgtctatgcgcgatagcgtgaaggaagagcttcgcaaaaacatctacgactaggagctctatcgccagctggtggctacatatttctgtctctgtgttatctatgactctgccctgcttatcatggcttgtttaatgtaacatggcatttcctactaatcatcgatgtgtaacgtaccatcgtactatagttgcactctataatagtttgtgatggttggttggtagt

SEQ ID NO: 7483 - DNA, 1872 bp, Oryza sativa
  ref <308>: DATABASE ACCESSION NUMBER: AK064610
  ref <309>: DATABASE ENTRY DATE: 2001-12-06
tattttattattaaaagtattttaagtataacttgtctctttttatatttgcacaaatattttaaataaaacgaatgattaagcgttaaaaaaagtcaaaacgacgtctaatttggaatagaggaattatactgtttaataatttggaaaaaacgtgtttaataatttggaaaaaacgtgtatgtagacaacgagaaagaagttgagaaaatatagattagaacgcacctttcacgcgagtatttgcctttccatgaatccacctatgctcaggttttacctgacaaaggcaaggccctgggggtatgcactacgctgactgcacggtcgcagcagccgaggggccaccacgcgggcggcgcgaggtggcggaggcggagctacaaatatccatcccttccaatccaggcttccacttccatcgcatcgatcgagtcggctgcttgcctgcactgaatactgatcgatattccatcacactcactgcctcttgtgccactctctcgcttgctcgccgttgctgagctcaatttcatatcctttcctccatggcgatgtggagggcaccgtcggcggcggggcagctgctcggccgcgcgcttgcatctacggctgcgcagacatcagcaggcagcaagaaggtcgtgggtgtgttctacaagggtggcaagtatgccgacaagaatcccaacttcgtcggctgcgtcgactccgctctcggcattcgcggctggcttgaatctaaggggcatcgctacattgtcaccgatgacaaggaggggataaactgcgagctggagaagcacatcgaggatgcccacgtcctgatcaccaccccattccacccagcctacatcaccgcagagaggatcaagaaggccaagaacctggagcttcttctcacggccggggtcgggtcagaccacatcgatctcccagcagccgcggcagcaggtctaaccgtggcggagatcaccggcagcaacaccgtctccgtggctgaagaccagctcatgcgcatcctgcttcttctcaggaacttcttgcctggtcaccatcagatcgttaatggcgaatggaatgtcgcgggcattgcccacagaacctatgatcttgagggcaaaactgtgggcactgttggtgctggtcgcatcggcaggctcctgcttcagcgtctcaagcccttcaactgcaacctgatgtaccatgacagggtgaagattgacccggagcttgagaaggagattggggccaagtatgaggaggatctcgatgccatgcttccaaagtgtgatgtcgttgtgatcaacatgcctcttacggagaaaacaagaggtatgtttaacaaagagaggattgcaaagatgaagaaaggtgtgaccattgtgaacaatgctcgtggagcaatcatggatacccaggcggttgctgacgcttgcgccagtggtcacgttgcaggatatggtggtgacgtctggttcccccagccagcaccaaaggatcacccatggcgatacatgcccaatcacgctatgacccctcactgctctgggactacaattgatggacagctgagatacgcggcgggggtaaaggacatgctggacaggtatttcaaaggggaggacttcccggcgcagaactacatcgtcaaggcaggccagctcgccagccagtatcagtaatgacccccccttgtgtgttgggtgggtgtccatatatcctctgtttattcctcaagtgtggaattatttctcaagggagagagggacggataggagccaacagccaagaaacaccctctgttaatgttgtagtaacttgtatgagtgttgaaataatgaatgcctggaaggctggaataaacagctc

SEQ ID NO: 7484 - DNA, 1715 bp, Oryza sativa
  ref <308>: DATABASE ACCESSION NUMBER: AK064611
  ref <309>: DATABASE ENTRY DATE: 2001-12-06
ctcttttctcctccaattcgacaaatttgacgctattccgcattttattcagatccattccccctcgttcgcagctttccgcgtgaaggtacgagcattttagagcaggtcagggatttttttttattttttttacgcttgatttgatgcctaaaatggccaagaatctgggccttgattcggagacgagtttctgattaattcgaattggctgctccggataaggtgaccggttgtttagctccggaagtccggatgaagtattcctcgctgcaaatcggttgaattgaagcggaattagcggttgtccaaccgctaacgcccggacagagaagaaaaggtatccgcttgggaaggctaatccggaagcaatcgcggcgatccgtcgtcgttgaatcgcttcgagagttttggcatttcttcagcgtggcatgggggcgggggcgtcgagcatgatgggaccggaggggtacggccggggatgggggcagacgtcgctgggcgacatgccggagagctgcgtcgcggcggtgctgctctacctcgacccgccggagatctgcaaggtcgcccgcctcaaccgggcgttccggggcgccgcatccgcggactgcgtctgggcggccaagctccccgccaactaccggtacctcgccgccctcgccgccgctgccgacgacgacagcggcggcgacggcgccacggaggggaatggcagtcgctgctcctccgcagccatgatcaagaaggagatatacgcacgcctgtgccggcccaccccattcgatgggggcaccaaggaattttggatggagaagaacaagggtggtctttgcatatccatttcctcaaaggctatggcaatcacaggcatagatgataggagatattggagtcacctctccacagaggagtccagattccaccatgtcgcgtatcttcagcaaatatggtggcttgaggtggctggggaaattgatttctgcttccctgctggttcatacagtcttttctttcggctccagttgggccgaccgcacaagtacatgggccgccgagtctatggctatgagtcaatccacggctggaacattaaaccgacaaggtttcagctttcaacttcagatgatcagcaagctacgtcgcaatattatctgaatgagccaggaaactggatcctttaccatgtcggggactttgtcgtatcaagttcagatcagttaaccaaccttaagttctccatgatgcagattgattgtacccatacaaaaggcggtctatgcgttgattctgtttttatatatcccaagggtcatcgacatgaggactgcacaatctgcaagtaaattttggaaagccactggatcccgttctcctttttccaggtcattcctgtccaaaagctcaatgtatatatccaaacttcccacagaaaaaatttttgtatgggcgtgaagtcttgatcgatattctttgtagtgttagctaaatcagcaggaagattatagatgtaggtagtgagttaggcatgagtgcttctgtgcttggagttttatctgtagaaagagcagttccatttgttcatcatttgtgtagtgatgtttaggtgataaagtctttcgccgatgttttttgagatttgtacaatttccccctttcttgtacagattatgtcgtatttttacttgtaaataatatgtcagattaaaatgttg

SEQ ID NO: 7485 - DNA, 857 bp, Oryza sativa
  ref <308>: DATABASE ACCESSION NUMBER: AK064612
  ref <309>: DATABASE ENTRY DATE: 2001-12-06
atatgagcagaaagccaagaacacacttggaagcaaacaaccaaatatggctgatccagttaagctcatcggcgcatttggcagcccgttcgtgcaccgagccgaggttgccctgcggctcaagggagtggcttacgagttcatccacgaggaccttgacaacaagagcgacctgcttctcgccaaaaaccccatccacaagaaggtccccgtgctcctccatggcgaccgtgccatctgcgagtcgctcgtcatcgtcgagtacgcggacgaggtgttcgacggccgtcccatcctacccaccgacccctacgaccgcgccatggcccgtttctgggctcacttcatcgaacacaagtgctcgaggtcatcgtggctggcattgtggttggacggcgaggagcaggaggggcttctgaaggagacgaaggagaacctggcgcttctggaggcgcagctccatgggaagaggttctttgccggtgactcggtcggctacctcgacattgttgccagtggactggctcactggatcagcgtggttgaggaggtgaccggagtgagcttgatgggcggcgccgacgaggatgacgagtatcctgctctacgccgttgggccaaggagtacaccacggatgagaccgtgatgcagtgcctgccgagcagagagcacctcgctgccttcttcgctgcgaagaaggacaagctgaagatggtggctaaggcgatgctgcatcagtgattgtgagtgttgtgggggccgacagtgggagtgtatgtctcaggtgatggtgcttcttaaataaaatcgaatcagaacataattaaacgattataaagccgaaagttctacacgt

SEQ ID NO: 7486 - DNA, 1706 bp, Oryza sativa
  ref <308>: DATABASE ACCESSION NUMBER: AK064613
  ref <309>: DATABASE ENTRY DATE: 2001-12-06
cccacaccaaaacttcgaggcccccgtcgcggcaccctcctccgccgccggatctccaccggagtacggcgccggccaccccctcctcccccggatcttcaccgccggtgaagtactgaggtgatgactacatcagagtcagtacaagaaaccttgggattggatttccctcatcctagcaaacctcgggtcctccttgctgcctctggaagcgtcgctgctataaaatttgagagcctttgccgtagcttctcggaatgggcagaagtcagagccgtcgccaccaaggcttcattacattttattgatagaacgtctctgcctagcaatattattctttacactgatgatgatgaatggtctacctggaagaagataggggatgaagttttgcacattgaactgcgaaaatgggcagatatcatggtgattgcgccattatcagctaataccctagctaagattgctggtggtttatgtgacaacctcttgacatgcatagtgagagcatgggactacagcaaaccactctttgttgccccagctatgaacaccttcatgtggaacaacccgttcaccagtcgtcatcttgagacaatcaacctgctaggtatatctttggtccctcccattaccaaaaggctggcctgtggtgattatggtaatggtgcaatggctgagccttctgtgatcgattccaccgtcaggcttgcttgcaagagacagccacttaatacaaatagttcacctgtggttcctgccggcagaaacctcccatctagctgatgcggcaactattctgttcaagattaaactctggacctagttttctatggtaaagagtacttcgtgtcacaaaatgaagtgttaagtgatgtctatgtcggccaacatagcacctttattggccagttgttgtactactattagtgatatggtaggacgtggagattggagaaaggctattgtcccagcactttaatgttgcttttccaaatttcttgtgacataatgctaaggtgctgatgaatatgttcatgttgtagcactatttttttctgcaaatgtttgcaaagactcgtgatggaatcaaaatgtagcaggttgttctttcatccttttctttttgtgcagcatgcgtatattggaaggtgaacttgtctggtgtgcaaatgctgcactttcctgcttggatacgcagccgctaaagcttggacatgacggcttacctgaatcctttgtttcgatctacgcttccctctcgttgatgactggtgatttgtcgcatggatcacttgaagctggtgcaggaacaaactgagaatgacatgtggcaggcaagccctgtgaatgcaaaaaagaaaatggtgactaagcaagaagataatgccaagttcagataagcatttggtaggggattgcaacaagctgggtgaaggtggcgtttcaagtttagtcatcatctgcaccccacaaggatatggtgaggaatggtttaccgatcaattggaaagattatgaccgttcaacatcgactcttttggataattctgcctatatggtatgcatgataaagctcaactagaggagtaacacaaaaaatgccatgcatatatttatcaatcagcatgactgaacttgaagttgaactgcatatggttggccatggtgtatgttgaaatagtaacacagtggtgttgaagttg

SEQ ID NO: 7487 - DNA, 2226 bp, Oryza sativa
  ref <308>: DATABASE ACCESSION NUMBER: AK064614
  ref <309>: DATABASE ENTRY DATE: 2001-12-06
atgccgatcccctcctgcttcctctctcaaatctccctgccgcaaccctagcctcgccgccgccgccgccgcctccggctcgccggctcccccctcccccgcggatccaagctatccaccaaatccctccctcgccgtcgccggcggatggacttcactgccccttccttctccctcggctccgagttcgacgagccagaggaggcggtagggtatacggcgcccgatgccccgtccttctctctcggaatcgatttcgagggcgacggcgacgagtcccacctcaccgatgccggcaatggaggggaggagcagaagcgttatgaggctcccgatgcgccatccttctctgtcggcatcgattccggcagcgacggcggtgaggagcgccgccgggaggagcaacggcgaagttacgaggctcccgacgcgccctccttctccctcggtatcgactccgatggcgacggcggcgacgagccccacctcaccaacggaggccaccgggaggagcagcagcggcgttacgaggcgcccgacgcgccctctttctccctcggcatcgacttcggcgacggcgacgacgaaccccgcctccccaacgcaagccgccaagctccgcgctacgaggcgcccgatgcaccctccttctccctcgggttcgatgacgacgaagacgatgttctcatcggcggcagccgtcacgagctcgggactgtcgaggaggaggacgacgacttcgtcctcgccgacggccaacagcaacagcaacggcggcacgaaactgttgtccccgacccggcgccgccgccgccagagatgaatcgattcaagcggctgcggagaggccccgcgccgccatctcaagcgccaacaccacctcctcataggacaccagcgccggctacgatggaggcttctccggtggtgagctcgaaggccgtcttgggggatattgggagctttgaggatgagatcgaggatttcaccgacgaggagagattcatgcgagacgtaccgccgtctgttggtagctgcatcacttctagcagctcaaggttctctcatgccagcaattcaaagttctcgctgatgaaccatggtgtcctgatgagccaatcaacaagtaaatcaaagaaatttgcacaaacacctaattattctgcttcaagatctatggaagaaagcagcaccaagaaactgctccctaagacagcattgagcccaatgaggaaaattcatttgcttgattcagatagtgactcggatgataacaaggaaatgcctggtttgcagcaaaactgcaaatccaaagtgagcactgttcaacataagggcaaggctgagatgaatgacagttgggcgacacctgctcttgatgagttctgcaatgagtatttcaaatccgtggaagactcgagaccatctcagcagaaagaaggcaacagtttttgtggccccaaagtcatacgttctaactactctgttagtgaaactggaggacattttccacatcaatccactccaagtggggctgtactagaggacaatcagacagatagtcatcctcctgcaatgcattattttttccaccatgaccagttggttcgtgacctgatccgtcaaagactcaagcattttgttcctgttggagtagacagcagaggaaatgagcaagatggaacacaaaatctccagtacaggagtcagaccggccggtgtgctgctgaaaatgaccggtgggtgactccgaacaagaggatgcctgttgcaactcaagttggcagaagaagagtaaatcctgctggaatgtctggctctggccattggttgactggagacgatgggaagaaggtctatatctccaaagatggccaggagttaactggaagggttgcttaccgacaataccaaagggaaagtggcaagggatttcgccagtcgaagaagaaaagttcggctggaactagagcaaagaaagccactactaaggtgaaacaagagaaaactagagcaaaaagaaagcgctgaattcaagacgtgctggcctcgtattcacagacgaggtggtgccaatgtaattagtcaatgagaaatcatagtcattatttgttcaatccatttcataaggagttgttaaaaacatagagcagagtagaatgacatggtttatgtcggagaatataatcacataacaaagcttcaactgttcttctttgataaggt

SEQ ID NO: 7488 - DNA, 2410 bp, Oryza sativa
  ref <308>: DATABASE ACCESSION NUMBER: AK064615
  ref <309>: DATABASE ENTRY DATE: 2001-12-06
tagctcaggacaggcgaatccaatcgccccactagaaaatattgcttattgaagcgatagattgaataatcacagaacatgtgtacatatagacatcctccttgccataaccacttaaccgacttatagcaacaggatcggaaggattaggaagggagattaacacttatctccttgtgttgttgtccttgctcagcggaagcacatagccaattcagtttgaagtcggtcgataaatcgatctatgtggcttggatcattaagtacggcaaggccaccttcaattaattttgcttcagttttcatcagaaaggctctggtttttaatgttgttgctgggttatttcgttgattgccgagaattcgagcatgcgatcggtgtgtgagcatgttcaccggttgcaggcttgcaacaattaaaaaggcttccttttttgttcaggagctatctgttttatttcagggatggttatttggttaacttgtcttgacagttgacacgtagatttgcgggcgaagggttgctgctacgacatgcagatgcagggaaaagataaagggagtagaggaggaagatgtatgtcacttacaggtgggccccatgtgccttttaatttctttttactaaataggatgctacgtcagtgaaaccgtcatctataccgtcgtcaaaggacctgaattatacggttctgttaagatggagagtgaggatttctggtaccgcggtttaggaatataagttaaactagacgtaaagatgacggatggcaagtgaacttattccgcccgtagtttgataagttcaataatgggccagggcctaacatcttcgtggagatcaaacggcgtcgggtgggctatataaagaaggaaacaaaatacgctttcagactgggaaagcggcatttgaaatcacgcttcctctttgcgagttgcgacaagggaaaaaaaaaaaaccaacggaagacagaaacgcctgccccgatccccatggcggggctcgccggcgacgactcctcattcttcggggacgacggcgacggcgatgagttctgctacgggccgttcgacgtcgaggatctctgctacggcgcctccgatgtcgacgacgattgggaggagttctgcgacggccccttcggcggcggcggcgtggaggagttctgcgtctccggtttctccgtccgcgacctctccgacgcgtcatcctccggcgcccgcgagacgggcgacccccacgacgacgatcccctcccccaaaccctagcccgctccctcgactccgacggcgacctctccgccaccctccaccagatcgtgtccgcgatgcgcctctccgaggacgaagaggaggaggaggaggaggagctactggtcctcggccacggccacggcgtcggcatcggcggcggcggcgacgtagatgggttcatggtgagcgccttcgatctcgacacagcgatggccattgggggcatcctcgaggacatccacgaggtgatgggcgccgatgaggtacgggaagaggtggtggtggaggaggaggaggccggcaatggcggggggatcatgccgaatggattcgagttcgggccgccgccgcgggccatcagtggcaccgccgcgggattccggatgatggtggacgccgatgacactgactccgatgacttccagtttgtcgaggtactcggaggaggacaggtcagggaggccggtgccggcatgagcatgcggccctcgcgtgcgtcccaattggtggtggagagcttgccggaggcgacgctcagtgaagaggaggcctctcgtggctgcgccgtgtgcaaggactcttttgcgtcggggcagatcgtcgccttgctcccgtgcaagcattacttccatggggactgtatctggccatggttaactatcaggaccacttgccctgtctgccggcaccaagttcgcactgaagatgacgattatgaacaacgtatggctcggcgcgtgattgttctagcagcagtggagcatcagggtgcaccggcacagggctgtggagacagcgcaaccatgggtgctgaaggcgcaagtgaatgtgtggtagaaaatggacctgagaaaacttcattttgatgcggtcccagtatttggtatgatgatcaggcagctgagacaagaaactgaactgacgtaggtagagggaccccccaactcccttggaatgttggcaggaaaactgtaccggcatccaacattttggctaacactcagcatattgttgtcctatgatatgctgtaaatgtacaaaactaagtagttcgatccactcattttctcgttcttcggctcgtatgaatgatgagttgtcggttatcttcaaggctcttgcactaatctgattagctacagttcctttttcttg

SEQ ID NO: 7489 - DNA, 1642 bp, Oryza sativa
  ref <308>: DATABASE ACCESSION NUMBER: AK064616
  ref <309>: DATABASE ENTRY DATE: 2001-12-06
atcaatagcgctggtaacaagtacactagtaatatagctagtggttaacacgattaagaagtatggcgtgcatggtggcgtcgcgttgaaacttggctagaactggcagggggacggcggggagaagaggccgttgcgagtccagaggtcggcgaaggcgtggaggatgagagggtggtggcgcggcgagttgagggagaggaactgatggaggaggtcgttgaggtcgtcccacgcgtagatctccttctccaccaccatctgcaccatcgactcccggaagtcctcgtacggctccgccgactccaccgccacagccacgctctccttcgccacgcgccggtacggcgcctgctcctgcagctgctgctgctcgtcgtcgtggccgccgacatcgccgccccgagcgaaggaggtggcgccggcccgcctccgccgccgacgctgctgcctccgcctccgcctcgtctccagctgctcctgctcctgctgcgccgccgccggctcctcgaacagcgagttggtggtgaacgacgcggggccccacgaggagtcggtggaggtggccgtgccggcgcccccggtcgtggccgtgaacgccgtggtcgtcgacgtggaggaggcgttgggcgacttgggcttgctaccgccgcggcggaacgacgaggacgacgacgaggagaagatggagaacagcttcggccggcggcagttgcagccgatgtccaccaccggcggctgccgcagcgagaagctgcccctccttgacgacctgcccgacatggacaatgccactggtgtacctctaagctcaatagccttgcactcctgcactcactgcagaagccaatgcagctcagctcagctaagccagtgagagcgacgtgtgcgcggcgagacagtgagagctaagctcggagagagtgagttgagttcttggagcttggagctggaagaggagctagctagtggtgctatatattaatggggcgccatgtgagagcgcgaggcaacgattaaatggcgagtaaagatagagcgacatgaacagtgagaagggagaagagagcgagcatgtgaagcggataattagaggtgtaagggcaagtgtgtgggtaaaataagctcggacagtgcaagaggaaagcagaaacctgagaaagatatgtgaacaacatgtacagcacagtccagtgcggctcagtgctacacactgctactagttatacggagtatgtgtgtgtggggggtgtatgggtgaatggttttcatggcatttcatggcttcatgcatgggtgcaaagatgttcagattggatccctggggggatcatgtcagaggggagagttgcagatgtaagccctgtaagcatagcatgcatgcatatatggctggtgtgactgcacgaggtggttaatttttgtgcagtaaattctgagctggagtgtacaccgtaggggagagggagaagatgactgatgatatattgagatggtgtggtgtgtggatggagtatattttttttctttgccacggttcgtaataggacgggagtcccctgttggggttgactaactgttcatgtgaggacaagctggccatgctgctggctcagctcatgctagctttctctgttgaagc

SEQ ID NO: 7490 - DNA, 863 bp, Oryza sativa
  ref <308>: DATABASE ACCESSION NUMBER: AK064617
  ref <309>: DATABASE ENTRY DATE: 2001-12-06
aaaagcccggcaagaagtctacttttcctccctgtcgctacagtgcgtcttcaagctccagccgccagccgagccgagtcggctgccatgccgagccgccttgccgcgccgaatccgccccaatctctccccttttcttccgtttttttttgaggggtttttatcctctcatcttcctctatccttacccccaaaaatcggagcaaatcgttgagtattttatccgaatcgaactcgttttgagtttatctccaaaaccgagtttttgatttcccggagcgatttcttgcgggaggagtccgatctattcaacccaaggctataaataggaccccctagtcctcctctttcgtttgccccctctcccgtgatctcccgtgcctcgtagcgccgccgccacgtgctccaccccgccatcgtcgccggccgagttccatccgcgtcgcgccgccgcctccgtcgtcgccgccggtcgccgtcaccaccgttaggtgcgcgggagggtggagaagcccggccgcctgacccccgaagccgccgaccaccgcagctccggcgccaccgccgaccgaagtcgtcgccgccgctcttcctctccgccggccgtcgtccgtcgtcgtttgtcgtatcggtgagcaccattgagttcgcaatgttgtcctctacgcgtatgtgtcctccaaaagtccggccgaccaccctagctccggcgaggtcgccacccgtgccgtggctgccgtcgatgacgtcatgacgtcatcatctcctctttttcagttttttttaatagattaaatcttcggaaattcataactaaatcatcgtaactcggttttgagtggttcaagttgctaaattcatct

SEQ ID NO: 7491 - DNA, 845 bp, Oryza sativa
  ref <308>: DATABASE ACCESSION NUMBER: AK064618
  ref <309>: DATABASE ENTRY DATE: 2001-12-06
aggctacgattcacaggcacacagcacgagcatccgccgccgccgccgcctcgccttagccttgccgcctcgttccggcgagcagcagccacccggcggccggtccaccacgcagacgcagtgactcttcgacggtcgggaagggagaaaaggcttctgggtgaatcttctattattagaaaatgaacaagggcaagattttcaagttggcaaagggatttagaggcagggcgaaaaattgcataaggatagcaagggagagggttgagaaagccttgcaatattcctacagggatagacataacaagaagagggatatgcgatccctttggatagagcgtatcaatgctggtacacgattgcatggggtgaactatggaaatttcatgcatggattgatgaaggagaacatccagctcaaccggaaggtgctctcagagctttctatgcatgagccctacagcttcaaggcacttgttgatgtatcccgcagtgcatttccagggaacaggccgcctgttaaaaaggagggtctagcagccatcctgtgaaatgattatgttcagtcgcacactgcactcatgatggccgttgcaactgaaagttactactattattgtcttttagctcaaaggtgactcatgtaattctcccttacctatattaaatatttatgttattttgtgtgatgttctctgtagcaggaaacatctaattgcattattgtttatctggcccctttctgttagtcttatggagagtgttattcctttactgttgacaatttcagcaacagtactatggatttggtcataatatatgcaaagagtcatgactttgtcatt

SEQ ID NO: 7492 - DNA, 1345 bp, Oryza sativa
  ref <308>: DATABASE ACCESSION NUMBER: AK064619
  ref <309>: DATABASE ENTRY DATE: 2001-12-06
atacctcaaccatcgcaatccatcaagcaaatctcactagctagctagctatctcagctcactctctcagtagccactgatcagaagaagagcaagagacgccaattaagctagctagctaagctggttaattgccatgggtagtggtaataagctcgctgccaccgtggtcgtcgtcaccttcgcggtgctcatggcggcggtgacgacgacgtgccaagcagcttacgggccacccaaccctgcttcgtgcgggctcaaggtcggttactactacgccaagtgcccgcatgccgaggaaatcgtcaagaacgtcgtcggcgccgccatcctccacaaccccggcgtcggcgctggcctcatccgcatgctcttccatgactgcttcgttgagggatgtgatgcgtccgtgctgctcgacccgacgccggcgaacccgcagccggagaagctcagcccgcccaacatgcccagcctccgcggttacgaggtgatcgacgccgccaaggcggccgtcgaggcggcctgcccgggcgtcgtctcctgcgccgacatcgtcgccttcgccgcgcgcgacgcctccttcttcctcagcaacagcagggtcgcgttccagatgcccgcggggcgcctcgacgggcgctactccaacgcgtcgcgcgccctcgacttcctcccgccgcccaagttcaacctcggccagctcgtcgccaacttcgccaccaaggggctcggcatggaggacatggtggtgctctccggcgcccacaccgtcggcgactcccactgctcgtccttcgtccccgaccgcctcgccgtcccctccgacatggagcccccgctcgccgccatgctgaggacgcagtgcccggcgaagccgagctcaggcaacgaccccacggtggtgcaggacgtcgtgacgcccaacaagctggacaaccagtactacaagaacgtgctcgcgcacagggtgctcttcacctccgacgcgtcgctcctggcgtcgccggcgacggcgaagatggtggtggacaatgccaacatccccgggtggtgggaggataggttcacgaaggccatggtgaagatggccagcatcgaggtgaagaccggcggcaatggcgagatcaggaggaactgccgggctgtcaatcactagctcatacaaatttacgagcatgcatgtttaattaatttattcatgcatatctatgttctatcgttaactgctgcatcttgtctgtttattctttcttttccactgatttcatttcaagtcaaatgaggcttatgtaccattatattgtatcatgtttgaatataataaaataactttcttacggac

SEQ ID NO: 7493 - DNA, 1151 bp, Oryza sativa
  ref <308>: DATABASE ACCESSION NUMBER: AK064620
  ref <309>: DATABASE ENTRY DATE: 2001-12-06
attaacgcaagacacacacatcgacacatcgtgtccatcggagcacaggagagatggccggacacgacgagctgaagctgctcggccactggtcgagcgcctacgtcaccagagtgaagctcgcgctccacctcaagggcgtgagctacgagtacgtcgaggaggatctccgcaacaagagcgacctcttgctcgcctccaacccggtgcacaagacggtgcccgtgctcatccacaacgggaaccccatccgcgagtcgcagatcatcgtgcagtacatcgacgaggtcttctccggcgccggcgactccatcctccccgccgacccatatgaacgcgccgttgctcgcttctgggccgcatacatcgacgacaagctactggcgccatggaagaaggtattcagggccaagacggaggaggagagggccgcgtggatgaagcagatgttcgtcgcggtggacgttctggagggaggcctgaaggagtgctccaaggggaagggatgcttcttcggcggcgacagcgtcgggtacgtcgacgtcgtgctggggggtgccgtctccttcgtgcacgccaacgacatgatcaccggtggaaagctcttcgacgctgcgaggacgccgctgctggcggcgtggttggagcgcttcggcgagctcgacgccgccaaggcggtgctgcaggacgtcgacagggcggtggagcacaccaaggtgcggtacgcacggaatgccgccaccgccgcaaacgactgaattagttaagttaaacaggcgtggctacgtacgtgtctccggctggctagcttgctcggacaaatgtacgtctggattagattagattgctcaatattttcactagctgttgtcgttacactactatagaaacacacatgcatattgacactatataagtgccggaacagccaaaaccgacacatatagtgtttctcccatctctacgggctgaaaattaaaaaaaataggaacctttaaacaaaggtgctggttttagagaaaaaccggcacctatactacatgtatctttttttaaaggtacctacaatatattattggtgtcggcttttaattaaccgacacctataatatactgtaggtatcagtataccatagattattagttctttc

SEQ ID NO: 7494 - DNA, 1073 bp, Oryza sativa
  ref <308>: DATABASE ACCESSION NUMBER: AK064621
  ref <309>: DATABASE ENTRY DATE: 2001-12-06
aaaaaaaaacattaaaaaaaagagaaaaaaaaggccgaggcgaccgggccgcggcccgactccggcgaggtcgtcgaccaaggccgccgagattcgtcgggatttctcgccaaaaatagcaaaggcggcggcggcggcggcggcggggatggggatggcgcgggcgcgggcgcggcggttgctgccgctgctcaccttcgtcacgctcggcatgatcctaggctctttacttcagttagcgtttttccgccggatagatgatcactcaaatgtaacacatttggagaatgatcaagaagcagcttttctccgtctaggattggtgaagcctgaagtcatcagctggtcacctcggataattgtcttccataactttcttagttctgaggagtgtgattatctaagatcaattgctagaccaagactacagatttccactgtagtggatgtcgcaacaggaaagggtgttaaaagtaatgtccgtacaagttctggtatgtttgtgagttctgaagaaagaaagttaccagtcattcagtctatagagaagaggatttctgtgtactctcagatacctgaagaaaatggagaactcatccaagtattacggtatgaaccaagccaatattacaggccacatcatgattacttttctgacactttcaacatcaaacgtgggggccagcgagttgcaacaatgttgatgtatttgactgatggtgttgaagggggtgaaacccattttcctcaggcaggagatggtgaatgtagctgtggcgggaagatggtcaaaggattatgtgtcaagccaaacaaaggagatgctgtgctattttggagcatgggactcgatggtgaaacagactcaaacagcattcatggtgggtgccctgttctggaaggggagaaatggtcagctacgaaatggatgaggcaaaaagaatttgtttgagcgaaagatgaggcgaagaatgatgccttctaatttctggctatgcagatatggagctatattctttctattatatgtaatgaaacgtttcaggaatcttgcaagcatatgaaagttcaat

SEQ ID NO: 7495 - DNA, 781 bp, Oryza sativa
  ref <308>: DATABASE ACCESSION NUMBER: AK064622
  ref <309>: DATABASE ENTRY DATE: 2001-12-06
atgcatttcatcgaacaccttgctatcactctctcaccaccgctagagatcaccattgtgaggctccccggccagagctggaggttggagggagtgggggaggttccgtgctgccgccatcgccattgggggagcagaggaccgctggacaccgggaaccacgcgtcgaacactttcgggcgtcaccaacagctagccgcctctgcttcgtccgcaccgcaccacgcgtcaccgcccttcgccgtctctccatcccgggccgccgttccgccgccgacgagctcaccgtggacaggccatccccggtgctcttcctcccatctttctggagaaatagaacgcccgtacgccgtatatgctcacgcactcatcaatttggtcggaaacccttcctgtcgtcctagccacttgtagccgagctcggctatggcgcagccatggcggccatgcgccccgtccctccaagcgccgccgcagccggtgggtggtcgccggagcttctccgcacctcccctggccgccgccgggtcgccctcggccggccttccgtgcgcgccgtgttcccctgctgctcccgctcggtcgagaggaagaagacgaaggttaaagacgaccttcagccgagccactgacaagctgtcccccactcctcctatttcctttagaaacttaatcctgtgaaaaagaaaatcaaagctttgaccccacatgtcagcagcggttagggataaggatatattttagattaaaaataaatgaattatgaacagtagcttttcac

SEQ ID NO: 7496 - DNA, 1687 bp, Oryza sativa
  ref <308>: DATABASE ACCESSION NUMBER: AK064623
  ref <309>: DATABASE ENTRY DATE: 2001-12-06
aaacagaaaccctctaaacccatggcaccgcccacgcccggcctctcggccgccgctcgcctcgtcatccgccgcttcctcaccaccggcgcggaggccgcggaggcggtggctccccacgccgcgagggcgaaggggaagaaggacaagcggccgctgggtcggcggctgctggagctcggggacgcggcgggggaagggagcgtgtcgcgggtgctggacgagtgggtgcgcgaagggcgggaggaggcgatcgccgcggcggatctcgccaagtgcgccagggatctccacaaggtcaagcgcgacgcccacgccctcgagttgatggattggatggttaatacaaagggtatgagcatgacatatgctcgatatgcattgcatttggaactcctttacagtgtgtatggcattgaggctgcagaggaatacttttctggcatcccttcttttactcgagaccagaaccatcgaacttatggtgcacttttgaactgttattgctctgctaaaatggaagagaaagctacaaatatctatcgcaggatggacgaacttggcatcccatccagtactaagctcatgaataacctgatgggcctttacctggagctaggccaacatagcaaggtggctaacctgtttgatgagatgaaagagaggaatgttcaaccggatgagctcacatgctgcattctgatgcgtagtcatgcagcacacaacaagatagatactgtcaaagagactttttacaacatgtcactattagatgtgcctaaacaatggtctatatttagaacactcggttccatctatatgaatgctggtatggttgaagaggcagaattggcttttatgagagctcaggaatttctcggttttgatcatggcaggcaccctttttatttccttatgaggcaatttgcatcaataggcaatttgagaggggtcaacagagtgtggaaagacataaaaatgactttttcttataacaggactaacttcagctacctcctcatgtttcaatgtctctataaactcggtgacaccgatcggatgaaggagatttataaggagtgggaatatcgttatgaaaactatgacccgaggctgacaaatatgttgacccgagctcatctaaggaatggcatgaccaatgaagctgaattgttgtgggagaaggtcaaggaaagaggtggtgatttcgatttcgaaacatgtgagctgtttcgggagcattacttggggaaaggggacacgacctccgctttgaaatgggctgaaaagatgaccaaacttcccaagaaacaagggaagcaagatcaggagacctgcaagttcttgaagtggttcgaagaagacaaggttgtggaaggtgccaaaagtacctgcaactgcagcaactgcttgaggaatgcggacagcgagacatgtgaacccctcctggctcctgcagacctactccccgactgacaagacaagccgttcgctgcttcaacggatcaaagaagattcaattgaagtgtttggtagtccatagaagtttttttttcacatatctgaaaattgcaaaattaaccgatccacgcatctgataacgatactttgttttggaaagtacccaaataatgtaacttacttcctccgttttataatgtaagtcattttagcattgcccacattc

SEQ ID NO: 7497 - DNA, 977 bp, Oryza sativa
  ref <308>: DATABASE ACCESSION NUMBER: AK064624
  ref <309>: DATABASE ENTRY DATE: 2001-12-06
acgaacggcggcgatggaatccgacggcgaggaggaggccgcggcgaccccgggggccggcggcgcgccggcggcggggaggctgaagggctgcccggagctcatggtggacgacgacatgcgggagatggcgaagacggccgcctggagcgtcagctcctgcaagcccggcaacggcgtcgcctccctccgcgacgacaacctcgacacctactggcagtcggacggggcgcagccgcacttggtgaacattcagttccagaagaaggtgcagctgcagcttgtcgtggtgtatgtggatttcaagctcgacgagagctatacgcctagcaagatctctgtccgggccggcgatggcttccacaatctcaaggaaattaaaactgtggagctttcaaagccagttgggtgggttcatatatcattatctggagctgatccccgagaaacattcattcatacatttatgctccaaatttcggtgttgtccaatcacttgaatgggagggatactcatattcgacagatcaagatatatgggccaagaccgaatcatgttccccatcagccatttcacttcacttcaagggaattcgtcacctactctactgttaggtgacagctgactaatttaattccgtggaaccctccacattggagcttttgttgaagattttggatagctcagcacacatgtgaacagattgtgtggtcgatcccattctctgtgcttcagaattcagtctcgcatgatgtgcacccagaaatcaacactggaagaagcatctgaagcatcaagtctctcattgcctttccggagaattgctgtatttttaatatgtagaaaattgatattggattcatctgtgtgtacgagctacattttcgtccatggagtgtaacattatcctcctctcgtgtgcaagagaaggttatttattcattgatattgaggatggctgatgcttatggtcttg

SEQ ID NO: 7498 - DNA, 805 bp, Oryza sativa
  ref <308>: DATABASE ACCESSION NUMBER: AK064625
  ref <309>: DATABASE ENTRY DATE: 2001-12-06
caagctcgactcccaggacctccttcagatgggggacgcccagttctacttcctcctccccacccgctccgtcttcgccaccgacgccgcacgccgcgcctccgccgccgcccggcgcgctgtcccgccgcctccctcctcctcctccgacggcgatgatggggaggaagaacgcgaagcggcggtggctaagcggccgaggaacggagacgccgggtctctcgctggaaggaagtctgagaagggatcaaaaggttacagacaatcagataacctacaactcttgcagttggaagagaaagatgttatctcatcaacagctactgtcttatctgatctctgtggacctcaggaatgggtgcctatggacaggcttcatgaagtgatgtttgagaaatatggcgacttgtggcaccacaacagggtgcggaaatatttgacatcagaagactggcccaagagcgaaactgatggtagaccgtggcacgggctctctctgctgctaaggaagtaccctgagcattttgtgataaacataagaatgtcaggggggcggagcattgagtttgtctctctggtttcgctgcaaccctgactagttcgtagtgagtcgcatcctgtgtgggacaagctttggagcgtatgtttcgctgctcttgtaaacagcaaaactgaagttagcaacagggtaggaaagaatcctacaaaggttttgtttttgttttctcggcggttaaattggtagatacatagagtgtagggcaattttacctgtgcattatcagagtgcgaaagtttacctttc

SEQ ID NO: 7499 - DNA, 1563 bp, Oryza sativa
  ref <308>: DATABASE ACCESSION NUMBER: AK064626
  ref <309>: DATABASE ENTRY DATE: 2001-12-06
gaagctgcaacgcaaccgccgcctccgccgctggcgcgctggtcggcggcgatggcgggcggcgctggggggccggaggatcttgggaagccggagctctctcccctgaggctgtagcccgttgctgtagccgcggtagtgctgtagtggggaattggagggggggcaaaagggagatcgtgctgggatgggggcgagcctgcacgcgtcgtgcttctcgcggcgcaggagcccgaagacgagggcgaggtcgtcggagggtgcgaggctgccatggccggcgtccttgcgaggaaatatcaacaggaacattctttgcagatggagatggaattgtgtacatgcaggtgataattggggatgcatttttatgtcggaatggaagaattgagtagttgtttgcaaccttcagtacaatctactggtgagtagtttgtcttgtttgagtctgacagtccgtacgagactatgtcaagatcaataaaagcatgcaatctattcatatgcataattagctagatgactttgtacctttgcaggtaatttgtttcattacagatgatgcagttttgggactgatgatgaatgataagttagctagctagcaaacattagaagctaattttaaagttgctgaacttccgtagtaactaaactctgaaatacactatctaaagtatgtgacactgcctgataaaatgttaaggaagtgtaagcatttcttgatacaaatgctctctcttatttgctgatgatctaatctaatatttattttgctccatataattcatgctcatgttagtgaaggtataaattgcgagcactttcaccattaggcattaagtgctttagcctgtgttgctttacttttcctgtgaatattatccacacctgattatttaaatcataccctttttgataagcatggatgtagtctataaattctataagataaagcttaagttcagttttgttctgatagtacagattagataaagatggcatcgattcttatctctgtctatcgttttttctttcctgtctagtatccatcttcaatgtcttttagcaaggaggaacgaagaaaagaaacatattgtatatcttaccttttatttttgcttatcttggttctaccatcaatgcttgcactattttgtctttaccaatggaaaagcgaagcactgcacatgtgtaagttaaaggaactcttttggcttacttctgcaatttcttaagtcttaacatgatataatggcttgatattgttgagttgccagttttgtaatagtagtttgagtcatatataagtatgcattcatttttggaaaaaaaaatatggaaagatgagagggtgagaagtgagataggacgtgggttttctcttttgatgaagaatctagcaaagtgaagctgacaagcatagcacagatcaacggtgcttttcctctttgctttgacaaataccaaataaggctaacaccgatggtagcttcaaaacaagaagatcatgtaaattcatccttgttatcaacaaattgcatgcattatcactgagaaaat

SEQ ID NO: 7500 - DNA, 899 bp, Oryza sativa
  ref <308>: DATABASE ACCESSION NUMBER: AK064627
  ref <309>: DATABASE ENTRY DATE: 2001-12-06
taacccggtgtaagcaagcaaaaaaatggttaagctaatcagcgccttcgggagcccattcgggcaccgcgccgaggcggcgctccggctgaaaggcgtgcagtacgagctcctcctggaagacctccgcagcaagagcgacctgctgctcgcccacaaccccgtccacaagctcgtccccgtcctcctccactccgacggccgctccgtcgccgagtccctcgtcgtcgtccagtacgtcgacgacgccttccatggcccgcccctcctccccgccgacccatacgctcgtgcccaggcccgtttctgggcccaattcatcgatgataagttctcgaggccgttctggctgtcgttctggatggaggacggggagaagaaggaggcgttcgtgagggaagcgaaggagaatctgcggccgctggaggcgcagctcgacggcggcaacaagaggttcttcggcggcgacgccattggcctcgtggacatcgccgccagtgggctggctcactgggtcggggtgttcgaggaggtcaccggcgtgagcttggtgagcgagcgggagttccccgcgctgtgccggtggtcgcagcgctacgtcaacgatggagccgtgaggcagtgcttgccgagcagagatgaactcgtcgccttgttcactgcaaacaaagaggcgtatacactgctggccaaggcaaagttgcagaaataattttattactcgtgaatttcgatgctggaatatgcgtatgtgtttctttttcaacatggaataaattgctaataaattatctgttctggtatctgcaatttattagctactgtttttcaatgtgtcgttgtaagattgtaataagaagtactagcagtaataaattaagatgaaactttgtgatggc

SEQ ID NO: 7501 - DNA, 843 bp, Oryza sativa
  ref <308>: DATABASE ACCESSION NUMBER: AK064628
  ref <309>: DATABASE ENTRY DATE: 2001-12-06
ggcttggaccactcaccgatcaatccgtctcgtctcgttccactgcttcaccgcgagcgaaaggggagagttggggttttgcgagcgagatcgagcgatggcgacggggagcggagcagcggcggcggcggcggcggatgcggaggagaaggagagcggcagcaggatgatcaccctgacgagcaacgagggcaaggcattcgttgtgacggaggcgtcggcgaggcagtccgcgaccatcaggagcatggtcgacgacggcggctgcgtcgacaagggcttcccgctccccaacgtcgactccaagaccctcgcgagggtgatccagtactgcgacgagcacggcaacaaggagccccacaccgtcgacgagagagcggcgctcgccaagttcgacagggacttcatcgccgagctggacgccgacaaggccttcctctacgacgtcaccatggccgccaactacctccacatccaagggctcctcgccctcaccacccagtgcgtcgccgacaccatcaagggcaagacccccgaggagatccgcacggccttcggcatcgagtacgacctcaccgcgcaggacgagaaggagatcaaggaggaggatactcacgcatgacgcaccagctagctgcccccgtaagccgtagtgtcctcgtcgtaacgattgttctctcgtagttgcgcgttgtgtctctggtggattcagatccaatcaagcttactgcctttgagttcgtgcatcctgtgtccaagtagaagtgtagaactgagtcggctgtgtcgttgaatgcttttgcaactgctggatcgcttgcatgaagtgaatattttgccccg

SEQ ID NO: 7502 - DNA, 796 bp, Oryza sativa
  ref <308>: DATABASE ACCESSION NUMBER: AK064629
  ref <309>: DATABASE ENTRY DATE: 2001-12-06
ccaaatccatcaccatcaccagagaaagagagaggcgaggaagaaggaaggctagggcaagatggctctcggggctctcctccgccgcgcccgcgcccttcccctcctgccccaaggcaccgccgcgcgctccttctccgcccccaacgtcggccacttctccgcctccaacaccaaacacgccattcagcgatgtcgggaagcactgcttgaagaattgatctggaatgaggtgtatgccaagcacaatgaagctagagtaaggcgccttatcaattcgcttgtgaggtcgctcggtgatgttccaaaacaaaagggtttcactaagacattttctcaagaatttgggatggttgtgaaggaactagaaaaggatatgaatatgagttttaaatcattcaaagtgccactacgaaggctcatcctcaggactttggacaagtatcagcagcagggaagtgatgctttactgaagaattctctggaatccaaagtgcacagcagccactggggagatgcacatgccaatcctaatttctggactagagcattcggactaagcctcctcctcagcttcttcagcttcgaagttggacaacaatatgagattctcaatggagagggagagcttccaaagtgatgatgtcaatttaatgcatgcatgtagggatcagaccagttggtgttttgtaatactaatctatacctagaggcattgtcaccttggtgtcaatgatttgcccccctttcatatgaacaattagttaatgatttaacgtgtctgacaacttccgac

SEQ ID NO: 7503 - DNA, 574 bp, Oryza sativa
  ref <308>: DATABASE ACCESSION NUMBER: AK064630
  ref <309>: DATABASE ENTRY DATE: 2001-12-06
atcgtaaaccattgcttccgaatcaatctgggcttgcccatatccatactgagctgcaaagttcatcgtggccgtttcctcaccatgcggcccagtaaatcggcccgtcacatccaccccacttcgctttcgtcagagatcgccgccgtcgccgtcgccgccgtcgccgccgccgccgctggatggaaccggatctgcctgcgcgtgctcgatagcttgcaagaccgatcagttggcgaatcctgaatgccgcagcggcgcagccgcctcggctgcttcccgtcgggcggcgctcccttggaaggatggggattggttccgttaacgcagatggtgcgtatttcttcaggccttagatccatgagagttccagtgcgccattgattaatagggtttatccagatctccactgtggaatgtggattgtgattgagagtattgcttcctggttggtggtggtgtgcaggtttcgccttggcctggggctttccatgaataaggcggcgccggcgtgctttgctgctttggacaacgcagcagcggatgcccttcaaagttcaaactcgtcacctgt

SEQ ID NO: 7504 - DNA, 840 bp, Oryza sativa
  ref <308>: DATABASE ACCESSION NUMBER: AK064631
  ref <309>: DATABASE ENTRY DATE: 2001-12-06
gatgacatatgatcccatttcccacttccctcgtagacaagcattcccaattccccatcgggcaacggctccggtgcggcggtgcccaacccgtactactccttcaggctcgtgatcgacggcccgtacgtggagccgtcgtgccgcttccctctggcgcctgcggcggcggcggcggtggcgcgctgctgctcgtgctggaagtcgcgccggatggaccagaggacctcggcgcaacgccgcatggcagggcgcgccgcgcggtccggcgcggtgcactcggccgccagcgccatcactttctccatggccgccaccaccgcgctggtcctccgcatccgggcgtccatcgccaccaccgcgtcgccgtcccggcacttccgcagcgcctgcgtccacacggtaatttcgtcgaacatctttcgtgcaacaacttgggaaacgttaaacgtggcagttaggatgtggtttttacccattgcgtggtgaggcgttggtggcggccgcggccgcgctcgatggggcgtcggccggtgaggagctccacgaggaggacgccgaaggagtagacgtcgctgcggtcggtgagttggttcgtccgcatgtactctgggtctacgtatcctgcagtgcccttcaccattgttgagacgtgcgttgcttcagtgttgtcaggcgctagccgtgcgaagccgaaatcggccacctttgctctaagttgatcagttaggagaatgttggatgacttgatgtcacggtggatgattggatggtctgcatgcccaattgcacattgttgtgaaatgccatcagaaattagaacgctagcaatttggtatc

SEQ ID NO: 7505 - DNA, 1134 bp, Oryza sativa
  ref <308>: DATABASE ACCESSION NUMBER: AK064632
  ref <309>: DATABASE ENTRY DATE: 2001-12-06
aactaaccacgccacgtatgccgggtcgcacccaacccaaacccaaaggtcgctaggaactcgctactactcccacccacccaccgatcatgttcgcgccgacgttcgcggtggccgccgctctggcgccgccgccgcctcgaggaggcggaggcggaggaggggagttcgaccacttcgtggtggtggacttcgaggcgacgtgcgagaggggcaggcggatctacccgcaggagatcatcgagttccccgcggtgctcgtggacgccgccacgggccgcctcgtgtccgcgttccgcgcctacgtccgcccgcgccaccacccgcggctcaccgacttctgccgcgagctcacggggatcgcccagggcgacgtcgacgccggggtgggcctcgccgaggcgctcctcaggcacgacgagtggctgcgtgcggccggggtcgtcgagggcggcgggcggttcgccgtcgtcacgtggggcgacgccgactgccgcaccatgctggagcaggagtgccggttcaagggcatcgcgaagccggcctacttcgaccggtgggtcgacctcagggtccacttcgaggcggcgttcggcggcggcgggcagcgggtgaagctgcaggaggcggtcagggcggcggggctggagtgggtggggcgcctgcactgcggcctcgacgacgcctgcaacacggcgcgcctcctcgtcgagctcttgcgccgcggcgtccccatctccatcaccggctcgctgccggccgcgccgccgccgcttgagcaagctcgtaagcagcagcagcagcaggagatgcagcagctgctcgtcccgtgcggcgcggcggtgtgctgctactgcggcgtggcgagcacgggaggggtgatggcgatgccggggtcgacgcagcggcggtgcttctacggctgcggcaactggacggcggtgtccggggcgacgtgccccttctttctcatgggcggcgtagtggattgtcctataaattagcaactctgtgctgggaattcttacacacaaaaaaaaatattatgtaatcaaattacaacagatagccttttttcatgttcagtttcagtttctgatctaaatgaaattataggagtaccattttttgctg

SEQ ID NO: 7506 - DNA, 1164 bp, Oryza sativa
  ref <308>: DATABASE ACCESSION NUMBER: AK064633
  ref <309>: DATABASE ENTRY DATE: 2001-12-06
gacgcgttattcagctgcctatagtagtagctagctaggtgagatcgaggggcaatggagttggtggtggcggtagcaggtgcagtagtcgtggcactgagcttgtgcattggaggtgtgcaaggtcagctccaggtagggttctacgaccaatcgtgcccccaggccgaagtgattgtgagagacgaggtcggcaaggccgtgagcgccaacgttggcctcgccgccggccttgtccggatgcacttccatgactgcttcgtcaagggatgtgacgcgtcggttttgctggattcgacggcgaacagcacggcggagaaggacgcgataccgaacaagagcctgagggggttcgaggtggtggacagcgccaagcggcggctggagagcgcgtgcaagggggtggtctcctgcgcggacatactcgccttcgccgccagagacagcgtcgtgctggccggcggcaccccgtaccgcgttccggccgggaggagggacggcaacacctccgtggcgtccgacgcgatggccaacctgccccgtcccacctcagatgtggcccaactcacacaaagtttcgccactcatgggctttcccaggacgacatggtcatcctttcaggggcgcacacgataggggtggcgcattgcagctcgttcagctcgaggctgtacgggtacaactccagcacggggcaggacccggcgctgaacgcggcgatggcgtcgcggctgtcgcggagttgcccgcaggggagcgccaacacggtggccatggacgacggcagcgagaacacgttcgacaccagctactaccagaacctcctcgccggccgcggcgtcctcgcctccgaccagacgctcaccgccgacaacgccaccgccgcgctcgtggcgcagaacgcctacaacatgtacctcttcgccaccaagttcggccaggccatggtcaagatgggcgccatccaggtgctcaccggcagcgacggccagatccgcacaaactgcagggttgcaaactgagctaggcctcgcttgctgaacaacaacatttttgaagcctctacttgttcctatcatcagagtttttgttcttcttttgtctctatgctttaatttgtcaaacggcaaaaattcaatggaattacgcattggttttgaact

SEQ ID NO: 7507 - DNA, 727 bp, Oryza sativa
  ref <308>: DATABASE ACCESSION NUMBER: AK064634
  ref <309>: DATABASE ENTRY DATE: 2001-12-06
atcagcacggcggatgagtgggcgcagcttcagcgcaccggcggcacccttggcggtgacctcgaccgctccaccggctgtatccacctcagcgacctcggtcaggtgaggaaaacgcttaagaactttttcctaggaaggaatgatctatacctactacaagttgacacttccaagctttcagatggcttagtttatgaggcagctgatgattcaaactattttcctcatttctatggccctggtcggagttttgcacctcttcaactagacgctgttatcaaggaggcagagaaaatagttctggtaaacaatgatttcacctgcagtctacttgatggagcagaccccttatcgtgatgtgtaagggtgacctttcccttgatctttataatgttttgaaaaattcgctacaggacgctcaaaagtttgcagttatttgtaaaaaaagctgcaaaaatgcaaaaatattactgctccatatctaacatctccaggaagttgaacctggtatattccaaggatcatagtaagggcagacatattgtatgcatcatatttataaacatcattgcatattcttcagtagccttaactgtatgccaagagacaatcttattttttgatcaccccaccaaattaatgtgaagaatgatagctgtataatctctaattcctgttaaaaagggtgcaaacttgaagtattgattagttctcaaatggttcc

SEQ ID NO: 7508 - DNA, 876 bp, Oryza sativa
  ref <308>: DATABASE ACCESSION NUMBER: AK064635
  ref <309>: DATABASE ENTRY DATE: 2001-12-06
accaagaggaacccattaacgcaagacacacacatcgacacatcgtgtccatcggagcacaggagagatggccggacacgacgagctgaagctgctcggccactggtcgagcgcctacgtcaccagagtgaagctcgcgctccacctcaagggcgtgagctacgtgtacgtcgaggaggatctccgcaacaagagcgacctcttgctcgcctccaacccggtgcacaagacggtgcccgtgctcatccacaacgggaaccccatccgcgagtcgcagatcatcgtgcagtacatcgacgaggtcttctccggcgccggcgactccatcctccccgccgacccatatgaacgcgccgttgctcgcttctgggccgcatacatcgacgacaagctactggcgccatggaagaaggtattcagggccaagacggaggaggagagggccgcgtggatgaagcagatgttcgtcgcggtggacgttctggagggaggcctgaaggagtgctccaaggggaagggatgcttcttcggcggcgacagcgtcgggtacgtcgacgtcgtgctggggggtgccgtctccttcgtgcacgccaacgacatgatcaccggtggaaagctcttcgacgctgcgaggacgccgctgctggcggcgtggttggagcgcttcggcgagctcgacgccgccaaggcggtgctgcaggacgtcgacagggcggtggagcacaccaaggtgcggtacgcacggaatgccgccaccgccgcaaacgactgaattagttaagttaaacaggcgtggctacgtacgtgtctccggctggctagcttgctcggacaaatgtacgtctggattagattagattgctcaatattttcact

SEQ ID NO: 7509 - DNA, 1222 bp, Oryza sativa
  ref <308>: DATABASE ACCESSION NUMBER: AK064636
  ref <309>: DATABASE ENTRY DATE: 2001-12-06
ctatcattgttgccgccatgtcgtcgtcttcctcattgtacaagcagctcggcctcggagccggctctcccgtctccgcctctcacctgcttctgctcgtcctcggcgccggcttcctcgcgctcactgtcttcgtcgtccaccccaacgagttccgcatccagtctttcttctccggcggctgcggccgtcctggcacggacgccgccaccgccgccgttgctgcctcgccggtcaagaatgtcagcggcggcgcaagtgatgctgctgccgcgaccacagcggcgcggtcgccggacaacaacgtgagggtgctcatcggcatccagacgctgccgagcaagtacgagcggcgcaacctgctgcggaccatctactcgctccaggccagggagcagccgtccctcgccggcagcgtcgacgtccggttcgtcttctgcaacgtgacgtcccccgtcgacgcggtgctggtgtcgctggaggccatccgccacggcgacatcatcgtcctcgactgcgccgagaacatggacaacggcaagacgtacaccttcttctccaccgtggcgcgcgccttcaactccagcgacggcgagggctcgggctcgggctcgccgccgccgccgcggtacgactacgtgatgaaggccgacgacgacacgtacctccggctggcggcgctggtggagtccctgcgcggcgcggcgcggcgcgacgcgtactacggactccagatgccgtgcgaccgcgagaacttctacccgttcccgccgttcatgtccgggatggggtacgcgctgtcgtgggacctcgtccagtgggtggcgacggcggaggagagccggcgcgaccacgtcgggccggaggacatgtggacggggcggtggctcaacctcgccagcaaggccaagaaccggtacgacatgtcgccgcggatgtacaactaccggggcgcctcgccgccgagctgcttccgccgcgacttcgccccggacaccatcgccgtccacatgctcaaggacgccgcccgctgggccgagacgctccgctacttcaacgccaccgccgcgctccggccatcccacctctgaaccgtgttcttcttcttcgcgccttctctctctcgatcgttttcgtgacggattcccgttgaatttggcggttgttggttggtggcgggtagttgttgcgcgaaagcacggtggattgcccctgtgttcct

SEQ ID NO: 7510 - DNA, 637 bp, Oryza sativa
  ref <308>: DATABASE ACCESSION NUMBER: AK064637
  ref <309>: DATABASE ENTRY DATE: 2001-12-06
gtttccatctcctccattcccatccgcccgcatctccactcctcctctccccacctcctcatcaagctagctaagctagctctcccaaccatggctggcgccggcaccgtctgctccatgtgcggcgacgtcggcttccccgacaagctcttccagtgcgcgcgctgccgctaccgcttccagcactcatactgcacgaactactacggtgacgcggcgcccgccccggccggcgccgacatgtgcgactggtgcctgagcgacgtcgccgggaaggcgaggtactcgtcggcggccgggaagcagcagggcgccggaagccaggagtcatccacgacgacgtcgagctcctccgccggaaggggtggcggcggcaagcccggcgccggcgagcaggagagcgggcggcgggggaccaaggcggccggccgaaggtacaagctgctcaaggacgtcttgtgttagtttgtttgtttaggtcacccatgccgtcacccagtactagtcgtcatcgcttaggctatatagactcgttagctagccgctagtttgatgatcgatgtgcatatactacgtgcgtactccatattgtatctagttgtgtgtgttagggtcttttaagggggcctgttacctg

SEQ ID NO: 7511 - DNA, 1495 bp, Oryza sativa
  ref <308>: DATABASE ACCESSION NUMBER: AK064638
  ref <309>: DATABASE ENTRY DATE: 2001-12-06
gaatgagatattcttcactgctcaatgggtttaatgtacaaaatacaatatggtagtagtgcttggaactagtacaaatctttgcccagtccaccccaaaactagagtgaagatgaagaacactattgcgacaagaggttgtatcctatatgagatacatccaagtttgttatgaacctaagctaccttgatgatgaatcacgtactgggcttcgcagaaatgaatgttccacctcttatctgcccttgcctgaccacatttgcagggtacctgaaacctgggggcatgggcatgccgtgctgcggatggtgttggggcatgccatgctgctgtggatggtgttggtgttggtgttgttgatgttgctgctgatgccctttgccgtctcccttgctgtcgttcttccatgctgcaggtttccctggggtgaacttgatctcgaagccgtcgtcgatgtcgtggatcatggcgcgggagctcgccatcggcttcatcaccgggtacttgatctcgaaccccttctccaggtcgccgccgacggcattgatgccgtagaactggtcctcggcggaggccgccctcttcttggagagccgccggccgcagagccggccgacgacgcaggcggcgacggcgaggaaggtgatcacggcgagcacggtgaacaccgggccgaacgagcccctggacgtggtggccggctgcgcgtgcatgatggagttggaggttgggtagtaacccatgggctgaggaaatggcttgtgtgatggaatggaagtgtctccttgagctcagaggcaggggtggtccttttatgatggaggagatctttgaacgcattggggcgcgagaaaggcgagtgctttgggatctctttggagcagttcaatgcgagcttggaataacgtctcggtatgcagccgcagcctgccttcctgcctgttctctctctcactcactgttttcttccgtgcttttgcttttggacgttgcattggatcaaagcaaccgtcgcagcagggagaaggcccggccagcgacatcacatcgctttggcttcctttgattgctttcccaccttcgctttagcagattgtgggggcaacgaggaatgagcgccagggccactagactggtcgcctttcttgggcatgccgatggatggcagcagcagcttgccgtcgccattggcatgttgctgcctcctcctcctcctccaggcccctccttcaaattccctgaggtgacatcttgggggcctgttcatcataaggttttgctcttaccatgatttgttttcggtgaatgctctggctctcgattgaacagggtaggtgaactcgtgggcagtattattaggtctagcgtatgtacgaatagctacgtggaactcgttatgatggtcgatcgttgagatgcactctagtcctactgctagaaccaacgaggagttttagatgacgttgcagtctcctgtgatcaagtgtcgttttc

SEQ ID NO: 7512 - DNA, 1275 bp, Oryza sativa
  ref <308>: DATABASE ACCESSION NUMBER: AK064639
  ref <309>: DATABASE ENTRY DATE: 2001-12-06
tcgtgttcctcaacaaaacggtgttgttgaaaggaaaaatcgtgttttggttgagatggctagaacgatgttggatgaatataaaactcctagaaaattttgggctgaggctattaacactgcttgttatatttcaaatcgggttttcttgagatctaaacttggaaaaacttcttatgaacttcgatttggtcatcaacccaaagtttcacatttgcgtgtttttggttgcaagtgctttgtcttgaaatctagaaatttggataagtttgaggcacgttctaccgatggattgtttcttggttaccccgcacatactcgtgactatcgtgtacttattttggggactaacaaaatcgtggagacttgtgaagtttcttttgatgaggctagtcccggtactagacatgaaatcgcaggtacactgtcacaggttcaggaggaggatggtcgtatttttgaagacgagagcgactacgacgacgacaacgaggtcggctcggccggtcagaccgggcgccaggccggtcagaccgccggcacacctccggtcaaaccggcgcatgacgtgcggtcagaccggccagggtcgtcggctgagggatctgttgatgctgatcgagatggtcctccggagattacaacttcgaccagtacggatacagaacgtggatcaacttcagaagttgctgctcctttgcacattcaacgacgacatccaccggaacaaattattggtaatataggtgagcggactacaaggtctaagattttgctgagactatgcgcagggaatttgagatgagcatgatggatgagttatcgtactttttgggattgcaaattaagcaaacacctcaaggtacttttgtgcatcaaacgaagtatacgaatgatcttttgagacggttcaagatggagaattgcaagcaaatttctacacctattggttctacagctgtgttggatcctgatgaagatgaagctgttgatcaaaaggagtatagaagtatgattggatctttgttgtatctaactgcttctaggccagacatagaatttgctgtgtgtttgtgtgcgtgctttcaagcttctcctcgtgcttcacatagtcaagcggtcaaccgaataatgaggtatttgaatcatacacttgagtttggaatttggtattctacttcatcttctatatgcttaagtggatattcagatgctgattttggaggttgttgaattgataggaaaagtactagtggaacatgtcattttcttggt

SEQ ID NO: 7513 - DNA, 1698 bp, Oryza sativa
  ref <308>: DATABASE ACCESSION NUMBER: AK064640
  ref <309>: DATABASE ENTRY DATE: 2001-12-06
atcggcgatcacactctcgctgccaccggtgaagtccaggctcgagcaagcgatgctccgccgccttcctccgtgcctccggcgagcgctccccgcctcctcctcctccacctccgctcctcgccgcggcgttcgcctcgcggagcatggccaatcccctcctcaatccgcgcccccaccgccttctccggctacgcagaaggacggcgcggtgcgtactccgggtggcggatccgccgcctcgtcgctgaaccccgccgaggtcgcccatttcgcctcctttgctgagacctggtgggatactgaagggctattcaagcatttgcttgtgatgaatccaacccgagtgtcttttatccggtccattctatgtaaacatttcaggcgggatccaaattcatctaaaccacttgaaggtcttaaaattattgatgttggatgtgcggctggcatgctctcggagcctcttgctcggatgggagctacagttaccggaattgatgctgctgacgaaagtataaagattgcacgcgtccatgctgcatctgatccattgactgcttccattgaatatctctgcacaacagctgaggacttggtaaaagagaacaaacaattcgatgctgtaatttgtcttgaggctgcaggcatcatcttcaagactctgaagttcagagattccttgtcaatttctgaacggggagcctttttgttgagttatataagtatattggagaatgctttggttgttttgtactcataatctatataacattctacgtgtgctcactttgttaccaatttactatacttggtacagtaaacattaaactatttcatttactccaagaagaactaaactattttacgaaccctcaatgacttatacaacaaatagaggagccatgtgtaagaaatctctggtatgcagcttacagcagaatattatagaaaatatacagcatgttgctcttacaagctttcttaatgaaaaataatttaccactgtgccgtgaatacagagtaaccttaatttatttgtaggtgattgagcatgtggataatccttcggagttctgtgggtctctgtcagctttgacagttcctaatggggcctttgtgatttctacaatcaaccgctcaataagagcatttgcaactatgatattttccactggattcctaaaggcacacaccattggtcaaaattagttacccctgatgagctagtgcaaatgctggaaaaagcctcaatctatgtacaagaaatggcagggattggttataatccatggcgtggagatttttccatgtcaaaggatactagtgtggattattttgcttatggcataaagaaagttgaaacaccctcagtagtgtcacaaactcaagcttagcacactgttagtacaaaggggaaaaaaagagatgatcctgaatcatcgggatcaggataattctgttgcaagaaaaacatgtgctatttgtatgtttttgtgcggactacaatcagatagcaaagtacagtgtacgtgtgtagtgtacacactgtagtggtgtgtgcatatatatcttccatgtaataaaacaaatagcaaatttaaaagctttttttttcatatactatctgttgagtactctctctttgtattaaatgaattctgaaggattttagttgaaattgaattatttattatt

SEQ ID NO: 7514 - DNA, 1071 bp, Oryza sativa
  ref <308>: DATABASE ACCESSION NUMBER: AK064641
  ref <309>: DATABASE ENTRY DATE: 2001-12-06
tgtatggttgctgccttgaaggcaaacatccactgctggttttatgagtacttggagaatggaagccttgataaagcactatttggaactgagaaattgaacattgactggccagcacgttttgagatatgcttaggcattgcaagaggtctggcttatcttcatgaagagtccagcatccgtgttattcacagggacatcaaggccagtaatgtcttacttgatgccaatctcaatcctaagatctcagatttcgggctggccaaacttcatgatgacaagaaaccgcatgtcagcacgaaagttgctggtacatttggttatcttgcacctgagtatgccatgagaggccgtatgactgagaaagttgatgtcttcgcatttggcgtggtcttattggagattttagctggccgaccaaactatgatgatgcgcttgaagaagacaagatttatattttcgaatgggcctgggatctgtacgagaacaacaaccctctgggcctcgtagacccaaagctcgaggagttcaaccgggaggaggtgctccgtgccatccgcgtcgccctcctctgcacccagggctcgcctcaccagcggccgccaatgtcgagggtcgtgacgatgctcgccggcgacgtcgaggcgccggaggtggtgacgaagccgagctacatcacggagtggcagctcaagggcggcgacaccagctacttggacagcgaagtcagctggcagtcgagctcggcgccgggaggaccggcctcgccgcggacctcgtcgccgttcttgagctccgtcgactaggatggcgtgtgattttcgttggatcaactgccccttaaactgaaagtggcagacaacttgttattctttcccttctgcgaggagcagataatttttttgtgtgtcgaaactgtcagtccgtgaggctgacagcctgtgaaagttgctttccaagtacaggccgtgcactgtgctactgtctatagaattttttttggataatgatagactattttatttgttcacttatacacaagaggaattattctgcttaattaccactcc

SEQ ID NO: 7515 - DNA, 992 bp, Oryza sativa
  ref <308>: DATABASE ACCESSION NUMBER: AK064642
  ref <309>: DATABASE ENTRY DATE: 2001-12-06
gcagactcaaaacttctccttctcccatggcctcatcagcatcctccgccacctcccttgcatcctcgatcacgccatgttctccggtgtttgcaaaccgtggcgatccatcgcgcagcagcagcagcagcagcacccgccgtgtaacctcccatggctgctcatgccgtccaccgccgcgacctcattgttctgcgtcgtctccgaggacacccaccgccccgggctcctcggcgacgcgcgctgcgcgagattctgcggctccttcccgggtgcctggctcgccgcggagctccccgagtcgcgcggccgcggccccgtgctgctcgacctatgcaccggcgagtgtgtcgccctcccgagaggctgtgaggccggagaatcttcctccgccgattctgcttcgtcaccgtcgacgacatcaggaagaggtcccccctgcccgctatgcatgtacttcctggtgctcgcccgcaacctcgtgctcatggtcatcaggttcgtctcaacgagggagacggcgtttgatgcgcttcaggctggagcacggcgacgggcagcagccgcctcactagaagaagctcgcaatcggcgcccctgagcggccggaggatcttcctcagacgaggctgctacttctccgtcgatttgtgcaacccctgcccgctccacatctacttctgcgacgccgccgcgagcttccatggtgcttggtgcggggacctggcacctggcgatggacttgggttttttccatcggctagaacatgcatagatggtctctgatccaaagattccaagtgatgagaaaactcacagagctctgatccaaagattccaagtgatgagaaaactcacagagctgcacctgtatcaggatataattttgtggacacgttcagtaatctgttaattcagggatggtaacgcttttagatttcccaatttgttttgagtgagaaatgaagaattaatgaatcgttgttactatc

SEQ ID NO: 7516 - DNA, 436 bp, Oryza sativa
  ref <308>: DATABASE ACCESSION NUMBER: AK064643
  ref <309>: DATABASE ENTRY DATE: 2001-12-06
cttccaccacaacgatgggcagcgtccccatccccctccgctcccccgatgggcggcgtccgcacgggaggcgcgtggacaggcggtggatcctgtgcttctttggccggatctagcctcccatggccggctctggccggtgtggtctgtgcctggtgaaggggaggcggcaagctcccgcggccacgccctcccctccaccagatccggtggccggcctcccgcggccggctcctgtgggcgacggcgctggggtcggttcgagtgctgatctagggttggtgtgttttttttatctctttcatgttctctcgtttaatttgtctcatatgtgtaccgagaatgaattgttgttattgacgtgattttgattttggatgtggggatattgatgtgtaccgagaaggaattgttgttattgacgtgattttgattc

SEQ ID NO: 7517 - DNA, 705 bp, Oryza sativa
  ref <308>: DATABASE ACCESSION NUMBER: AK064644
  ref <309>: DATABASE ENTRY DATE: 2001-12-06
aaaacaaaaccaaccgaaaacaaacattcctctgataattaagttatattatacttccaaagaatcatcgccatcatgagtgtggagatcctcgacggcaagacggtcctgagcttcgtggaggacgagggcgccttcaactcctccgtcgacggccgcttcgccgcgctcgacaccaaccgcgacggcctcctctcctacgccgagatggccaacgagctcatgagcctccgcgtgctggacaagcacttcggcgtcgacgaggccgccatgggcgccgacgagctcgtggagctgtaccacggcttgttcttgcggttcgaccgcgatggcagtggcgccgtcgacctggaggagttccgggcggagatgaaggaggtgttgctcgctgtcgccaatggcctcgggttcctgcccgtgcagatggtggtcgaggaaggcagctttctcaaggttgctgtcgacagagagctggccaaagcggcttgaaatatacctcaaccggcgagcaaattaattttcacatgtccatttacgattttggattgcttcttattgttcttacttcttgcatttgttgagctatactatgtatcgttttgatatttcagatgaaaacggtacatcgatagaacacttgaaaaatcctgtaccatttttatttctatttcattattataaataatcggaacacgacaactgatt

SEQ ID NO: 7518 - DNA, 579 bp, Oryza sativa
  ref <308>: DATABASE ACCESSION NUMBER: AK064645
  ref <309>: DATABASE ENTRY DATE: 2001-12-06
ctttttcgtgcttcggcgccgcgcgagtgaggagctcgagtcctcggcttccgctacagccgccgccgccgccgcctcctccgcctccgccttctccgcctccgccttctccgcctccagcccggctctaagcctgcgctgcccgccagcaacatgccactgcaagagaggcaatgggctgatcaaggtgaatgggcgaccactggagatgatagagcctcgaaccctgcaatacaagctgctggagcctgtcctcctgctaggcaaggaacgttttgctggagtggatatccgggtccgtgtgaaaggaggaggccatgtcgcacagatttatgctatccggcagtccatctccaaagccctggtggcctattaccagaaatatgtggacgaggcctccaagaaggaaataaaagatattcttatccaatatgaccgaactctcctggtggctgatcctcggcgctgcgagtccaagaagtttggtggccctggggcccgggctcgttaccagaaatcctaccgataaagcaactgctaggattgcggggtgtttgcaataaacttggtatatgacct

SEQ ID NO: 7519 - DNA, 1556 bp, Oryza sativa
  ref <308>: DATABASE ACCESSION NUMBER: AK064646
  ref <309>: DATABASE ENTRY DATE: 2001-12-06
tctgtcggttcggttcggtccggtcgccgccggctccggtgatcccctccgctgcctgcacgtcgtctccggcgagcgaccatgcggagctcgcaccagcctctctgcacgagggcccaccaagcggccgccctcctcctcgtcgccgccaccttcttcctcacccgcctgctcgaccggtccccactctccgctccgccgcccccctgcgccgcaccatacagtccctggccgcaccgcgacctccgcatctacgtctacgccgaggacgaggtcgacggcctgcgcgcgctgctccgcggccgcaacgacgacgtcaccgctgcaacctgcatcaagggccagtggggaactcaggtgaagatccaccagctcctcctcagctcgagatttcgaacatttgacaaggacgaagcggatctcttcttcgttcccacctatgtcaaatgcgttcggatgacgggaaaacttaacgacaaggagatcaaccagacatacgtcaaggttctcagtcagatgccttatttccgcagatccggaggacgcgaccacatttttgtcttcccaagtggtgctggagctcacctgtttcgctcatgggcaaccttcctgaataggtctatcatccttactcctgagggtgaccgcactgataaacgaggtataagcgcttttaacacatggaaagatattattatacctgggaatgtggatgattctatggtgaagtctgacaggcttgctgtcaaaccgatcccattaacaaaaaggaagtatttagcaaacttccttgggcgtgctcagggaaaagtaggccgtctccaactggtgaagcttgcaaagcagtatcctgacaagctggagtctccggagctgaagctctctggaccagacaaattgggaaggatagattacttcaagcacttgaggaatgcaaaattttgcctagctcctcgtggcgagtcttcatggacacttcgcttctatgaatccttctttgtggaatgcgtgccggtaattttatcagatgaagttgagcttcctttccagaatgtgattgactacactgaagtatcgataaaatggcctgcgtccaagattggcccggggctccttgaatatctcgagtcaataccagatggaagagttgaggaaatgattggtcgcgggcgggagataagatgcctatgggtgtatgcggcggatacagagcggtgctcggctatgagcgctatcatgtgggaactgcagaggaaggtgaggcgattccatcaatccgcagaaaccttctggcttcataacaggtcaatcgtgaacagagacctggttgagttccacgagtggaggacgcctgtcccactgccatgaccaccaccacccttactgctctgtacgtcttgacttgtcctctttctttccactggattgtagtagtagtagtaagtaatttttttagatagaggatgttgaatgcaatttttgagatagaggatgttgaattgcaatttttgagatgttaaacttgtagtactgttaagtaatgatcgatgcgatgt

SEQ ID NO: 7520 - DNA, 658 bp, Oryza sativa
  ref <308>: DATABASE ACCESSION NUMBER: AK064647
  ref <309>: DATABASE ENTRY DATE: 2001-12-06
agaaatgcaacaccggcggcggcgcggcggctctccctcccagggtagcggaggaggcggctgtgtaggggcggcgagctaggggaggggccacttgctacctcaccatggagctcgacgccgccgctgggagattcctcgccgggagatcgatgccgtcgcgcagcccaccgatggtttctctgttgctgtggtgcaaactagcgctgacaaaatggaaaggaagttcagtattgagctttatggcaggcacgcgatcccggaaggaggagtaagggaaagtgatgctgacaaagctgaaaggaatcgcgacgccggctcctttttccttcgtaaagatgaggaggaatatatcacctcttgaggagttgagagttgagtgcgcgtggctgttttgttctccgcttattagcctccttgttctcggcgccggcggtgctattcaaatgaacagcacgtgtgaactgttgtttgtgtaggtgggtaggttggctctggctatatgtgtgtaggttgtaaaagtgtttcaagttcttgtgctgtagtattaaacttgtgtccgaagaaagtgaaccggaacagcagtgttgggagtctgtatacagaccatagcttttctcttttctctttgaggcagttgtgtttctgcccttaattt

SEQ ID NO: 7521 - DNA, 1685 bp, Oryza sativa
  ref <308>: DATABASE ACCESSION NUMBER: AK064648
  ref <309>: DATABASE ENTRY DATE: 2001-12-06
acagcgagagagacgcttcgtttcgtcgaggttccgcgcgcgccacctgttcgacggaacgcccctgtgacacctgccgccacgcgcgcgccaccggcaactcgagcgtccacgcgcaccacctgttcgacggaacgccacaggacggacgggcgggtgatgatggagccggcttatgcccccggcagagacaggctcagcgccctcccggacaacgtcctccgccgcatcatgtccttcctcaacgcgcgccagtccgtgcagacgtgcgtgctgtcgcggcggtggcgccacctctggcgctccctgccacgcatcaacgccgactacaccgagttctgcttcgcctgcttggatgagaagaaagagaaggtgcaggaggcgcggttcaagaagttcgtgagcacgctgctgctacgccgtgaccccgtccccttgctggacaagttctggctcaggtaccaggtgtctgacggcaacaacaacgagaaagcttcagcagaagctggtctgtggatcagccatgcgttgcagttgcagaccccggtcgtggaggttctcacatttcaatttccattgatgctagaccatgctgtatttacctcagactacttgagaaaattgggcctctccaatgcttatctccgcatgggtttcttcgagcaactcagcagaggctgcccacagttggaagatgtgttcttgaatgattgcatcattctggatgatgagatttcctcaaccactctcaagactttgaacatctatgcttctcggttttcggaggactaccgtgcttctatttctactccgagcctcacttctctgacattgtataaacctgatgccagtgtaccttcactaaaggacatgaaatcactagtgtctgcttccattattctcgacgataatactgatatccatgagttgctcatgagcctttctggtgtcagaaatttggacttggagtgcccgcagaaaatggtctcaatcgcaaaaaatacgcaatggtgtccagaattcaaagatcttgtaaacctgagtctgggtcagttttgtctgggctcaaagttatatgcattaactgtcttccttaagaactcaccgaaactagagaagctgactctggacccccctgaggtaatcattgataagcttgaagaaagatcatttgaatgtgagcaccttaagattgttgaagtcatatgctcggaggatgatagtactttgctcaagctcgtggaggacatctttgttactagtggcatgaactctcttcagattaatcgcaaaagcagttacaagcagtactattcagatgatttttttcagatttgattacgacagtacgactgcacaagaacatgcggaatgacaaaaggatcatgcactcacttgtcactagtcgtcaatatgatcacgctgtttgtcggatgagcctaagtgcatgcatttcttcaattagaatttgaaggcagatagacatgtttactgcactcgtttgctgatatggcttgagaacaaacaagtgtgtcttgagttgcatgtaaggtctcaaattccgacagggtggtttacttgtttggaaaattttccccaaaaaacagtgataacagaatgtgtggctacttctgttgatgctcaaagaacaaagtgaactgcatgttacattacatgttttcagt

SEQ ID NO: 7522 - DNA, 697 bp, Oryza sativa
  ref <308>: DATABASE ACCESSION NUMBER: AK064649
  ref <309>: DATABASE ENTRY DATE: 2001-12-06
ctttcccggtcgttgtgaaactgcagcaggcgcggccgtgtcgtacccgctaggccaagatgccggtcgccaggagctgggtgtgtcggaagacgtacgtgacgccgcggcggccctttgagaagtcgcggctggaccaggagctgaagttgatcggcgagtacgggctccgcaacaagcgcgaggtgtggagggtcaagttcacgctggccaagatccgcaaggcggcgcgggagctgctcacgctggacgagaaggacccgcggcggctgttcgaagggaacgcgctgctgcggcgcctggtgcgcatcggcgtcctggacgaaggtaagatgaagctggactacatcctgggcctgaagatcgaggacttcctggagcggcgcctgcagacgcaggtcttcaagctgggcctggccaagcccatccaccacgcgcgcgtgctcatccgccagaggcacatcagggtccggaagcaggtggtgaacatcccctccttcatcgtgcgcctcgactcgcagaagcacatcgacttctccctgcgctcgccctacgggggcggccgggctggcagagtcaagaggaagaatgccaagaagggccagggaggggcgggcaccggcgacgacgaggaggaggattaaatgcacagcccccccaaagtttatcgcattggaataaagctctttaacttgtg

SEQ ID NO: 7523 - DNA, 1047 bp, Oryza sativa
  ref <308>: DATABASE ACCESSION NUMBER: AK064650
  ref <309>: DATABASE ENTRY DATE: 2001-12-06
acaaaccgtaaaaccgatccagacaacaacagcatcatactcacacagttcgcggcagcaatggcgggaagaggaggaggaggaggaggaggcgagctgcagctgctgggcacatggtacagcccgtacgctatgcgcgcgaaaatcgcgctggggctcaagggcctgagctacgagtacatcgagcaggacctcttcggcaagagcgagctcctgctcaagagcaacccggtgcacaagaaggtccccgtcctcatccatgccggccggccggtgtgcgagtcgcgcgtggttctcgagtacgtcgacgaggcctggcccggggccgcgccgccgctcctcccggccgacccccacgaccgcgccaccgctcgcttctgggcgacctacttcgacagcacggtaatcgatggcatcttcctgaagaaatcaaccttagatagatagcaacgttcatgtcggtgattgagaaatcaatattagagagatcgacatttttgttttgatactgtattaagttcttcccgccgtggagggcgctgatgagggcgacgacggcggagcagagagcggaggccttcatgaacgccgtacctcaggtggaggtgctggagcgagcgttcgtggagtgctccaaggggaaggcgttcttcggcggcgacgccgtcgggctcgtcgacgtcgtggtcggcggcttcgtggtgtggttcaaggtggtggacgaggtggccggctccagcctcctcgacgaggccaagttcccgggcctggcggcgtgggcggagcggttcttggcggtggacgccgtccgggaggcgatgcccgacgccgggaagctcctggagcactacaagggatttctggctaaattggcttcgccagctggttctacctaatggcaatctatctgccttgctcgcctgctttgacgatgaagaagttgtttggtactgtgtcatgtgaaaatattttgttagtctctgttgagcggtgttcagaatgcaaatgtgtacatcttgaataaaaggagagcaaaatagtgaggcg

SEQ ID NO: 7524 - DNA, 1087 bp, Oryza sativa
  ref <308>: DATABASE ACCESSION NUMBER: AK064651
  ref <309>: DATABASE ENTRY DATE: 2001-12-06
aaaacgaagggtgactttagtcaaagactggtcaccaccccactttgcttttggcgacgaaaccctcgccgcgatggctacgacccgccgccggaccgcctctgcgattccctcctcatccgctccagccgacgagctccccggccgaggaggggacgcgctgggggcggagcgcctggagggttccgtaccggccggggagttggtaaaggcgaaggcgacgaagaagccggccgcgttcgcgcgcgtctggtcggaggcggacgagctccgcatcctggagtgcctcgccgcgcacgtcgagaagcacggcgcgcccccgggtcgctcccagctgcccgaggtcctcgccggccgcggcctcgacaaggaggagttcaccgtctcggagatttacgagaaggtgcgccgcctacggacccagtacgacaaaatgctctccggtcctcggcccgtaccaggcgacaacaggttcgagctctcttgtgccatttggggcaaccccgtcgcgccaccaccaacctctccggctccggagaagagctcgattccggcgtcgggaaccaggggccgcagggacctagaggagctgcgtcctctgtatccttatctcgtcgatgaggtggagaggatcagcaccaatgagttgggtggacatgttctcaagatgggattggagttcatcgatgacggtacagccgtccgtatgaacggcatggcgaagaagcagagggttctggagctcaagacgatgttgaagctagatagtatgaggaaggaggtgacgaggacgttgctcaacaacatggattgacaagatcctccatcgtggtatgactttgtgcatgctgtgccccttttgttacatatagctgcacgccaatagttttaggatgcattagtactctatctattataagatggtaaggatgatccaatgatatgtgatctggtcatggattagtatatattagtttgcctagtaagatgatgctgatggtccaacggtatggatggcgtatgggttattaatatatgtaagtttatctagtaagatgacgatgatctatatatgatcttgtttgat

SEQ ID NO: 7525 - DNA, 1514 bp, Oryza sativa
  ref <308>: DATABASE ACCESSION NUMBER: AK064652
  ref <309>: DATABASE ENTRY DATE: 2001-12-06
aacccagaaaccctcgcctcgcctcgccgccgtcgactcgactcgaaccggagcgccggatccagcccgccgccgtccctagctccgccgccgccgccgcactgtggattggttgaggcggattccagggatgggcgcagggggtggatcccggcgccggcggagaagctcaccgacgacctcctcgtagagatcctctcgcgcgtgccctacaagtcgctctgccgatccaagtgcgtctccacgcggtggcgccgcgtcatctcccaccccgaccaacggcgccgactgccgcggtatcacctcggcaacgacattgtcggctacttctacaagtccaacaccttcaccaacgtcacaggggaaggccgcccttttgttgacccctcgctccccttcctgcccaagtgcgagtttctcaacgtcgtcgatagctgcaatggcctcctcctgtgtcgctgctggaggctcgcagatccacggagattgattacctagtggttaatcctgccactgaacattgggtcatcctgcctgattccggctggtctgacaaggtgcagactgctcgcttggggttcgatccaacggtctcctcctcgcactttcatgtgtttgagtttgtggaggacggcgctgcggatgtcgatgggaatgttgatcgtgacgactatgatgggcatgtcaaaggggtggaaatctactcatctgtaactggagaatggagtcacaaggacaatggttggaactgggaaatcaggttacgcgatgaatcgaatagtgtgttttttgatggcgtgctgcatttgatcactattgaggatgtggtggcagcggtcggtgtggaggggaatacttggaggatcattcctatgcctcaaagtctagttgagcctttcaatggtattggtgagggattcattgtcctgtctcagggttctctgtattttgtaaacagcgatcacgataaaccatataaagtatcagtatgggttcttgaggactacagcagtgaacagtggatctggaagcacactgtcagccatttacatctatttcaaaccaagagactcctttttggacatgactacaaagttgtctcaattcatccggaacggaataacattttcttggtttggccgcatagcaaaatgctcatgtcctatgaattggatagcagagaagtgcattttatatgtggcatcggaggttgtgagtgggtgatgtactatcttccttacgttcccttgtacttagaatcactggcagatgggcattgatcatcgtacttgcataggcgaacgcttggtttgttaaccttaaattatgacattggagttaggacaccgataagatcagcaggaacttggcagatctttctgatgttgtgctacattgttgtaggtggttgagtgcgttctgcaacctcactttctggggccaacttttcagtaacttggaacttaattcggattttgtaatagtgatgttgtatttgattgtttgcgatgttg

SEQ ID NO: 7526 - DNA, 1192 bp, Oryza sativa
  ref <308>: DATABASE ACCESSION NUMBER: AK064653
  ref <309>: DATABASE ENTRY DATE: 2001-12-06
atggcggcgacactcgcaggccgccgcctcctcctgcagcgatccgcggcggcggcgggggggaggtggcggctgctggggacggcggcggaggcgtcctcctctccgggagggagggaagaggcgggcgggggagggggagatgagatctacctgaagaagccggcggcggcggcggtggtaacgacgcgggacgagacgtcggtggcgatgccgatgtcgttcatgacggggtcggtggtggggaagcggttctaccgggaggccaccgtgcggcgcgccgacgacggcaacgggtggtcggtgatgctcgactaccgcaccctcaagtcgccggcgaagcggccgctcaagctgcagtcgcggacgctcgccatggccatcgccgccgagtgggagtaccaggaagcagatggaatccggccttttacaatgcctcttatgaagcttgcttgcactgcactggaacgagttccattgacacgaaaaaaaataattgataatttgatgaagaaattccaccaagatttggtattctgccgttcacctgatgataatgagctgactgtaggagtttatcaaagacagaaggagaaaattgaccctatactagactgggtaaacactgagtttggcttcaagcctgttgtatacacaagcttttttggtggaaagcaagatgaagggttagctaatgctgtagaaactgttttgaagaataccaccgactttgagttggcatctattgatgctatggcagcagcagcccattccctggtaatccctctcgcaatattcagagggaagctgggaattgagcaggcaattgaattgatcagacttgaagaagatcaccaggttgatagatggggcttggttgaaggaggtcatgatgttgatattgccgatctcaaagtgcaaatgtcatcagctgttgtgtttcttttactttcatggcaactatagttacttatgtagcgaatctacggatcggttggtttttttttgtttgatctcgactttcgagcttgtatcaacttttgtgacgactggtagaataagacttccctgcagatggttaatagggagacagagctccagaatttaatctgttggattctggtgtctcaaacagtatgtttgttaagatataaaaactcaacctgtggaatacttatcattttttttgtgg

SEQ ID NO: 7527 - DNA, 583 bp, Oryza sativa
  ref <308>: DATABASE ACCESSION NUMBER: AK064654
  ref <309>: DATABASE ENTRY DATE: 2001-12-06
agatgcgcaacggcttaggcagtgagagcacctgcccggtcggacggagtgcctgagccgcgccgccgccgccccctcccgccgggacccgtcgcagccgccagcgcccccgacccgcggtagccatgtgtgaccgcaaggccgtgatcagaaatgcggacatgtcggaggagatgcagcaggactcggtggagtgtgccacccaggccctggagaagtacaacatagggaaggacatcgcagcccacatcaagaaggagtttgacaagaagtacaaccccacctggcactgcaccgtggggaggaacttcggcagctacgtgacgcacgagacaaagcacttcatctacttctacctgggccaggtcgccattctcctgttcaagcctggttagagcatggcctgtgcctcctgccccgagagccatccagatcacaaggactgcagcctaaattccaaataccagagactgaactatcttcagcgttgccatgggaacacctcgagctttacgcctttattgtgttgttgttgtacagggcatcctatgtactagtttgttgtggttataaaacaattagc

SEQ ID NO: 7528 - DNA, 1659 bp, Oryza sativa
  ref <308>: DATABASE ACCESSION NUMBER: AK064655
  ref <309>: DATABASE ENTRY DATE: 2001-12-06
attgtcatcttcctcctccctccgccgcctctccccgccgcgagcgagaggaaagcctgagctgcagaccgattccgcaatggggcgcaatgggggaagagcagcaagaagaagaagaagaagaagaacaaggtgatcctcccgccgcagctgccgccggaggtggacgacggcgaggtcgtggtcaccagggtcgccgaccacgacgacgaggacgaggtcgagcgcccctacgaggagcgcgagggcaacaggaaggtggccgaggccctcagcctcaggccgtgcaaggagcatgacgacttggtggagggaggtcgacgcattccccatcaagacgctgcaggggaagctggtctacaacaacgccaagaacgcgagatttgatgacagttctaatggtgttgaatctaaatctgaagacaaaggagcagatgccaaacaaactattcaaaagaaagaacaaaaaaacgctggatactagggaaggacccaatgtcgaatttattaagaaagagggtgagcacgtccgaccagagtcaaacgctggtcacggagagcacaacggctgcaccatgccatctgcggctctgcgctacgcgcagtgtctcaaaagaaagaacataaagcaatatctgaaagcaaaaagggagacagtaaattccaaaatgtgcaagctcaaactgaatctcctcatgcaaagtttcagttgaaagttctggtatccttatgctcctttttgcattacagagaaactcatttttaaataagcctttgcttatgatacatattaatgttagtgcatgctcagtagacagctgtatcaaactccttgctttggtcccaaagcaattgccagtgagtgataaaaagaaagccaaaggctagagaagaggttgatgctgaacttagaggtgcctcctttactcttaatcgaaaggttaggagaagtatacagaaagaaacactatctgctcttttcgagacttaccttcgtattttgaagcataggatgtatacttcaaattccaggacttcaggagcaaggccattaatgtatccccagatggagggattaggaaaattctcacatttaattgatttggatttcatgggcgaacttaccgcatgtctcaagaagctttctgggtataccgaccatcacagtgagattctacatgataatacactgtctacatcacaacatctgcaatgctgcataattgtgtttaatgtcgggaggagcaaccttgaagctctgaatgtcgacctggaagacttctttctgcagctttttaaccacatattgggagtatcggcctgacagattggaattctattgatttggcgattgtggtgaagtattggctgatgctctgaagacacttctctgagaaggcaaaccgcaggatatgataagagcagctgctttcattaaacgcctagctacctttgctgtcctttggttctccagaagccatagcaggtttgagtttcttttgtcttgcactgttccatctggttgagctaataattgccagatttttcatgtttgacttgtggtcagtatgagcagtgatgcacattctgaacgggcactcatgtgcagagcattggtggaataattcataatataatgcaataaatcaccattatatg

SEQ ID NO: 7529 - DNA, 1066 bp, Oryza sativa
  ref <308>: DATABASE ACCESSION NUMBER: AK064656
  ref <309>: DATABASE ENTRY DATE: 2001-12-06
aaattggtgccaggattaaaagccggcgaagtagcaagatatgcgcctgcttcgcctggccgccatggctcacctaccgcttttgctcctctccttcctcctcctcatcggcgtccatgcctccgtttccgatggctcgcctctcccacacacttacaacacttccatttgctccaaatcatacaagtgcggcggcgtcaatatctcatatcctttctatctttccaacgcaaccggcgaaacctatgattacactcagttttcttgcggctacaccgatttgaatatcacttgcagctgggacgggagtaagcagaccccttttatccaactcaacggagacaactatactatcctggagatcatctacgacagtcgcaccatcgtgctcgtagacaccgatgcgctccgcggcggcagctgccccagagtgcgccacaacatcaccttctcccaggccgatgagtggcttcagtacaccggcccccgtgacaacctcaccttcttcttcggctgcaaccttgtaccactaccaccaatggatccagggctgactcgttttgtagacaagaaccaaatcaactgcaaagacttcagcaactggcctgacggtggagattcattcgtgttcacctccgtcgagcttgaggcaccaatggagtacgaattggccagtcgctgccgccaggtcatcgtcgtgccggtaaatgggagtattcttaattcaagtagccagagtgcgctcccaagtggtgaatacggtcaagtgcttaagaaggggttcgagctggcatggaaatcaaggaaagataaacaatgcaacctgtgcgaacaatcccggggacagtgtgcctacagccagaacaggacattcctaggttgcttgtgcgccgatgggaaggtgagcagcacggattgcacatcaagtaagtctttcgatgccgatccttcatttttttcccctccattctgtaaagccaacaattagtcgatcatctggcatgccgtctcagcattccaatatctcgttgattggtataatttgcatctcgtagtcgttaccccc

SEQ ID NO: 7530 - DNA, 811 bp, Oryza sativa
  ref <308>: DATABASE ACCESSION NUMBER: AK064657
  ref <309>: DATABASE ENTRY DATE: 2001-12-06
ggcttctagtactactcgggctgtgccctcgctcgtggacgatggaccggcggcgagcttgtccggtgaggggcggcaagcttccgcctgaccactcgagcttgactccaccacaaggactggctcgagactccttggtccaccccgcgccggatcttgaagctatggcgcgcgtcggcgtcgagaaggagtgagaggagtgggagtaggaaggtgagcagcgacatggtgcgtgggtcagcgcgggaagggtccacggccaccaaatccggcagccctccgcctcctaggcgatagatcggacggccctgttcctcctagcgctggataattcgtgtggatgtccatggcgatgtgatgtcgccagcgcagcgtagctgctagtctcgatccatgtctcagcgaggtagggaggaggcactgggttgacgaggaccgaggacagcgcagcccggcggtggctgcttccgctgcccccaagtaagcgctgaagctgatgatctgggcatccggcagataaagctgttgcggaaccagcggtgcgcacataatttcggaatcgcatcccccatgagagtaggccgacatggaggatttctgcagctacctcatccttcgccactgcatgttcctcccgatctctctctcccctctctctggcgaggaaacagtcatggaaggtcctgccttgatgtgaaaaattatttggttgatcttgagaaaaaaaaatcccagttcatgtgcatgctctttgtatttcgcttgctgcattttttttagtgaattgaactttgagccacctttgatcacc

SEQ ID NO: 7531 - DNA, 1137 bp, Oryza sativa
  ref <308>: DATABASE ACCESSION NUMBER: AK064658
  ref <309>: DATABASE ENTRY DATE: 2001-12-06
agcttggtcattccacgtgggaagactcgcccgcctcgcctcgcctcgctctcgcgcttcgaatccccacgcgacgcgacgcgcccaaccgcgccctcgcctcgccgccatggacgcccccgcgttacctcctccccctcgcctggtcgactatatctccagcctccaaggcctggtgcgcctgggggacctcgccgatctcgagccggacaagtccgtggtagttgttgtctccggctgttacccgctcgaggacgcacctatactgttcgatgatttgtctgcgagggagacctggtgcgtgatcgggatgccggagctttgtatcctccgggcgcgtgccatcagtcttttgcagcggcgggaagatctcagagctctcgtccgggacatgggacatgacttgctggtctgcgggacggagtcaggcaaggtcgagggagttctcgcgagggcactgaagcttccagcaggcatggatgcaccgcccgggatcagcctcgatctggtgggagacgctgacgagggacggcgcttcctccgccgcgacattgcccgcgcgcgtctgcagctcgccgcgctcgcgggccacaccgagcggcacatcctgaggcggctcgggagggagctcgcactgcgggcgagcaccggagtcgtggctccgcaggagctgtggccagacatccaggagcagaggcttcgccacgcgccacctgactccacatctgatgcggcgttgtatgcagaggctgcagaggaagctgcttgggtcgctcctgcgggcactcctcccgactgcgatgcctaggcgacgccggtgacaggacggtgtccgccatctctgactaaactccggccttataaccactgcgaattgagtacataaacgttgcgttccttacttacattgagctgcttacatcgttactctagttagaaacaggtagccttttttggttcaggtgcacatgacccaaatggtgaacttgtggatttgagcaattttttgttcaccaaataggtcatgtggtcctgatatgtttccgatgatgatcgatcagcactgaagtttgttttttgttcttgctatccctttttgaaaatgattgaatatgtgccttgcctggcttttgaact

SEQ ID NO: 7532 - DNA, 2162 bp, Oryza sativa
  ref <308>: DATABASE ACCESSION NUMBER: AK064659
  ref <309>: DATABASE ENTRY DATE: 2001-12-06
gtgcgcgcccgcgccgtcccctccgcgccacctcctccgttcatcctccgacaactctccttccccgccgccgtccccgccctcgacctcgacatcctctgctgcaggctctcccgccgccaccgcctcgcgtgcctcccccagcccccgtccgacgtcctcgttgtctaccagagatgccagtcttgcgctgccgcggaggccgtgtcggggatcgcggaggcgttcgagggtgccgcggtgagcgcttctatcctgcgcccgccacctgctcgacgttttgctgcaccgagtaatggttcgtgaggatgtgctggcttgttcggcgttggacgttgtaggttggcgaggaggaggaggtggtttgttcgggctcactggttgcgaaagctgtcgagtgcgacctgcgctccctgatgcttgagcatggatggaggtgtcttggggagagcgtgtatgtcctttcgacgtttgctgatactaaggagagaactgaccaatgcacggtgaacgtggaagtcaagcttgggagaaatgatgatattgaatttgctgtctcaccagatgcacttcggtttacaacacctaagttctctgattttgttagctctgatgagatggaaacatttgaaaacgacaaggaagtaattttggattattgtaatttccgaacagcatgtactactcttccaacccttcaggaaggccatgtgataggttttagcaagacactccctacaggacagtgcttggacaagtttatgcagctttgctcacttaagcatgatttagaggcagactacagtcattatgcagcagtcagatttggttacgaatcttcccatgaaatatggttgccttgttcatttgttctacaaggttcagggctccaaccagcccccaaatcttctagagcatcaagggcaatgtgtgccttgcaatcctttatgggattattgaatgcttggaacttctttggccagaatcaactagtaattaaggagcagttactactcaattctacagcaactctgcctacctgggataaggctatgagcagtgcaagaactaacaactctgaggatcttagactagttcatacaaatattttgacgaatgatcaatctttggctctagactttcgcactccgaaacctgctgttctatgttctacaagtatcaaaccatggaataccaaagttcagatgacaagtctatctcttgacaatgatgacactggcaatagaaaaggctccatcaattatgattgccaaacccagtccattgttcgaaccaatttatgcaagtcacaagttgccttattgaagccgtcattcagcagaggtaaatcagaacagggacacaaaagaaagcattcttcagaacattctgatgcagataactcggacaaattgagacatacttctctgacaaattcaacactggtttctggaggtcataaaagaaagcatgcagagtctctggatagaaattgtcaagaagtatcaaaagtgcatttacaggattactcacaaaaggaaaatttggatacaagcaggaagagtaaagattgtatacctcaagtcccagatgagactagagcaataccaggtgtcaagaatgatatgcttagcactaaggtaatgaaaccaacattgaagtgtgtagtcagcaatgatgagaaaactgcaccaacaaattcaaagactaaacagaaggttcgcaaagatgtgttaactgcagtaacaaaaccaacaataagaacagaagatgtcaaagaccacttcactaaaaaggtggtagataatcagaaggatgagctaatgaaaaaggcaacaaaggcaaaaggaaggagagtagttaacagcactgagttaacttcaatgaactcaaaaacaaactctgatgtactcaatgatgacatagttagaaaggtgacagatcatcagaagcgaggtgagctgcgtttgctaacagttgcagatctgaagtgcttccttagtgcaagaaaagtgaaggttggagggacaaaggaaatgcttatcaaaagagtcgctgagctcattggttaacatataggtacaagtttctaacatgtgcagtctgcaaagcacaagtagacttgtgaagagaattcggttatcatttttctttctcatttt

SEQ ID NO: 7533 - DNA, 638 bp, Oryza sativa
  ref <308>: DATABASE ACCESSION NUMBER: AK064660
  ref <309>: DATABASE ENTRY DATE: 2001-12-06
gatttgggcagaccagctgacgggtcacgccacgcacgacggcgacgctagcgtcgcgtgagacgggcgggtgcgcgacgaggagggaggagacgaggcccacgaggggccggcagggggaggagctgcgggcggcaggggaggcgaagcgtcgagcccgggagcagaccgtggcgaggcgacaagctcgacctcggcgacggccacgcggtcgacaacggccaggaaggaccagcacggcatcacccgcgctgtcgagctccactctgcgcgcgacgacgcgggagcagagccggcccagctccaccctcagctcccgtggttccgccgccagccacgaccacaacgccgcctccgcaagcaccatccgcggcggggctaggggctcgtgctcctctggctctctctagtgatgaattgactcgaaccagggcgagatcgaagatgatgtgctaccgttccgccgcgccagagttgttccacgacaaaagcgacatgtgcaggcgtgcagcgatggcatccccggcgccggctgcagcgtctcctgccactccggccatcctgcacatgctttgcttgtgacgtaccaggaatcactacaagttggcaatttcaattcacgtctacatatcagtcct

SEQ ID NO: 7534 - DNA, 1548 bp, Oryza sativa
  ref <308>: DATABASE ACCESSION NUMBER: AK064661
  ref <309>: DATABASE ENTRY DATE: 2001-12-06
tcgcctcaaacctcaattcgacaaatccatctcccgctccacccaaaacccctcgtcctctctcccggcgacaatggcggcggcggcggcgccgctcgccgacgacggcgacgggatcgtagaccgtggcatgtggctcgcatgcgccgccccgaactccggccgcctccccgccgtcggctcggtggtcttctacttcgtcgacggccacgccgctcagttttgccagttccccgcccctctcctggagcagctcgccgtccccggcccccgcgtcttcctctgtacggtggccgccgtccgcctccgcgccgacgccctcaccaatgaggcctacgccgagatcaccctcgacccggtcgccgaccacgacgtcccgcgcctggcccccgctcccgctcccgcacccgccgccgccgccggtggccagcagttgcgttacttcgtcaagacgctgatgatttccgacttcgacttccgcatccgcttctccgcccccatggctgacgccaaaggcgtcttcccgccgctggtcgacgccaaagcggtccagcccctcctcgtcaaggacctccatggatctccgatgacgttcgactacggcaggaagggcaagagagtcacgctcgccaaggtctggaagaaatttcgggacgacatggacttcgtcgacggagacagcgtcatcttcatgcgtcgccgcgacgacgacgacgacgacggcgagctgtacgtcggggtgcggcgccagcgcacgctcgaaaggccactcaggaatacgatgcgccggtacaggcctccgaccccgccccaggcggccgtgcaggaggcggtactagccgcggcgggtcacgcggcggccggcgagcggttcacggtggcgtaccggtcgcggaaggacggcgacgagttcgtcgtgccacgcgaggcggtggaggaggggctccgcgccagactcacctcgctggcggaggtggagtttgtgtgggccgtcgaggacggcgcgccgcccgtcgtcgggccacggggcaaggtcaccgccattgccaccggacagctgtggcgaaatctcgagattgtatgggatggaaactcggagatggacatgagtgccaacttttggcaagttcgacctgttgaggaagttgatatttctccttctactcctcctccgaagaggctcaagaattgtgagattgatgataccgcctctacttctgtttccgtcgacaatggagatgagcaagttccaacgatgaggcaacggctagaggcgctgattcctgataacatctgaggccaagtacacctgcttgtgactaactcaagtaaaaattagttctgtcacttgcgagttgtgactttgtgagattgggtccgtcatgaatcagctttggtctgcatttagtttgaaggttattccgaatagtttcaaaattcggggaacaagtttgcagtgttaaatgtccattctaaatctgacggaataggaaaatggtgtacctgaaatctgatatctgaagaacacgaacagttcagatcgagatg

SEQ ID NO: 7535 - DNA, 776 bp, Oryza sativa
  ref <308>: DATABASE ACCESSION NUMBER: AK064662
  ref <309>: DATABASE ENTRY DATE: 2001-12-06
aatccctcttcaaatccaagagtttttttttctccctcttttttctttggcatttcaccccagagatcagaaaaccaaagccaaatcctctcctcatctcctcgcatgcaaccacgtacacctcctcgtctatgatggcttcctcccgcgccgcgctgctcgtcgctgttctcctcctcctgctggtctcctccctctccgtccgagccgaggcggatcaggtggcgcgagcgccggcgctggcgccggacgttgccgcggcgagctgggtacagcagggatcgcaggaagcggcggcgccggggcggcctggaatgggcatgggcaagaacggcgcggcgaggtggaggaggacggcggggcggcgcggccggggaggaggaggaggaggcaccggcgcgtgggcgttctcggcgatgctgccccgtgggttcgtgccgccgtcgggatcgtcggcgtgccacaacgacatgccggccgccgccgccgacgcggagttcttcgtgtgcggcggcggcgacgggagcccgtgatcgtcgacgacgacgacgacgaagacggccgtgttcgttcctgcctgcccggtgctggacttgttcgatcaacaaatgaagatccagttccaagagctcattcaagaataggatgatgagttagttcttgtttcgattcgtcaccttctcggcttctcccctgttcttgaatttgtaaaaaggcggaaaaaaacttttgtcctccgaaaatgagtgcttacactacaatctcttggacattcc

SEQ ID NO: 7536 - DNA, 722 bp, Oryza sativa
  ref <308>: DATABASE ACCESSION NUMBER: AK064663
  ref <309>: DATABASE ENTRY DATE: 2001-12-06
tactggtggctttcgccgctgcaaacctccgtctcctccggctccggctgctcggggcctaaaccctcgccgcgtgtactaaaaaccccggcggcccaggcggcggagggatgaagacgaggtcgcagacggcgccgaagccgctgaaaacggtgcggctgcctcctgtcaagccgcggcccaagccgccgccgccgcagccgcagccgccgccgtcccggaagaaggggcagcccctcgtcgaccggcgccgccccaagaagccgcccaccgccttcttctacttcatggaggattttcggaaaacttacaaggaagaaaatccaagtgtaaaatcaatgcaagaagtagggaaggcatgtggcgagaaatggaatacaatgacatttgaggaaagagtgaagtattatgatatagcaaccgagaagcgtgcagagtatgagaaggcggtggctgaatttgacaagaaaaaggaaagcggtgaattgtccgaggaatcagattacgactagaggtgaacgtcgggtagttgttccgatggttcacccaagtaattggatggacgaatcaattgtatattacagaactgaggcactgagctttgtaatggaatctatatatagtcagtttcctgctcattctagagtgaactatcgtcttgtgataaagtgatagctttggatcgagtattcgctggtacaccaccagtgcttgaaataact

SEQ ID NO: 7537 - DNA, 1288 bp, Oryza sativa
  ref <308>: DATABASE ACCESSION NUMBER: AK064664
  ref <309>: DATABASE ENTRY DATE: 2001-12-06
aaaaccgcaaccgcctcaacgaacgcctcctccttcctccgccgctctcccctcgccggagcgccgagagaccaagagcgcccccggcgctgcctccgccgctcgccggagcggagcccggaagcaatggagcggttccaggaccggcaccacgtgtggctgcggagccgcgagcacggcctgtacctccacgccgacctcgccgacgggagcagcgtctacctgcacccgtaccgcgcgaccgcgcgcgcggcgtgggcggtgcacgtgctccaccacttcgacggccgcatgctcatgctccacagcgccgccaacgggcggtacctggcggccacgacctcgccgtgggcggcgaccgcggcgcggttcggcctcggcggtggcaaccgcgtcaccctgcgcgacctcgaccggctgccgatgttcgccgccggctggtttcccatcgtgtcggcatccggggacgtcctgctgggtcacgctagcgaccgattcctccgagctatcgacagaggggatggcaatggcgtcaccgtcgaggtgtccgacagccgcagaccgaacacgccctgggtggtggaggccatccccccgatagaatccatacctcgccttccacatcttgtgggcataggacacattgcacgggcaatccggttcgtgcgagcagagcgggcatctactgatgggacctttccccatgtcgcctgggcttgtttcgagttcaccgggaggtcattgttcaatctgaggacggagctggcgcgtaggttgaactttgcagtggtctccgatgtcattatgtgtgttcgagcgggcttgtttggacggctgactcctctgatcaccgatctgcctcccaacaatgtgaccatggagatcatcgttgtcacggctgggacgattgatgccaatgagttgagattccccaatgttggtgcagtctagaggaagacagaagtgcaggagcagaacatctgacagtcactcccccattcatcgtttcagaatttttttgctggctcagaccgaatgacaggagaaatcaatggaataggcttcagaaaggaaaccaccatctgttctgtttcccggttgttagctatgggatgctctgatgtcttgaatgcctgaacatcgcgttctgacatttgctgtactttccattgtcatctgtatgatatgactgatgatccatacatttgcagatgtgaaatgttgtgctcaagtctgaatacacagagctcatctgtatgatatatagtactaaaaaaaaaaaaaaaac

SEQ ID NO: 7538 - DNA, 1424 bp, Oryza sativa
  ref <308>: DATABASE ACCESSION NUMBER: AK064665
  ref <309>: DATABASE ENTRY DATE: 2001-12-06
aatcctccccgatagccgaagccgaagccgaagccgccctgctctgacacctcgattcaccccgcctcgccgccggccaccgccgccgcagatcaggcggctccagcgggcggtagggctcctcctgtaggaggagttggtgggtaccgtcgcgttcttctttcccctagctaggtctcgccagaaggaggaggaggcggtggctgcggcgcggtcgccatggaggcatacaagctctgggtgcgcaagaaccgggacctcgtccgctccctcgagtcgttggccaatgggctaacgtggatacttcctgagcgctttgccaactctgagatcgcaccagaagcagtatatgcatttctgggtatcgtgagttctgtcaatcagcacataattgaaacgccaactgatggtcagacattggcctccaaagagcaatctatcccatggcgctttctcgccgccgattcgccccccgcgcgctgcagctgggcgccggcgccacggccgggtacacggcgctcatggcgcaggccatgtcgcaccacttcggcagcctgcgccgcgccatactgcgcaagctcaggctccacgccgccgcggcggccaggacgaggtcggcgttgctgcggctggcccgggacgccatggaggaggacgacgagggcgacggcgaggaggaggaggaggtggtgaacagggtggtccggcggacgaagcaggcggcggcggcgagggcggagcaggcgtggaggccgctccggggattgccggaggacgccgtgggcgtgctccgggcatggctcttcgaccatttcctccacccgtatccgaatgacaacgagaagctcatgctggccgtggctacgggtctaagcagaacccaaatatcgaactggttcatcaacgcgcgagtgcggctgtggaagcccatggtggaggagatgtacaacgacgagttcgacgacgacgacgccggcagcggcggcggcggcgcttcgtcctcctcgtgagctcctcgccggccggagttcatccttgatcatgatggggaatatgcgtgcttgcttgcaactttgcaagagtccaatggatcgggtggccgatcgacgcatcatatcagagcctatataaatcgttctaagcattagtttttctgagatttctgctcatgtttccgaaaaactttgcgtttagttttgtttctggaggagttattggatgcagaagcttctttgtttgtggtagcgtgggtgagtgcacctttgtagtagtgaggactgaggagtaattcaggcttgcagctctgaagctaggaaagggattgggtttgttctactcttcttttttactatttctttgatttgatttggaagagatcaagcttttgatgcgaatgaaacagtgctactagtagctttgttggg

SEQ ID NO: 7539 - DNA, 802 bp, Oryza sativa
  ref <308>: DATABASE ACCESSION NUMBER: AK064666
  ref <309>: DATABASE ENTRY DATE: 2001-12-06
aaaaatcacattccaaatcagaaacctcggacctccaacccaggatcggagcggatgacgacgacgacgacggcggcgacgaggaggtggtggaagcgccgcggcggcggcggcggcgacggcgcggaagacggcgacgacctcatcccgatggacatccaagaccaggaggagatggtccggtcgctggagcagaagcaggcgcagcagagccgccggtggaggcgcgtcttcgccgggttcctcctcggctacgcggccttcctcgtctactccggctttcaccatgcggcggccccgtgggaactgcggtatcatgcttatttcatggaagatttgtcatcaccgatggtcgtagttgcagattggatagctgccctagcatgtttattctcaattaaaggattacttcactcctggaagaagtggatgtggtattcattctatgtcagcatactagtagccctcttctggacatactacctcttgaggttaccgagaattcgatgggatgtagcatggctcccgtttggccctttgattgcttctgcattgagcctctatgtggaccactctatgctggagtcaatgcaagatatcaacaccttgaggagctacatgtataactacaaggccttgtagtgtggagaatatggctagttgtatctatacatgtaataggtttgcacttttcattaactcccggtatagcttagagttcatctacttctagtttactgctaaacaatggagattcacaggtttcatctttgaatggaattattttggttaatgtagcatc

SEQ ID NO: 7540 - DNA, 569 bp, Oryza sativa
  ref <308>: DATABASE ACCESSION NUMBER: AK064667
  ref <309>: DATABASE ENTRY DATE: 2001-12-06
ataccgcacgcccgctcatctcgtttccatcagcgccgcgccgctcgttactcccgcatgcaggcctacaacacgccctctcacgcagtcaacctcgccgctcacgctcgccaccaccgcttgcgtcgcgctcgccgccccgctctcgtcgcgcttgcggtcatggctgacccgctcgcctcacttgctcgcgccatggaggttgtgccggactcggagatggaggtagcgccggtatcatcgtcggagtagcgccggtctcgttggaggtgttgccggactcggagatgctgctgccaccgaagcgacggcgtcgtggggccatgcgcgggccaacgaagctacggcggcatgaggctatgcgcgggataacgaagcgctggcgtagacagctcgttcgatgcggatatgaagaaaggagcgatggagttaccgctccttggtctcgctgctagcctgaaatacgaagatcaaaaggaaacgaagggagtataacattttcataagttttcaccacccatgtttaaggttagacaaacaaaaataatgacatggctcaatcaatcttg

SEQ ID NO: 7541 - DNA, 709 bp, Oryza sativa
  ref <308>: DATABASE ACCESSION NUMBER: AK064668
  ref <309>: DATABASE ENTRY DATE: 2001-12-06
agcgctccccgccgttcccaaatttgttgcggcgggagagggtcggagagacaagcagcggcggcggcggcgcgtgctcggcggcggcgatgaggatcgaggaggtgcagtcggcggcgaagaagcagcgcatcgccacccacacccacatcaagggcctcggcctcgacgccaatggggcggcgatagggctggcttcggggttcgtggggcaggcggcggcgcgggaggcggccggcctggtggtcgacatgatccgccagaagaagatggccggccgcgcgctgctcctcgccggcccgcccgccaccggcaagacggccctcgctctcggcatctctcaggagctaggtagtaaggtccccttctgtcctatggtgggatcagaagtgtattcctcagaggtcaagaaaactgaggtgctgatggaaaatttccgtcgagctataggcttgcgtataaaagaaaataaagaggtttatgaaggagaggttactgaactttcgccagaagaagctgagagtacaacaagtggatatggaaaaagcattagccatgtaatcataggtctgaagactgtaaaagggactaagcagctgaagttagatcctacaatttacgatgctttaataaaggaaaaggtttacttcctgatcctcatccttatgtcgtgtgctagactttaaaaatacatttctttcatgttttg

SEQ ID NO: 7542 - DNA, 541 bp, Oryza sativa
  ref <308>: DATABASE ACCESSION NUMBER: AK064669
  ref <309>: DATABASE ENTRY DATE: 2001-12-06
attatctttcacgctcctcccaagctttcgattctgaaccagaattccacggtgaatcgatcttccgacgccagatcgacgcgagttgagagacggccgtgctcaggacggcggagcgccggcgagatgcggaggcggcggcgccgccaccacgcgcgctcctaggtgaatctggcgatcgggaagttgttgaaggatgtgcaaaccctcaatcatagaagacattcggctaagagagctcgaaggaaaaaacctgctcgagtaaagatccggtcgaatggaagattctgtgggggccgtttctcaaccactcttgccagctggagccaaaagactagaatgaccctgagaatgtactaaaatacccctagggttgctgacatggcaagggcattataggaagatcactaaagcccatgagggtagaaatgtaacatcacatgtaagaccgtaggctataaaagccggtcaagtccctatagctagaggagacattttttaatacaaaaagtaatcctctaaaaaaaaaaaaaaaaaaaag

SEQ ID NO: 7543 - DNA, 1325 bp, Oryza sativa
  ref <308>: DATABASE ACCESSION NUMBER: AK064670
  ref <309>: DATABASE ENTRY DATE: 2001-12-06
aaaagcagaggcgcatgcagcggcagaagcagccacagccgtcacatatcgtacgcccatccctgaccccaaatcttggtcccttggatactactactaccaccagaaacgtcgacgagagaagggaagctaagctaggagaaatggctgccacagccatgcaatgcaggggaggtgagcgcagcgaggacggcggtggcggtggcatgaggacagtggagtgcctgagagggaggctgcttgcagagagggtagcatccaaggctgccaaggaggaggctgattcactcgccaaaaggctggatgagctggagaagaagctctccgacgaggtcaagatcaggaacaaggcggagaggaggctcaggagggccataaagaagctggagtccctcaagattttggatgtggagctctcggacagctccatcgggtcactctcctccaatagctgctccggtcaccgcgcgccggagacggaggcggacgtgaacaatcctggctcctcggctggttcatgcactcaggtgaactcctcccaggaagggagctggtgctctgttgtgtccgagcaatcaccatctgttcattgcaaggaggaggaggagaatggcttggaccctgaagatgctaagaactgcggctctggggaggaggctggtgaccatgactcagagagaacacatggaacgctcccatgtagcagggatgatgaacctgttcatgtgccatccgacttcggctcatcaaaatcccaagataaccaacgcgacgaggacgacgacaggctagcgctggtgctggtagacccgcagccgaatgcagaaacaggcaacgaagactatatgcgtatcgatatccaagcacggaaggctcaggccgagcccagagagggagacggcgaaatggaggaggcgaatgagctcgcgatcgtgctcgcggacccgcaacccgagcccaaggcggagcctgcggcgacggcgaggccgcgcaacgacgtgcagtccgtgctcctcgcgctgcggcaggtgaaggagcagctgcggtacacgatcgagaggaggtcggagctcgtcgcccaccaggagctttgcggccactgttgagagcgctgcacctcgtcagttttgagcagcggctcttgctagtatttgccacgatactactagagttcttgacagtgatagtgtagtagagtatttgtagagaaattggaataagattttgctcccgtggctgtgttacatacacgggagacaaactgagataattcagttgtgtacaatttgttctccatctgtcaatgttatatatgatggtctgat

SEQ ID NO: 7544 - DNA, 1744 bp, Oryza sativa
  ref <308>: DATABASE ACCESSION NUMBER: AK064671
  ref <309>: DATABASE ENTRY DATE: 2001-12-06
atatatcaaattctacgcacaaactgtagtgcaccagaattttgctaccaatggagctcccaagaatggccagtcgtcgtcttcctctgccactagtagctcaactcgttgtcttgctcggcttggcttgcgggctccggtcgtcgtcggcggcggcggcggcggcgagtggccttgccggtgaacgggttacatatctgcccgggcagccgccggtggacttcgacatgtactccggctacgtcacggtggacaagcgggcggggcggtcgctgttctactggctgcaggaggcgccggcggcggcgcagccggcgccgctcgtgctgtggctgaacggcgggcccggctgctcctccgtcgcgtacggcgcgtcggaggagctcggcgccttccgcatccgccccgacggcgccaccctcttcctcaacgactaccggtggaacaaagtggcgaacatcttgttcttggactcgccggccggcgtcggattctcatacaccaacaccacctccgacctctacgattccggagacaagagaactgctcatgattcctataagtttctggtgaaatggttcgagaagttcccgcagtataaataccgagatttctacatcgccggggagagctacgcagggcactatgttcctcagttgtcccagcttgtgtaccgtaacaacaaaggcgtcaaggagcccctgatcaacttcaaaggcttcatggtggggaacgccgtgacggacgactaccacgactacatcggcacgttcgagtactggtggaaccacgggatcatctccgacggcacgtaccggctgctgaacgcgtcgtgcgtgcacgactccggcgagcacccggcaccggcgtgcctcgccgcgctcaacgcctccacggtggagcagggcgacatcgacatgtacagcctctacacgcccacctgcaacgagacctccacctcgtcggcggcggcgaggcagcggcggctcaagcaaggccactatccgtggatgacagggtcgtatgatccgtgcacggagagatactcaacggagtactacaaccggccggaagtgcagagggcgctccacgccaacgtcactggcataaactacacatgggcgacgtgcagtgacatcctcaacgacaactggagagattcgccaaggtccgtgcttcctatctaccatgagcttattgcagctggcctaagaatatgggtcttcagtggagacacggacgctgtcgtccccttgacagcaaccagatactccatcgatgctctcggccttccaactactgttagttggtacccttggtatgataccatgaagattctatgtttgagagatcagcttgtgcctccacttcctcagaaatttgtgcgtcttcaccagcacctcctacctttccatcattgtaatcataaaggacaagatgtttcatacgggaagccaaatgcatgcgatgcatgatcctgctgctagtattgatatggtaaagcatgggaggaagtatggaaacctgaagatagaagcaaatttcaaagttttgtcatatgcataaaacgataaaaaatcatataacaaaaatagtatgagtagtagctcacctcccaaatatggattctttggagaaaatatgtgggtacttttctgcaggctaatacatgatacatgatagacaatgttagtcatatacttttgcattgattattttataatacaattaaagtgcagctact

SEQ ID NO: 7545 - DNA, 833 bp, Oryza sativa
  ref <308>: DATABASE ACCESSION NUMBER: AK064672
  ref <309>: DATABASE ENTRY DATE: 2001-12-06
acacacactcccatcactccaattaaccaaagctaattaagctagctcaagctctaatccacatttagctagaatggcgccgtccaagtccacagccgccgccggcgtcctcctcgtcctgctcgtcgcggcggcgggcggcggcgcagaggcggcggcgacgacgtgcgtggcgtcgctgctggagctgagcccgtgcctgccgttcttcaaggacaaggcggcgacggcggcgccggaggggtgctgcgcggggctgtcgtccatcgtgaagggggaggcggtgtgcctgtgccacatcgtgaaccacaccctggagcgcgccatcggcgtcgacatccccgtcgaccgcgccttcgccctcctccgcgacgtctgccgcctctcgccgccggcggacatcatctccacctgcgccaacgagaaaggtggtgtgccgcctctctactcttgcccggctccatctgcctgagtatatatgagaaaagaataaatgttaccaaaggagggatttcaacatatctaaaagtcaagatggagtaactttggtatacaagaccaacatatatatcacgttgttaaaggacaagtagatattggattattggcatatactgatatatccatgctaatattagtatatgtatattctgcaacatgcatggacatacacattgtcaaatgaagtactaagtaacacggaacgtgtactagctcgtgctactgtcgtgctatgcgctgtcaatagaaataaaatattttacattgtggtattaagcattaaagccatattgtattctaatattatcgggcggagattgcggattattcct

SEQ ID NO: 7546 - DNA, 915 bp, Oryza sativa
  ref <308>: DATABASE ACCESSION NUMBER: AK064673
  ref <309>: DATABASE ENTRY DATE: 2001-12-06
atcaaagcttagggagctagctagctcgatctcaccatggcgaacttccaggccgcgctgctcctcctcctcctccgcttcctcctcaatctcgccggccaccgcggagaggttctctcggtctcggcggcgcagcagcaagacccacccggcgacgacctggtctttctcaaactgcgtagcggcgacggcgacggcaccgtcctggccatgcaccgccacgacatctccttcgccggcttcaccaacgggagccaccactggcacgtcttccgcggcgacgaggacgccatccccaacgccaggcgcctcccgttccgcaacacctaccgcgacctcatcggcggcctccaccacgtccccggcctgccgctcgggaaagcggccgcggcgcgggccgccggggtgctcgcctcctacgaccccgacgccgaggaggggacggcggcggtgaagcgggcggtggcggcgctgtcggtgatgttcacccaggccctgcggctggagccgatcagggagacggtgtcgagcgggtgggagagcggcgaggcgcgcgtggcggcggagcacctgccgtacatcgagcactgggacaccatgtcgttcgaggtcctccggtggaggcgcaccggcgagtgggacgggcccttcaccgaggtgctgaggaggcgcgccggcatccgcagcgccggcgaggcgctcgccattgccaagctgctcgcgaaccgcagcttcgtgcagctgctgcaggatcacagccacagcgcctgatacttatatggagtatattctgcatttgcacgggtgctgtttctctgaataaaacgttgctctctatgctctagtgtcagttcgtgtgtcaccgtgatgtctgtgttcgttgctccctttctgaatgggatgatcttaaatttc

SEQ ID NO: 7547 - DNA, 1620 bp, Oryza sativa
  ref <308>: DATABASE ACCESSION NUMBER: AK064674
  ref <309>: DATABASE ENTRY DATE: 2001-12-06
attcaataacctgcaaacaaaatgcttcacaagggagaaattgcaatatagcctgctgactacagtgccaaaattgatattctgtttacctccgaaaggaaagaagctttgtctctcttctgatcagtgtgtggcaggagttcacgaagtatttcaagcctgaaggagagcatgaagaattgcattttagaacacatttcttgcaccatatacttatatgaaattgtcttggaattaaatgctgctaatatgatatcttgttgagctatctagctacgtcttcatggttggtttgttcctgctctgcagaaaataattcaaaatggtgtttgacctctactagcttgcctgtcatttatcttggtcctccttctctgctcagttgctgaatgctttgatctcggagtgctgggtccctgatcggcgctgctggcgctacttcttccctctgctcttgttgctgagtgcacatgtatatatcaaatccatcagtgcctgaattgaagtgacagactagagaatcaacaatacaactgcggtactaaccttcatatggtgtctggcctatggatctttgatcaatggcagaatcttgccacatcgtcgacggcgcacggtgagccctactcccagatcttcctcctgtttcatgtgcattctccatcctggcgccatgaagcgcaggtgcaaatgcgaacgcactcctcctgacgccgccatggctaccggcctcttctctcgacggagtaccggacgcgtgcctgatgctgaacgtcccgacgccgcccggtagcacgtgctcctccgagtccgaacctgccggcgacgcgccgtcgacggcactccccgccgccgtgccattgccgctgctgcggccgcgctgcttggccaggtccagtggcctcagtgatctgcggatctccataccgtatcctgcacttgacatgggtaacatgggttagcaagttggtgcattgctgtctaacttgcacaccatggcacttgcagttgagaaggcaaaggagagggcggtgcagacagctcacctcgcgatgaatggctggaatgctgctcctcccggtgctggaacggcggcgacgacgagccgccgccggcgcggagcgagaggaagtcatgagccggctcctctcctgcgaatcaccgacaagcacaacacaacacacggcaatgtaccatgagctgatgagcatcatgcggtgaagagagaagacgctgtggaattggaggaaggaaggaaaggacactagggtgaagtgtaattctctttgataccttggaaaagctgcattggcgcccgggacacaggacactggagatctgtcgacgctgctgccaagccgagcggcctgccgttgcagcagaaagatggcgcctggatcttgccgctgggcagtacactgatggaatgtagcgaattcggttgtccactcggaccttattatagtcggctaagagagagtcgagaaggataggagactgataatgatataacaaataagctagggaggtaagccctgctgcctgccgcctccctgcctgtctggctggtagtattatactttgtacctttgatataacaaacgtttcatggttaaaaag

SEQ ID NO: 7548 - DNA, 1689 bp, Oryza sativa
  ref <308>: DATABASE ACCESSION NUMBER: AK064675
  ref <309>: DATABASE ENTRY DATE: 2001-12-06
gaaaaaagattagaaccattacaagctgcatttccaaaacttgtaagaaaggagacgctgctagacttggaagctctacgacaattccagaaccattcttctcagatggctgcacttgacttcattgtatccacagccagtgatattttcattcctacttatgatggtaacatggcaaaacttgttgaaggtcaccggaggttcctgggtttcaggagaagtgtgctactagaccgacagaaattggttggatttatagatctgtacaacaataagacaatctcttggaacaattttgcatcttctgtccaggaaactcatagaaatcgtgtagttcaaccgtcctgtcggcagaaacttgaaaataagccaaaagaagaggattacttttatgctaacccacacgaatgcctggccaattcaagattttgcagccgaaccaaggatgcaatcagtgtaaggtgagcgtcaagtcaagttgtaacctcaccgagccaagttattatggcgacgtgcagtggactgaagccagcagcacagcaggcagagtccatcttgatcgtttaaccggttttcctgatctcctgttgtatagacctgctcgccaagcttggaaaagtttgcagaaagaatggaaggggacacgatgatgtcattcttcgagaacttgtcaaccctggatgatgccctcactcggaatgctttcctgcaaagcatcaagggaaaaacagaatgagaaccttaagatcacagcacttaaccaagatagcatcatagcaacagtaaaggttctaagaaatgccgtcctgatgaactcctcaagtcaactggtgcagcttgagagcagttgggagaaatagcatcaatactagctcgttcaacctgcgccggcagctcaaagctcatgaacccatccagtcccagaagcgcgagagctcgcaaagatcgggtcggccgcggcgcataccagcgaagaagggggcgcaatctcggaagcgaacggtgggggtaactacctgggcgaggagaaggcgaggcggcggccgagggaggcggcgcgcggcgaggcgaaggtcgagcacagcgacgacgacgacgacggcgacgccatctctctctctctctttctctctccaccaactccctctcgaggagcagcgagagcttttgatttggtgaagcggtggcggctaggaggcgtcgcgtaggaggagaggagaggagagggaaatctggctccgcttcgcctcgttatctgctcgctgctgcacccaagccgcagccggtccacataaatcgcagcgtgggggccagcgaatttcgtcgcgtttttgggttggggaggagtttttggttggttagttggtggcggctctgaggcgagccagccaaggccaagccaacgaccgcggtttcgtcctctaccaaacccgcaccaccactgcgcgcgtgtggttgcagcatttttgcacctgcaccgcaccggaaacggcacgaaaatgaaagagcatccgcatctcgaactggcatctctcttccagtcttcctcgcccaccttccgtgcggcagtggcgaaactatactatgtgccagattcctaatttcggacttaaaaatactagaatgtgcagttatgtgctgaaattttctagattctcaatggtagtgcacccctcttattttgatgct

SEQ ID NO: 7549 - DNA, 1844 bp, Oryza sativa
  ref <308>: DATABASE ACCESSION NUMBER: AK064676
  ref <309>: DATABASE ENTRY DATE: 2001-12-06
tacaagtcttccatctttggagaacttctaccttgtgactccacgaaagtgcttggtgatgacttttccaggtggatgctgttggagagagtcctgtttacattagatggtcttgaatgtaataagattggagttggctatgaagctttcaggagccagcctaacttttgttcatcgccacttgacagctgcttgggcgatcagctttccaaattttgggagattgacaaaaacagggtaaacaatagccaaccaccccaatacgttgttctgggaaagtttgaaaggatcaaccaatatccgaatgcaggagttcataccttttctgtgggaatcccagaagttctcaataccaatttgatgatagagctgagtgctgatgacatagaatatgtctatcagagaagctcagggaagataattagcattaacatctcttcgtttgaagccttaagtcaagttggcagtgctagagtcaaaaccaagaatattggaagacttgaagcttcatatagcttgacgtttgactgcttaagcggcatcaatcccgttgaggagcagtactttatcatgaagcctgatgaaaagcttattcggacatttgatttgcgttcgtcaacagaccaagcatcgaactatacatgtcaagctattttgaaggcgtcagatttcagtgaacttgacagaaaagaatcccaattctcaaccacagctacagttcttaacaatggaacacagattggttcgtccgaaaaccacacaaagggtggcatctggggtttctttgaagccatcaaagcctggtgcgccaaaatgtggcacatgctgattaatttcttcactggtacaacatgcagcacgagatgctggagcttcctcaagttcgtcatccacggcctgctacttgtcgcagtcctgtggcttctgcaccggaaagggctcttcgatccactgtactattggtgggacggcgtggtcgggtcggaggcgcaggagcgcgcgcgccggaggcacaagagagctcacagccacaggcactcccaccaccacgacgcgcacaagaggcacaagaccgagcttgccggccaccgccgccaccacgtcctccacatacatgacgacgacgacccggtggcggcggcggcggcggcggagcacgtcatcctccgccggcacggcaggcacgaggcggcgctcggcgtgcagcacagggacgggctcaagctcaacaagcaccggcgccacggtggcaaggcggttgcgctactgccgccgggggagatcatcgtccgggacggtggcggctgcggcggcgtggagcacggtgatcggaggcaccacgcgtggcactgacgccgacgccggtcgccggcgcggtttaaaatggcgttgacatactgacaagtgcacattatgatcgatgttgtaaatgttgctgctgacgcacggaaccattgtattgtgtgaatgctgatgtttcatctgatgcttcctcccggtgtggcggtgtagtcttggaagttaacccgagtgtggtttctggaatctggtgggtacgttagaattggagtgtgagagtcaagcttttgttggttgttgcgacagtgcgacactgacgtttcctcctctcgccgtagattgctgtctgtttgcgtgtgatttactggacttgtggggcaggttagaggcagagcaccgtgaggtgttcatttctgacgaagtactaggaggagagtaggtacaggggcacagtcaaggaaaagcagaacataggccttgcttttcaatagtaaagggttatgactaaatggcttcttcatttttaaatagtgttgttaaccttc

SEQ ID NO: 7550 - DNA, 1151 bp, Oryza sativa
  ref <308>: DATABASE ACCESSION NUMBER: AK064677
  ref <309>: DATABASE ENTRY DATE: 2001-12-06
taagctagatagatctatctcagatcgaaagacagctagaaatggggggcaatggcggcggcggcggcggcgatggcgtgacggtggttgggcgggcggagatcgacatgagggcgccgttccggtcggtgaaggaggccgtcgtcctcttcggcgagaaggagacgcctctgctcgccggtgatggtgatgttcatggacctggactacatcgcctccgattaatgaatcgtgccgccacaacgccgccggcaatatggccaacatttagccaacagcaagtctccggcggggtcgtcgccgtgacccgccacgtgccggcggagctggaggaggcgaggcaggagctggagaaggagcggtccgagaagcagaagatggccggctgcatcctctccctgcaggaggagctcagcaacgctatgagcgagctcaacaagatcaaggcacgcgacgacgtcggcgacggcgacggtggcgaggcggccgccaaggtgatcgacctgcaggtggaggacctcaagttcgtcgagatcgacgacgacaagccacagccgcgccagcagtcgccgtcccccggcgagttccagaagaggaggtacgtgacgttcgccgacccgccgccgccgatggcatcagcgtacgaccgcgcgccaccgcaggcgccattgccggacgtggtgatcgagctgcgccatcgtcacaaccacagcagcacaccctcgccgccgcagctccgcgaggtgcggttcatgaggcagatgtcggccagccatggcatgatgaaggcggcggcggtggcagcggtcgatcaagaggggagaaagaagaagaaatcgttgattcctctggttggagcattgttcatgaggaagaagaagagcagcagctgcagctgccacaacgacgactcggcgctcaacccgcgcacctccttttgatcctacccgtccgattgttgcatcggacgcttctccaccgtcggatatattgaagtacaaaatacatatacggtatttatatacgagtatagtatactactccctcgtatgtgtgcgagcgtacacgtacgtacaccatgatgcttgcttattttggatcattaataaataaacttgagctgtaatatacaatggatataatttgtttgt

SEQ ID NO: 7551 - DNA, 1929 bp, Oryza sativa
  ref <308>: DATABASE ACCESSION NUMBER: AK064678
  ref <309>: DATABASE ENTRY DATE: 2001-12-06
catagaagaaaaccgattattcgagtaatccaactgagagtctgtactctctttaggtataggtatgggtccttcaaacatattataactgagattgatatatcttgtgtacagggggagcaacgtgtcatgtccaagactggtaaatttgttatttgataggtccaagaagaacgattctttccaagtttcccatgcccatggaggaagctaggctcaagaattttactttgggagaggacactgctgaatcattgactaacccgtccaccacagataatttattatttgaaagatcaaggtgtgataagtatggtagtctccagaatgaggtaagttccactgtccccacgaagttgtttagtggaagatgcaagctatgcagttgtgtcaagttaaagatttgcaatggtatgtttccagtgaagttgctcttgaataaagacattcttctgagattcttgagattgcctatggaagatggtaaagatccagacaaaccacaatgagaaatttggagatctgtcaaagatgttagatttgttatccaagctggcattgatcctactaggccgagccccgaaacctcaaataagttcaaggatttaagcattcctagagaagacggcagttctgtagggaaattatttgcactcagactcagctccttcagatccgtgagattagaaatagagcttggtatgtaacctgagaacttggtgccactgacatgcaatttgatcaaactgctattaggtggaaaattgggcaaatcaccataaacttcatagttgtagctaatatcaatagctgtcagttttctgttctggaagatcctttgtggaaacaaaccctcaaacttatttcttgaaagctgaagaacactaagggatgacaaatcagcgaagaattcaggtatggcaccagacaggtcatttccttgcaagtcaacaacagaaagggatcgcaaactaaacagagattggcaaatgggaccagagatctggcataatggtaggctcagaacctgaatcttaggagtggaattagccagagcattgcaccacccttcgcctccgttggacatgtacaccaatccaagatagagctccctcagattaccaagatttgcaatcaacttctcgaagtttaccctcgagaagccccaggggggtaacaaatttgacatgatactgacatcgtcatctccttgattgacgatgtagatgctagatgacagatcaagagaaaccaagttggtgaggcttccaatacctgctggtatctggcctgcgaagctgggtggggagatgttgagatgggtgagctcagtgagcctctcgaatccggtggccgggagctgtgacgcgttgaagtcgttgccgccgaggttgagatacctcagcgacgtgaggctgaagacggcggcgtcaaggccgccgctctgcaggcgtcggccgcctagatcgaggaaagtgacgcggccgccgtcgcagcggacgcccgcccagcggcagcagtcggtgccggcgcgccatgaccggaacgcggtggcggacgcggtggtcgccgagaacgatcgcttcagctggagcagcgccgccgcctggtccggcaagcatggaagcgagctcgcgatcaaggtttgtagtaggaggaggagtacaagtaacaacggctcgtactctcgttgggctacccgaggtgacatcttggcgggtggcagctgaatgaatgactatattgtatgatgcttgaaactgatttttttttatacatgtagagctagagagagcctgttcagtactccaagcctgacttgtatgactgaattgtgatagtgtgatggtgacatactatatcaagtcaatgcaaatgcaaataatcaaagatgccgttggcatcgtagtcgtatcgtacgtgggacgt

SEQ ID NO: 7552 - DNA, 1389 bp, Oryza sativa
  ref <308>: DATABASE ACCESSION NUMBER: AK064679
  ref <309>: DATABASE ENTRY DATE: 2001-12-06
accatcttgctaaattaaagcctaaagcctttccatagtattaacccaaatcgagcaaattttttctcatcttggtagctttgattcttcgtcttctttgcggcgatcgattgatcttgaggagcttaatatatcgattgagatagcaaatggggaggcagccgtgctgcgacaaggttgggctgaagaagggtccatggacggcggaggaggaccagaagctcgtcagcttcctcctcggcaacggccaatgctgctggcgtgccgtccccaagctcgccgggttgctccggtgtgggaagagctgccggctccggtggacgaactacctccggccggacctgaagcgtggtctcctgtcggagacggaggagaagacggtgatcgacctgcacgagcagctcggcaacaggtggtccaagatcgcgtcgcacctgccgggcaggacggacaacgagatcaagaaccactggaacacgcacatcaagaagaagctccggaagatggggatcgaccccgtcacacacaagcccctctaccctgctccgccgctggccgacggcggctcgccggagcagaaggtgccggaggaggaggaggaggtggaggagaagtcgtctgctgccgtggaaagctcgacgagcacctgcgccggccacgacgtgttccgcaccgacgaggtgcccatgctgcacctggacgacatcgtcctcccgccgccgtgcgacgtcgtcggcgacaccgccggctcgccggcagagtcgtcgtccacgtcgacgtcgtcgagcggcggcggcggcatcgacgaggagtggctgctgccgatcatggagtggccggagttgatgtacctgatggggctcgacgacgtcgacatggtcaccacggcggcgccggcgatggcgacgtcgtgggagttcgaggatccgttcaacgcgtaccagaggatcgcgttgtttgatcaccaccacgagctgacgtgggcttgacgtaaccacttctgaattttctcttgtttcatactccctcggtctcataatataagagatttattgtaccgggatctattatattatgagatggagggagtacaaatttcatctcggcgctagctgcacttagtgatttattaccattggattattagtgccctaattaaacaattagagataggattaagaacatatataagatgataaaaaaaaaggtgaagtggttgtgtgagagagagagagacaaatgcatgagctagccctctttaatttcgcctttctgtcatttttttttctgctcatcattttttttcaggcttcttttagatacatgtgtttggcatacatacatgtaaatgaaaggaatttgaataatgaaaatgagagtgaatggtgt

SEQ ID NO: 7553 - DNA, 1708 bp, Oryza sativa
  ref <308>: DATABASE ACCESSION NUMBER: AK064680
  ref <309>: DATABASE ENTRY DATE: 2001-12-06
atcactcgccaaaagctcagcccaggatcccccgccgccgatgtcggacggcagcgtcgagtcgccgtcgctccaccgcacgccgcctccgccctccccgtcgccgtcactctcgctctcgcgctcccagcagcagaccccgcggggccgccagccgcccccgcccggcgccgaccccgtcgccttcgccgtcgtcgccttcgtcgccatctgcttcgtgctgatttcattttcggcaccgtcaagcattctacatcaagtccctgaaggacatgttggggtgtactggagaggaggtgctcttttggaaacaatcactccaccaggttttcatgtgaagctgccttggataacccaatttgagccaatacaggttactcttcaaacagaccaggtcagaaatattccttgtggaacaaaaggtggagtcatgatcagctttgataagatcgaggttgtcaaccgcctccataaagagtttgtgcacgaaaccttactcaattatggtgtgcattatgacaagacatggatctatgacaaaattcatcatgagataaaccagttctgtagtgcccacagtttgcagcaagtttacatcgacttgtttgatcagattgatgaaacgatgaaagaagctattcaaagagactgtacacgctatgctcctggtattgagataatcagtgttcgtgttacaaagccgaacatacctgatagcattaggagaaattttgaacttatggaggaggagcgtacaaaggcattgattgccattgagaagcaaaaggtagcagagaaggaagcagaaacgcagaagaagattgcactatctgaagcagagaagaatgcacaggtgagcaagatcctcatggagcagaagcttatggaaaaggacagctccaagaggcagcaacagattgataatgaaatgttccttgcccgagagaaagctcttacagatgcgaactattacaggataacgaaggaagcagaggccaacaggcttaaacttacaccggagtaccttgagctgaggttcattgaatcaatcgccaataactcgaagatactctttggtgaaaagattccaaacatgatcatggatcaaaggatgcctaggaattacctcgacaatggttccaccaaggaccatttggaaatatagcagttgtctctgtgaattgcaaagaacattggctgtttttctgatcccacggggaaattaggattctcacggatctgctcactacttggtaaagccaaaaggactagacattagggccttttaaagatggaaattagtagtctactgtagtagcatagctggaggctggagtaatcgttttgcgtgcgtgcgtaggagctgggagttacgttagatcactagatgcgctatcttgtgcaatctgcagaactgatggacaggaacaaatgctatcaggagcactatgatttccaagttcagaaaaggttctacgagtacaaatgggaaagatcgggcattacttgatacagtagtctcagcgatcgacacagcactaactgtgtgaagctatatactcctatctggaattgaggtatagcatctgtctgcaaggaagatttctgagtgtagcaggttcacatacatgttgcatgcatctatctgcaaacaaacctgtatcatgaatgtgaacaattggactagtaactaatgggtataggaaac

SEQ ID NO: 7554 - DNA, 1385 bp, Oryza sativa
  ref <308>: DATABASE ACCESSION NUMBER: AK064681
  ref <309>: DATABASE ENTRY DATE: 2001-12-06
acacaccaaaccacctcgagatcgcttcactctcgtagcaatggcgccgtcgctagccaccgtcgttgcgatcttcctcgccgccatcctcctctcgtcgccaccaccctgcgccgccgcttcgtccgcgccagcgccggctgcggccgggcatggcgtcccggcggtgttcgcgttcggcgactcgacgctggacccgggcaacaacaaccgcctcgccacgctggtgcgcgccgaccacgcgccctacggccgcgacttccccggcggcgcggccacgggccggttcaccgacggcaagctcatcaccgactacatcgtctcgtcgctcggcatcaaggacctcctcctggcgtaccactccagcggcctcgccgtcgccgacgcctccaccggcgtcagcttcgcgtcgggcggctccggcctcgacgacctgaccgcgaacaacgccctggtgtccacgttcggctcgcagctcaacgacttccaggagctcctcggacacattggctcgcccaagtccgacgagatcgccggcaagtccctgtacgtgatctccgccggcaccaacgacgtcaccatgtactacctcctgccgttccgcgccacgaacttccccaccgtcgaccagtacggcgactacctcatcggccttctccagtccaacctcaacagcctgtacaagatgggggctcggaagatgatggtggccgggttgccgccgttgggctgcctcccggtgcagaagagcctccgcggggcgggttccggaggctgcgtcacggagcagaacgaggcggcggagcggtacaacgccgcgctccagaaggcactctccaagctggaggccgactcacccggcgccaagatcgcctacgtcgatatctacacccctctcaaggacatggccgagaaccccaagaaatacggtttcacccaggcgagcctcggctgctgcgggacggggatgatggagatgggggcgctctgcaccagcgcgctgccgcagtgccagtcgccgtcgcagtacatgttcttcgactccgtgcacccgacgcaggccacctacaaggctctcgccgatgagatcgtcaagtcgcacgtgccgcagctcatgcagtaattagatggtccgtagcatagtttagtgtccagtgtgttaaactaattattaagaataatagatatgcatggttcagtagctatagagtttttgcatagagtaaagtccatcaccggtccctaaacttgtaccgctgtgtcatcccggtccctaaactcgcaaatctcggtccctaaacttgcagatcactcgtttaggtcctccaacttgttcagttgtgtcaccccggtctctaaacttggatttgaatatcatctgggtc

SEQ ID NO: 7555 - DNA, 936 bp, Oryza sativa
  ref <308>: DATABASE ACCESSION NUMBER: AK064682
  ref <309>: DATABASE ENTRY DATE: 2001-12-06
accgattcctgcgtgatgtcgctgcgccgcctggccgcgtccgccctgcgccgcggcggcgccaacgacggcggcgtgctggccgccgtccgcgccgagatcgctcatgagctctcctcctccccctcctcctctcctccgtcgctccaatcccaggacattcctgatttctccaccgtgtcggacgcgccgcgcgggcaggaggtgctcctgcgccgccgggatgcttccgaggaggtcctcgtgtcggcggtgctcgcgccgctgcggttcgaaggggaggagcccctgcccagggacgcgctcatgaaggtgttcgtcagtaagcctgatgtgaagccggtgatgcggttcgattgccgcgcgtttgcagctgaaggtgatggcggctctgctgactatgatgttactgctgtttgttaccacccgtttgctggcgagtgcgacgctggggaagacaagtatgaagggccggagttcaggagatcttgctaatcatcaagtgaaacgtggattcccagagatgtcgccgtgctaataatcaagtgaaatatgattttgggccaaatactcatatggcagctgaagccaatgaaagcattgttcaatgcttcaactgtaagttatgatgtcaaggagattgaacgtcctgaagaaaaaatggtgaaacggatgacgggatgccacgctcggagggagtacgtcacgtgccacggaggagggcacagtgcgcaacgcatgtgaggggggaagagaggaactacaattttgctgttggtagttttctagctggcccactttatttgtttggagagttgaattttgggtatctcttggagataaagatatattcatgccttatatcctttttagagatctcaaaataatagtttaggggattgatttgggtggctgttggccatgctcttaagcatt

SEQ ID NO: 7556 - DNA, 978 bp, Oryza sativa
  ref <308>: DATABASE ACCESSION NUMBER: AK064683
  ref <309>: DATABASE ENTRY DATE: 2001-12-06
gctcccgaaatcacgccgcatcctctcttcagccaacgtcgcccacccgctcgtcaccgattccccatccacgatttctctcctctcccgcgccgcccctccgtcgtcgtcgcgtgaagtcctggccgatcccctccgtcgtcgtcgcgtgaagtcctggccgatcccctccgtcgtcgtcgcgtgaactcctcgccgatccccttcctccgtcgcgccgtcacgccgccgattcccccctcctcgtcgggcgcgccgcggggttcagtcggcgccgatccccatcccccaggtcgccgtcgccgatcctgcatctcctctgtcccgtcctcgccgatcccccgcctccctcgcgccgtcacgccgccgattctcgcctctccaagaccgtttgctggtgcatgtgcatgtatatgataactattgctcctcgatgactgggtcgctgttgaaggctcagttttggcaagttttgaattcgagctcgatggccgggtccctgttgaaggctttcagttttggcaagttctgaattcgagcgagctttcatttttgcatcttccccagatcactgctggtcaacaggtcaacaaaagaggcagtggagactgaggaggtcgccatccacaaccgacaacgacaacgcgacgccgctgccgcctcaagagccaccgctgcctatccatactcacgccaccgttcctcctgcgccgaaaggtactttcagcgaacaagaatcttactccattataaggaatcaaaccaatcgtgaaggtagctggtactttgagaactgtcagatatgcaaatctggctaaatggtcatccatgtgaaatgccttaatgaactctgtatttatatagatgagatagctcatttagagagtacatacatgatgtgggttcttcgatccaataaactctgtagtgttgatccatttatatataattctccctgttgtgctgatccatttatat

SEQ ID NO: 7557 - DNA, 1046 bp, Oryza sativa
  ref <308>: DATABASE ACCESSION NUMBER: AK064684
  ref <309>: DATABASE ENTRY DATE: 2001-12-06
ggcattactggatcacatcacccaccacactagtagtcgtcgtgacgccttcccttccactctcgccgccgccgctgttccgctactgcaccacccggaaccacttcgacatccctttccctgattggtccttctggggctggcctgaaacgaacatcgagccgtggagcaaggagttcagggacatcaaggaaggggccaaggcaatcaaatggcaagacagagtggcaacggcgtactggaagggcaaccctgacgtggcgtcgccattgagggtcgcattgcttaactgcaacgacaccaacatgtggcacgccgagatcatgcgccaaaattgggatgaggaggtcaagtccgggtaccataactccaagctctccagccaatgcacccataggtataaaatatacgcggaggggttcgcgtggtcggtgagcctaaagtacatactgtcatgtgggtccatggcgctagtgattgacccgcagtacgaggacttcttcagccgtgggctgcggccggaggtgaacttctggccggtgcacatcgacgtcgccgccggcggcatgtgcgagtcgatcagggacgccgtggagtggggggaggcgcacccggcggaggcggaggcggtggggcggcgcggccagcggctgatggaggagctcgacatggacgccgtctacgactacatgctccacctgctcaccgagtacgcgcggctcatgcggttccggccggcggaggcgccgccgccgcggccgccggcgcaggaggtgtgcgaggcgtcggtgctgtgcctcgccggcgagaagcagaggcggttcctggaggcatcggcggcgagccccgccgtgtcggagccttgcgtgatgccgcccgatgccggcgagtgataaaatgtgttacattatgttttttttagagcaacacggtaggatacgtaggcagaaaatttgagcagttcaacttgggattttaggatttgctttcagccttaaacttattttattttcagccgagcgcaaaacaattcgaaaattttgagc

SEQ ID NO: 7558 - DNA, 789 bp, Oryza sativa
  ref <308>: DATABASE ACCESSION NUMBER: AK064685
  ref <309>: DATABASE ENTRY DATE: 2001-12-06
accgagttccacctcccaaacccctcaaccctcgccgccgccgccgccgccgccgctcgtcgctctgctccgccgcagccatggggaagttccgcaagctcggccgccacgccgcccaccgagtatccatgctcaggacgatggtgtcgcagctcgtgaagcacgagcgaatcgagaccaccgtcgccaaggcgaaggaggtgcggcgcaaggcggatcagatggtgcagctcgggaaagagggcacattggatgcagcaagacgtgcttctgcttttgttcggggagatgatgttgttcataagctatttacagagctagcctaccgttacaagaaccgagctggtgggtacaccagactattgcgaactaggatacgagttggtgatgctgcaccgatggcatacattgagttcgttgatagggaaaatgaacttcgagaagccaaacctgcaacaccacagccacctcaacggtctcctcttgatccctgggccaagtctcgtgctagccaacagtgggcgggacctaaaatcagcgagggctctagaaaagaaggcttatgaaaataatattcatgtgttgagttccttgagactgtattcaattttctgtactaggctatgaggcaccagcttgtcattttggaggagttttgtcacgagatatattgtcaatagaataatttgaacttggctgcttacttttaacaaagcctgatgccctcatgagatgtgtatcatgtatgactgcaaatcattcattgagatatgaaatgcagaattatcc

SEQ ID NO: 7559 - DNA, 1125 bp, Oryza sativa
  ref <308>: DATABASE ACCESSION NUMBER: AK064686
  ref <309>: DATABASE ENTRY DATE: 2001-12-06
gaagtactacggcctccccatgtcgcaggtgaccgccggcgacggcgccaagatcatgggatacgccgcggtggggtcgccggccgcgtcccacaacgcgacgatcgtgttcaacagcacggtggtcggcgtcaagccggctccggtggtcgccgccttctcgtcgcgcgggccgagcgcggcgagccccggcgtgccgaagccggacatcatggcgccggggctgaacatcctctccgcgtggccgtcgcaggtgcccgtcggcgagggcggcggcgagtcctacgacttcaacgtcgtctccggcacgtccatggcgacgccgcacgtcaccggcgtcgtggcgctcatcaagaagctccacccggactggtcgccggcgatgatcaagtcggcgatcatgacgacgtccagcgccgtggacaacgacggccacgccatcatggacgaggagcaccggaaggcgaggctctactccgtcggcgccggccacgtcgacccggcgaaggccatcgacccgggcctggtctacgacctcgccgccggcgactacgccgcctacatctgcgcgctcctcggcgaggcgtcgctgcgggtcatcaccggggacgccgccgcgacgtgcgcggcggcgggctccgtcgcggaggcgcagctgaactacccggcgatactggtgccgctgcgcggcccgggggtggaggtgacggtgaaccggacggtgacgaacgtcgggccggcgagggcgaggtacgcggcgcacgtggacgcgccggggtcggggacgacgacgacgacgacggtgaaggtggagccggcggagctggtgttcgaggaggcgatggagaggaagacgttcgcggtgacggtcacggcgagcggcggcggcggcgcgggcggcggcgggcatgtggtggcggaggggagcctccggtgggtgtcgcgacgtcacgtggtgcggagcccgatcgtggcggacagtagcgtcggcggccccagccgcaggtcggcacaagatgcttaattagttgccgccttcggtttgatcaacactacatttatatactatcgtcaattaacccatgtcatcgatatttatacatttcaagaggtaaagtttacagc

SEQ ID NO: 7560 - DNA, 1271 bp, Oryza sativa
  ref <308>: DATABASE ACCESSION NUMBER: AK064687
  ref <309>: DATABASE ENTRY DATE: 2001-12-06
ggcttgaagaagcattcagttgtctcaggagtattccctgactcctgtaccgcaggctcctcccaacgccgctcctcccgatccccctccggcacgtcctccatggcggcggcgcgaccaatctcgccggccagatcggcagacacctccgcctccctcgcagcaacctgccgtcaccaccctaccccatcccaactcaacttccctttccggcttccaggccagatccggccgcctccgacttcggggcgccagatatagctcagggcggcgacgggaacgggaagatctccttgagctcgtgggcaggctggctacgagcacgatgaagaagaggcggccacggtgacgcggcggcgacatcggaggacgtgggctgatatgttgggacgcctgcgcgactacttcccagcatcctctctcctccccggcactagtacagagaaggcggctgttgggcgacggcagcgacttcggccgaccgccctccctggtatgctcccgatggcgctgatgcttcctcctcctctctgatccactctcaacccatctggaacgaagccaatgtcagcatgagctgcgagtccagcttcatccggccaaggttagtgaacttatcccaagaccgcgacctgagacagggttgaattataattgaatgtatacggatatatcttaaaaattagagacaactgaagcttagtttatttagcaagaactctagatgttaaaaatcttgtttatcttcatctttacatatcactgtgtgctgatagagctttgcatgaaagaaatatggtagttcgtactcaacttacaaggactgaaaaggagttggtaagatcatgcccaagaatttgtcagctttataactgtctttgcacttcctttgcacacattttattgcgtttgtcgttcttctgtcatgcaggcactgaggatcataaaatcaactctaatcgaaaatcccattttattgacaacgattgaagcctcgtttggatcaaaatccgtcaaaatgtggcctcatagtggaacgctgaagctgcatttggcaggattcaagtcaagttgtttgttaggaggctagctgtgcctatgggtatatgtaaagtgttatgtgatgtgaagctgtttgtcgtagctctttttttgtgtcaaattctccatactttaaaaatgtgacgatatgcatgcgaatgtttactgcgatcaacatttttgtgactgttggatgtaggtgaatacaggggagttatgctgaaattttt

SEQ ID NO: 7561 - DNA, 1789 bp, Oryza sativa
  ref <308>: DATABASE ACCESSION NUMBER: AK064688
  ref <309>: DATABASE ENTRY DATE: 2001-12-06
gcaaaaagaagaagaagaagaaaaaaaagaaacagcgcctccccacatcgccgcgcccgcgcctccatcgcctcccgcctcccgcctccccacctcgccgcgccggcgcccccatcgtcaccgtcgaccgtccgccatcgccgctctcctctctctcgcactcaccccgtcacccgacgccgccctcatcggccttcccctactcgttccactgccgaaaccctagacccgcaccaccctcgccctcgcgaaatcctcctcgccgccatcgttctccatcgccataccaccgtcgcgccgccacgccttgctccgctgatgccgccaaatcaccgtcgcccggctcgtcggtctcctccgcaccgttcccgatctccgccgacaaaacatcgtcggactcctcgccggttccttctcgccaccaccgttcgccgccgccagaccgccgtcgcgctgccacgatctgcggagcccagcctccatcggctgggtcggcgccagatcgacaggagccaccggcagctccacttgcgccgtcatcgggaaccgtgaaacgacctccacgggctgcgcctgcgccagattgacgggagccgccggccgctccacttgcgacgtcgtcgggagccgtcgaccgacctcctccatgggctacgcagccgccgaatcgatgggagccgccggccgctccacctgcatcgtcgccgggagctgtcgaccgacctcctccatgggctgcgcagccgccgaatcgacaggagccgccgaccgctccacctgcatcatcaccgggagccgtcgactgacctccgtcggctgctaacttgccatatttgttcttcagatagcttaatatggagaagactccgccctccgcgcctcactataatgaactgctctatctgaaattctgagaatgttatatctgaaattctgagaaaatgtgacattgttaaattgctatataatttatgatatactagaatataattagcactatcttctaggtgcttatttctaattgaatactcagtggtagttaataattgttgcattgataaacaagtgcattggacttaagttttgcaagatagtcttgaataagtaaagatgcttacttgtctgtgctggtgaaatcttcatgctagatgagcttgtgtgctttttggaaaaaaaaaactgagtgcaaacgtacaatttattgagatgtaaactttgggtggtttgttgttagcactattaagtattctattgttccactgatgggtgtagctgctaccaagttatctagcacaggggtttttagatgatcaggtccattttttcatgcacagccgtggatctttcactaaggtggtccagtgctcgatctgcttcaggtttagtcctaatcccctgaaggtctcaacgtctgctttcagaacgttggcagcagcgatccgccatgcgtgacctcaccaatcagagacctcttgtgcccatatcctgttgtttccattcgacgtcctcagtaactcctcatctgaatttaagatacagaagaggcttctgtttggctgctagcctgctaccttgcttaattagaggatgaggctgcagacagtttcttacaagaggtatgcaacggcgcatctgtatgcataggtttctcggttagaacattcttttttctttcacccaactcgacccaataggtgtaaatatgtatccttctttataacatgttagagggattatcttgtaatctgttcgtcgcctggataagcatattgatatggaggcacgcccg

SEQ ID NO: 7562 - DNA, 1700 bp, Oryza sativa
  ref <308>: DATABASE ACCESSION NUMBER: AK064689
  ref <309>: DATABASE ENTRY DATE: 2001-12-06
acgaaatctctctgcgccagcgacgtgttcgatcaattgcctcctcaaccaccgcctcgccatggtgctgaagaaatccaccggccgctctagcggccacgcctcgacgtcgtacgatgcctccgctggcggcggcgctgtggctgtgagcgcgtatgagcagaggatccgtcgtaatgccgccgtgctcgagaaggtcgccgtttcggtgcacgacagcctggcgtcgacgcgggaggcggcgctggcggagctcatcgccgcgctcgagggcttcctctccgccgacgacgcggagggtgggcacaccgacgagatcctgcgcggctgctacgtctccatcaagaagagggccgccagggaggcctgcgtggcgctccgcgccgtcgcgctgctcgccgtcacgctcggccccggcgccacctcgaagaagatcgcggcggtggagacggcggcgaacccgctcggctccggcgcgaataagatcatgaaggcgacgtacccgctcgcctcccggattctcgaggcgccacaagccgacgcgtccctggtggtcgccgcgctcgagtgcctcgccgtcgtcgcgttcgtcgacgtcgccgcggagaacatggacgacacggaggcgtgcatgaacgcgctgtgggcggtgatctgcccgagcgcggggcccaagctcgccagcgcggcgaaggggacggcgagcccccgcgtgctggccgccgccgtgtcggcgtggacgctcgtcctgaccaccaccggcgggtggaacaagaagaagaaggtgtcccccgccgcgccatggcgaggcgcggcggctcacgcgcacctcgtctccctcctcggctccgacagccgcgaggtccggatggccgccggcgaggcgctggccgtcgccatcgagatgaagctcttcaccgagaaaaacaatggcgccctcttctccaagatggaggccagagcttccgacctcgccaacgacgccgccggagcgggcgtcgacaagaccaacttcgtcgagcagaaggagctcttcaaggacatcacgacgttcctcgccggcggcaagcccccggtgatctcggtccgcacgtcgtcgtccaactacggcctcctcacgacgtcgacatggacggacaatgtccggctcaacttcctccggcgattcctcgccggcggcttcctgcaccacctccaggggaagggtctgatgggccaggtgttcgtcatcgacgacgacgaggtcaccgggaagctgtcggcggcgaggtcgaagcggagcctgatgaaggacacccgcattgtgaaggagttgaacggcggccgtggcggcggcggcggcgccatggatgagaagaaggagaagaagcaggagatgatcaagaactcgctggagaagaagaggacagttaagaaggagcggctaatagcccatgagctcaagcatggatcatctgatctatgaaacaaggaaaggaattatggataatttaattagggttgcatttcatatatatgatttatcttttttagggtttatagggcagtcttttagggttaattactagatgcaacgtactgcttggtttccctttcaatatcactatgttattttcgtattattgtcatgttcattcatggtccacaattgtacttgggagttacattcaccacgattcaatcacgctaattagatcacc

SEQ ID NO: 7563 - DNA, 1836 bp, Oryza sativa
  ref <308>: DATABASE ACCESSION NUMBER: AK064690
  ref <309>: DATABASE ENTRY DATE: 2001-12-06
atgctgttgtgagtagtgattagctaggcggctattagcagcagcaaccagttctttttgcgtatgatagatgatgcagagtgcagctggagcaatggagctgctggtggcgtcgcaagaagcaggcggcgttgtggtggtgggcatgaacagtggcgacgccggagagctgagctacgccaacaactcggacatgcagcggacgatcgctgcggcgacgaggaaggagcggcaggagatggcggcggccgttcggcgcggtcggcggcaggcgagagccatagccatcgccgacctcgggtgcgccacagggccgaacgcgctgctgatggccggcgacgccgttgaggccatgctgggcgacgcggagcggcagcaggaggcggcgcctgcagagttccacgtcttcctcaacgatctccccagcaacgacttcaacagcgtgttccggcagaagcagaagctggtggtgccgagcaataatgccaatagcagccggtgcctggtgtcggcgtggccggggtccttctacgggcgcgtgttcccggcggatagcctggactacgtggtgtcgtcgtcgagcctccacttcctgtctagggcacccgcagatgcggcgcccaacgaggggaggatgtacgtgtcggcgtcgtcgagctcgagctccagctccagggtgctgcacgcctacagggctcagttccaggccgacttccgcctcttcctctcctgccgcgccgaggaggtccgccgcggaggcgtcctcctcctcaccttcgtggccaggcgggaggcggtgccctcgccgcacgactgccacctctgggacctgctcgccgaggccgccgccgacgacaggaggctcgtcgactccttcgacgcgcccttctatgggccctgcccggaggagctgagggaggccatccgcgaggaggggtccttccaggtgacgaggatggagctcttcgaggtgagccgctcccgctcatgccaatcccaagcagatctagatcagctggcggctcagacaagcagcaccatcagggcggtggttgagcctatgcttggaccacacttcgggtgggacgccatggacgccctcttccggaggtacacccacctgctccacaattactaccgccacaacaacgaccagctcaccaacgtcttcctcgccttgcacaagatttgacttcattcatcccatccttccttccttcaaccatatatatataccacattccctacagtatcagtatgtattactgtatttccaaaacgtacctacaatatataccacgtgtcagttctacgatatatatatactacccggataaaatgatagtatcgtttctaaaatcgggataccaactgtttcatgtactagacaatatttaaattcaaaactatttaagtgtatttgtgtttatgtatcttcaaaatcaatcttaaataaaattattagaactagtgagtggctttctcttgacaaatgtctcttttcatgtactattctatttatttagaatggctatatatatttaatataaatattaaattaaacttagaaaaataaaatattatatatcccgatactacgatgcgattaaacaatccgatactactcaccttctacatgttcaaagtgtatagtacaacttccattctagcagtatattatatactagtatatatctgttcaaagtgtatagtacaacttctcttctagatgtgatcctcctatcttattataaatatgtttttattgtgtttgtgttgtaattaacatatataaatctgttgtgactggaatggattttaaacctcttgagggat

SEQ ID NO: 7564 - DNA, 1984 bp, Oryza sativa
  ref <308>: DATABASE ACCESSION NUMBER: AK064691
  ref <309>: DATABASE ENTRY DATE: 2001-12-06
atcaccgcgagcagcggcaccggcagacggcagtccagcactcccgcaatcccgctgctcgtgccgcatactctcgcctgctactcctcgcgcccaagtcaatctccccgtcctctcggtctcggctcccgcatcctcgcgagttcgccagccgccgccgcctgcgccgatctccgtcccgcgagcagcggtgcgtcgtcctgctgcttccgcctcagttgaacacccgtgccgacggacggcctacttctttctcatccgtctccatccacaccttctctctttggccttatcttctcttctagatctggaagcctttcctcttcgtcttaaccttagtactaataacagttaggtccgcccctttggggagtacgctgagatgaccggcgcgggcgacgccgccaaggagtacgccgccggatgtgctgccggcatcgcacaggtggcggtcggccaccctttcgacaccgtcaaggtcaaattgcaagctcacaataccacagctcatgggaaggtatacaggaatgctttccactgtactagaaggatactggttgaggaaggaatgagaggactgtataaaggtgcatcatcttcatttatcggtatcgcacttgaaagctcccttttctttggcacatattcacaagccaagcaattactaaagggaaaatctgaggatggtaggccacagctacaggtaataataccttctgctgcctgtagtggagctttaaccagttgcattctcactccaactgagctaatgaagaatgcaagttcaagggaagcatgcattgcatggtactaggtactccagtcctctagattgtgctatgaaaacgctgcaaagtgaaggggtttgtggtctatttcgtggtggtttggctacattgtttcgagaggcagttggcaattctgtcttcttttgcacttatgagtatagccgatattggatgcacaggtatctagattcactatggttttcaggtggcaatcacttagttctggcaaaagatgttggcgtaggaatcatgagtggtggcattagtgggatggcgttctggacagctactctaccattggatgttgcaaagaccattattcagactgaccctgaccctcatttgagtcgaaacccctttcaaattttaaaaatggtttatagaagagctggaatgggtggctgttatgctggccttggtccgacgcttgcacgagcattccctgccaatgcagctgcaattgttgcttgggaatacagtgctaagattcttagtataaggcgtgactagcataagatgctgaaagctgaattgctggtccaattttccataatataccggggaacacacctgattaatcattttttttctatagttagatggttttggtaggaaatgtttatatttggtaccttaactcttcttcaccgtggtcaacttttgcccctcaactataactattcaaaccatctaaataatgtccccagactggttctgtggatactttttgagtgacatggctgccacatcttgaccccacacttcatgtcctcttgtctttaaattaaatgcggttggagaggaatatgaacaaaggtggataatctagttggtcccatcacttccttttatttcttttccttgatttgttttccatgtcggcatccaattaggaaatcatctaggacagtacaacctaggtacgtgcgcaaggacgtcatttcagttttgactgtagaggaattagttctggaagagttcagaaagactaaatagacctttgtcctgttcatagagaggtttcgttaaaattcagtgtattgtaaaactcagcggtacatttttaattgtaaactcagttggggagaggcttcttagcttatcccgtttgattgcatcaaacgaggaaatggctgtgactgcatcaatggatgttgcaaattgtaccctgtcaatggaggcccatttgaattgac

SEQ ID NO: 7565 - DNA, 2007 bp, Oryza sativa
  ref <308>: DATABASE ACCESSION NUMBER: AK064692
  ref <309>: DATABASE ENTRY DATE: 2001-12-06
atgcagcatgctgcgtacgtacaataagatacatattatgggaaacggtgatgacactactacagaaatggtttttctggacgaggcagggcagcagctgccggaggtgagggtgaacataatccacgacgacaacgacgatggcggcgacctcccgccatcgtcgctgtcgttccggtggaagacgaagaagtaccgtctgtggcgagtcccggagcaggtgcgcgccatcaacaaggaggaagcgtacgcgcccaagttcgtgtccgtcggcccgtaccatcgtcgtcacgccggcgccggcgatcgcaaccgcctctgcggcgagaagctcaagaagcgctacctccacgagctcctcagggacgtcgagcctgacgaccacaagcatggaggcatcctccaacgctgcaaaagcagcctccaggagattgtggacgatattcgttggttttacgcggaggaggagtacgtgcgcgagatgaaggatgaggagatggtgaggatgctgctacacgacgggtgcttcatcatcaagcacctctacaacttcgtgcagggctacaacgaggaggagctgtacgcgacgcggtggtcgccggcgcagctgcgcatcgacctcggcatgctggagaaccagatccccttcttcgtgctggaggagatcttctaccacctcacgccgcggaagctccagcggaagatcacgcgcgacgtaggcgacgacggcatgatgatcacgccgcagaccttccagcgcaagacgatgatgcggcagaggaagaggcacaagctgccggtcatggcgatgtggtacatgctcaaggggtggttcgtcctccccgaggacgagagcgacgagctgtacaagctcatcgccgacaaggaggtccaccacctgctgcacctgctgcacctcgcccacgcccacctcgtcaatgtcgacgacgacaaaggcgccgtcctcggcctccgccggcgcgacggcagcgccaccaaccagcagcagcagggccacgacaaggacgacgacgacgccaaggcgaaggcgaacatcgtgtcggcggcgcagctgcgtggcctcggcgtcaagatcagcaaggcgccgacgaaacgcggcggaatactggacgtgcggctcaggaatggcctcttgtcgccggttctggaggtgccggcgcttaccgtcgaccagggcacggtgcagctgctgcagaacctcgtcgcgtacgagcagcagggcacgccaccaccgagcaacgacgacgagcacccccgggactacttcaccacctacgccttcctcatgtacaacctcgtcagctccacggacgacatcgccgtgctccaggagcagggcgtcctcctcaacaacttcggaagccatgaaacgatcatcgagtacttcaagaacctatgccgaggtaatcagcggagcggcacggaggagaagacacacatcggcaaggtgctgcaggggctcagggattgcagccagaacaaagcgtatcgttactgggcggaggccaagaagtacatggacagccctgtcaaaatcctcgcgctcatcgtctccactcttctcgccatctccactgtcttgcagactaccgtcgccttctatcccaaatgatacacctcgcccttcattccatgcccaactaattatgatcagttatttttcgctcctaattaactttcaaatttggataaaatttatttacttggaataatgctagtactacctaacttttaagttcatttcgaagatttaaggcttcattaaaagcttaattcagcttcaaaaataaaccctaccctattggtaattatcttatgtcatcttagctatacatatatatgtgtgtggattaatttgtgtgcgcgctcgtggagttcagatcctcagcattagtgatatattttgtcggtgttaccaaaatgttgtaataatttaatacatcaaataagtggggcacctacaatttgggccttgattgatatttt

SEQ ID NO: 7566 - DNA, 737 bp, Oryza sativa
  ref <308>: DATABASE ACCESSION NUMBER: AK064693
  ref <309>: DATABASE ENTRY DATE: 2001-12-06
atgtgtaccgctgtaacatcacgaggtgtgacagccatgacgagatcatgcttcctgatagtgctcctgctcgccgttgccatgggtggtagcaagctctcgctcgccgccggcgagagcggcggtggcggcatcccgaccaccctcggccgcgagctcagggagctcatctccaaggccagcgacttcctcggcgcggcgccgcgccgggccggagcggacgggtggcacgccgccgcggccaccggcgacggcgccgacgcgatcagggcgtccctgaggagcacggcgagggggaggccggcgaggaagtccgccgcgaactgcatccccgccgacatgtgccggaagaagaaggtgctgtgcggcaagaggtgcttcaggtcgagctccagtagcagcctcagccacatcccgtccaccaagtgcgttgtcaagtgcaagaaatgcgtgcccacctgctagattttcctcccttgtaccgagattccattccgcgggttgccccggggcctcacctcacgatcgatacccattcctgttcctcgtcgtgatgttaactctccacaatttactttcctatatatatagattcagttgaataagcaggcaagtctcatgcacgaggtagataggcaggagttatagaatttgctaagtcggatataatttttcgccctcgtactatgtttcttccacgtgaatgatcgatgaactgcacgagctactactatacc

SEQ ID NO: 7567 - DNA, 1473 bp, Oryza sativa
  ref <308>: DATABASE ACCESSION NUMBER: AK064694
  ref <309>: DATABASE ENTRY DATE: 2001-12-06
atccactgcgtgcgtttgtaacttcctccgcagctatctcccttgctctcgccatctcgccattctagctcccgcaaagctctccccccccgaggcgagctctctctgctcccgagcgagagctctcgccatggcgaagaacgcatgcaagctctgctaccgccgcttcgctagcccacgcgccctcgcggggcacatgcggtctcactctgtggcggccgccaacgcagccgcggctgcggcggcggccgcagccgcgaagctgcagatctcatcggcgtcgtccgcgtcgacgtcgttcaccgcggccgatggggaggaggaggaggaggaggaagaggagggcgtgggattcaagaagcccctttccatctacgcgctccgggagaatcccaagcgcagcctccgcgtctccgagtacgcgttctccgaccgcgagagcgaggccgagtccaccccgacgcccgcagccaagggcttacgcgccggcggcggcggcggcggcggcgatggcgagcccatgagctcgttgtcgtacgcgggaacgccggaggaggaggtggcgctggccctcatgatgctctcccgcgacacctggccgtccgtcgagcgcggtggcggcgggggcgagtactcggacgacgggagcgacgacggctacgcgctccctccgccgtctcccgctccggcgccggcgccggtgccggagaagcggacgcggttccagtgccccgcgtgcaagaaggtgttccggtcctaccaggcgctcggcggccaccgcgccagccacgtccgcggcggcaggggcggctgctgcgcgcctcccgtcgctcctccccctcagccgcatccgcagccgccattgccggagcacgacgcgggcgaggaagacatggacgggaaggcgccgccgcacgagtgcccctactgctaccgcgtgttcgcctccgggcaagctctgggcggccacaagaagtctcacgtctgctccgccgccgccgccgcggcccatgcacagacacccggcggcggcgctcctccgccccagcccaaaattctcggcatgatcgatctcaacttcgcgccgcccgtggatgaggtggagctctccgccgtgtcagatccccacttcccctccaatccaccaggtccttgaagcaagaaaaccagacttggcaatggcggagatgatgatctgaggtgaggcataaatcgaagaaacagaaagaataacaaaaagagggaaaaaaaaagagaagagaaggataaacacaagaacatattttttagccccttagttaatcttctggtcgtaccttttagtattccattccattgatttgtgttcagaatgtttaattaatatgttactaccatgctgttgctttgtttttttttgcctgtttaagctatggaatcgatgtagatttgagcaactgacagtgcaacaagaactagcccctgttcttgatc

SEQ ID NO: 7568 - DNA, 1075 bp, Oryza sativa
  ref <308>: DATABASE ACCESSION NUMBER: AK064695
  ref <309>: DATABASE ENTRY DATE: 2001-12-06
gtaaaaaattatctcccctcgccatccttcctctccttcccaagtcttcccacccaggcgcagaagtggctccggcggccggaaagtcaccggcgattcggcggcgccggcggcggcggacccctttctccacccctgccttgctccctcccgtctcctccatcagctgacttaactacactccgtaggagattttcagatcgagattgccggccatggcgtcgggccttgtcgtcgccgccaccgaccccctccgcgccttcctcgcctccgccgccgcctcccacgacctccccgctgacctccgcgacctcgcctcctccctcgccgcccgctccgccgtcccctaccgctccctccgcgacatctggtgcgccgcctcctccacggcgccgacttcctgctctccagccccaagccacgcgacaagagcgatgagctgaaggcgaggctggacaagctcagggagatgcaggagaggaaggagtacgccgaactcgtcagggatgtcgcgccgccggcgaaggaggacagccccgagctcttctcctcctacaaggaccagattggatttggtcttcatgttgttcttataatgttcacgggttatttggttggatttgttgctttcagagctctgttcaacaacagtcctgtaatgaatgctgctggaggcatcttaggattagtcggtggcatgctgatggaaacggttcttttcatcatcagatcatctagtaaagaattggccacttctgttccaagaccaaagaaagttcagtagacatctgttttggtttcaatagtcagttttaatgaggatacgactgaagtttttaccttctgatctgaagtgaacaatacgaatgatgagaaacatgttgtaaatgtagccgataagtgatccgaggggtcacatcaggaggagttatttgtggagtccgcgatgggatgaaaatgtaattatctttagttttgtcgatgttctatgccagtgcacaatctgtctgatcaggataatatattacacggcgttatcagtcgatatattaattaatttgccagctgggttgtc

SEQ ID NO: 7569 - DNA, 1754 bp, Oryza sativa
  ref <308>: DATABASE ACCESSION NUMBER: AK064696
  ref <309>: DATABASE ENTRY DATE: 2001-12-06
attttcttcttcttcttctctctcctctctctctccttccccacgagaaatttcaaaaaccctacctccactcccgatctccacgaaaccctagccgccttctgctagatcgccgcggcggcgggaatggaggtggcgccggagacgctcgacaccctgtcggggtggttcgcgcagtcgctctccccggacgccgccgcgcgccgcgccgccgagcagagcatcgagtcggccaagtgctcgccggggttcgggctcgcgctcctcggcctcgcctcctccccgcgccacgacccgcagtcgcggctcgccgcctccgtccagttcaagaacctcctccgccgccgctggcccaagccctcccccgacggcggcggcgacgacgacgccgaccacctcccgccctccgactgcgccatcatcaaggcgaacctcctccagctcctcctcaccgcgccgcccctcatccaggcgcagctctccgaggccctcgccgccgccgcggcctccgacttccctgccaggtgggagtcgctcctcccttccatcgtctcctccctcggcaccgccctctccgccggggacatcccggcgaccaactccctcctcgccgccgcggcctccctcttctcccgcttccgcaatgccttcgacagcaacaccatccgcctcgacctcaagtactgcctcgagaacttcgccgctgccctactcgaggtcttcctctccacctcccgccgccttcaggctgccgcacccacggtcaccccgcctgaatcccgcccggtgtttgagtgccttcgcctatgctgcgagatcttctattcgctcaactccatcgacctgcccgagttcttcgaggaccacatgcgtgagtggatgacggagttccgtgcgttcctcaccacctcctacccgccagcgatagaggcagacggcgccccggatgcgctccgcgccgccgtgtgtgacaacttgcagctgtacatggagaagtatgaagaggagttcaggggatatctgaaggagttcgttgaggcggtctggggcctcctcatggcaccatctgtctcaccatcccgcgggcagcttgcggtgaccgcaataagatttttgacaacggttgctgagagcgtgcaccacgcgctgtttgggagccctgatgcaatgaagcagatatgcgatagtgttgtaattcctaacctgcggttacgggatgatgatgaggagctgtttgaggggaactgggtggaatatgttaggcgtgatgccgaggggagtgatgcggatacactgaggcgggctgcatgccggttgctgcgggggcttgcggcaaactaccgggagcaggtggctgcacttgtgtcagcacaggtccagcagatgttggctgcatatgcagctgatcggacgaacaactggaaagagaaggatgctgcaatataccttgttatttctcttatgcagaagcctggtgccacaggaggtgggacaccggtggttgatatggagagcttctttacatctgtgatcgtgcctgagctgcaggcccctgattgggaatctgaaccaatgctgaaggcaactgtgctgaggttcttgaaggaattcaaggatcaaatccccaaagccactgcactggcactgcttccaagtgtaataaggttcctgatacacgagtcaaatgttgtccattcatatgctgcgacctttattgagaaccttctgatcatcaaggatatggtaccagtacc

SEQ ID NO: 7570 - DNA, 1566 bp, Oryza sativa
  ref <308>: DATABASE ACCESSION NUMBER: AK064697
  ref <309>: DATABASE ENTRY DATE: 2001-12-06
atagtcacggatcaatctaatctaagaaaggaacattgttactaatatttcttgattttttttttaaaaagctacaaacccttgtcgcgagtagcactagcaatcatgggtcagtgcgccatgtctcccgcacgctctggcaccaccgccggcagcggcggcgggccgacgccgtcgtcgtcgtcgtcgcgatccgcctccaccatcgtcgccggcacggccagcgggtaccacctcctcaagatcgacgactactcgcgcacccgggatctcttccccaccagcactgccctcaagtcccgcgctttcaccatcggcggccatcgatggcgcatccaatactaccccaacggcaacacgcccaactgcggcgattacatatccctcttccttcatctcgacgaggaagtaaccagggaagtgtacgcgcagctccagtttcgtctgctcgacgacgagttgggtgacaaattaccgccgccgccgccgccgccgtcgctggatgcgaacaagttcttcagccatgccagttgggggcaaccaaagttcatcaagaaggaggaattggagaaatcgaggcatctcaagggcaattccttcaccgtccggtgcgacgtcgtcgtcatcaccgagttcgtcgcgaaggatatgcccgaggcggcgaccgcgacggcggcgagaagaagaacccctgcgaggggaactggaagcttcgtcagcgtgccgccgtccgatcttcaccggcatctcggtgagctcctcctcggcgagaagggcgccgacgtggtgttcaaggtcggcggcaagaccttcaccgctcaccggtgcgtgctcgcggcccggtcgccggtgttcggcgccgagctgctaggctcaatgaaggagagccgcaggaaggccgtcgtccgcgtcgtcgacatggaggcgcaggtgttcaaggcgctgctccgcttcgcgtacaccgactcgttgccggagatgaaggagaaagacgaaggcgccatgtgccagcacctgctcgtcgcggcggacaggtacgccatggagaggctcaagctggtgtgcgaggagaagctatgcgagcgcatcgatgtgagctcggtggcgaccgtcctggcgctagctgagcagcaccattgtgatggcctgagaaatgcgtgctttgatttccttagctctccagaaaatctgaaagctgccatggccggcgacggcttcgagcatctgagtaggagctgcccttctcttatgacggagttggttgccatgctcggtaactgtcacgatcctcaacccacccaccgatcaatgcccaacaccggaagcaaccgataattcatagcagtaatcactcaagtaacttggatacaattgagaggaattagcaatgtagattgggaagagaagcaggggactgggaataagagaacagaaactaggattggaagaacagagagatgagaggaaattggaggaggaagaagccttggctttagttctgttgatttcttcatcgatgcctcatctgttgctgttccttctcttttaaaggcatgcaccctgttt

SEQ ID NO: 7571 - DNA, 1807 bp, Oryza sativa
  ref <308>: DATABASE ACCESSION NUMBER: AK064698
  ref <309>: DATABASE ENTRY DATE: 2001-12-06
acgtgctcactgccattgtcgtcatcgataatcgtcggttgcaatatcctcttttccgttgccatttcgctttccaagcctccaacttttatgctgttcatgagcatgacagcgtgcatacatggcattacagaatctacagatgcacaggctagctgctctgctgagataggcgcaggcgcagcgcaatccaaagcagctgacgccttttgcatcctgccttctttgtaggcttcgtcctcctacctctgccatggctcagcgacactggccatggcggctcgccgtgttcgtcgccgccgtcgtgacgccggtggctgccgaggagaggctggtggtgggcatgactctcctccaagctgccacatcgacaggagcagtgtgcctcgacgggagcccgccggcgtaccacctccaccggggctctggcggcggcgccggcggctgggtgctccagttcgagggcggcgggtggtgcaacgacgcgccgtcgtgcgcggaaagggccggcacgcggcgaggctccacgcgctccatggacagcctcgaggtgttctccggcctcctcagcaacgatccggacatgaatccagatttttacaactggaatcgtgtcaagctgaggtactgcgatggtggctccttcgccggtgattcagaactcagaaatggctcttcagtcctctacttcagaggtcagaggatatgggacgctatcatcagtgatctccttccaaaaggccttgcaaaagcccaaaaggtattgctctcaggctgttcagcaggaggcctagctacattcttccactgcgacgacctcaaaggacgtctcggagatgctgtcactgtgaaatgcttgagtgacgcaggatttttccttgatgtgtaacagtggagtctaatcaagcaaaaaaaaattaccttggttgactgattcttgaactcattgggttgaaacacaaaaatttactttggttggtgtcctgcagggatgacattactggcaacaacactgttgagcctttctttaggagcctagtagctttgcagggagctgagaagaatttgaacaaagactgtttaagttcaacagactatccataccagtgcttctttccgcaatatatacttccatacatcagaaccccttacttcattttgaattcagcttacgacgtatatcagttccatcacaattttgtgcatccttcatgtgatcctaaaggccaatggagccactgtaagtcggatcctggtgcacgcagtacatcccaaattgcgactctccaaggactcaggaatgcaatgttgacggctctgaagccgttccaaaatgaacagggtgtagggatgttcataaattcttgttttgcacattgccagagtgagctgcaggaaacatggttagcaccaaattcgcccaggttgcataacaagacaattgcagagctggttggtgaatggtactttgagagagggcctggcatagaaatcgattgcgcatatccttgcgactcaacttgtcacaatattataccttctaatcaggaattggggatttaggagtttggcaggggagcatccatgcccaactgtgatcaaaataacaaagatttcatttagtttggtgaacaaactgaaggatgaacactgttacaataatggagactcaggcatccacaatggaggtccctgcatgaacattcctcccaaattctacagcatcagcctacagatgattctttacctgtctatattgcacattgcagaacaattcataatttcatacgacatttgattgaacagt

SEQ ID NO: 7572 - DNA, 1751 bp, Oryza sativa
  ref <308>: DATABASE ACCESSION NUMBER: AK064699
  ref <309>: DATABASE ENTRY DATE: 2001-12-06
cttttctttttcttccatcgccatcacctgctgctgtgtgtcctctgtccttcttcatcgccaatggctgccatgccaacaccaagatccttctcctacccctagctcatcgcaaaacaagctagaaatcgtctcttctcccaagaaaattcatctttggatcgtagagcgtatttgaagaatgagcaattcgacgtggcagccgtcgccgccgcagactccggcggcggcggcgtcgtcggcgtcggggattgacggcgtggagaacaagataagcccgagcatcgtgttcatcgtggccgtcttggcgatcgtgttcttcgtgtgcgggctgctgcacctgctggtgcggcacctgctgcggctgcaccggcagcggagggcgagggaggacgccgagagcgcgacggcgttcgaggggcagctgcatcagctgttccacctccacgacgccggcgtcgaccaggccttcatcgacgcgctcccggtgttcctgtaccggaacgtcgtcggcgtcggcggcgaggatggcaaggacccgttcgactgcgctgtctgcctgtgcgagttcgccgccgacgaccagctccggctgctgcccaagtgcagccacgcgttccacctcgagtgcatcgacacctggctcctctcccactccacctgcccgctctgccggaggagcctcctcgccgagctctcgccgacgtgcacccccgtcgtcatggtgctcgagtccgagagctcccgcgacatggtccacgccgccgacgatgagccagccgacgacggtggcgaagacgcgccgggagcggaggaggtggtcgaggtgaagcttgggaagttcatgtgcgtcgaaggcaacgtcttcttcaacgtcaacgccatcgccggcgaaggggatagagccggcacgagcagcaacggcaatggcgacgccaatgccaaggctggtggtctcgggcaaagacggtgccattccatgggatcctacgagtacgtcatggacgcgcacgcctccctccgcgtgtccatcaagccgccgaggaagaagccggcggcggcggcctccaagtcgcgccgccgcggcgccatgtcggagtgcgagttcggcgcctccaagcgcggcgagtcctcgctccgcctgccgccgttccgcgcgacgccgcgcaagaaccccgacgacgacgcggccgcggccgccggcgcgaagctcgccaaggacagcttctccgtgtccaagatctggatggtgccgtccaagaaagagcccggcgccgccgccgagaggcgcgcggtgtcgttccggtggccggcggcgaaggactgggacgtcgaggccgggagctgcggcgggaacagcgccgtgtcgtcggtggcggcggaggagcggccgtcgttcgcgaggaggacgctgctctgggtcgtcggaggcagcaggcagctcagcagagtcgggagctgttcatgatcaccatttcgatcatcaaatcccaaaatgaaaccaaaaaaaaaaagatgattcttttgttcagttcttttaccccctccttttgcttgctaggttattggtagcgaactagcgattgcatccaacagcaagagaaattgtaaaacccatatgctacgaagagaagaaattttcctttcatttttaactgcatttgagattttaagtccgggttggtttcaattttcagcaaagtgactccctgatcattactcgaaagaaaacattacctattaggacaatc

SEQ ID NO: 7573 - DNA, 566 bp, Oryza sativa
  ref <308>: DATABASE ACCESSION NUMBER: AK064700
  ref <309>: DATABASE ENTRY DATE: 2001-12-06
atatgatgcgtagacagtgatctcagtttcaactcctaattagctcctagctagctagctttatataccaaatcgaagaagaagaagataatgtccggctacgggcagcagccgacgggcgatcgtcttgagtcggcgacgttggtgcagtccatggagtcgaccaaggatacgatcgtccggcgcatcaccgagtcggcggccaccgtcgacagcgccgacgtgcaggcggccgcggccaagctgacggcggctgtggagtacaggttcgacgttgccaaagctgacgttgatcggatcatggccgggagaggcaactagacaagtgatcgtggaagacgacgaacaccgctggcacacatgtccgatgcagtacaagatcgaaatttttatctgccccgatagaatttaattagcctttttctttgtttttctcttgtaactttctttaaacaagttgctggcagatcaggctttagttctgatagatagagcaacaccaacatggatcggcgctgttatgaaaaagcaataaaattaattgcatcgtggactcaatacatatt

SEQ ID NO: 7574 - DNA, 1137 bp, Oryza sativa
  ref <308>: DATABASE ACCESSION NUMBER: AK064701
  ref <309>: DATABASE ENTRY DATE: 2001-12-06
gtgcgtacgtacgtgatgccgggaccgggggcgcacctgctgtacgcgctgtcgggcggggcggcgctgtcgcggctggccggggcggcgcggttcgggccgcaccactgcgccgtctacgccgccaacgccttcctcggcccggacctcggctccttcgccgagtggctcgcctcgttcctcccctcctcgtcctcggccgccgccgccgtgggggacctcgccatgggcgtcgtccaccacccgttctactacccgctcctcctcggcttcccgctcgcctgcctctacgcctggctctcccggcggctgctcctcgccggcgtcctcgacgagccctctcgggtggcactaagcaggagacaatgcttctaccttatcacggcaggctcgctctcccatttctttttggatcacttgtttgaggagaatgggcactctacgatgtatacttggattctgagcactggttggtgggtaggccgtgctcctatcaattcggatgcagtggttattgtaggccttctttgtatttgcctcgtgctggggtttgtgtacattaacagagtgaagcatgaaaaatcagccactcaaaaatcaaaccaatctttcttcctcatcgtggtgatagctatcttgtactgtatgtggtgtgccactcagatatacctgcgaaatccacctcaaccagccataggtgaagaggctgatcttggagtgataatatttgttgccatttacctttttctcccccatggcttgtgtgccctgtcaatgaaccagaatgattatgctgaactggaagggatccaacttcgataatgtgccatatggtggtgtacttttatcctaatctacaaagaacatcattttttgaagtctgctcgctcctccatgttgtaatcatatttattttctaataataattggctaattgccagggatttatgttttctctagtgcaaaaatacttctagcgaagacttaggagttaggattatggagttcaggatgatactggcactgtattatcagttgtgatagcaataaacttctattggcagtggtgttcaaaacatcccagcaagttctgttttccactttagaatatacatttcaaagttatgatatgatttg

SEQ ID NO: 7575 - DNA, 839 bp, Oryza sativa
  ref <308>: DATABASE ACCESSION NUMBER: AK064702
  ref <309>: DATABASE ENTRY DATE: 2001-12-06
gtttggttcgcctggatgggaaggccgaggggtgggaaaggcaggaaatccaccgaagctgcgaaagccgacgatggcagcagcagcggcggcggcggcgaggaggtgatcccggcgtacaagaggaggggaaggccacaacaacagaagcatcaccacctcaaggacgaccacgccgccggcgacgacgaggacgaagacgacgacagcgtcgccaagaccgaggaggaggaggaggaggaagaacacgacgacatcgccaagatcgacgacgacgccgcgaagacgacggcggcggcggcggcggcgccacaagccagcaaggcggggtcgtccaaggccgcagctcagaacccggggaggaagaggcggcggcagctgaagcgcggctccgacaacagcaacagcaacagcgcctccgccattgagcggcgccggaggaaggacggcggcgagccgtcgtcgtcgcggcagcagaacgggttccggcaacacgggagccggcggaagaactccacgccgcggagagccgccgaggccggagtggggtgcaagtgatggaagtttctgaaatctttgatcggtgatcaccatttgttacatgtagatgaagttgtccatggtgacatctctgcattagcgcacaccaacatgctagtactatgtatgtatggcttgtgagaatgtgtgcgaatgataagctgcctaatggcagtaggtagttatatatattatagcacctagtttgtttactagcggtttagcctaaaattcagtagcttagtcctagtgtttaagattttttgacagtatgaattaaagagactttgatgtcagac

SEQ ID NO: 7576 - DNA, 546 bp, Oryza sativa
  ref <308>: DATABASE ACCESSION NUMBER: AK064703
  ref <309>: DATABASE ENTRY DATE: 2001-12-06
atctctccctctttctctctcctttccttcaccgggtggcacagtcgggaggacaggaggagacagggaggccgagggaggcggagaggccggcgagccgctcctctcccgccggccggcgcgcgccgctgcctcgcctcctctcccgccgactggtgcgcgccgctctctcctctcccggtggccggcgcgcgctgctgcctcgctctctctcccaccggtcggcgcgcggggatcccggcgagccgccacgaccttgcgcacgccgcggggatccagtcacgcaggctgccagacttggagaagtcgaaggccggtggcagtggcaccttcagctcgccgagctgcctcgccctcgcctctcatcggtgaaatagattagtagcagaattagtgtgttggcactgaaaagcgactgattccattatacggatgatgaattgcatagcattggtgaaacaaatcagtagtagcggaattagtggttttgatactgaaaagcgatggattgaatgctgcaaatgatgatgaatgtgtgtttgattt

SEQ ID NO: 7577 - DNA, 1088 bp, Oryza sativa
  ref <308>: DATABASE ACCESSION NUMBER: AK064704
  ref <309>: DATABASE ENTRY DATE: 2001-12-06
ctccccccatttccatcttccccgagctctccaccctccacccgccaccgccaccgccgccttcgccgccgccgccgccgccgacgacgatggggagagggccggtgcagctgcggcggatcgagaacaagataaacaggcaggtgaccttctccaagcggaggaacgggctgctgaagaaggcgcacgagatctccgtgctctgtgacgccgacgtcgcgctcatcgtcttctccaccaagggcaagctctacgagttctccagccactccagtatggaagggatccttgaacgctaccagcgttactcgtttgatgaaagagccgtactggagccaaatactgaggaccaggaaaactggggtgatgaatatggaattttgaagtccaaactggatgcacttcagaagagccaaaggcaactcttaggtgaacaattggacacactaacaataaaagaactccagcaattggaacatcaactggaatattctctgaagcatataagatcaaaaaagaatcagcttctgtttgaatcaattcctgagcttcagaagaaggaaaagtcacttaaaaaccagaataatgttctgcaaaagctcatggagacagaaaaggagaaaaacaatgctataataaacactaaccgggaggagcaaaatggagcaacaccaagcacatcatcaccaacaccagtgacggctccagatcccatcccgacaacaaataacagtcaaagccaaccaagaggatcaggggagtcagaagctcaaccgtctccggcacaagcaggcaacagcaagcttccgccatggatgctccggacaagtcacacatgaaggcatctgttgatctcaaacgtcactccactcaatggccaacatcaacatgtttcttccaactaaggcagccactgttgtgcaatccatcttccagcgatattgatatatcggcattcggcatagccaatatatattaatgtaatgtatcttgtcaaagcttcatagggttaatgacgccttgagcttctctgttctatatctgtcttgtaacgatctttgcatatctgctgcatttttttttctctc

SEQ ID NO: 7578 - DNA, 1090 bp, Oryza sativa
  ref <308>: DATABASE ACCESSION NUMBER: AK064705
  ref <309>: DATABASE ENTRY DATE: 2001-12-06
attttctcatcttctctctctttctctcttactccaatctgatctccattgctcaccttcctagtagcttagctgatctcaatggcgacaatggcgagctcaggagcagcagcagcagccatggccgtgttcttggcaatggcgctggtgttgagtggcactgaggccaggttcctgtccaacaacatcactgtggttggctctgtctactgtgatgcctgctccaacaacactttctccaagcacagcttcttcttgaagggggccagggtgctgatccagtgcagcttcaaggtgaactccaccatggccgaggagctgtccctggaggcggagcgcaccacggaccagaacggcgtgtacaagctcgacgtgccggccgccggcggcttcgactgccgggagggccacgacctccggtcggcgtgccgcgccacgctcgtccggagctcctccgccgcctgcaacgtcccgggcctccggggatccacgcagcacatcgccctccgctcccgcgccaccaacgcctgcttcctcaacctcaacgcgctcaacttccgccccgccaagcgcgacgccgcgctctgccacggcggcgatggcgccggcgccggcggcggcgctgcgttcggctcgtcgctcttcttctggccgttcttgccgctcttctggccgccgtaccggctcccgggcggcggcggcgggacggtgtcgttcccgtggccgttccccgtgccggactggctggtgccattcctgcggccgccgttcttgccattcacgctgtaccagccggcgccggcgggctccgcgccgccgccgttctaccgcttcccgccttcccaagaagcatcaccatctcagccttagacctgaaaaagtacaaaaaaaaaacttgccaagattaatcctagattcttcatgtttagcagcaagagaggttgtgtgattgtgacattgttgtaggtgatgattctccctgcatcacacgtgtagctggagcgagttcaggaattgccaccgtgttcatcgggctgatgaatatgtggaagtgataattataatgtagtgatggcaacttgttagtagt

SEQ ID NO: 7579 - DNA, 978 bp, Oryza sativa
  ref <308>: DATABASE ACCESSION NUMBER: AK064706
  ref <309>: DATABASE ENTRY DATE: 2001-12-06
gtttttgccccctctcccgtcctcttccgtgctccgtagctccgtcgccactgccgccaagcaaaccgccgccgccggccatctccggtgccgccgcgccgccgtctccatcgtcgtcgccggtcgccgtcatcgccgtaaggtgcgccgaggtgtgggcaagctcggccgctctctccccgctgtcgccggtcaccggagtcccgtcgccaccgccgaccgaagccgcgccgccaacagatctcgtcgccggccgtcgtcgttcgtcgtttggttcgaggcttgtcgtttccgtcgttgcgaaggttcgtgagtgcgtcaggagtgttcagaagattaattgaagaccgattattgcaagctagcggcgatgcaacgccgctgtctatccctctacgttgccgttctcatgctcgtctggctcttcttcgcgccgctctccgtcgtcgccggcagccttatcgccatccccagcgcactcgacggtagccgcacctctcaccgtcgccctattgaaaatccacggttcaacgtgacgctctgggagaaaaacgagatcaatactagacctaaggcgtcccatggatttgacgatggtgacgaagtctcctacaccgtggccatgcccttcatagagaagcttaggcggcgatgcgccgtggccaccggcggtagccatcgtcgctgcgatgccacagcgatcaggcagtttgaggaggatgtggctccctgcctgctagaggggttgaaggtgaacagggagttcagccacacattgtctaatttggattatagtagatggctgggcccctattatctggatttggccgtgcagcaaaggtcccaaatgatgaacttgttttgcatgaacaaacccaatgttttatcgtgcttatgctaccttaaaatgatcaattaatgctttccacataaaatgcgcaatggtatttctcatatctatatatttatttttggtcc

SEQ ID NO: 7580 - DNA, 1269 bp, Oryza sativa
  ref <308>: DATABASE ACCESSION NUMBER: AK064707
  ref <309>: DATABASE ENTRY DATE: 2001-12-06
acacaaagcccaatcagaaatcacaaagcacaacaaaacctcattgcatctagctagcttttctgtctcctgaatttctgatcagccagcgaaaacccaacgcaagcttggtcaccatggggtttgcttcctgcgtcgccgtatgcctcgcgttcgccgttctcctcccttggcacgccacggcgacgtcgccgacgggcacgatacagcgggagacgaagcagcagatcctggccagcatcccgccgcactggcaggagaacccggtgctgttcctgacgtcgccgtcgggcaagtacacggcgtacttcctgcgcagccagaccgcgccgggcgccggcggcctcggcgccgacttctgctacgtggaggtgctcgacacctcggatcccggcgcggaggggcggagcgtgtgggagtcggagtgcctggcggtgagcaccgtgaacacgtgctcgctcgtgttctcgtggaaagggctggaggtgttcgacgggagcaactcggtgtggcacacccacgacacgcagtccgacagccagaacttcctcgagacgctggagctggtggacgagggcgacatgcgcatcctcgacaagggcggcgagctggcgtggaaggccagcgacgagccgcgcgccgcgcagcactgcgggatgccaggctcccccggtctcgcctcggcgttcccgccgttcgcccagccgatcggccacggcagcagcgacctgccgttcgggttcgggaacggtgaccacgtcgctggcaacggcatcggcggcggcgccgtggcgcagccggagctccccgtggcgccagtgccgcagccggagcttccgttggcgccggtgccgcaggaggctgatctcggtggcgccgccggggtggagccgcagggacagggcgtggggcagacgtcgttcggattcggcgcccagccgctggtggacaacagcccgtacgacagcggcgcatggaagcaggtgggcggatgcagcctcaccgccatcggagttggcttcattctcaacgtcgccattgccatgggcttgggccactgaaatactgaattcggagaattcgagggcatatatggtagcttcggtgcttggatgatcacgtacagttacgtagtggtttctttgaaattaatggtgatttaactctggcacaagaagccagcggatgtgcgtgctgtgtgtactggtgtgttgcaggtggtgctttttctgggtgtttggttgtattagtatcgtgtttggaaattgc

SEQ ID NO: 7581 - DNA, 941 bp, Oryza sativa
  ref <308>: DATABASE ACCESSION NUMBER: AK064708
  ref <309>: DATABASE ENTRY DATE: 2001-12-06
agagaacaagaccctagctacctgttcagtgttcaattcgcacggaaagccatggcctcccgcgacgccgccaccttccaggtctaccggcccatggcaatgccaacgccggcggcgctgccaccgtcgtcccagcagatcacaatgccgttcacggcggcgctcgtggacgccgtgctcccagctccccgaaaggcggcggcgacgcagggcggcaaggaccggcacagcaaggtgaacgggcgcggccggcgcgtgcgcatgccgatcgtctgcgcggcgcgcgtgttccagctcacccgcgagctggggctcaagtccgacggccagaccatcgagtggctgctccggcaggccgagccgtccatcctcgccgccaccggctccggcaccaccccggccgtcttctcctgctcgtccgccccctccaccgcctcctcctccttcctcctcggcaagcgcccgcgccaggaggaccacgaggcgccgacgttctgggaggcgctgcagcaacagccgcggcccgccgtgtcgtcgtggggtgccctcgcctcgccgtcgcaggaggcgcaggcgtacgcgtcgtcggtggcgcaggtccaccacctcaacctactctccgcgctctccggcgccgccacgagacggccagcacaggaggagtcccggtgatcgcgcgccgcagctatgcagctcaatttgcgacgtgattgcatgcgcgcgcggggttgatttgtacttggagctagtcttgctttgtcttgtgtgtatggcttgccgtacttaatttcccatttccgctggtgtttccatgggtgaattttgtgtgaatttgcttgattttaggccggagaatactagtaagtagctggtgaagaatcaagaatgtgatcagatagatcatcagaggcagcaattgtagataccaagtcttttggatt

SEQ ID NO: 7582 - DNA, 1711 bp, Oryza sativa
  ref <308>: DATABASE ACCESSION NUMBER: AK064709
  ref <309>: DATABASE ENTRY DATE: 2001-12-06
atcccgctccctccacgacgacacagagcccaactcaaccagctcaccagacgaaccgagcaaacgatcgaacacccaccatgcacaccacgaacggcgcgcctgcatgctgcgacgccaacgccgacacgcccccgcttcacctcatcttcgtgcccttcctctcgcgcagccacttcggccccgtcacagcaatggcagccgaagccgacgcctgccaccgcggagggcgaaccgccgcaaccatcgtcaccacgcgccacttcgcagcaatggccccggcatccgtgccggtccgtgtggcgcagttcgggttcccgggtgggcacaacgacttctccctcctcccgggcgaggtctcggccgcggcgttctttgccgccgcggaggaagcgttggcgccggcactcggggcggcggtgcgtgggcttctccgcgaagggggctccaccgccaccgtgacagtcgtctcggacgcggtgctccactgggcgccgcgtgtggcgcgcgagtgcggcgtgctgcacgtgacgttccacaccatcggtgccttcgccgctgccgccatggtggcgatccatggacacctccacttacgtgaggccatgccagacccgttcggcgtcgacgagggcttcccgctccccgtgaagctccgcggggtgcaggtcaacgaggaggccctcgttcacctccccctcttccgcgccgccgaggccgagagcttcgccgtcgtcttcaacagcttcgcggcgctcgaggccgacttcgccgagtactaccgtagcctggacgggtctcccaagaaggtgttcctcgtcggcccagcgcgcgccgccgtctccaaactcagcaaaggcatcgctgccgacggcgtcgaccgggaccctatcctgcaatggctcgatggccaaccggcagggtcggtgttgtacgcgtgcttcgggagcacatgtgggatgggcgcgagccagctcacggaactcgctgctggcctgcgcgcgtcgggccggccattcctctgggtcatcccgacgacggcggcggaggtaacagagcaggaggagcgcgcgtccaaccacggcatggtggtggccgggcggtgggcgccgcaagcggacatcctggcgcaccgcgctgtgggcggcttcctcagccactgcgggtggaactcgatactggatgccatctctgccggcgtgccactcgcgacttggccattgcgcgccgagcagttcctcaacgaggtgttcctcgtcgacgtgctccgcgtgggcgtgcgggtgcgtgaggctgccggcaacgcggccatggaggcggtggtgccggccgaggcggtggcgagagcggtgggtaggctgatgggcgacgacgacgctgcggcgaggagagcgagggtggacgagctgggcgtcgcggcgcgcacagccgtgtccgacggcgggtcgtcgtgcggtgactgggcggagctgataaatcagctaaaagcgttacagcttacatcgtcacgagacagacgcactgatgcagtgacaagggactgactcacatgcaggccagtagtaaacaaatacggaatactaaaagatcaagattaatttatacaagttcataaaaacacaatccaacatcctgccctttaccagtgtattacttcctctgttacagaataagttaatttagtacagggtgtaacacatcctactaaact

SEQ ID NO: 7583 - DNA, 903 bp, Oryza sativa
  ref <308>: DATABASE ACCESSION NUMBER: AK064710
  ref <309>: DATABASE ENTRY DATE: 2001-12-06
agagagagagagagagcaatgcaaggtttcagctttgcggccatggaggagttcacgttccccagcgtcgcaccggagcgatgcaacgccggcaagaagccgcctttctcccctcacttcgccaccccgccgccgtggtttggcggcggcgttgtcgtcgacgcggtggtgtacgatcaccggaggagcttctcggccgtcgagaagggggaggaagaaggcacggtgagaggcggctggtactattgctacgacgacggcggctgcggcaatgtctcggcgaggttcgccggcggcgaggagaccaagacgatggacatgctgtgggaggacttcaacgaggagctctcccgggcggcggcggcggcgccgtgcccgctgagcaaggagtggaccaaggaggcgtggctcgccggcgacggcacccccgaaatgcgccgccatgccgccgcggcggcggcggtggcctccggcagcgtggtccggcggaggcggctgagcttgctgatgatgctgaagctgctcaaaaagctcttcttggctcacaaatccaatgctgcatcaagaaaggcaccaccaatctgaaaattctgattgacagtcagaagaagcagtagatgattgcatgcatgatataccaggtgtatatatcgatcgatctatacatttttcatcctaccagaatccagagtttgactcatagttaatggctatgattcttttcttttttcttcttcttcttctctacttttgattttctgatgaatgttcaggccttcagggttttgtctcttttgtttgtctgatgaatgttcagggtctgatactctctgatcccgctcgtcttttttgtaatgccattggatttggcgtctgtttgatactacttgattttagctgccg

SEQ ID NO: 7584 - DNA, 811 bp, Oryza sativa
  ref <308>: DATABASE ACCESSION NUMBER: AK064711
  ref <309>: DATABASE ENTRY DATE: 2001-12-06
ctcttaagctgaaggatacacgaccacatgacatcgacaaaattgttcgttacagcgtcagaaaaattttcagacaaaaagttcagcgtctctcacctgcctacacctacacatacttgcctctgtacttaggcttggagtccctgtctatggccggcttcccgtcggcggcggcggcggcctgatcggcggggctgaacacggcggagtggaggttcccctcctccatccacttatggtggttctccctgaactcgcggcgccgctcctccgccgccttctcgacctcctcggtgtagggcccgaccttcaccatggtcagcaggacccggctgtacctcatgctcaggatctgctcgcaggaggcaagcagcctgaagcaggggtgctccgggtacttggccgggttggcgacgccgtcctcgcggacgacggggaagaagaagaccagccggccacccatgaccagcatcctcgcggcgaggtggaggaggtcgtggacgcactccgcgaggctgtacggcgcggtggatgggatgtggctgtccctcttctcgtccggaaccgtgtacggagcgacggtgccctttatgagcttccggccaccggacttgcggcctccagcccggactccgtatggtggatcacagatgatggcatcgaaaacctgattgatcgcaagcatcaatagtgtgtttatcatatcttgtcgaaaaaattgaaacaacggagtaaatcagtaactttccagagtatcttgtagcatacaagcagaagatatatcaagccaatggttatggaaagttttatt

SEQ ID NO: 7585 - DNA, 913 bp, Oryza sativa
  ref <308>: DATABASE ACCESSION NUMBER: AK064712
  ref <309>: DATABASE ENTRY DATE: 2001-12-06
agcttcaggcagcgaacgaggagttttgcggcagcggcggctcgtggacgcggcggcggagtaatggccggggaggagacggcgtcgggctccaagccgccggcggcagcgacgaccatccgcctcgtcaacttcatctccgaggaccagcttgacgaggcgaagcggacgagaggggagcgggcggacgacggcaccgcccagcgcgacaagccgctcttccagatcctgcaggagaacaaggagaagaaggatgccgagttcaacgagcggttcaagcacagacctccaaaagccttggatgaagatgagatggagtttcttgacaaacttgcatcatcaaggaaggaatatgagcagcaggtggctaatgaagaagctgaacaactccgcagtttccaagaggcggtcgcggcccggtctaatattatacatgaagaggctcctacagtctcgagaccagaggagagcaagcctaaggcaaaaaggagccaacctgcactcctgaaaaatgtaataatttcggtgaaaccacaagcgaagaaagcaaagttagatggggaagataagcctcctgcgaaggagcttccttcaaatgggcacagtgcagatcacaagcccccagatgccaccaagggcgtgcttggttctctggtgcagtatgatgatgatgaaagcagtgatggggacgtatgacaactgtaacagagcaacagtctgaggttttgctggctggtgtctggcaaaaatatgttttttcctgttttccctgtgcattaatatccatgattttcttgtagcgtgtgaatttattgtcagcggtgatgataatttgataacgaaaacaatactaatgcacgaatacacttataaccctggtgttttttttcccagttctacctgggttgcacat

SEQ ID NO: 7586 - DNA, 714 bp, Oryza sativa
  ref <308>: DATABASE ACCESSION NUMBER: AK064713
  ref <309>: DATABASE ENTRY DATE: 2001-12-06
tgggggagcaacagcgcaggcggaggcggcggtgacgccatggttccggggggcatggggggaggagggcccatgggggcagccgccgccggcggcggcggcggcggagacgggcggcacgacgacgaggcggtcctcaccgagttcctctcctccctcatggactacacccctacgattcccgacgagctggtggagcactaccttggccgcagcggcttctactgccccgacctccgcctaacgaggctggttgctgtagccacccaaaagttcatttcggacattgcaagcgactctcttcagcactgcaaagccagggtagcagcacctatcaaagataacaagagcaagcaacctaaggataggcgtcttgtgttaacaatggatgatctttccaaggccttgcaagagcacggtgtgaacttgaaacatcctgagtacttcgcagacagcccttctgcaggaatggctcctgcagcaagagaagagtagactcaactgaactcaaagtgaaaccagggactatgtagggagcatgcaaatgaatgaccatgtcggcatccttacccaaccttattacagcatgcaaatgaatgaacctgtcagcatccttaccgaccttattacaacctgatgtctgttccttgatatactattgaccattagcttgtaactaatagtctaataccactggttgcttctgtacttagt

SEQ ID NO: 7587 - DNA, 1485 bp, Oryza sativa
  ref <308>: DATABASE ACCESSION NUMBER: AK064714
  ref <309>: DATABASE ENTRY DATE: 2001-12-06
atgcaaacatgcaccatttcacagcattagcacaacaaacacaccatgctctatcctccatgtatccatatccatatccatccatccatccatccatcttctcttctagctagccatgcatatccactttgaaagggagaaaagaaagagtgacatagttttaagagagacatatagatataggtagtgttcatggtgttaatttagatgtagttagtttggtgtggcaatatggcggcattggaggggagatatatgtgtgtgtgtgtttggtactttgggtgattgtgaaggtgatgaaaaggtaggggatatgcctggctccctgtatgccgctcgcatggctgccaacccaatgaactcgatctcgttgttggccgctgcgtacggcgtgcgaggtgccaagcatggccctcttcccttctctctttctctctctacatctctctcttctttcttgttgcattgcatgttttatatatccttagaatgcttgttttcttttcttgttaagtaatcattcacatggatctagctagtgcatgcacgaattttgagttaaaaaaaaacaatcagtggatatgaacatgacagtgcatatatatatacagcatttacatcattgcatgcccgagctagtctaatttttggaatttctctgaagtcagatagctagcctttgtagattaattatatattactgtgtgcattgcatgcatttgcatttactcgctgcgtttctgatgtatatatacgtactcctacattgtttatcttgtgatgaaatcaagatcatgcatgtgaactaatatgatagattaattatagtagtataattttcaatactgccttgtaaataacttttatttcttttaatggaaaaaatacgctccttgcgtattcccgaaaataattttcaatactgaaacctttgctcagttctgaacttgctgcagttagagcaaaataatgtgccaatcagttcgaatatcttgcctgcatgcatgcatgccgccgttgagtcaggttgacggccggcgccgcgccgcactccggcgagagctgcacaccgccgccggccgccgcctcaatccgtccatggcagacagagatcgataggccgccgcctgcgcagaagagaacacagggacgcgtccgagcatgccgaacgtcggaagttccatcccgccgatgaaggcggtggctgccggagaacccggccggccggaggcgccgcaatgtcgccggagagagaggagatggggtgtggttgtacaatttgaacttattgagggggctttctgaaaaaatagatgtacttcttccttcctactagccgcccaattattcggcacacatactctataatattgtacaatttaaaggaaaaaggatgcattttatagattgatgtgaccagggttggaaatttcggaccgaaatttctgaactttcggtcatttcgttcaaaaaaaaaaaaaaaac

SEQ ID NO: 7588 - DNA, 967 bp, Oryza sativa
  ref <308>: DATABASE ACCESSION NUMBER: AK064715
  ref <309>: DATABASE ENTRY DATE: 2001-12-06
atggagcgacgtggattatttcatccagctaactttaacagtactgtgtgcggagtgtgtgttcgtcatggacgacggcagcaagctgcagccgacggcaacaaggttccggtggctgaaccttgcgcgctgcacgctggcctccgtggtcaccgtcctcgccgtcgtcgtcatcgcccgcgccgtcgtcgtgctactccgcccggagaagctccggctaagcgtcgccggcggccgcgtgtccgtcagcaggatgccggcgatgaagccgctgccccgcgtgaacatgagcttcgtcctcagggccttcaaccccagcggccgcgcctccatcgagtacacgggcatcaccgtcgcgctccgggccatcgacgacggcgacgccgcctcgccggcggcggcggcgccgatcatcgcgcagttcccgttcccggacgtgcccgtggcgcagcaggtggcgcacgaggcggcggcgagggtgtcgctggcggcggcggaggacgtgcctctccggtacgtgaaggcgctgttcgacggccgtggcatcagcgcggcgatacaggtggacggcttcctcaccacccgcatggagatcgacgggaggatcagcaggagcaacggcggcgtcgccaccacgttctactgcctgccggtgaccatcgccgtcggcgacggcgacgacgatgagtcccgtaccagggacacgtggtgcctagacaagtctgacgtaccagctttcgttggatagaccgacggatctactccctccgtcaaaaaaaaaaatctaatctaatattagatgtgatgttttctataacaacaaatttggatagaagtatgctcagattcttctattagaaaatgttccatccaataccaggttgagtttttttaggacggaggaagtatgtattactacatgctttttaatgaaagtattactacatgcttgatgataatgtttaat

SEQ ID NO: 7589 - DNA, 1178 bp, Oryza sativa
  ref <308>: DATABASE ACCESSION NUMBER: AK064716
  ref <309>: DATABASE ENTRY DATE: 2001-12-06
aactaagtaagctcgcatgagtgagctcaccatggaccaagaaatccaactgaaccagaggccatcgccgcagcgacagcaacaagcacaagaacatggcggcgccaccgcaccggcgccggcgccggcgacgccacaagatgatgaacagcaagggcaccaagcagctgtcgccaggcatggctgcggcggcgcgacagccgaacgccaccaccagaccaagctcacgctactcccgctcgtcttcttcatctacttcgaggtggccggcggcccgtacggcgccgagcaggccgtgagcgcggcgggcccgctgttcgcgctgctcggcttcctcgccttccccttcgcgtggggcgtcccggtgtcgctcgtcaccgcagagctcgccgccgcgctcccggggaacggcggcttcgtcgtctgggccgaccgcgccttcggcccgctcgccggctccctgctcggcacgtggaagtacctcagctgcgtcatcaacctcgccgcgttcccggccctcgtcgccgactacctcggccgcgtcgccccggcggtcgccgtcccgggaagcagggcgcgcacgggcacggtgctcggcatgaccgtcttcctctccttcctcaacttgggcggcctaagcattgtcgggtggggcgcggtggccctggggttcgtgtcgctggcgccgttcgtgctgatgacggcgatggcggcgccgaggacgcggccgcggcggtgggcggcgcgggtgcaggtgaaggggaagagagactggaggctcttcttcaacacgctcttctggaacctcaactactgggacagcgcgagcaccatggccggcgaggtggagcggccggagcggacgttcccgcgggcgctcgcggtggcggtggtgctcatcgccgtcagctacctgctgccgctcatggcggcggtcggcgccacggacgcgccgccggaggcgtgggagaacggctacttggctgacgcagcaggtacgtagtacgtgtgtacgtatatacgctgacgcgattacgatattgatgatgtcacagcttcttttatcaacaaacaaaacacacatgatgtctccggcagatcgccgtaccggtaattgtcgccgttgtttattactttatgagttatttactcatcatatgaaaaagatccaaccttac

SEQ ID NO: 7590 - DNA, 568 bp, Oryza sativa
  ref <308>: DATABASE ACCESSION NUMBER: AK064717
  ref <309>: DATABASE ENTRY DATE: 2001-12-06
aagcacagcaaagcagcagcagcaaaggtaaggtaatatttgcagcatcgtctgaagaagcacaggagcaggggagatatggcggcgagcaaggggaacgcggcggcggcggcgtgcgcgctcgtgctggtgctgctggccgtgggcgcggaggcgcagggcggcggcgggggggagtgcgtgccgcagctgaacaggctgctggcgtgccgcgcgtacgcggtgcccggcgccggtgaccccagcgccgagtgctgcagcgcgctcagctccatctcccagggctgcgcctgcagcgccatcagcatcatgaacagcctgccttccagatgccacctcagccagatcaactgctctgcctaagacgagacgagagttaaccccggacgccatggaagaagaataatcaaggtgttgacgaagccgtcgttgtcttcgtgtctcgtttagtaaaatcttcagattgtactgcagttgctattgatgtcgatgaataataccagtaagtactatggaacaatcatgtaatgcccggttgctggttcattaacgatgacctcctttggct

SEQ ID NO: 7591 - DNA, 893 bp, Oryza sativa
  ref <308>: DATABASE ACCESSION NUMBER: AK064718
  ref <309>: DATABASE ENTRY DATE: 2001-12-06
atctcccgctcctcccattcaccaacggattcactgtgtcaaacctccgatctctgcaatggcagcaacggcgcagggcggcggcggggcggtgtccgtgcagcacgtggcgagggcgtcgtcggacgagctcctgcgcaagttcgccgacccggacgcgcacgccaagcagatcacgccgccgcggcgcagcctcgcgctgcggcggaagcggtcgtccaggagggtggcgtcggggctctccgcgagggatttggagtcgggggcggagctcgcggcgcccaagcggaggcggagcatcggcgggtccaccgagtggaaggccgggctgctgctgccgacgaccaccacggcctccgcccgcaagggatccgccgcgagccactcccaccggggcggggccgcgcgcctcgatgacgccgccgggatcggcctcctcctcgccgcgttggagcggacatggaggaagacggtggcgggggcgtcgaagatgttcgtggagaggcaccgcaccaaccacgtgctgctcatcagcgacatggtctgagctctgaactctaaactgaagcctctgccatgacaggtggccgagctgtgactgattcttctctcgtcatcgagctctcctgctcgggttggttaattggtttccttcgaattgaattcgtttatgactgatcgattctacagtttagctagaataaaatggcagaaaagaacaacacaaaattgaactagctgtgtagttcaggtagagtaggttctttgactcctgcctctgtgtttgcttttattcactcgttgtttctttatactcggttgaatcatcgtctcggcgaccacgttgtaaattcaagtttgcaatatcaataccagtgctgttcttctcagag

SEQ ID NO: 7592 - DNA, 764 bp, Oryza sativa
  ref <308>: DATABASE ACCESSION NUMBER: AK064719
  ref <309>: DATABASE ENTRY DATE: 2001-12-06
atcacgcgtctcctcatttgcaggaggccaagaaagccaaagaggaggaacgccatggagaagaagctgtccatcctcgtctgcctcctcctgctcgccgtctccggccatggcctgcgcatcctccacgacgtcgacggcgacttcggccagggcttcgccttcggctccaaggccgccgccgccgacgagacggagccgctggacccgttgctggacgactacgagaacgagatcagccacctggagttcgagccggtcgacgccgggtcgacgccgtacgccgcgggggatgcggacgcggcggcgccggctcctgggccggcggccgaggcggggagcgccgccggcagcgacagcatgaagtggtggctgccgccgtcgacgatcccgtcgttcccgctgttccccgggatgcccggcctcggcatgcctctccccggcatcccattcaagcccatcggctggggctcgccggcggcgcccggccagtacgcgccggatccccccgccggcgccggcgccgacggcgacgcggacccgagcgccgccagccaagtcatcaactgagccaatatcgatgacgtggcacaccacgtagttctagttctacacgaaatgaatccttgagtttttaaaacggagttactataaatatgacgctatatgctatacagtcgattttttttcagccatttatacagtagttacacctcatttacgaatttacatactaattacatatataattttcaaatttacat

SEQ ID NO: 7593 - DNA, 754 bp, Oryza sativa
  ref <308>: DATABASE ACCESSION NUMBER: AK064720
  ref <309>: DATABASE ENTRY DATE: 2001-12-06
aagaaaagcaaagcaaagcagcaaaataaatacgtagtacgaacgcgcgattgcaagcttcttcctccatggatcaggagcaaggcgagagagagctccagctgctgctcccggcggccgcctccgccgccgcggcggcatcgcgccgccgccgccggtggtggacgtgcgggcggtgaggcagcagacggcggagcagatgaggcaggcgtcggcgcaccgggcgtacgcggagcgggtgagggagatggcgcgggcggagctggagctcgcggagcgggagttcgcgcgcgcccgggcgatctgggagcgcgcccgcgaggaggtggagcgcgtcgagcgcatgaaggagatcgccgcccgccgcctcggcatcggccccgccgccgcctccgccgccctcgagatcacctgccacgcctgcatgcagcgcttccacccctagctagcttcatgcaccgccgccatggcgatggcgtacgtacgcagctaggtcgccattgttgctgacttgctgtaacgaacacttcagtagcatatgctatagctgctgcgaatggcgccatggctgcgacatgtgtcgtgttcagtttgggatggatggatggtgatcatctggttggatgcatgcatcaacacaaggcttcttcttcttcttcttctagcttcttgttgttgcttctctcttactcttgatgtgtaaatgctggattaatttacagctagcctgcattaagttaagttaaattaattt

SEQ ID NO: 7594 - DNA, 1312 bp, Oryza sativa
  ref <308>: DATABASE ACCESSION NUMBER: AK064721
  ref <309>: DATABASE ENTRY DATE: 2001-12-06
attcgtttcccttctcccttcctcgctccccgtcccccgactcgccgccggccgcgccaccggagaatccaaaccctcgccgccgccgacgccgccgcccggccgcgcagagctctgattccgcggaatccctgcgcgccttcgcgagattccctcgggtttgggcgggaccgtcgtcccctggcctgagggggggttgccgagttggcggcggcggtggcaggcggcgagatgggggcgaacgccgaccccacgggggtgcttctgggcgggccccaccaccgcaacccttcccccgcgccggcgctggcccagccgccgggcgcgagcaccgcggcggcgctgcgccacgacccggggctctccgtccggtggacgcccgaggagcaggccgtgctcgaaggagggctggccagctatgcggcggatgcagctgtagttcgctatgcaaaaattgctatgaatctgcctgacaagacagtgcgagatgtggccctgcgttgcagatggatggctaaaaaggagagtaacaagaaaaggaaggaagagtcatctaagaaaaacaaagaaaagaaggagagagccaatgattcttcatcaaaagggccagctcacctagtggcccgacctaatgctgctccatattctcttccagttcttcccatggatgatgatgatgtgtcatacaaaacaattggaggccaaactggtcaaattcttgagcacaatgcacagatcttgaaccagatctataccaatatttcaaacatgcaggtgcaggagaacatccctcttttatgtcaaactagggataatatacttgcagtcctgaaggagataggcgatgttcctgagataatgaggcagatgccaccccttcctgtaaagttgaatgaagaactggctaactctatgttgccgaggcctccacatacatgatatgtgcaacagtttgctcaaccaaatcaattgtgcatgaagatcagtttagatagatgggttatttgcatatgctttgtcgctatagattccagatgtctgattgtgctgtccagatcttaaatccagccatgtaacaattctataccttggttctatttgttcagctgatagtaggtgctccgtgtacaaagccagcagtttcagtgaaacaagttcgtagccctctagtccttgtagaaaaaaaacataggggttaacttctgtacagtgtcgaaagaaatagcatcttttctgtttcagttatgtttagaactggcattcagcccaatcttacatgttcggacatgatataatacaagcaaaacttctt

SEQ ID NO: 7595 - DNA, 1209 bp, Oryza sativa
  ref <308>: DATABASE ACCESSION NUMBER: AK064722
  ref <309>: DATABASE ENTRY DATE: 2001-12-06
ttgctattaatcaagctctagatcccagtgttatcacttggctcaaacaattctgcaatgaacaagttaaaaagttggatttaagagcgaagatgaacttgatgaaggaatctaaacattcaggagatcaaatttggagtgtgatgatttttttcttctttaggccatgttcggttgggccgggaacggccgggatcagggcccgatccccgtggatcaacccggcgtgggaagaataccggcccacgcaagaataggcgttcggttaagcccatgcgagattttatcccggcccacggggtgttttccccgtgtaataggccgggaaatattcagcttctctggtggcgaggaaaaaaccctctcgagggcgtgcaacgcagcggcggcacaacgagagggggcgctgctgcggcggggatggcgtggcgcggcgcggcgcggcgcaacccggacgcagcggcaacaacacacgctctccgtgggtagctgtcttctccggtggccaccttctccccggtgagttcctccccttccactctcccttttcttccaaagttagggtttcttgaacgcgcactactgcggtggtggtggcaatggtgcacggcagttgcaggcgtggtgggggacgccaccgcatcacaccccctcaccatggcgccgttgaagctctactgctgtcgcaaggagaagcaggaggacacggatgcagcaacagcttcaagtgttctttttttcactggtttcttgatttgttctttctccccgttgatctgtcacctggatttcctcctcccttggttctcaaagaagaagaattaaattaaaattagtggagactattagagatggatggatcgatctttaatttttctctgtgcagtgtgcacagcacagggaaggaggggtcactgttggtccttgtcttcatttttatgtccttaattacccctcttgatgcatgtattactactagttactagtactagcttagtagtaggtgcctcctcttgagttggtagttttctccggcaataataaggatgaatatatatatatgccatcataatctgttgtcctgtgaggagaaggaacatttacagtggtcattcctgaatttgtgctctgaagtagccccacaggattttgatatgtagataaatgtgatcagatgaatccgagttattgcagttctcatttttggtc

SEQ ID NO: 7596 - DNA, 1045 bp, Oryza sativa
  ref <308>: DATABASE ACCESSION NUMBER: AK064723
  ref <309>: DATABASE ENTRY DATE: 2001-12-06
aaacgcgcgccgtttcccgcttccactcccctccccccattattcccgcgattctcctcccttcctcccgccgcgcgcgccttggccatggggaagtacatgcggaaggggaaggtgtcgggggaggtggcggtgatggaggtgggcggggcgctgctcggcgtccgcacccgctcccgcacgctcgcgctgcagcggacgacctcgtcgcagaagccgccggagaagggggagggggaccccggtgcgggcgcgggcgcgggggcggagtacctcgagctcaggagccggaggctcgagaagccgcctccgcacacgccgccggccaaggagaaggagaccgccaggagggcttccgccgccgccgccgccgccgtgaggatgccggcggcgccgcaagcggccgaggagttcgaggcggaggtcgaggtgtccttcggcgacaacgttcttgacctcgacggcgacgccatggagaggagtaccagggagacaacgccttgcagtttaattaggagctcagaaatgataagcacccctggctccacaactaaaaccaacacctcgatcagttcccggcgcagaatggagacctctgtttgtcgttacgttccgagttctcttgagatggaagagttctttgcagctgctgaacaacagcaacatcaggctttcagagagaggtataacttctgtcctgtgaacgactgcccacttcctggacggtacgaatggacaaggctagactgctagattttcatcttgagagctccattgatctctccacacagttgactagcaccaccatggcagaggcaaaatgcaattcgattaggtttcttctctgttgtaaaaaaaaaatagagttagtcagtagctcaatgatcttgtgtaacaaacataagtgatgttgagttacacatcctgatccccccaccaacatgtaaccgttaactgctcattctgtaacgaaccacctcttttaggcctagctttattatctgtccccagtcgatttaatgaatttagttagaatttctctagc

SEQ ID NO: 7597 - DNA, 1231 bp, Oryza sativa
  ref <308>: DATABASE ACCESSION NUMBER: AK064724
  ref <309>: DATABASE ENTRY DATE: 2001-12-06
aaaaaaaataaataaaagaagacgaaaaaggaaatcgtcgtgcggcgtccgctcgtcgtcgactcgcgagttcggccgccgccaccgccgccgccgccgccgccgatccccatccatcccgcgagcaagcaagggcgcaggcatcctgatccgcccctgggcttggctagcacaacattttttagtgggggaaggaagggaaaggaatcggtgggtggatcgatgcgagcgttcgcgcgaaatctggcggccatcatccctcccgcgcgctgcaatgcgacggcgacgaccgcggcggcgccgtcctccctcgtcctcaaggtcggcgacacgctgcgcgagcggcggcgcttcacggatggggaggtggaagcgtacgccgcggtgagcggcgaccgcaacccggtgcacctcgacgacgccttcgcccgccaggtgggagggttcggccgcggccgcgtcgtgcacggcatgcttgtcgcctcactcttccccgccctcatcgccgcccacttccctggagccgtgtatgcgaggcagtcgctcaagtttgcggcaccggtgtatgtcggcgacaaggttcttgtgcaggttcaggcgctgcacatcagggcctccacaaaacacattgtcaaattcggaaccaagtgcttcacgagtgacagtgatgacctcctagctgtcgatggtgaagctatggctgtgctcccctcgctttacctcagacaacaactgaaccaagtgcctcccatcgttgattaaagactggaagcatcgtcaggagtgggacaatatgtgatttatgttcttttgggtctgtagatgctttgacaagataggaaggctatatgttgttttgctgttctcggtagtagctggctcccttgttaagctggaattcccagccttctgtacttcatcaaacctttattccgtttccaatagaacctggggtaaatcccgttataaaaaaaaagggtacatcactgatggtagcactggctagtaactctcagtgcactccattactctaaatagaagtcccatggtttgggtcctttgttgttaaaacatttataatgtctcatgatttagtcagacagcatcttcaaaactgagcttgcagagcaatttgtttggtttgtgttgctcactttagtagaagatgatgtaaaatctgcactcgtgagcgcctgctcaacacacaataaaagttcttgacatattgttc

SEQ ID NO: 7598 - DNA, 1598 bp, Oryza sativa
  ref <308>: DATABASE ACCESSION NUMBER: AK064725
  ref <309>: DATABASE ENTRY DATE: 2001-12-06
cttctctctctcccgcgcgtgacgacgaggagactcctcccaccgaatcgaacaaccagcgtgctctctcctccgaatccgccgtcgacgatgccatccgccgcggcgggcgacggcaagggtaagcggcggttagtggggatgccgccggcgagggcggcggcggcggacttcgcgatgggcagggcggcggcggtggtggcgaagacgggggcggcgccggtggagcgggtgaagctgctgctgcagaaccaggccgagatgctccgccgcgggagcctcacccgcccctacaggggcatcgccgacgccttcggccgcgtgctccgcgaggagggcgtcgcggcgctctggcgcggcaaccaggccaatgtcatccgatacttccccactcaggcttttaacttcgcattcaagggctacttcaagagcatctttggctacgacaaggagaaagacggaaaatggaaatggttagctggcaatgtagcatctggcagtgctgcaggggctacaacctcatccttgctatatcatctggattatgcacggacaaggctagctactgatgcaattgaatcacagggaagcaaacgtcagttcagtgggctgcttgatgtctacaaaaagacacttaaaactgatggtattcgtggattatatcgaggtttcagtgtgtccattgtgggtatcactctatatcgaggtctctatttcggaatctatgataccatgaagcctcttattctagtgggaccactgcaggaaaatttcttcgccagttttgccttgggctgggcaataactacgttctctggagcctgcgcctatccatttgatacactccgtcgcagaatgatgttaacttctgggcagccattgaaatataagaacgccttccatgcagcaaaacagatagtttctactgaagggttcttcacactattcagaggggtcggcgcaaatattctctcaggaatggcaggagctggagttcttgctgggtatgacagctccaccggtttgcaggtcaacatggttacaattttgagagcaagatgaaaggggcattgaaatgatgtgcaaatggggataaatagaggcatatccttggttgaagtttggattggccaaatgggatgtatgagcttggataatcaagcgggcgaaacagaactccagatactcctgcagttgataggattgacggcgaagagaacagcttttgcaggatgtatactttcaaggagcggagatgaagtcagaatcaaaagatagctcttgcggtagaaagaatgtcaataattctgaaacctgattcttgaagtgtgaatatcgatcgagagttagatcgtactcgcgctaccaatgccttgatgtgaactgtaaatagaacttgtggaattgctccattgaataacctttctggtgtagtataccacatttgtactactgtatagccaaaaacaaattaataacaaacctctgggtgttccgaggattggagtcgggtcccaaagcgggaatcataccatcagaatctttcacaccatcctgtttataatggcccgcaggaaatcaagatagttgattcgacc

SEQ ID NO: 7599 - DNA, 879 bp, Oryza sativa
  ref <308>: DATABASE ACCESSION NUMBER: AK064726
  ref <309>: DATABASE ENTRY DATE: 2001-12-06
acctcacaggcacaccatccaggcttcgcttcctccaatccacgacaatggcgcccgcgtcgctgacgagattgaccaacccgttgccgtgcgcctctccatctccaagatgccggcgccggccggggagatctccgccggcgagggcggcggcgtgcggggtggtttccaggaggagggcggtgtcggagatggcgattcttggcggcgccgccgcggccgcggcctcctgctgcgtcgatctcttcttcgcccacatgcctgcccgtgccgccacgctggagcctgatgtgatcaggtacagaaagctggacagtggagtgaagcttgaagatgttgtggatggcgagggtccagaagcacgtgaaggagatgtcgtgcaattcaactatgtgtgccgccgcgcaaatggttatttcgtgcatagcacggttgaccagtttagcggcgagagtaagccggtcacacttgcacttgatggaaaagagatgattcgaggtctcaaagacgtcatcgttggaatgaagacaggaggtaagaggagagctctgatacctcctcaagtaggttacactgatgagagcttgcagcccataccagaagagttcggtccacggcgaagcctcctgtcacatgccaaggagcctctggtgtttgaggttcagctgctcaaggtcctctgaccctgaatttttctgccattatctaatcatcacatcctatagtgttcactcttcaaagaatatgcatttctctttcagaataaactcagaaaactgtactgtttcatatgtataagatacagtgatcacttgctgatttgaaacgcaactagcagcaagttgaatcaatgaaagagacaatgaacagcttctagcc

SEQ ID NO: 7600 - DNA, 1381 bp, Oryza sativa
  ref <308>: DATABASE ACCESSION NUMBER: AK064727
  ref <309>: DATABASE ENTRY DATE: 2001-12-06
gtgtacaccatcttagctggaacgtgcatgcgtacgttgcccacatggcgctcaagccaacgctcgccgccctcctcttctccctggccgccatccacggcatcgtcgtcgtcgccgtcgacgcggccgctgccgccgtgtcactgggtgggagcgcgcgacgcataccggccgtcttcgccttcggggactccacgctcgacgcgggcaacaacaaccgcctcgtcaccgcggtgcgcgccgaccacccgccctacggccaggacttccccggcggcgcgccgacggggaggttctgcgacggcaagatcatgagcgacttcctcgtggaggcgctcggcgtcaagggcctcctgccggcgtaccactccggctccgaagtcctcagcgacgccgacgccgccacgggggtcagcttcgcgtccggcggctcgggactcgacgacaggacggcgacgaacgccggcgtcgcgacgatggcctcgcagatcgcggactttagcgagctcgtcgggaggatgggcgccggcaaggccggtgaggtggtgaacaagtcgctgttcctcgtgtcggccgggacgaacgacatgatcatgaattactacctgctgccgagcaagtacacgctggaccagtatcacgccctcctcatcggcaagctccgatcgtacattcagagcctgtacaacctgggcgcccggagactcctggtcgccggattgccgccggtcggatgcctcccggtgcagatgacgctggcggcgctgaggcagccgccgaggccacagggctgcatcgcggagcagaacgcggaggcggagaagtacaacgccaagctccgcaaaatgctcaccaagttccagtcaacttcgcccggagcgaaagccgtgtacgctgacatctacacccctctcacggacatggtcgatcatccccagaagtatggtttcgccgaaactggcaaggggtgctgcggcactgggctgctggagatggggcccctgtgcaccgatctgatgccgacctgcacgacgccggcccagttcatgttctgggactctgtccatccgacgcaagccacatacaaagctgtcgctgaccacttcctgcgaactaacatgttgcagttcgatgattaaatgtggcttaattaatgccacaacttactagcagtagctctgaaaggtttgtacgcactgtgacagtacttatagtacatctttgaagaccaaccattgcaacttcgtcttcaatgcaacgctttacttgcaaccattaccgacctgaattgctgttgctagttgtgcactggctttttttatcaggcttcttgggtttgtttggtttacggtctaagagcaaatactataagtttgtaagc

SEQ ID NO: 7601 - DNA, 873 bp, Oryza sativa
  ref <308>: DATABASE ACCESSION NUMBER: AK064728
  ref <309>: DATABASE ENTRY DATE: 2001-12-06
agggcaattgaccaatggtggcgccctcgacccggccggccttgtggcgatcgcgatcgcccatgcactcgccctgttcgtgggcgtttccgtcgccgccaacatctccggcggccaccttaacccggccgtgacgttcggcctcgccgtcggcggccacatcaccatcctcaccggactcttctactggatcgcccagctgctaggcgcctccatcgcctgcctcctcctcaagtttgtcacccacggcaaggccatcccgacgcacggcgtcgccggcatcagcgagctggagggcgtcgtgatggagatcgtcatcacgttcgcgctggtgtacacggtgtacgccacggcggcggacccgaagaagggatcgctcggcaccatcgcgcccatcgcgatcggcttcatcgtcggcgccaacatcctcgccgccggcccgttcagcggcggctccatgaacccagcgcgctccttcggccccgccgtcgccgccggcaacttcgctggcaactgggtctactgggtcggcccgctgatcggcggcggcctcgccgggctcgtgtacggcgacgtgttcatcggctcataccagcccgttgccgaccaggactacgcttaaaagtggatgaaccgaattaattgaagtatccgtgtcagtttgcatgcatcgtacgtttgcttgatttgatattcgtcgtgtgtgatacgttcacaggctttgtattttccggtttaccttctttttgtcaaacacggtacatgtaaaaggtcactttctgcgattgttgtctggaaggggaaatcaaaattgtaaaatttcatcgacacaattgataagatcaatttgcattagatttggtttgtaccagg

SEQ ID NO: 7602 - DNA, 1148 bp, Oryza sativa
  ref <308>: DATABASE ACCESSION NUMBER: AK064729
  ref <309>: DATABASE ENTRY DATE: 2001-12-06
aacgaatccccttccccggatcaagcagctagggtttccacctctccctcccccaaatcttctccatggccgccgccgccgccgccgacgcatcggccgaggccgcggccatcgcgcggcgcctggcctcctgcaacggctccgcacgggagcgcgcggtgcggcacctcctctccaccttcctcccggcctcggctccgcacctctccgcctccgacctcctcaagctctggaagggcctcttcttctgcttctggcactccgacaagccgctctaccagtcctccctcgccacccgcctcgccgccggcgtctcctcgggcccctcgccggccgccgccgccgccttcttcgccgcctacctcgccaccctccgccgcgagtgggtccacatcgacacccaccgcctcgacaagttctacctcctcaaccgcaggttcctccaccacgccttcctcctcctcgccgccaactccttcgccgccgacctcacctcccaggtcgtatcgatcctgtcggagaaggtactccttcccgaggccgacaacgtcgccgccggctcgccccgtgggcttgggtaccatgtcgccgaggtgtttctggacgagctgtcgcctgtgctccctgtgagcttacagacaatggaggtgttgctatctcctttcttcgctgtgttggagaagtcatctgatagggcgatggtggctaaggttaagtctagtgtgtttgagaggttcctcgagagcggcaaacaattgctcgagatggcgaagaaaggcgagggggtggagaaggggagcgcagacgagaagattgggaaggttggcttgctgtttgggttcagcaagaggttctcagatattggggcgaaggcggagaccgtgcaagcaaaccgaaaggtgctatttgggctgagggatgcgtttgtgaaggttgagaaaggattggagctctctggggtcgagattgctgtgccagagttcaagagtaccgaggtgacaggggtggagaatggcatggatttggatgaggtgaaggtggagaagaagaagaagaaaaaggcgaagaaagcttcattggtggaaggtgagacagagggggccaaggattcaaagcaagagaaaaaggtcaagaaggagaagaaagag

SEQ ID NO: 7603 - DNA, 1982 bp, Oryza sativa
  ref <308>: DATABASE ACCESSION NUMBER: AK064730
  ref <309>: DATABASE ENTRY DATE: 2001-12-06
gcacatccatcccagtgaaaagtgcagtggcagaggcagagcagccggtgaagtagcagttggagctaagctagcaatggatcccctgaagctgaaaccaccctccatggccacccgcaagcgcctcgccggcgccgccctcagctgcctctcgctcttcctcctctcccgcgccctcctcttctcccaagacgacccggagcccgtcaagcgaccggacgaggcgtcctcaatctcattgccgcccgaccgcattgccattattgctgctgcacctgcgccgagcccagctactgctgctgcttccgatggctcgccggcgccggcccaggatgaagtccggtgcgacctgttcgacggcagctgggtgtacgacccggccggctatccgctctacgacgccggggagtgccccttcttgagcgaccaggtcacctgctggaggaacggccggccggactccggctacgagcactggcggtggcagcccaggcggtgcgccgccgctctcaggtgcgtggccactgctacctaccttgcatctcttctgcctttttgaaatttctcttcattttgttttaaatcctggacagacaaactaaagctggtctctttagtagattctgaatctgatttgtttttgaaatgcgcatgaatcgttcatgaatgctctccgttgtgtgtgtgtatcccctgtgacacagtcgtaatcgatggctaaaatgaacaagcccgtgcaagtcgcactgtctcagggcccgttcttggatacaaaaggtaaatgaaaagtgggtaaagttgtcaacttgtgacgatgtgcgttgcttttgagttgggaacacagctctgacagtgccctgtgcatagtactactagtgttatggcagtaattaattatttttcactttgaaacacatagttgacactagttgcacacatgacaaccaaccacggtcactgttcctgattcctccggtgcatcattccgaccggaataatcgtgttgattctccatgagtaatcctctgcaaatcgcacacgtcgcactgaataatgcttcacttttttatcaggctgcgtggtggggagatgctggagcagtgccgggacaagcgagtggtgctcgtcggcgactcgctcaaccgcaacatgtgggagtcgctcgcctgcgtcctctacgccgcggcgcccgaccgctcacgcgccaccgtcgacgacgccagcgccgaccacaagatcttccaagcattggattacaactgcacggtggagttctactggagcccgttcctggtggacctcgacgaccagaccagggtgctgaagctggaccgcctcccggcgacgacgtatcgccggctcgccgccgccgacgtgctggtgttcaacacgggccactggtggacgcacaccggcaagttcagggcgtgggatcacctggagaggaacgggaagaaggtggagatgggagcggaggaagccttcaaccgcgcgctccggacatggacgcggtggctcgatcgaaacgtggactctcacaagaccatggtgttcttccgcagcatctcccccgagcacaagaacaagaactggtgctacaacgagacggctccgatggcgagggcggaggagtacgtggaggcgttcccgagagggatggtgtcgatcgtggagaggaacgtgaggagggcgaggacggcggtggggtacctggacatcacccggctgtcggagctccggcgagacgcgcacccgtcagtgttcacggtcaggggagggaagctgctgacgccggagcagaggcggcagccgggatcgtacgccgactgcagccactggtgcctgcccgggctgcctgacacgtggaaccttctcctctttgcctcctggacctcgcttcgatcctgagatcatctcttcttctccattgtcgatgcgccattgatgcatcatgcatgtatatataggattaattgttgctg

SEQ ID NO: 7604 - DNA, 966 bp, Oryza sativa
  ref <308>: DATABASE ACCESSION NUMBER: AK064731
  ref <309>: DATABASE ENTRY DATE: 2001-12-06
aaggacgccgtgcggcgtgccatccagctcggcgtggccccgggctcccagatgttccggcacgcgctctccaccgccggctgcatcggccaggacaagatcgacgccaaggtcgccgtcctgaaggagagcctcgggtggtcgcaggaggaggtgaacctggccgtgagcaaggcgccgcggatcctggtcgcgtccgaggagaggctgcgccgcaacgcggagttcttgatcgacgaggtcgggctgcagccgcagtacgtcgcgcggcggtcggtgctgctcatgtacagcctcgagaggaggctggtgccccgccatctcgtggtgaaacttctcaaggagaggggtctgatcgagcaagaccggtgcttcttcaacgcggtggcgccaactgaagagaagttcttggagaagtttgttgtcccctttgaggggtgcgtcccgggtctcgccgacgcctacgagtctgcctgtgccgggaagacgccggtgcaagctgagtagtgaccggacttgggggaggacaatggaggcttacactctagctggcttctggcatgatcagcgatcacgatgtcctgatgtgcatcttccaattccaagttgaacgagagaaagtgaagaaccatctgagcaaagatataactagataaattgcgggactagggaagaacactctacataaggagatggaaaaggttgatctggttctcagcaaatcatcagaatgaggagtgttcctctacggcatagaacaagttgcggctgaagctttagaagaggttatttttcaagctgttcaactggataggcagaggctttcctatcgtatactagcatgtttcttggattgcatgcctactgttgcaaagcaaaaacttaggcaacccaagattagaaaaagcactactccatatacttcattcacccgtttctaaatatttgacaccgttgatttttttt

SEQ ID NO: 7605 - DNA, 649 bp, Oryza sativa
  ref <308>: DATABASE ACCESSION NUMBER: AK064732
  ref <309>: DATABASE ENTRY DATE: 2001-12-06
gagctgaggaaggtgttcaagatgttcgacaagaacggcgacgggaggatcaccaagaaggagctgggcgagtcgttcaagaacttcggcatcttcatccccgacgacgagctcgacgccaccatggacaagatcgacgccaacggcgacggctgcgtcgacgtcgaggagttcggcctcctctaccgctccatcctcggcgacgacgccgccggccgagcccccaggacggcggcggcggccatcggcggcgagggcggcgcccccgacgacgaggacgaggggatgcgggaggcgttcaacgtgttcgaccagaacggcgacggattcatcaccgtcgacgagctccggtccgtgctgtccagcctcgggctcaagcatggccgcaccgccgacgactgccgccggatgatcagcatggtggacgccgacggcgacggccgcgtcgacttcaaggagttcaagcagatgatgcgcggcggcgggttcgccgcgctcggtggctagcctctggcttggcctaatctttgtcctaatcttgttgcacttgcacgcatggcttaattaacctgcttgtggtattttatgcaccgctcggtttgtagataatttgacatgattagcagttaattaataggccggtttggtt

SEQ ID NO: 7606 - DNA, 1639 bp, Oryza sativa
  ref <308>: DATABASE ACCESSION NUMBER: AK064733
  ref <309>: DATABASE ENTRY DATE: 2001-12-06
ggaactctgcaactgcaagagcaaaccacctccaacccccgttcgtcttcgtcttccccagaaatctccctgcaggtagtagtaggtaggtaggttggcagaggcaagaagatggggggcgcctttacagcggcgcccgcactcgctctggtcttgctcgtcgccctctcggtggcggccaccgcgaatgtgggggattcatgctcgacggcggtggactgcggcggcgggcagtggtgcttcgactgccagccagagttcgccggctccagctgcgtccgctccgccgccaccaatcccttccaactcactaacaactcgttgccattcaacaagtatgcgtatctcacgacacacaattcatttgcgatcgttggggagccatcgcacactggagttccacgcatcacctttgacaaccaggaggatacagtcactgatcaattaaataacggtgtccgcgcgctgatgcttgatacatatgacttcaaaggagatgtatggttgtgccattcaaatggagggaaatgcaatgatttcactgcattcgaacctgcattggacacattcaaggaaatcgaagccttccttggagccaatccatctgaaatcgtcacgttgatcctggaagactacgtgcatgcaccgaatggcctgacaaacgtgttcaaggcctctggtctgatgaagtactggtttcccgtgtcgaaaatgccacagaaaggtaaggattggcctcttgtcagtgacatggttgcgagcaaccagcgcctccttgtgttcacctccatcaggtcaaagcaggctactgaaggaatcgcataccagtggaactacatggtcgagaacaactacggagatgatggtatggatgctggcaaatgctcaaatcgtgcagaatctgcacctctgaatgacaaaaccaagtcgttagtcctggtgaactacttcccatcggtcccggtgaaggtaaccgcatgcctgcagcactccaagagccttactgacatggtgaacacatgctacggtgcagctgggaatcgatgggctaatttactcgcagttgattactataagagaagtgatggagggggcgcattccaagcgactgatttgctcaatggcagactcctgtgtggatgccaggatgtcagggcttgctcgcgaggatctggtgtaatatgttcttcatgaaccctggggaagtaggatttgattggagtggcacatccacatagaaaaagtgtttatgatgtgatgattcagagatttagcctcaagacaacattgtaggatgcagattaccataaacttgaaagtgatggattgacctcctcttgtgaatagtgaattcgttgcaaatactttatagtgggagtggaggtgttatctgaaagaagaataattcgatttttgggccacatcgccacgacaataatatgtcatgtaaaaacacttttaagttccaaccaaggttgaaaaatgaactggtggttcaaggtttaatattaacaggtttcgatgtttagcacattctatattgtaatgaaattgttgtaactttttaaaagatagctcttagttgtaatggactttttcatttttaaacaatatcaatatgaacatctgcaaatatcac

SEQ ID NO: 7607 - DNA, 1162 bp, Oryza sativa
  ref <308>: DATABASE ACCESSION NUMBER: AK064734
  ref <309>: DATABASE ENTRY DATE: 2001-12-06
aacagggcaacacctaccgtagttgatcccgactccatggctggctccggcgacatcgacggcgaggtcgtcttcgaggtcgaacactgcatacgcatcttcaagggcggccgcgtcgagcgctacttcggttccgactccgtcccggcctccacagatgccgccaccggcgtcgcctccaaagaccgcgccatctcccccgacgtctccgtccgcctctacctcccgcccgtcgccggcgtgagcggggaaggtgagggaaagaagctcccgctcctcatctacttccatggcggcggcttctgcctccacacggccttcaacttcgtcttccacgcctacctcacctccctcgccgcgcgcacccgagccatcgtcgtctccgtcgagtaccgcctcgcgcccgagcaccccctccccgccgcgtacgaggactcgtggcaggctgtcctctgggcggcctcccacgcccccggcgccggcgaggagacctggctcaccgaccacgccgacttctcccgcgtgtacctcgccggggagagcgccggcgcgaacatcgcgcacaacatggccatgcgagccggcgccgaggggctcccccacggcggcagggtcaacggcgtcgtcctagtccacccctacttcctcggccgcggcaaggtcccctcagaggactgggacccggcgatggcggagaacgtggtgaagatgtggagcgtcgtgtgcccggcgaccaccggcgtcgacgatccgtggatcaacccgctcgccgacggcgcgccggggttggaagggctggcctgcggccgcgtgctcgtgtgcctcgcggagaaggatgtgatccgcgaccgcggccgcgcgtactgcgaggggcttaaggcgagcgggtgggcgggggaggtggaggtcgtcgaggtggccggccatggccactgcttccacctgatggacttcaacggcgacgaggccgtcaggcaggacgacgccattgctgagttcgtaaatcggtagagaatccaatggcctcttgggtaactgttgcattgggcatgctgctgtctattgctattgctgtatgatttgttatttgatttatgctgatttcgcctagtatgaatccatgtaaaacacagatgtctattgacacactacatttcaactt

SEQ ID NO: 7608 - DNA, 661 bp, Oryza sativa
  ref <308>: DATABASE ACCESSION NUMBER: AK064735
  ref <309>: DATABASE ENTRY DATE: 2001-12-06
ctgcttctccccgcaaatctccgatggccgccgccgccgccgcgccgctccgcaggctgctcctccgcctcggcaagccgccgccgctgcccattccgctgctgccccatatcacgccgcaaaccgcacaggccgccggggaccccgccgcgcctccttgcccaggcgcgatcccgagccaagccccggcgaggaatctccgtgacgtcatctcctccttccaccccgggctccagatttacccgtccctcgatccgagattcggggaggtggaggagggcgtggacggcgaggggggtggcgcggaggtgtgggcggacagcgtgaagaagaagcggaagcgcaagatgaacaagcacaagctccgcaagctacggaagcgcctccgccgccagacatagagcgggccgccgccgccgccgccgcacgtgggcccaaggattttacttgcaagcaagcactcgacaccgctccctcactggatacaagctgattatttctagcagtttttatttgattatgggaggggctggtttaataccagccttcgattgttggcacggggcatccatctaggaaccctgtcaagactaaatgaaaatgagcaccaggaagcagtggtttatgcatgaatttctgtctaataaaacttttaatgatt

SEQ ID NO: 7609 - DNA, 1863 bp, Oryza sativa
  ref <308>: DATABASE ACCESSION NUMBER: AK064736
  ref <309>: DATABASE ENTRY DATE: 2001-12-06
aaacccgcatttcccatcgtacaacgagcgagcggatcatacggtcatggacgttgtgcctctcccgctgctgctcggctccctggccgtgtccgccgccgtgtggtaccttgtgtacttcctccgcggcggcagcggcggcgacgcggcgaggaagcggcggcctttgccacccgggccacgcgggtggcccgtgctgggcaacctgccgcagctcggcgacaagccgcaccacaccatgtgcgccctggcgcggcagtacggcccgctgttccggctccggttcggctgcgccgaggtggtggtggccgcgtcggcgcccgtggctgcgcagttcctgcgcgggcacgatgccaacttcagcaaccgcccgcccaactcgggcgccgagcacgtcgcgtacaactaccaggacctcgtcttcgcgccctacggtgctcgctggcgcgccctgcggaagctgtgcgcgctccacctcttctcggccaaggcgctcgacgacctccgagcagtccgggagggcgaggtcgcgctcatggtgaggaacctcgctcggcagcaggcggcgtcagtggcgctggggcaggaagcgaacgtctgcgccacgaacacgctggcccgcgccaccatcggtcaccgggtgttcgccgtcgacggcggggaaggcgcaagggagttcaaggagatggttgtggagctgatgcagctcgccggcgttttcaacgtcggggacttcgtgccggcgctccggtggctcgacccgcagggcgtcgtggcaaagatgaagaggctgcaccgtcggtacgacaacatgatgaacggattcatcaacgaaaggaaggccggggcgcagcccgacggggtcgccgctggcgagcacggcaacgaccttctaagcgtgctgctggcgaggatgcaggaggagcagaagctggacggcgacggcgaaaagatcaccgaaactgacatcaaagctctgctcctgaacctattcactgcggggacggatacgacatcgagcacggtggagtgggcactggcggagctgatccggcacccggacgtcctcaaggaggcccagcatgagcttgacaccgtcgtcggtaggggtcgtctcgtgtccgagtctgaccttccacgcctcccctacctcaccgcggtgatcaaggagacgtttcggcttcacccgtcaacgccgctctcactgcctcgggaggctgcagaggagtgtgaggtggacggctaccgtatccccaagggcgctaccctcctagtcaacgtctgggctatagcccgtgacccgacccaatggcccgacccgctacagtaccagccttctcggtttctccccggcaggatgcatgcagacgtggatgtcaagggtgctgatttcggcctgataccattcggagcaggacggagaatatgcgctggccttagttggggcttgcggatggtcacactgatgactgccacgctagtgcacgggttcgactggaccttggctaacggcgcgactccggacaagctcaacatggaggaggcctatgggctcaccttgcagagggccgtgccgttgatggtccagcccgtgccaaggctgcttccatcggcttatggagtataaaaccggtctacttactagtaccactttaaattaaggtcagaaatcggtggagactacttgcagtgttggccgcattatatgacgtattattttgttttgtttgttggtggaaaaataaagtagtctatctcagtgttatctggcactaaaggaactctagaaatggtggcaaaatagagtactatcgtggaatcataaaaaaggattatttggtgtataatacagaaaaatttatg

SEQ ID NO: 7610 - DNA, 759 bp, Oryza sativa
  ref <308>: DATABASE ACCESSION NUMBER: AK064737
  ref <309>: DATABASE ENTRY DATE: 2001-12-06
aaaaaccctagaactcaacggagcgagcgcgtgggtcgggatgtcggcggcggtgagtgccctccgccgcgccctgtcgtcgtcgtcgtccgcggccaagaccagcagcagcctgcgccgcctcctccccgccgcgccacttcgccgcggggtcctctcgtcgcagccccggccgtcgcgccgcaaggacagcatcgagctctctcggagtgaggaggggaggaggctcgccggccgtttcgacgagattgaggatgccgtgcacgccattcttatcagggacatcgaatcctaccgggccagcaccatggccgaccaaggcttcgtcgagagaaggctcacctctctggggttcaccaagggatataccagggaccaagctctttggctttccaagctcgtgcttgcattcttttcttcgtgggtcgtagggactggattcgccaaaatcgacgacagcctccatcagaatctgtgattatcactggagtggagcgttacacatgcatgaattttgtcacccaacctcacagcgatcatactgaagattgtgccgcgaaaaataaatgtgaacgttttatgattctcttctctcaagaacattgggtcgtatcatctgataatttcctcacacagtatgctatcagagtgaaacaaatacatgagaattgtgcatctgtatggttttgagcttaaactttattagaaaggctgtaaacccatgagatgatctatgatcattccttgattttgtggttc

SEQ ID NO: 7611 - DNA, 848 bp, Oryza sativa
  ref <308>: DATABASE ACCESSION NUMBER: AK064738
  ref <309>: DATABASE ENTRY DATE: 2001-12-06
gtcgtcgtctctctgcacgcgagaaaacgggagaggcggccggcgcggcgcgcggccactagtcatcccgccagggcgcgcgccatgtctctgcacgctcgcgtcgcgctcttcgccgccgcgctcgccgccgtcctcgccgcctccaccgccggcttcatctcaaatgaggcggtgggcgcgtcgtcggcggcgagcggcggcgcggggcggagcttgctgcaggcgaagaaggattgcccggtgaacttcgaggaggcgaactacacggtgatcacgagcaggtgcaaggggccgatgtacccgccggcgctgtgctgccaggcgctcaaggacctggcgtgccccttcaccgcctacatcaacgacgcccagaccacctgcgccgcctccatgttcagctacatcaacctctacggcaagtacccgccgggcctcttcgccaacacctgcaaggagggcgccaatggcctcgagtgccccgaggacaccccccagatgaagcccggagaggacaaggccgcctcctccgccgccgccattgtcgccgccgtcgcgcggcccgtgctcgccgccgtgtccgcgttcttgatgcttatcgtgtcctgaatgatcgaccccatcgatcatatgtatatctgaaattaattaatttctgcactgcacagggtggtacgacgtaattaatctaattaattaattaattaacctgttatttccgctcttgcagttgcttgtggatgtggtagtcaaattcggagctcctgtaatccgaatgcatgtgtttatcattatatgctagagatcccagaagattgccaccattaacatgcatgttttaaaaattc

SEQ ID NO: 7612 - DNA, 1602 bp, Oryza sativa
  ref <308>: DATABASE ACCESSION NUMBER: AK064739
  ref <309>: DATABASE ENTRY DATE: 2001-12-06
attcctctctctctcactctcggagcacacgagcacgagccgcggctggtgtgagatggtgagtctaactagggtttgatcgatcccatcccttccccccatccacctatcgccgccgcctccgacctcgccatgccccgctccgtcgtcgtctagggttagctcgatcgctagctccaccacaaccagctacaaccgcgcgctcccgacgacggaacatgatccgcctccgcgccgccgccaaggctgccgcgtcgctggcccgcgggcgcaccaccatcgccaccgatgctggctggtcgtcacacctccgtgctgtctgtcaccaaccgctctgagctgctgcgccaggggcagggggcgacgacacgggaggccgcgtcgctcgccgccatccaggacgacaccagagcggtggccgcggtgaacgccgtgctcttctccaaggacgtcgccgtcgccaaggagacgggctggcgccgggacgccaagatcaccgtccgcgggcgcggccacggcaacccaccgcgcgctctcgtcgtccgtccgctcccgttgctgcccccttctccgttcctccgcaacaggggcatctcgtcactcccctccaaccagaaagaccaaggtctcaaagagctgctcgattctcatggaggtggaccaggcgacagcagcgccatgaacggcatcgcctacaagcacatcaatgacgacgccgacaaagccaagatggctgacggcgccggcctccaggacgcgaccgatgtcgacaagttcggtaccggagcgggaggtgcgggcagccaggatgtcgagggcgcgggcgaccaggacaaggccaagaatgtcgccgcggtggtcgtcgatggcacgagcgacgtcgacaaggccaaggatgttgccggggtggtcgttgagggcgacgccgacaaggccgacgaccgcgcgcccggtgctcgtcgccgtcggaggacgaaacctcgcgatgaacgtcttctccaaaggattcttctctacgccaggaacatctctggcaaactcgacgacttgtgttctcgtccgaggaccggagctgcagacatggataaaatcaaggtcatgatgaatcaacttcgttggagtataccttttacaactggactaggcctctttgttggagttgttgtgatagttgtactggcgatcaagttcggaattcccttcgtgattgacaagttcgcgcaagagttgggtatggtgcttcaatcaattgatgcagaagacgtgaaaatggttatagacacctttaccaacctcattctggagaacgtctgggcttttctggttgggaagatcccatactttggacgctccaagtgatctatatgagaggatgtgaggcttatttctttctctaagacttgattagaagaacagtggtttaatttatgcctgagtgcgtgcatgcatgctctgtttgatgtggatgtataatctggattcaaagattagctgcgggcgttggatgtatgctagtctgggtttagttgtctgtttaatctcgggctgaagcaatttgcagctcattctagctccaatataacacctgccaattttgttgtt

SEQ ID NO: 7613 - DNA, 751 bp, Oryza sativa
  ref <308>: DATABASE ACCESSION NUMBER: AK064740
  ref <309>: DATABASE ENTRY DATE: 2001-12-06
gtctccgcctcgcgggagaccacacattaattcctcgcgccccatccatccattcccctgccatgggctgctcgacctccaagctcgagccgaaggaccagctggacgcctcggcgccgtcccaccaccgccgccgcggctttgccagcgacctctttggccgcgccaccaggaagaaccaccacaatggtggcaagagcgggtgcgaaagtggcgacgccgccgtccccatggccggccggcagcatgaggaggagcagccgcggcaagggaagaagggcggccgtggcaagcgcgaggtgcaagcggggtcgccaagcttccggtactactgtgagaatgccgccgccgccgccttcggcgaacatcgaggtcaagcaccaacaacgcaaatatgatctgtggatgaactcctggaacttttatcaatgcagtgcgggcctacaaaagaacaaattatacccctaaggaatgagagatgaatcagatgggttattaatcaggagctgcaagcaaattaggcgttaaatccacgacctttttcgcctgttcgttgcttttcctcggctgttatatctccagggatcaaagacgaagaaaaaaaataacttctgatgatatataagtcaagcagattcccaatcatggagagcataacgcactagtccctggagaattcatcgtagcagttgtaccaaatgcagtttgtacatgtaataccaacacgatgaatacaaattaattccagatc

SEQ ID NO: 7614 - DNA, 1119 bp, Oryza sativa
  ref <308>: DATABASE ACCESSION NUMBER: AK064741
  ref <309>: DATABASE ENTRY DATE: 2001-12-06
atcaaatatccaacgctccatttcgcttccccacccaaattcccaatcccaccccgccgccgccgccgccgagcgataccggggccgccgctccccatggacgccggcgacgcgagccgcttgggggagtcgctggacgccgtctccgccgccttccagtcccgcgtcatggagctccaggagctcgtcctcgcccgcaacatgtacccggctacggcgataccggacctcgccgccgtcgacgtgtcgctcacggccatggaagcgcagttgcaggcggtccgccgccgcctccaggaggagcgcgaagccttccccaaggccaagaaactagtacaacagtccttgaagcaacagcggaggctgcagcttatgcttgcaaacatgccaactgggatgcgcgaggatgtctttgctacacctctggaacataattcatcaatgatgtttcctgagtcgctcaatttcagctcggctgttccagaagtcagagaccatgatttaaagattaaggaggagccaactgcaccacccaagaagggaagaggacctgcacctcgttggtacatatccactgaggagcttgattcgttgtcatcatacatgagagggaggctcactctggagaaggttaacattgccatcaatgaagtggcttcatatgcggacggcaatgctcatcttgttgcatgtccaaagaaaaagttatcagaagacacatgggagaaggcactggaattaagggacattgcagcaagagagtcagttaaggggaggcatttcttcttggaaactgatataaagggaccgggcttaaaacttgataccacagggaaagcaatccttactgtccttcgtcatctcggccgcttccaggagacccggattgggcatcatcgcgttttcatactttcaaaacaacagtgaatgaagggtctcctccaagctttatttaggtgctggagaatataaagtttaatttggtgttaggctggagatagatacgcatgcattgagcttgtttactaattgctatgctgtagtttgttgtatacaggtcagggcaagtactataatgctctatatgctacccctaaaattgccatattggattgagtg

SEQ ID NO: 7615 - DNA, 1799 bp, Oryza sativa
  ref <308>: DATABASE ACCESSION NUMBER: AK064742
  ref <309>: DATABASE ENTRY DATE: 2001-12-06
aaacatcacgctgcgatgtctcccccctccatgacctcctcctctctttagccattggcttcggccaaggctgatgagacattcctaaccactatgggcaccctcccaccattcccgcccctcctcctcctcgtcgccgtcatcttctccttcctctcctcgtcgtgctttgctgtgaccagccatgaggcggcggccatcgcgcggcgccagctgctcaacttcgagaagcacggcgaccacgtccacatcgatatcgacatcgagatcaaggtgagcaacccgcggctggcggcggcgcacagggcgctgcacgcgctgaagcgggcgctctactccgaccccggcaacttcaccggcgactgggccggccccgacgtgtgcgcctacaacggcgtgctctgcgcgccgtcgccggacaacgcgtcggcgagcgccgtcgcgtcgctggacatgaacgccgccgacgtcgcgggctacctgcccagggagatcggcctcctgtccgacctcgccgtgctccacctcaactccaaccgcttctgcggcgtcatcccggaggaggtcgccaacatgacgcggctctacgagctcgacgtcagcaacaaccgcctcgtcggcgcgttccccggcgcggtgctccgcgtccccgagctcagctacctcgacatccggttcaacgacttcgacggccccattccgccggagctcttcctccgcccctacgacgccatcttcctcaacaacaaccgcttcacctccggcatcccggacaccatcggcaggtccaccgcgtcggtcatcgtcctcgccaacaacgacctcggcggctgcatcccgcccaccatcggccaggccgccgccacgctcgaccagttcgtcttcctcaacaacagcctcaccggctgcctgcccctcgagtcgggcctcctcgccaacgccacggtgttcgacgtcagccacaacctgctgaccggcgccatccccgcgacgatgggtggcctggccaaggtcgagcagcttgacctgtcgcacaacaccttcaccggcgttgtgccgggcgacgtctgcgggctgccggcgttgacgaacctgtcggtctcgtacaacttcatcgccggggaagacgcccagtgcagcagcgcgctgctggatgcgaagctcgacaagtcgttggaggacgaggctaactgcatgggcaacgtgaggccgatgcagaggagtgccggtgaatgtgccccggtcgtgagccatccggtggattgcagcaagaccaagccctgtggatggccggcgccggcgtagaagccagcgccggagagctcaaagcattcaccgccgccgccgccgccaccagcaccggtacaatccccgccaccaccggcaccggtggtatccccgccatcgccagtgttctctccaccgcctgccttctcgccgccgccgccgcccaagacatctcctccaccgcctgtctcctcgccgccgccaccgccaccgccgactatgtccccgccgccgccaattcaagagcccgtcatcctcccgccaatattgtcagcaaaataccaatcgccaccgccaccgtttttcgaaggatactgataatctagtttgaggccatgagtgatgtgttgttgtccgacactagtacagaaaacgtcgaatgtaatataagctcatgctttaaccacattgagggtgcccatttacctttccatttttaatgctgtttttgacctggtttcaggattaactgctggctggtctgaagaaataaagaggggtggaattaaagt

SEQ ID NO: 7616 - DNA, 2017 bp, Oryza sativa
  ref <308>: DATABASE ACCESSION NUMBER: AK064743
  ref <309>: DATABASE ENTRY DATE: 2001-12-06
atcccacaacgtccgtgaatcgccctctcctcgaaactgccgctcgaattgcttcgtcgtcctcgcctccggtctccgcgcgcgacgcgccgcctcttcccgtcggctcgtcggcgccgcggccgcacccgaggcctagagagcgcgcggggtcgcggcctcgacggggttttcctcccccatggaggcggtcgccggcggcggaggcggaggcggaggggagtcggtcggggagctgctgctccgcgcggcggcgatggtgccagcggagcactacgcgctcgcggcgctcgccgtggtgtcggtcctcgcgtacgggttcctggagctgcacttcctcggggacctcctccgcgggttccgctgcggccgcgtcgagctcaccttccacccggcctccgagatctaccaccgcgtagcctccaagtgccgctccctccacggcaggtatctggcgacgccttggctcgccagcccacatttgcagacactgttcctgggtatctccgggaggccaccttcgttcacatacaaaaggcaattgtacacagtacatgatggtgggaccattgctttggactggctgcttgccactgattcaaagggttcagatgggatcctttctgaggatgcttcagcaccacttgtagttattgtacctggattaactagtgattctgctgctgcttatgtaaaacacatggcttattccatggcaacgaaggggtgtaacactgttgtaagcaatcacaggggtcttggtggtgtgtccattacttcagattgcctctacaatgctggatggacagaagatctccgagaagtcattaattatctccatcacaaatatccaaaggctccaatgctctgtgttggtacaagcataggggccaacattgtggtcaaatatcttggagaagaaggtgagaatactcctgtggctggtgccgcatctatttgttctccctgggatctggtggtgggcgaccgatttatttcccgcaagcttgtgcagcggttttacgacaaagcccttgcctttggtcttaagggatatgcaaagctgcatgaacctgtgttggttcgaattgcaaattgggaaggtattaaaaagtcacgctctatccgggaatttgaccaccatgccacctgcatggttgcaaaatatgagacagtagatacctactaccgccgttgcagcagtgccagttatgttggtaatgtgtcagttcccttgctatgtgtcaatgctttggatgaccccctctgcacaagggaggccatcccttgggatgagtgcagggccaacaagaacattgttttggctactactccgaatggcggtcatcttgcattctttcaaggactaactgctggaagactatggtgggtcggagctgtttctgagttcctcttcgctctgcttgacagtaaatacatgcatcagcaaaaggcacaagaccatattttgcgttcttccttggagtcgtccatcgataagagcccatatgtcaacgtcatggaagatggaatgatagctccggtgacagatgatggcccttgtgatgatatcaccccttctcaccaggttaatgacataaaacaagataatggggattttacgcaacagaatgaacacaccagggaagcagatgataaaaatatcacagaagtaaatgcaatgccttcccaaagccctgaacagtctgcaggacagcaagtagaggaacactacgttggtaagtttcatgaggccattgctccagttaagagatccataaaccaactcactcggtaccagggtaagtcagtctggttgcttgcttatattgcttttgtaacatcatggccactccttggttccttagcttttatcgcatttaggaaaaagttcaggaataatttgctagctaagtggctgagaagataaataagttgtgttccaacagtttttttttttcatttgcatcatgtaaaactcagaattgtttaaaggcttgaaaagccattcgatctc

SEQ ID NO: 7617 - DNA, 1031 bp, Oryza sativa
  ref <308>: DATABASE ACCESSION NUMBER: AK064744
  ref <309>: DATABASE ENTRY DATE: 2001-12-06
aaaaatcctgtgggggaacctcgccggcgatccctccaaagcccagaagcgacgccgccgccgccgccgccagccgccacgttatccatgaggcctctcctcgcccgcctcttcgccccgacttacattgccatgggtttctcctcctccgcgtcgccgccgtcccggcggcttgcccacctcacacgccacctcctcctcagctccggcgagctctcctcctcggtgggcgcccccgccgccgccgcccggccggcctacctcgccgcccccaagggctacgccgccgtgctggtctgcctcttcgaggacccccacggcggcgacccccgcgtcatcctcaccaagcgcgccgcctccctctcctcccactccggggaggtgtcgctgccgggagggaaggtggaggagggggatgcggatgcgacggcgacggctctgcgggaggcgaaggaggagattgggttggaccctgcgcttgtttctattgtcacagttcttgagcccttcttgtccaagaacggactccatgtaactcctgtaatcggcattctttcggataaagctttattcaagcctgtcttgaatgaatctgaagtggcagacatctttgatgcacctctagagatgttcctgaaggatgataaccggaaaacacaagaatcgaattggatgggcatgaatattccagtccagtcttttgagtaccagtcagaggacaaaacgtttgtgatttggggcttaacggcacacattctgactcgtgctgcagcagtcgttttaccgagagaaccatcatttgttgaatttcgaccaagatatgtgaactcaccctctggagatacgaatgaaacaaaacgctgatgcaataccataatcgtcaatatgtaattctagcatttatcccctccattcagaggcagctgcttgtgcctgtctatagaaaatcagcttactgtactttttgtatgtacacgatagtccatagaatgttgcatcatcagcatgttggaaaatttgtcaatttgatc

SEQ ID NO: 7618 - DNA, 852 bp, Oryza sativa
  ref <308>: DATABASE ACCESSION NUMBER: AK064745
  ref <309>: DATABASE ENTRY DATE: 2001-12-06
atctcgctgtctgcgagtgacgacatggccgctctcgccgtgctgctgctggtggttgcggcggtggagggcggcgcggcgtggtcgttctggccgccggcggccggcgacgagccgtactgcctcagctggcgggtgatggtggaggccaacaacgccaagaactggcccaccgtgccgccgccgtgcgtcggctacgtctggagatacatggcgtgggggcagtacgcccgcgacgtggccggcgtcgccgaccagatcgccgcctacgccgcccagctcgccgccggcgacgacggcctcgacgcctgggtgttcgacgtcgacgacacgtgcctgtccaacctcttctactaccaggcaaagcaattcggggcgtatgatccggtggcgttcaagaagtgggcgagcaaggcgatctgcccgggggtacctggcatggcgcagctgttccagatgctcagaggcagaggattcagagtcttcatcctctccggccgagaccagcagactctcgcctccagcaccgccgccaacctcgccgcggccggcttcgccggctacgaccggctcatcatgagaagcgcggagtaccggggaatgagcgcggtggtgttcaagtcggcgatgagaatgcagctgatggaggaggggtacaggatacgcggcaatgtgggtgaccagtggagcgatctgcagggtgacttcgtcggcgaccgtgtcttcaaagtgcccaacccaatgtactttgttccatgataatatgatactctaatcgcccatcaaacatgtgttcgcacatacgcacttcgttacacggagtatatatgtaactatttcttttttagacag

SEQ ID NO: 7619 - DNA, 736 bp, Oryza sativa
  ref <308>: DATABASE ACCESSION NUMBER: AK064746
  ref <309>: DATABASE ENTRY DATE: 2001-12-06
ctctcctcccctcctgagtcccgacggaggcagtggcggcaacggcgcgcgggatctggtgggcggcggccatccccgcacggatccggtgaccggccgccctctcccctgagggatcccactcccctcccctctccttccttccatccccaaatccggcgaaggggaagggcatcggcggcgctacggctagaggggagcacggaagctggcgggagcgcggatccggctccgctctcctccccttccttccctcctcagatccggcggaggggaggggcgtcggcagcggtgcggccggaggggagcacggatgccggcggcaggcgccacggagaccggcgggagggcggacggctgcgcggaggctgccatcgacgacgacgagggtgggagcagggtcctcagccgacgaggacgatgaggcggtgccaccggattcatttttttgaaaaatttttggatttttgttttttcgtgcgcccgacataagcacccacacgcgaaaatcagattttcgcttgcgggtgcgccacccgcatgcaaaaatcatgattttcgcagatccttgggtgcgtgagggccaccctcccgcacgcgaaaatcacatttgaccgcacggaaaaaccgctcttctagtactgtttcgacattagacaacatgaaggtctttattgaggatggtacagttacaaaaacaaaagaaagataataaagtgtttaattattttgttct

SEQ ID NO: 7620 - DNA, 1655 bp, Oryza sativa
  ref <308>: DATABASE ACCESSION NUMBER: AK064747
  ref <309>: DATABASE ENTRY DATE: 2001-12-06
attcgccattattttttttttcctcttcctctgtttcccaatgatgatgatgaactacagggcgttgtggttgtggctctccgtcgcaatcgtcttctccgtgcaatcatgccgggctctcgccgccggcgagggctccaaggaagcggacaagatcgccgcgctgccgggccagccaccggacgtgaagctacagcaatattcaggctacatcaacgtcaatgagacttccgggaagtcgctcttctactactttgtggaagcctccgttgatgctgcccacaaaccgcttcttttgtggctcaacggagggcctggctgctcatccatgggcatcggagcgttccaggagatcgggcccttccgcgtggacacggacggcaagacgctctgccggaacccgcactcctggattactgcggcgaacctgctgttcctggagagccccgtgggcgtgggcttctcgtacgcggcggtgaagccgcaggaggtgtacagcaccataggggacaacatgacggcgcacgactcgcacaccttcctgctccggtggctcgaccggttcccggaatacaagacccgggacctcttcatcgtcggcgagagctacgccggccactacgtcccggagctcgccgtcaccatcctcgacaacaacttgctcccgcacgcgacccccatcaagctcaaaggaatcgccatcgggaacggcatactggagttcgcggctgagcaaacgcagctgtacgagtacctgtggcagcacgcgttcatatcggactcggcgcacgcgctcatcacgcagagctgcaagtaccccgacgaccacccgtcggcgctctgcgagtcggcgaggaaagcggcgtatagccggattggcaacatcgacatctacaacatatactcgtccacctgccacgaacagaaagtcaggccctcagcctccaagtgcatggatttggctgatccgtgctcccaatacttcgtggaggcgtacatgaaccagccccaggtacagaagacgatccatgcgaacacggagttgaagtatccctggactagatgcagggtttacaacctagaccacttcggcgactcgccaaagtcaatgctgccatacatcaaggcagtgataaccggccgcatccgcatctggatattcagcggcgacttggatgcgatggtgccggtgacggcgacgaggcagtcgatggagaggctccagctgcgggtggcggcggactggcggccgtggtcggcggacggcaaggacgttgccgggtatgtgatcgcgtacgacgggctggtgttcgcgacggtgcgcgggtccgggcacatggccccgatcgaccagccggagcgagcgctggtgctcgtctcctccttcatccgggggcagccgctcccaccgccgcaacctgaccaacacgacgcctagcgcgcgtgtgccccaccgctgcaccagttgccatacgtagctagggagattggcatggcatggccgagctgaggagctcaacgtgtcgtcgtgcactcgtgcgtcgtcggatcggaagtgaattctcgctgtactcctggtgtctttcgagactcgatcgcaactgtgtttatgtgtgtagggtgacgcatatttcagtcaatccgtgacaacctcc

SEQ ID NO: 7621 - DNA, 1174 bp, Oryza sativa
  ref <308>: DATABASE ACCESSION NUMBER: AK064748
  ref <309>: DATABASE ENTRY DATE: 2001-12-06
gaccagaagtggaatattgaacggtggaacgcgtacttacccacaagttaggtgcatgccatggcaccattcatggcatgcgcctcgccaccggtactcgcgctggccctgctcgcgtcgtgcggtgcctttctcgccacctccatgctcccggcgcgtgcgacggcgagcagctgcttggacgtcggcgacatggtgatgatggacaggttccgcgcttggcagggagctcacaaccggtcgtacccgagcgcagaagaggcgctgcagcggttcgatgtgtaccgccgcaacgcggagttcatcgacgccgtcaacctgcgcggcgacctcacttaccagctcgccgagaacgagttcgcagacctcaccgaggaggagttcctagccacgtacaccgggtactacatcggcgatggccccgtggacgacttcgttttcacgacgggtgccggagacgtcgacgccagcttctcctaccgcgtggacgttccggccagtgtcgactggagggcccaaggcgccgttgtgcctcccaagtcccaaacttcaacatgcagcactacaccacgacctaaatccgctgtctcagaatctgtcggcaaagcacccatgtgccagcaaattatctgtcagaaaaggttttcccgacagataagtttcgagcacgacgacccaacatattcaaaataagtgatttcagatgctctgtataatgcagctctggcttcctcgaggccacaacaacagcctactgttgagcaatagcaattctaccaaaactatgggtacagcagataaggtataagttttcaagaactcacctgcgccggccacgactctcctcttgaaagcggtcaccgctggcctcccggtgccacatctccgggagcggcacgtcgtcggggtcgcttacatactcctcctcctccttgtcatcatccccggtccccgccgtctccacctcctccggcgtcagcggcaccaccgggggcttgccggcggcgtggaaggaaggccagcaagattaaaataagattaagtcactagaaaatcctttgagatgtactactactgcgaaaccaaaaatcggagctgaaaattaagatcaaaccaataagcactctcccatgtcagtcataaggcttcacaagtgaaatatgagccttcaagc

SEQ ID NO: 7622 - DNA, 725 bp, Oryza sativa
  ref <308>: DATABASE ACCESSION NUMBER: AK064749
  ref <309>: DATABASE ENTRY DATE: 2001-12-06
ctctctccctccgggagcaacatccccctcctcctagattgaccacgtcagcgctgccccttgtccgccacgccgtcgaccgctgccgaggccgccgccgtccactgccttgtcgttatccaccgtcgctcgcttgcatcctctgcccgtgctcgccatcgtcgccgggtcaagcgcctccatcgctgctcactcgcatcctccgccgtccgctgcctcgtcgttatccaccgccgcgggtcaaccgccggccgaccagtgcaacgagcggagcggaggcggcggcgcaacggtgagggagggagggcgcgacggcgagggagtagcaagggaaggagggaggctatatggcggatggctgtcgaggaagacgaggctagcaaggaacggatctgccattgtcgtcgcctcgcgcgcatggattcgacgtcgccatagtcatcgctcccaccggccttcgctgcctgtgccgctcccattgtcctccgccacctgtgtagctcccgtcgtcctccgtcgctcgcgctactcctgccggcgccacctccatagccgtgccgcactgcagagaagagaggaggagagaggtgggtgaagaacaacacagagactgacatatgggacccactattaaattggagagtgtaatggacatgttgttggagtaaaacgtacttggctctctaaatttttggtaagttgccaaataggacatttggagagtc

SEQ ID NO: 7623 - DNA, 927 bp, Oryza sativa
  ref <308>: DATABASE ACCESSION NUMBER: AK064750
  ref <309>: DATABASE ENTRY DATE: 2001-12-06
attcctcctctgtttcttccttccaccacgcgatcagcgcgcgcgcgagagagagagagagagagggagaaggcgcgatcgcaatggggaggatccagtacgcggcggtggcgaggggggcggtggtgatggcggagcacggcgacgcggcgttccccaacgccggggccgtcgcgcggcagatcctcgaccgcctctccgccggcgatggcggcggcggcggcgattgcaacatctcctacacgcaggatctccacgtgttccacgtcaagcgcaccgacggcgtcaccgcgctctgcatggccgacgacgccgccgggcgacggattcccttcgcgtttcttgaggatatccacggaaggtttgtcaagacgtatggtcgtgctgctctcactgctcttgcttatgcgatgaatgatgagttctcgagggttttgggccaacaaatggactactactcaaacgatcccaacgcagatagaatatctcggatgagaggtgaaatggatcaggtccggaatgttatgatcgacaacattgacaaagtactcgagagaggtgatcgtctggagctgttggtcgacaagactgcaactatgcaagggaacacgatgcgatttaaacgacaagctcgccgcttcagaaacaccgtctggtggagaaatgtcaagctcacagccgcatcggtattcatccttcttgtaataatatacatagtgcttgtatatatgtgccacggcttcaccttaccgtcttgtatttagtacacctctatacgaagcttcattccgatcctaaaattgtcccaggttccttgtaagagaagctccgctgttgcaatttttcttccaacataaaagaggcaatgttgcattgcttgatcttgtaattttttgcacccactcctggaagctcaccaatgttgcc

SEQ ID NO: 7624 - DNA, 1417 bp, Oryza sativa
  ref <308>: DATABASE ACCESSION NUMBER: AK064751
  ref <309>: DATABASE ENTRY DATE: 2001-12-06
aagcatctcacactgcgcccgccctgccacggcggcggcgatggcgatggcgatggcggtcacccagactggattctcgtcgacgtccaggcctacatcgccgaccgccggaacgccaccaccgccaccgccatgctcagcaacggcggccaccaaatccaggtcaccatctgcgtcgcgccgccgccgctcgtctcctacatctgcgcctggtcccccaccacccaccacgccgagctcttcgacacggagcccaccgtcgtggccgtcgacgccgacctcctcctcctccgcatccacgtctcgctcaaccatgtccacgacctcgtctaccaggcatccatgttgccatcgctgacgctcatgcccagccaagatccttacctgcacgagcccaactgcatcgcgctcatcccccgctcctcccatggcttctacatctccacgctcgacacggatctccgcagtgggattgggcgatacaacctctgcctcttcgactccaccaactccaaatggagccatgaatcgctctctctggatcagctgcgcaatccgcctgacaaaaacgaggtgctccatatcacggagaaggtgatcaccttcatcaacgatccacatctggttgccttcgttgatctctggcggggcatcatcatctgtgacatacttgacaccaaaactcaaactgcaagctatgtgccgatgctcaaggagatcatcaacctccgcagaacccgagcatcgtcgatcaccagggacattgctgtcgtcaatggccgcctcaccgtcgtcaggctcaccactgtctttgatccagatatcaatggttgggactgggatctgtccacatggagcagggcagtggattgtttggagcaggaggattggcgcgaggactctctggtcgaggcctctgacatcttaatcgaccacaacatctgcaacgttgagctcttgcctaagatacaggggcaacctaccatggctaaactccacgttgctcttcccactctcagcttgactgatgctcaggttgtttatgtcatgggcaaggttaacgaatccgatgaaaaggctgtgctgctgtctattgacatggccaacagaaggcttgatgcagtatcagtgtatgacgctgcaagaatcctccactactttgatgtctgctacacgcagtctaccatcttccgatattccgccccttcttcaggtttaaatggaaacctgaaacgaccagggaagttccctatgccatatcctcgcaagcagcaggctgtaaatgagccatttcttccggatgctgggagaggtttagaaactgaagatagggatactatggactgggagtagttatgtaatttggagctgaaacctgaatagacataaattgatcacagctgtttattttgcttct

SEQ ID NO: 7625 - DNA, 1847 bp, Oryza sativa
  ref <308>: DATABASE ACCESSION NUMBER: AK064752
  ref <309>: DATABASE ENTRY DATE: 2001-12-06
atctatcgtcgggagctgcgaccggaggcgcgccacgtgtccctctcccctccccgccgatgagctgccgcgcggcgccgtgggggcgcccgtcgctccccggcggccggccctcccccggctcggcgcggcaacgcggtccattcggaggtttgaatgtatggaggaattcaatcctcaacaattcatggaggcttggtggtacgccaatgaagtttggactaccatctagattgttcagactcatggcttcaagtagctcaggagatggtggtttttcacggccttcatcaactgatgaagggccaatgccaatatactcttggccggataagcagcgtccacgagtgtgcatcttgggtggtggatttggtggcctgtacactgctcttagattagaatctcttgtatggcccaatgataagaagcctcaggtcatgctggttgatcaatctgacagatttgtatttaagcccatgttgtatgagctcttgtcaggagaagtggatgtttgggagatagctccatcatttacagagttactgaagaacactagtgttcaattcgtgaaggatagtgtaaagcttctgcgcccttctgatcactttagaagagattctggaggatcatgcactggtggagttgttcatctggaaagtggcaccgttattgaatatgattggctcgttctagctttaggggctgaagctaaaattgatgttgtcccaggatctgctgaatatgcaattcctttcacgactttggatgatgctttgaatgttgaaagccagctgaaaatgttggaaaggagaaggtttggtaaaaattcccccgatattcaggtggccattgtgggattgggttactctggtgtagagttagctgctactatctctgagagactaaagaacaaagggattgttcaagccatcaatgttcagacaactatctgtcccagtgcaccacctggaaaccgcgacgctgctctgaaggttcttgaatctcgaaatattcaacttttcttgggatattttgtgaactgcatcagagaagcttctgcatctgaggattcaagtagcatggttacagatgcaaaagaagttaatggtgaccataagaaactactattggaacttcaacctgctcaaaggggcatccagagccaggttctggaggctgatatggtattatggacagtgggttcaacctctcagattcctcggttacagcctccagatgctccatatgttattcctttaaatggtcggggccaggtagagactgaggaaacccttcaggtaaaaggccatcctcgaacttttgcaatcggtgattcagcagctctaagagacccatcaggcaaacttctcccagccactgcacaggttgcttttcaacaagcagattttgctggatggaatctctgggcagcaatcaatgaccgacctcttctgccattcaggtttcaaaatcttggtgagatgatgacacttggtagaagtgatgctgcgataacagcaagctttattgagggcctgaccttggaaggacctttagggcatgctgctaggaagattgtatactgccttaggatgcccacagatgaacatcgagtgaaggttggaatcagttggttcacaaagactgcagttgattcacttgcctccctgcaaaacgcagtaagtagcatgctaacaagcccatgacaataacattgtctatgttacactatgtatggaaactgggaaagtatcaacctctgagtcaaatgatctggagaacattttgagatcaatactgtgtatgaatttgaaaatcatatcaggtagcgggttttttttttccat

SEQ ID NO: 7626 - DNA, 1796 bp, Oryza sativa
  ref <308>: DATABASE ACCESSION NUMBER: AK064753
  ref <309>: DATABASE ENTRY DATE: 2001-12-06
ttgtatcgtatcagtgtactgcttgttctacctgttaatctgttacaaacaacaaaggtagacttattgcttactttgcaagatcagcaccctcaggtgtgtggaatccgttaataaggtaagcagttgcagtgccacttgggtaggtcagtttatagtccacagtcatcacctgataagagagttacagttgagtagcaagtagattttgacatgctgtgtgttaacaatgggagtagagaaaggaagtgaaatagatacctttcgcatgggcaccagtgcaaatagcccaacaaaactgacgaggaacatgaacccgatgatccatccaaggtgaggattcttgatattcatcggatcattagcctctgttgcttgcttagctatggtctcgctcataccaaacaagtaactgccaaacccacctgaacaattggaacagattataaatcaagaaaactgctagacaattctattgatttttagtatcaaacattcagtaaaagcctgaaaggaataaccaaaatttgcatagacagtccttcaattcagtggaaaatcttaatctattcgggactcgtctgttctccatgctgcgcagtaccctgagttgcgtctaaagatctaataaaatcgatcggcgaccctccgctgttccttcagaaaaataatctaagctataactcttgatctatcatcacagagacctgaacacaagcacatattgctaatatctttctttagcagatctatttttctatataaaagaatgtcccaaaatagatccctgaaaagtgaaaagccaagatcttcccaaacaaccgaatgcacaaaaaccacttggtccggtgcaacggaagtggagcaggaataagagattgagttcgatcttttaccgctgaaggcgacgccgtaggcggagacgacgcaggtctggatgacggtgttctcctggcgggtgaagggctgcttgaggaagcccaccctctcgatggccgccgtccagaggcggacgaggaagaagccgaggaggctggcggagacgttgagcgaggggatgacgccggtggtgagggacagcttcatgacgatgatgttgaacatgatggagaggaggaacccgaccacgaaggcgcgcaccgtcagctgctccctccacgacggcacgggcttgtccgcgaacgcctgctccacggacggcgccaccgcctccgcctcctcctcctcctcccccgcattgccgcgggcggcggcggtggtgttgcggcggcggaggaggccgcctgtctccgccgcatcgtaggcggccgagctactgttgttggcggcggccgacgccatgatcgatctcttctagctagtccctcgtcgtctcagggttttgctacgagaggacacacgtggtggtgtgtgcgggattatatggagaggccgtttggatggaggtcgacgagatacgatctgccagctgcgtctagccaggtcaggtgctgcgccgtttggattttctgtctatctcctgttgaatcgagtggcccagattcctattacagcacgtttggctcccggttgcgatcacggtttacagttcctgtggaaaccggacttttcggacggggtctaaagcacaaaccgctcgatttttcggttaagttcaaaaattatttaaaatttttaacaagatttatctagatttcattggtttttgtcagtttatcgacgggttctgtaaaatccaatgaaactgcttgtgagaggttttgatcccatatcgaaattgtgaaccaggttgcgat

SEQ ID NO: 7627 - DNA, 976 bp, Oryza sativa
  ref <308>: DATABASE ACCESSION NUMBER: AK064754
  ref <309>: DATABASE ENTRY DATE: 2001-12-06
atcacaattaaagtcacagcatagtaaccaaccgaaccaatcatcagccatggcgcgaaggctcttgctgctggccgtcgtgctggcgatggtggcggccgtgtcggcgagcacggcggcggcgcagagctgcgggtgcgcgtcggaccagtgctgcagcaagtgggggttctgcggcaccggcagcgactactgcggcacggggtgccaggcgggcccctgcgacgtgccggccaccaacgacgtgtccgtggcgagcatcgtcacgccggagttcttcgcggcgctcgtcgcccaggccgacgacggctgcgccgccaagggcttctacacccgcgacgccttcctcaccgccgccggtggctacccttccttcggccgcaccggctccgtcgacgactccaagcgcgagatcgccgccttcttcgcccacgccaaccacgagaccataaagttctgctacatcgaggagatcgacggaccgagcaagaaccactgcgacgagacgagcacgcagtggccgtgcatggcggggaaggggtactacgggcgcgggccgctgcagatctcgtggaacttcaactacgggccggcggggcagagcatcgggttcgacgggctgggcgacccggacgcggtggcgaggagccccgtgctggcgttccagacggcgctctggtactggaccaacaacgtgcacgacgccttcgtctccggccaggggttcggcgccaccatccgcgccatcaacggcgcgctcgagtgcgacggcaagaaccccaccgccgtcagcaaccgcgtcgcctactaccagcagttctgccagcagttcggcgtcgaccccggcagcaacctcacctgctaattacagggattgacatatgctatgtatgtgattttgtacgaataataattgtcataagtaatcaaataaaatcgtattgcattacgtcaacgttgtttgcggcataggagt

SEQ ID NO: 7628 - DNA, 1455 bp, Oryza sativa
  ref <308>: DATABASE ACCESSION NUMBER: AK064755
  ref <309>: DATABASE ENTRY DATE: 2001-12-06
agagacctatcaagtatgaagtatcaagcaataggtaagtcgcatattcccacagagttttagctcaagacgatgacgttcgtggtaaccaagtcgtcgccgtcggtgctcgtccgcccgtcggagccgacgccggcggcgaccatccggccaacctccactgacatgacacgcctgggcatgtcgttcacgtcgttccacgtgttcgagcgcggcgtcgacgagccggcggagaccatcaggcgcgcgctgtcgcgtgccctggtccactactaccccttcgccggccgcctcgccggcagcggcgacgacgtcgtgttctcgtgcaccggcgagggcgtggtgttcgtccgcgcgacggcgaactgcaccctggaggacgtgaacttcctcggagcaccggtggtcatgtcgctcgccgacctcgccgtccggtacggcgggccatgccgggcggcgtccgacccgctgatgatgatgcaggtgacggagttcgcgtgcggcgggttcgtcgtcgcggcgacgtggaaccacggcgtcgccgacgcgtgcgggttggcgcagtttctacgcgccgtcggcgagctcgcccgcggtctccactcgccgtccgtcgtgccggtcaggtacgacgagtcgctgcctgacatcccgcagcttgccaccatcctcctcaagcggctagccgccggcgtaaaatttgagcacgtcgacttcgcctactgcgacgtcatcatcccgtggagcttcgtcaaccgcgtcaaggccgagttcgggagcaggcacgccggcgaccggccttgctccgtgttcgaggcggtcaccgcggcgatgtggcagtgccggacccgcgccatcaatggccacggcggcggcgccctcgcgccgctcgtgttcgcggcgaacgtgcggaagcacgtcggagccaaggacgggtactacggcaactgcatcatgtcgcaggtggtggtcgccacggccgacgcggtggcgaacggcgacgtcgtcgacttggtgaagctgatcaaggacgccaaggagcggatcccggtgctcctcagcaccaagacgcttgggctcgacgacagcggcggcggcgagctcgtcgccgcgctgtgcgggtacggcgcgctgtacgcgtcgagctgggcggggctcgggctcgacggcgtcgacttcggcggcgggaggccggcgcgggtgatcccctactcggaggtgaagatgctgccgtccatctccccgggcgcgccgtgctcgatgatggacggccatggcgtcaacgtggtggcgtcgtgcgtaacagacgaacacctcgaggggttccgggcacaattggcgaggctctagtgatctgccctatttcaaagagtatcctaaagcgatttcaaattttcaaatctttacttttatgaattaagttttgcagatactttttatgtctttgctccagtg

SEQ ID NO: 7629 - DNA, 673 bp, Oryza sativa
  ref <308>: DATABASE ACCESSION NUMBER: AK064756
  ref <309>: DATABASE ENTRY DATE: 2001-12-06
atctcaaatccacaccagttaccctcaatagaaacggtgctaatggcccagaacaagaccatggctctgctccttgccacccttgtggcggtggttgcggtagtacgagccaccgaagagaaggatatagaagaagctgtgtgctcagagcattgcaacgacgagggaaaagaaggcaccatcgaccacaagcactgtgtagacatctgcatcctcacgaacagggaactttttggggccttggagagaggaatgaagccctcgatggagcaattcagcgctttgtgcaatgaggggtgtagcaaagaatttaaggaggatcctgccaccaacaagaagtgcgtagacagttgcatcgtcgatgctaaggaactcaatggacacttagcgaaaggtggcgcttctagtgttcccgcacgtgcatgattgtgtcgagctgcacatctgttccttcatccatgatcgagggacgatacccattaatggttcccacccagcggtcggccttgtattacattgtcctgttgttccttttgcctcttcaattgtttcattatttggtgttcatagcttctatgtgatcgatctggtctgttgttctacccaatattgttactaaaagcatttgttatctttaattgattaaaatagttccagttgtgctttgtctttt

SEQ ID NO: 7630 - DNA, 1527 bp, Oryza sativa
  ref <308>: DATABASE ACCESSION NUMBER: AK064757
  ref <309>: DATABASE ENTRY DATE: 2001-12-06
aaccctccccaaatcccagaatccgccgcggcatccggcgatcacgcccctgcaccggagatggcggacgacggcggcgacggaccgccgtgcgactccgactacatcagcaacctcccggaaaacgtcctggtcaccatcctgtccctcctcaggctcgacgaagcggcgcggtccaccgtcctctccacccgctggcgccacctcttcccctacaccctcctcgacttcagggcctacgccctcggccgcgacgtcgtcgccgccgtgaacaccatcctcgccgcgcaccccgccgcgcgcgtccgctccttccgcaccggctagctctacttcccgcccgaggacgacccctccgtcgaggcctggctccgggacctcgctggccgcggcgtcaaggagctctccctctccttccgggagaggtggcagaagatccccgcgtcgctcttcgcctgcacctccctcaagcgcctccacgcgagcagctgcaccttcccggacgccacccaggcccccgtgccgctcgccgccctcgccgagatcgatctgttcggggtcaacatatccgaggaatcgctcggcgccctgctgtcgcggtgcacggcgccggaacacctgaggatgcggagcatgggctggtgccaccgcatccacgtccggtctgagagcctcaagaccctctgcggctgcggcgacttcgatgagctcttaatcgaacacgctcctaacctcgagcaggtgtacggcaactacatgtacatgagaagcacacacctcaaggtcgcgcacgcaccgaagctggagttcttgggctacctcggcatgagcttcgacacgattgagattgggcaatccgttttcacggaagatgatttcgatataaagaccctgatgccaagcctgaagacactcgctatcgaattgagctacacgtccgaggggtacatcaattggttcatgcagctcctcaagctgttcccttgcctagaaacgctctacatcaggtcagacacttggtccaaggtccgcgccgcggcaccggggtcctgggacgtgctgagatctgtcccctgcatcgacaaccaccttgagagggtggtgtttgaggtttaccgggggcacgagtggcagagggagatggccaagtttctccacggcagggccaggttcctcaaggccatggagttccactgccagggagataaaggttgcagcgagcttttgggtgaagaatgggtcagggagcagcaggagctactgtgcctcgacagccgggcatccttggacgctcgtttcctcttcttcaagggcgctctggtgaataatcatcacgatgttagccaccatgagtggtacaagaggaagtactatcattacctgtataatgtctaaggaagaggttaggggactgagagtttgttaaatcgctgtagaacaggatgcgtttggtttaattagaaggttttcatttttggagatactatttatgaatgaataagtgagtgaataattataggaggtttg

SEQ ID NO: 7631 - DNA, 1698 bp, Oryza sativa
  ref <308>: DATABASE ACCESSION NUMBER: AK064758
  ref <309>: DATABASE ENTRY DATE: 2001-12-06
tggtgttcgccgggaagccgttcatccactacatccgtgacctgcggcgggagtacgggcccatcgtgaagctgcagatgggggtgcgcacgctggtcgtcatcagcagcgccgagctcgtgcacgaggcgctcgtcgagaagggccgggagttcgcgaccaggccggcggagagccccatccggagcatcttctccagcggcaagttcaccgtcaactcggcggtgtacgggcccgagtggaggtcgctgcggcggaacatggtgtccgggatgctgagcgccgcgcggctcagggagttccgccccgcgaggctgcgcgccatggagcggttcgtggcgcgggtgcgcgccgaggccgcggcgtcgcgcgacggggcgtccgtgtgggtgctccgcaacgtgcggttcgccatgttctgcgtcctcctcgacatgacgttcggcctgctcgacctcgacgaggagctcgtcgtgcgcgtcgacgccgtcatgaagcgcgtggtgctcgccgtggcggcgcgcatcgacgactacctcccgttcctccgccccttcctgtggcggcagcaccgccaggcggtcgcgctccgccgcgagcagatcgacacggtgctcccgctcatcaaccggcgccgcgccatcgtccgcggcatgcgggccggctcgccgcccgaccccgccgtcgcggcgccgtactcgtacctcgactccctgctcgacctccgcgtcgagggccgcgacgccgtgcccaccgacgaggagctggtcacgctctgcgcggagatgatcaacggcgggaccgacaccacggccaccgccatcgagtgggccatggcgcgcgtcatggacaacccgtccatccaggccaggctccacggcgagatcatgcagcgcgtcggcgacgcccggccggtggacgacagggacaccgaaggcatgccgtacctgaaggccttcgtgaaggagctcctccgcaagcacccgccgacgtacttcgcgctgagccacgccgccgtggagcccgggagcaagctcgccggctacgacgtccccgtcgacgcgaacctggacatcttcctcccgaccatctccgaggaccccaagctgtgggagcggccgacggagttcgacccggacaggttcctcgccggcggcgagacggcggacatcaccgggtcggcgggcgtccggatgatcccgttcagcgccgggcggcggatctgccccggggtgggcatgggcacggcgcacatcgcgctcatggtggcgcggatggtgcaggcgttcgagtggcgcgcccacccgtcgcagccgccgctcgacttcgaggacaaggtggagttcaccgtggtgatgaagcggccgctgctcgccatggtcacacctcggaagctctccttctgacgcgtgcatgcatgcacgcacatacaacgtggcagagcacgtaagacactgagccgtggggcctagctcgctctcctgatggattgtctattaggtcagcacgtgagatataatactactactcgtagctacaaattattggaagtttgctatttcgagtcattgttttaagtgaggtatttcccggtggaaggcttatacttacgtacgcagttatactttccctaatagcgagtacttataatgtataagtaacacttctgctcaagattaatgcacatgttcttagtat

SEQ ID NO: 7632 - DNA, 1545 bp, Oryza sativa
  ref <308>: DATABASE ACCESSION NUMBER: AK064759
  ref <309>: DATABASE ENTRY DATE: 2001-12-06
aaacgcgaagggcgccgtcgaagtgagaggcagagcgcgcgccgggggcgggatcgcgcgggaccggaaccggagctcgcggacggtggtcgcgcaccgaacaatggccatgcagatgcaatttgaagctagtgcagacacttcagtggaagaagagaacattggcccacagcccatttcacgactagagcaatgtggcataaatgccaatgacttgaagaaattggaggaagctggataccacacagttgaggctgttgcctatgcaccaaagaaggaactaataaatattaaaggcattagtgaagccaaagctgataagatcctggctgaggcggctaaattggtcccaatgggtttcactactgcaactgaatttcatcagcagcggtcagaaatgatacagatcaccaccggctccaaagagctcgacaagctactgcaaggtgggattgagactgggtccatcacagagatatttggggaatttcgaactgggaagactcagatttgtcacacactggctgtaacctgtcagctcccaatagaccgaggtggtggtgaagggaaggccatgtatattgatactgagggaaccttccggccagagcgattgctggcagtggctgaaaggtacggcctgtctggcagtgatgtcctggataatgtggcgtatgctcgaggcttcaacactgatcaccaaacccagctcctctatcaggcttcagccatgatggtggagtccaggtatgcgttgttaattgtggatagtgctacagccctctatcggacggattactctggccgaggggagctatccgccagacagatgcacttagccaggttcctgcggatgcttctgcgacttgctgatgagtttggtgtggcagtggtgatcactaatcaggtggttgcccaggtagatggggcagccatgtttgctgcagatcccaaaaaacccattggaggaaacatcattgcacatgcctcaacaaccaggctgtacctaaggaaaggacgaggagaaaccaggatttgcaagatctatgactctccctgccttcctgaagccgaagctatgtttgccattaatgctgatggagtgggagatgccaaagactgaggcactactttgattttgcttataaaacttgagtgtttccttatgaataggactgttccctggtatccttcacaggccttttcctgttgtgacggccccagaagagacttccgtgaaaacagccattgtatttgcccgtctgaaggtgtaaacaggagacaggtcagcactcaggaaccctgatccgaaatgttgattccttctgagcttactgatctctatgtgacttctctggcccttgagggaggtgagcagcagctcttcccataacactatctttaggtgggcataagatttccattcgtctggaatgtcttttttttttttaaacatgtggctgcaactggactgacaacctgaaaaaaactgggccctttccccctactgtctttaatgacgaaaattaaatggaccagggccgt

SEQ ID NO: 7633 - DNA, 989 bp, Oryza sativa
  ref <308>: DATABASE ACCESSION NUMBER: AK064760
  ref <309>: DATABASE ENTRY DATE: 2001-12-06
tccactgcctccctaaccccacaatccatctcgccgcggcggcggcggcggccgagaccggcggcgagcggcgggggcgggggcggcgtcagccatggtgcgcgttagcttctatcgcaactatggcaagactttcaagaaaccaaggcgtccatacgagaaagagcgtcctgatgctgagctgaagctgtatggtgagtatggcctcaggtccaagtgtgagctgtggcgtgtgcagtaagccctaagccctatccgcaatgctgcaagggagctgctcacccttgatgagaagaacccccgacgtatctttgagggcgaggctctcctgcgccacatgaaccgctatggtctccttggtgagggccagaacaagcttgattacgtgcttgcgctcaccgttgagaacttccttcagtgccgcctccagaccattgtcttcaagaacggcacggtgaaatccattcatcatgatcatgtactcatcaggcaacaccacatcagagtgggaaggcagcttgtcaacatccccttattcatggtgagacttgattagagaagcacatcgacttctcccttaccagcccaccggcggtgagcctggaagggtcaaagagaaagaaccagaaggaggcctctggtggtgatggtgatggtgatggtgatgaagaggaagagtgaatatgtgatgtcagctcggttttgttataggacctaattttgcgggaacttgtcttattagggacctaatttttgttacatgagtagaaaacaaaaattagccaccgagggttgtcaaaaattgttgtttgcgctgttgaaattttgatttgaagtttatctcctcatgaacatgtgaattcagtgtacccaggaaatatatcccaggtctcacaagctaatactgttgggaatatttgaagtgttgggtaccttgtcttttgaaaactggctttgattatactaaagcggatactaaatctggcctc

SEQ ID NO: 7634 - DNA, 1720 bp, Oryza sativa
  ref <308>: DATABASE ACCESSION NUMBER: AK064761
  ref <309>: DATABASE ENTRY DATE: 2001-12-06
aatgcctcatctatctattacgagttcattctcaatcctgcaatccttcagatccactatcacgtgggacccacctgtgatcgcccaaagaaacctcatcgtgggcagaccacttcgcgcacgaaaaaacaacgaaaaaaaagaacgccaaaaaaaggcgcatctaacctccgcccctcagccatccccacgccgctacttccgcccgcccgcgcgcccttccctccccacgccgcaccggcgaccctgaccttgacgcggccaaggtctccctcggcgccatctcccaggtcactctcgcgttgcagccgctatttaagctgtcggttgcgtttgtgaaccgcaacgactcggacatcgccgagatggtcgccatgtggggcggcctccacgagttcggcgacgtggcgtcgctgccgcggcggcgcatggtcgtgtaccgcgagcacggccgcgccgccgaccacgcgggcttcctcgacgccgtcgaccctttcctgaatctcttttttttttactgaatcacccacatacgaatcaatttagagatttacctccattgttgcatccattaactgatgagttaggagatttactaaatctgatttctgcccgttcagtagataaggctccaagagagacatatgctggctattactcggtgcggtgaattatacaatgttagtatcaagtattagtttaattagcgagattaacaaaccacgctaccagctcaacattgttcctcaatcattgtctgttgtcactgccttatcgacttggcaatgggaaacaatatatcaaaagtattttgagttgtacatattttcttaatcgttatagattatgaattaccaggacttacatatatattctagacctaggtcatatttacacaatacacgtaaataaacagattcttgtacttataatatgctcaatttaatttatattgatcataacgtgtactacacgtgcacgattgctagtttactatcaatagaagcagctattctagaaattaaccgttcactctcagcattttttggatcttaccaaaccgagcggcgccaggatgggctcctcgacgtcgacggcaaccgccggccagccggccaccgcgacctcctcagcgtcaacaccgtacaccagcaacgggaggactgctgcgagcctgcagatcagcaggcgtcaggcggcgtcgcgacaagcatcagccaccagcagataagctagcagagcaggctaccgagatactgtctgccctatcgatcatctaccatttgttgatctatcactatatatgtactacagatccaaccacaaatcatctctgacgggtcagcacgacttgtcatagatgtgaggttatctgtaacgggttgtaattgtaacctattacaaatatgaaggtctgttaatgctaaaatttggtacgattctttggtgaattcggttaaggaaagaagccaattagtagatagatgttttatccagatctagctgaatttaaagagaaatcgcgaagaccacggcagaggcagtttcatatttttagtataaatcttaaataggtaggattagttatatattctcattttcttgtttggagtcttatctcgtgtttgatcaagacttgtaccaacctgagggtatatttatgtacacctgcagtctttgtaaactatctttcatagattaatacaattactttctgtgc

SEQ ID NO: 7635 - DNA, 1098 bp, Oryza sativa
  ref <308>: DATABASE ACCESSION NUMBER: AK064762
  ref <309>: DATABASE ENTRY DATE: 2001-12-06
aatgattccggcgtgatgttgctgcgccgcctggccgcgtccgccctccgccgtggcggcgccaacggcggcgtcctggccgccgtccgcgccgagatcgcgcatgagctctcctcctccaccccctcctctcccccgtcgctccaatcccaggtacccaccaccgcatcctcccgcccccaatccagcgccactcacttccccctggttctcgcaggacattcccgacttcgccaccgtgtcggacccgccgcgcgggcaggaagtgctcctgcgccgccgggatgcttccgaggaggtcctcgtgtcggcggtgctcgagccgctgcggttcgaaggggaggagcccctgcccagggacgcgctcatgaaggtgttcgtcagtaagcctgatgtgaagccggtgatgcggttcgactgccgcgcgtttgcagatgaaggtgatggcggctctgctgactatgatgttactaatgcttgttatcacccgtttgctggcgacgcaggggaagacaagtatgaagggcctgagttcaggtgatgtttcttcattcatgtgattttaggggctgtttggttcttaactaacattgccaaggctaaggaggtgtggcagcctaaagtacggtgtggcaagttgaagcaatgaaccaaacacaatgtttgtggatattgtgatgcgcgcagtgggctcataaacttggagttcctccaagaaatctggaaaaacaagcactttcatggcattttggtggagctctgtaattctagtgaccggtagaaaaaaaattagcacatgatcaatttcaggagagcctatgccttccaggaaattcagtaccacctaccttttctttctacaaaagtagaggaacatgcgtatatttttttgtggtttactgttctaacgcgctgattgttgattacattgtcttacaacatagtatcttggtagactgaaaatctattactatgtattattttcctacagtcttgtcatgacagtgaaccaagtatctgtccttgttattaactccatgttaagccgcagggtcttcatttgctagaatatctagttataccctattgtcaaaattc

SEQ ID NO: 7636 - DNA, 872 bp, Oryza sativa
  ref <308>: DATABASE ACCESSION NUMBER: AK064763
  ref <309>: DATABASE ENTRY DATE: 2001-12-06
aagccagccgagatccttgacagtgcagtgccaagactcgggggggcaattttgctccctcttcccgctcgtgcccaggccggggccttgcttgctagctagctttgaagccagccagcaacgccgccaccgcaggcatgaaggggagcggtgcagcgatgccgtcgtccatgttctacgtccacgaggcggacgtcgcccaaatccaccacttcctcgaggagtgctccctctgcggcaagttcctctccggtgacatcttcatgtacaggggagacacgccgttctgcagcgaggagtgcaggcagcagcagatcgaggtggacagggcgaagcaccggcggaagaagcgtgcggcggcgcacgcggtgtcggtgcggaaggagcaccggaaccaccaccaccaccaccggcaccaccaccagcagccacagccgcggccggccatcgacgccaacccgtggggcaccgcgcgaggccccgcgttgcgcgtgtgagaccgatcgagccgcacccgcgcgtcgggcgcgcggggaggccacgtcttttttattttcgggacttctggtgcgacacgggcaggacgacggagacaaatacattttcacaacaataaaacgtacgcgaccctgtttctgtttgtagggggactggtgctactagtactacgtgcgtacacgcgcctgagggtcttgggccgagttgggccctagcttcctcgggcgagtcttggtttgttttttttttctcatttctcaaggttagaacattggagctaggcgatcgattcatgggctctcctccatttttgcctcctgtttttttggccgctgtgttctgcttttgaggaatgaaatatgttttttttctcc

SEQ ID NO: 7637 - DNA, 1716 bp, Oryza sativa
  ref <308>: DATABASE ACCESSION NUMBER: AK064764
  ref <309>: DATABASE ENTRY DATE: 2001-12-06
aaaccacgagcaacgaactcacctgcaaattaagccaggtaataaaacttggcgtgaaaattaagctgaaaattagctgatcgatcgatcgccatggacgagctcttctaccagtcgctgctgctgtcggtggcggccgtgacggtgctgcagctgctgaagctgctcctggtgcggcatcgccgtccccggacgccgccggggccgtggcggctgccggtgatcggcagcatgcaccacctggtgaacgtgctcccgcaccgcaagctgcgggagctcgcggcggtgcacggcccgctgatgatgctgcagctcggggagacgccgctggtggtggccacctccaaggagacggcgcgcgcggtgctcaagacccacgacaccaacttcgcgacgcggccccggctgctcgccggcgagatcgtcggctacgagtgggtcgacatcctcttctccccctccggcgactactggcgcaagctccgccagctctgcgccgccgagatcctcagccccaagcgcgtcctctccttccgtcacgtcagggaagacgaggtgatgatgcgtgtaaacgagatccgcgcggcggggccgacgagccggtgaacctgagcgtgatgttccacagcgtcaccaacagcatcgtgtcgcgggcggcgttcgggaagaagaggaagaacgcggcggagttcctggcggccatcaagtccggcgtcggcctcgccagcggcttcaacatccccgacctcttcccgacatggacggggatcctcgccacggtcaccggcatgaagcgcagcctccgggccatctacacgacggtggacggcatcctcgaggagatcatcgccgagaggaagggcatccgcgacgagaagatcagcggcggcgcggagaacgtcgacgagaacctcgtggacgtgctcatcggcctccaggggaaaggtggcttcggattccaccttgacaacagtaaaatcaaggctatcatcctggacatgtttgccggaggaacggggacatcggcgtcggccatggagtgggggatgtcggagctgatgcggaacccctccgtgatgaaaaaactacaagcagaaatccgcgaagtgctccgagggaaggcgacggtgaccgaggccgacatgcaagcaggcaacctccgttacctgaagatggtgatcagggaggcgctacggctgcacccaccggcgcctcttctagtgccgagggagagcatcgacgtgtgcgagctcgacgggtacacgatccctgccaaatcacgcgttatcatcaacgcgtgggcgataggacgcgaccccaagtactgggataatcctgaggagttcaggccagaacggttcgaggatggaaccctcgacatcacgggaagcaactatgagttcatccctttcggctctggccggaggatgtgccccggtttcaactatggcctcgcaagcatggagctcatgtttacgggtcttctctaccacttcgactggtcgctaccggagggtgtaaatgaggtggacatggcggaggcgccaggcctcggggttcgccgccgctcgccactgatgctgtgcgccaccccgtttgtccctgtggtctctgccaattagttccatctatgcatgctgtgttgcatgtttcagcgcaaccaaaataaaatgaagatactccctcattctataatataatgtcttatattttcgt

SEQ ID NO: 7638 - DNA, 2274 bp, Oryza sativa
  ref <308>: DATABASE ACCESSION NUMBER: AK064765
  ref <309>: DATABASE ENTRY DATE: 2001-12-06
aaaaagaatgcgccaccgtggcccaccgccgtgacctcgccgccggcgaggcctcccctgcccatggactccgccggcgtcatcctctccatcctcagcaagctgcagtctctcggcttctgcgcccatctccggatcggcgacgccgcggcctccggccccccctcggacctgttcgacaccgtcctcgccgcgttcctccgcgaggtctacccgggcggccgcgaggtgcgccctctcccggcgaagctcggcgacgggagccgcgtcgacctgctccgcctcttctccgccatccgcgccgccggcggctacgccgcgacgtcgtcgtcccccgccgtctgggcctccgccgccgagtccgtttgcctcgacgccaccctcgccgcgcccgtcaagctaatctaccacaagtacctcgccgccctggaccgctggatccagaggctcgtggaggcgcatggacccttcctggatggcaacgacgggaggaagaagccagagccattcttcgattccaatggaagggagaatgaagaaccactcttggaatgcaatgggggagatctgcagcatccaatcttgaagaggaagagggaggacatggttgggatgttggattgggtcagggagcttgccgagaatggcggtgaggcaggcaccatggctgccggctcggcgaatgggtactactcgttggcgttggcagcgaggaaggcggtgttcgcgaagagggctcgccgctcgagcatgacgatgaatggtgcactcatgcaggaaatatttccaatggattgcaagtgctgcatgagttccagcactactggaattgacacacaagaaaaatgcagtaaaaagattcaacttgtcattccacaggctggttcagatattaatgaattgataaatgttgtagaaaacataaatgtgccttcaattggaatggagcaagagaacaacattattggacaagcgaaatatgagagtaggaaacatcataactctgacaactggctttttacgagtcagcagaggaacaaaataccagtgggctctgagttccaagcacaagtaccacaatggactggtgagttgcctgtaagctatgataatgcagaaaccaggaaatggttgggcacaaaggtctggcctctggaaaatggtaacaggaaattatcatatttttgtaaccctgttggaaaaggtagagaaggtgtttgtggctgcaaccttccaggatctgtagaatgtgttaggtttcatgttgcagaaaggagacttcagctgcgacgtgaacttgattcagctttctatgcatggggatttgatcgtatgggagaggaaatcgcactttcctggacagataaagaggaagcaaatttcaaggcttgcgtgcagcttaatgccccatcttcaggaaggaatttctggaagcgtctccatatgctttttcagtcaaagggtaggaaagaacttgtgagctactattttaattgttttctacttagacggaggtgttatcagaataggatgactccaaataacatagatagtgatgatgaggatgagacagaatttggattcttgggtaaccgccttggtcataatgcaactaagtatgacagttccaagtataccctttgcatcgaaagtacacactgcatggatctcaaccaatagtttctgatcagcattaatgaagatgattgaagtttagtagttcacttctcttgctgttgagtgtcttggataaggtttaaataggcggagtggagttttggtgtttaacttctctcattgccaatggtttctgcgcgatataaagaagcttactgaaatttggcaattaatttcttccattgccaatggtttctgatcagatatagagaagccgattgagtttgataatacacttctctctttgcgaaaagtttctgatcagatgaatgctttcatccactgatttcttatgcagacggaaatgtaaatgcttaagtgcaagccaatcatttgaacaagttgcttaccgctgcggaagatttgaccgaagcttgcgattgaagttgggaggcaagttttgatagagtgtagtggcactgatatgtgaacaatcacatggattcattatatccacaaggtgaaaaagagaacagcggtagcatttttaccgatgcttccttgaaggtatcacatgtaccattttctagttttatcctttgtgtaaagtagttttgcatacattgcacagtagtatgattaactgttccttgctct

SEQ ID NO: 7639 - DNA, 1612 bp, Oryza sativa
  ref <308>: DATABASE ACCESSION NUMBER: AK104987
  ref <309>: DATABASE ENTRY DATE: 2002-08-28
gctgcggaattcctcgagcactgttggcctactggaccaccctccttgttacagctgtgccgcctcttgcttcctcctcctcatcgtccgccatggcttctctcaccgatctcgtcaacctcaacctctccgacaccacggagaagatcatcgccgagtacatatggatcggtggatctggcatggatctcaggagcaaggctaggactctctccggccctgtgactgatcccagcaagctgcccaagtggaactacgatggctccagcaccggccaggcccccggcgaggacagtgaggtcatcctgtacccacaggctatcttcaaggacccattcaggaagggaaacaacatccttgtcatgtgcgattgctacacgccagccggagaaccgatccccaccaacaagaggcacaatgccgccaagatcttcagctcccctgaggttgcttctgaggagccctggtacggtattgagcaagagtacaccctcctccagaaggacatcaactggccccttggctggcctgttggtggcttccctggtcctcagggtccttactactgtggtatcggtgctgacaagtcttttgggcgtgatattgttgactcccactacaaggcttgcctctatgccggcatcaacatcagtggaatcaacggcgaggtcatgccaggacagtgggagttccaagttggcccgtctgtcggcatttctgccggtgatcaggtgtgggttgctcgctacattcttgagaggatcaccgagatcgccggagtcgtcgtctcatttgaccccaagcccatcccgggagactggaacggtgctggtgctcacaccaactacagcaccaagtcgatgaggaacgatggtggctacgagatcatcaagtccgccattgagaagctcaagctcaggcacaaggagcacatctccgcctacggcgagggcaacgagcgccggctcaccggcaggcacgagaccgccgacatcaacaccttcagctggggagttgccaaccgcggcgcctcggtccgcgtcggccgggagacggagcagaacggcaagggctacttcgaggatcgccggccggcgtccaacatggacccttacatcgtcacctccatgatcgccgagaccaccatcatctggaagccctgaagcggcttcttgacgccacgacatcctcgtcatcgtcctccccagctcgccgtgtcgctccggttgctccattgatcggacgatctggtgaattgcatttgtgctgggagaagtaaaaaaaaaaggaaagagaaaaaaaagaaaatcacgccaaaaaaaattctcattccatttcgatttggttgcatgctaccactactactacattgctcatctgccatttagattagctcctttttcttcgtcttttgggtgagtgcgtttgggtgctcttgtgtaatcctccaataatggccgtacctacggtacttgtcccatcctgtggatcatcgtcctcctttccacatgtggttttatcatcattgttattagtgatcacctttatataaagttcttgctgggcttccaataaaaaaaaaaaaaaaaaaaaaggccacatgtgctcgagc

SEQ ID NO: 7640 - DNA, 1738 bp, Oryza sativa
  ref <308>: DATABASE ACCESSION NUMBER: AK104988
  ref <309>: DATABASE ENTRY DATE: 2002-08-28
gctgcggaattcctcgagcactgttggcctactggaaggaaccggaaaaaaaaaatccccaattccccctacgccgagcagcggcgtgccggcaatgtccctccgcaagcgccagcgttcggcgagcagctcccgcctcagcaccctctcctcctcgccggctccccacaccgccgccgccgccgcctccgcctcctcccctccgctctccttccccaacgccgacctcgtcctccgcctccacctcgacccctgccccgacgacgacgcggacctcgacgccggcgaggatcaccgcccctccctcgacctccacgtctcctcggcgtccctgctccgctcccgctacttcgccgctctcctctccgaccgctggagccccgcccccacctccgccgcgggggggcacggccacctctcgctggccgtggccgctccgcgctctgcctcgcaccctttccacgcccacgtcgaggtcgtccgcctcctccacaccctcgacttcgccggcgccatccactcgcccgccgacgccctcgacatcctccccgtcgcgctccagctcctcttcgacgcgtgcgtcgaggcgtgcacgcggttcctcgaggcggtaccctggtcgcccgacgaggaggcccgcgtcctcgagatcgcgcctctcctccccgccgatgaggctgccgacctcctcgctcggatcacgcctcccccagccgcctccgcctccgccgccgggggcgaggccgccaggtcgccctccgaggcgatgctgcacggcttgatccactccgccatccatgggcacccggtccccgccgcaaccaaggcgttcgtcgcgatgctcctcaaggactacccctcccgtgactgcgtccagaaggtgctcgacgaggcgttcctgtcacggctggagactgtcaaggagctcatggggaagtatgccagcccggatttcagggtcgcggtggacagcgatgagcgggacgcgatacagaggctgaacctgcagtccgcggtattgaatgtgagacacttgctctggctcatcgagaggatggtcgaaatgagggtggccggtgatgcggttaagctgtggagtgagcaggctgcactgactgctgatctgcagaagttgctgaatgatgtggatatgtggaagaatattactcctgggcttcctgtgcctgttaccagatgcacgctcaggttcgccaattcggttgtgaatggggagacaatagttcctcgtcaggtgaggacgaagcttgtcagaagttggcttcctgtcctaaacgtctgcaggaacatggttcagcctatgcagtgtggatacaagtcaccaaattgccaagagctagaggagacatttcttcagatcatctccaccttgcctgtcccagatgctcaggagttgctgcaacagtgcctcgggttctcgactcgcaacgtcgacgactgcccgcacttgatcgcagccttcaagacatggttcaggcgtgctggccgggctcctcaaggtgcagaaaattgagatgagcgctgcagctagtgtctgccaacagtgggtgctgtcttgtgcgaaatctcacatctagttcaatgtagttcctaacgctgtttctgtacattgttgtactacctaccctatctattgccatgtaaggtatatgatatgtacataacaacatttttctgttcgtgtgaaaaaaaaaaaaaaaaaggccacatgtgctcgagc

SEQ ID NO: 7641 - DNA, 1318 bp, Oryza sativa
  ref <308>: DATABASE ACCESSION NUMBER: AK104989
  ref <309>: DATABASE ENTRY DATE: 2002-08-28
gctgcggaattcctcgagcactgttggcctactggactatcgtcggcgcagcgccctcgacctccaccagcgcgccaatgtccgcgccgccgcaacacccaagccagcgacgccaccgatccgcgccgccggaacacccgcgcctctcgctctcgtctgtgccgctccccccaccccctgcgcccgccgtaaacccctaatcctccgcgctcccctcgccctcctcacgatctcctccgcgccacctccattctcctgccagtagccagcctcaaggccctgcgctacccagccgcccgtcgttgccgctcctgctacgtggatctggcggcgggatttgcaacggggacggcgtcgcgccctgctcgtgctggcacagaggttggggagaataggatgtaaaggttccttggctttggtgagttattcaccgtgatgcagctctgtccctggtgcaaatgggaatgggatcgctcagggcagtctaaatcatggaggttgttttgcctgcaggtttctttcttgcgttagattggtgggaccctctccaacgtgtacaggaagctccttcctcttcttggtttatcctcgattggattaaaaatcttagaagaaatgttaattttcagtatttaattaggagctgttttatctggggatcatatcttcatatggccagcgatcatttgttttgatggtttgactttgtttctgctactcaaaattacatgtttgtcgtcatcgggtttgcctgtatatatacgattagctgtgcttctaattccagcccccaacgctacaagagtagtatcagtggaagtgtttccacctccatatatagtttcttatcagtagaattaccgaattacatcagatattatatatatttttatgcgccatattggaaatcttgtttcatggctaatattagcattcttatttttcagatccgataaatttcaggttgcaatttacaaggatctcttttggcaggactaccaagttgcctggaatctggggggaaaagtcaacatttatgcacaacatcggcagcagtgatctgccgtgcatgaccacaccgatcggatacctcctatgcctatatcctgttatttccagttgacgtccgtagttcctcctcatcattgaaggtaaaagaattagcaatatattaaacagtttctttttttcctgaatcataaatctatctcattttatgtcggttgttaaaacatatattttttatttgatttgtattattatatatggtttcatggggaaaaaaaaaaaaaaaaaaaaaggccacatgtgctcgagc

SEQ ID NO: 7642 - DNA, 1890 bp, Oryza sativa
  ref <308>: DATABASE ACCESSION NUMBER: AK104990
  ref <309>: DATABASE ENTRY DATE: 2002-08-28
gctgcggaattcctcgagcactgttggcctactggacacactctatgctctctatctgcttcctaagcacatacaagcactactctccatacagcaagcagatacaaacagaaggatgaagctcagagtaaaaggcctcggcctccttcttctccttgtcttgcttgctctttgctccaccatcgacgtctgcgatgcaagaagaggcaagcattggcgacctaggagctcaccgagctcctctctgctaaggaacaagggcaaaggaaagaagggcagctccaaccggcagcatggaagcaaccggccgagcccgaagccgccactcagcccgccaccgagtcctggtaatggcaaaggataccagagcccataccagccaagcccaagtccaagcccgaatgcacctgtaagcccaagccctgtcaatgggagtggacatgcaagtcccaagtctccaactccaagctgtgaaaaaggtaatcagccaccatcgcggccaacaccaacatcaccacagggcgcagtgtttaacgtggttgattttggagccaaaggcgatggcgtctccgatgataccaaggcctttgaagcagcatgggctgcagcgtgcaagcagggagcatctacagttgtcgtaccatcagaacttgagtttcttgttgggccaatctcattctctgggccttactgcaaaccaaatattctgttccagctggatggaacaattgtagccccaaccagtgctaaagcttggggttctggtttgcttcaatggattgagtttaccaaactaaatggagtatcaattcaaggcaatggcatcataaatggtagaggacaacaatggtggacctattcagacatagatgacgacgaagatgatgacacacagtacgatgtggagtttgaaaggatgccacaagttaaacctacagcattgagattctatggtagtttcaacgttgtagtagctggtatcactattgtcaacagctcgcagtgccatctcaagtttgacagctgtcaaggagtgatggtccatgacgtaacaatatcctccccagaaaacagcctcaacactgatggaatacacctgcagaactctaaagatgtcagcattcatcataccaacctggcttgtggtgatgactgcgtctccattcaaacaggatgcagcaatataaatatacacaatgtgaattgtggacctggccatggaatcagcattggaggcctaggccgggacaacacaaaagcatgtgtctccaatgttactgtaagagatgtcaacatgttcagaaccatgactggtgtcagaatcaagacctggcagggtggcttaggcttggttcaagatgtacggttctcgaacatccaagtctcagaagtccaaacaccaatcatcatagaccagttttactgtgacaaaagaacatgctcaaatcaaacatcagcagtggcagtatcaggcgttcagtatgagaacatcagaggaacatttactatcaagcctgttcattttgcatgcagtgacagctcaccttgttcagggataactcttactggagtacaactcaggcctgtccaaataccccactaccgcctaaacgaccctttctgctggcaagcttttggggagctctacactccaacagtccctccaattgcttgcttgcaccttggaaaacctgctgggaacaacttacagtcataccacgacttatgttgatacacaaaagtaccttcatccattgattggtgcttatccatgagtggtcgtgaaacttccgacccctttgcaccattgcttggcggtgtgcatatatacagttattctgatgccattgttactaaaaaaaaaaaaaaaaggccacatgtgctcgagct

SEQ ID NO: 7643 - DNA, 1089 bp, Oryza sativa
  ref <308>: DATABASE ACCESSION NUMBER: AK104991
  ref <309>: DATABASE ENTRY DATE: 2002-08-28
gctgcggaattcctcgagcactgttggcctactggaattcacacaagcatctcctcttctcctcttcttccatctgcaagctcgagctcgttctagaaggttctagacacatcagttgccatgggcaacagcctctccccgtgcatgcacctgccggcgacggcggcggcgggggtgaagctggtgtactggggcgggcagacgaggatgctggacgacgatggcggggtgtgcgccgtggcgggggacgtcacggcggagctccccggtgaccacgtcgtctgcgcggccgactccttctacgtcggcctcccgatcccggtggtgtccgccggcgaggagctgatggcggggcggacgtacttcgtcctccccgccgagcgcttctcctgcttcaaggtgctcaccgccgcggcgctcgcgtcgctgtcgccggcgccgtcgaagaaggtgtccgtggctgggccggggcagtgcccgttcgagtacgtcaagggcgagggcggcgccacgctcatccgagtcctcccggagttcatcgagaaggtgatcagctgcgacgagaacggcggcggtgcgcgccgccggaagccgtcgacgacggcgacggcgacggcgacggagctgtgcagcacgccggagctgaagcggcattacgcgctgctgatggggcggaggaaccagccgtggtcgccgaggctggagacgatctcggagtgcaacaagactaggaagctgctactgcggacgctggcgaggctcttgtcgtcgcgatgagcggcggcggcggcgcgtcgaactcgaagacgaccaccaccacactacgctagttgtaggattctagctgtgcagataatacatagaaggattccattcagacatgtacagtcaattggcgaatggggattgagattaagacgcactgttcaactaattagatgggtgaaactgcgatatatatagagcgagaaaacacggcacaaatacacacttctttgtaaattaagtattcaaagtctcaaattaaacgatacttcctccatttcagactaaaaaaaaaaaaaaaaaaaaggccacatgtgctcgagc

SEQ ID NO: 7644 - DNA, 1212 bp, Oryza sativa
  ref <308>: DATABASE ACCESSION NUMBER: AK104992
  ref <309>: DATABASE ENTRY DATE: 2002-08-28
gctgcggaattcctcgagcactgttggcctactgggtacggcgccgtcgactgcgccgcgccgctctgccgcaggctcgactccggcggctgcgacctgcgccgcaaggcctgcctctaccaggtcgcctacggcgacggctccgtcaccgccggggacttcgccacggagaccctcaccttcgccagcggggcccgcgtgccgcgcgtcgccctcggctgcggccacgacaacgagggtctcttcgtcgcggcggcggggctcctcgggctcggccgcggcagcctctccttcccctcccagatctcccgccgcttcgggcggagcttctcgtactgcctcgtggaccgcacctcctcgtcggccagcgccacctcccggtcctccaccgtcacgttcggctccggcgccgtggggccctcggccgccgcgtccttcaccccgatggtgaagaaccccaggatggagacgttctactacgtgcagctcatgggcatcagcgtcggcggcgcgcgcgtcccgggcgtggccgtgtccgacctccgcctggacccgtccacaggccgcggcggcgtcatcgtggactccggcacgtccgtcacccgcctggcccggccggcgtacgccgccctgcgcgacgcgttccgcgcggcggccgcgggcctccgcctctccccgggcgggttctccctgttcgacacgtgctacgacctgagcgggctcaaggtggtgaaggtgcccaccgtgtcgatgcacttcgccggcggcgccgaggccgcgctgccgccggagaactacctgatcccggtggactcgaggggcaccttctgcttcgcgttcgccggcaccgacggcggcgtctccatcatcgggaacatccagcagcagggcttccgcgtggtgttcgacggcgacggccagcgcctcggcttcgtgcccaagggatgctagctaattgcgccttaagcctgctgcttaatctaattaacgggggagtgagccttgtttagtcataattaagtacttaattaagggtttggtttgattaaggtggcgagtgagtgagggagggagagagctttggatgctgtaaagcgctgtgtgctttgaggataaggcggttgaaggctgtaaaacagttaaagtgatgggttataaaaatctccttgaccatgtcaaaaaaaaaaaaaaaaaggccacatgtgctcgagc

SEQ ID NO: 7645 - DNA, 2046 bp, Oryza sativa
  ref <308>: DATABASE ACCESSION NUMBER: AK104993
  ref <309>: DATABASE ENTRY DATE: 2002-08-28
gctgcggaattcctcgagcactgttggcctactggaaattccccctaatctctgtctccccctccctcacggcctcacctcttctccctccaaattctccatccccggatccccctctcctcctcctcctccgccgctcgtcggagccggaggcgcggcggccttctcccgcgcccttcgtctcctcacacccgcggcggccggcgagaaggcccagaggcaaaggcgtgaagcggcctcctcccccggcgcggcaccctcggacgcacggcggccggtgagcaggagcaggttcggagggggcgacgcggccgggctccttccaccggccagcatcctggctcgagtcgaattttgaaggaagcatgaaggttgatgatggtcctggcgtcaatggcagtaggtgggccaaaatgatgagcacagattcgtggaggtggtgtttaggattgatttacattgttgctgttgcgagtatatggattgctgcaagctacattgttcagtctgttgtggatgagggtgtttctccattcttgattacctacatatgcaattctctatttgttatttacatcccaatagttgaggctgcacgatactttgaggattctatcaacaacttttggacaaagttgaaaggcaaggatgttgcggacctggagcagtctgctgatctggagagcataaatcttctccatggaagtgaacaagagggcaatacagcctcaccaacaaggttgcctgaagacatattggcttcagaagcagtcttccctgtccaggccgagctgaatgtagcagatggcagcaaagggttggatgcaaaagggcgctggacacgtgctcgtgtggctagagtcagcatggtagtctgccctttctggtttctcgctcagcttacattcaacctgtctctaagatacaccactgttacatcaaatacgatattgagcagcacgtctagcctcttcactttcttggttgcactagtatttcttggagaaacattcacgtggttgaaactaatcagtgtacttctctgcatgggaggaacgataattgttagcctagctgattcaggtagtacagcgaataccattgccacaaatcctctacttggagatgtcctttctattgtttcagctggattgtacgctgtgtatatcaccttgatacggaaaaagctgcctgatgagaaagaaggtcaaggcgaagtgagcatggctcagtttcttggattccttggactgtttaacatgttatttttctttccttttgcattgttcttgaatttcaccaagctggagccattccacaggctgacatgggagcaagttggtcttattgttggaaaaggtttgttagataatgttttgagtgactacttgtgggcaaaagcaatccttctcacaacaacaacagtagccacggctggtctcacgatccaagttccaattgctgccattgtggatacactaacaggtcatgctcctcatctattggactacatcggagctgctgctgtgttggtcggttttgctggcatcaacatacctgtaggcactccacagggttctcagcaagagcaggaaactcctatcgtcagtatggttgatgatccagtccatttaccaagtgatagaaatgctactagcatggttgatgatccagtctatttaccaagtgatagaaatactactggtgctgttcaataaggaccggcttggctttggagtttgtcacaatgtatatttttttcgaggaaaattttcataatgtatattatcaagtaatgtataaggatgcgagatcagtacagttactgtaattgttcccccttgccatgaaaatcatagagaaggggatagacagggatcgaaattagattaacatgctttccttgctcataattttgagcaactagccagttgtgttcgtttttgagttaagcacgattatgaaaacattcaagagattgaatagaacatgtgtgtactaaacattcaaaaaaaaaaaaaaaaaaaaggccacatgtgctcgagc

SEQ ID NO: 7646 - DNA, 1871 bp, Oryza sativa
  ref <308>: DATABASE ACCESSION NUMBER: AK104994
  ref <309>: DATABASE ENTRY DATE: 2002-08-28
gctgcggaattcctcgagcactgttggcctactggaaaagcagagcagcgcatctgcatccaaaaccaaacccaaactcgtcttctccaccggagcagagcagcggcggcggcaatggacgccctcctcgtggagaaggtcctcctgggcctgttcgtggcggcggtgctggccctagtggtggccaagctcaccgggaagaggctccgcctcccgcccggccccgccggcgcgcccatcgtcggcaactggctccaggtcggcgacgacctcaaccaccgcaacctgatggcgctggcgcggcggttcggcgacatcctcctcctccgcatgggcgtccgcaacctggtggtggtgtccagcccggacctcgccaaggaggtgctccacacccagggcgtcgagttcggctcccgcacccgcaacgtggtgttcgacatcttcaccgggaaggggcaggacatggtgttcaccgtgtacggcgaccactggcgcaagatgcggcggatcatgacggtgcccttcttcaccaacaaggtggtggcccagaaccgcgcgggttgggaggaggaggcgaggctggtggtggaggacgtccgccgcgaccccgccgcggcgacctccggcgtggtgatccggcgaaggttgcagctgatgatgtacaacgacatgttccgcatcatgttcgaccgccgtttcgacagcgtggacgacccgctcttcaacaagctcaaggccttcaacgcggagcgcagccgcctctcgcagagcttcgagtacaactacggtgacttcatccccgtcctccgccccttcctccgccgctacctcgcacgctgccaccagctcaagtcccagcgcatgaagctcttcgaggaccacttcgtccaggaacgcaagagagtgatggaacagactggtgagatccggtgcgccatggaccacatcctcgaggccgagaggaagggcgagatcaaccacgacaacgtcctctacatcgtcgagaacatcaacgttgctgctatcgagacgacgctgtggtcgatcgaatggggaatcgcggagctggtgaaccacccgagcatccagtcgaaggtgcgggaggagatggcgtcggtgctgggcggcgcggcggtgacggagccggacctggagcggctgccgtacctgcaggcggtggtgaaggagacgctgcggttgcgcatggcgatcccgctgctggtgccgcacatgaacctcgccgacggcaagctcgccggctacgacatccccgccgagtccaagatcctggtgaacgcgtggttcctcgccaacgaccccaagcggtgggtgcgccccgacgagtttaggccggagaggttcctggaggaggagaaggccgtggaggcgcacggcaacgacttccgcttcgtgcccttcggcgtcggccgccgcagctgccccgggatcatcctcgcgctgcccatcatcgggatcacgctcggccgcctcgtccagagcttcgacctgctgccgccgcccgggatggacaaggtggacaccaccgagaagcccggccagttcagcaaccagatcctcaagcacgccaccgtcgtctgcaagcccatcgacgcctaggtcgatcgatcgacctactcaaatcaatcatgtgctgcgttatcctattgcactaaaaaaaggttgtatttttgtttggggggggggggggggggtagttatgtgtgtgttctgtgaggcaggcacctgttgttgtaggtttacttaactttttttttcttatacttgttggttcaaacttaattattggtaatctatactgcccaaacattgcaaaaaaaaaaaaaaaaaaaaaaggccacatgtgctcgagc

SEQ ID NO: 7647 - DNA, 1567 bp, Oryza sativa
  ref <308>: DATABASE ACCESSION NUMBER: AK104995
  ref <309>: DATABASE ENTRY DATE: 2002-08-28
gctgcggaattcctcgagcactgttggcctactgggatgttagccggtttgattcttctgtggctgaaagtgttggagtactaggtagtgacgaacctcaacaaggggctgaggtcagggccctcactggtactgagaatacgacccaaattatgcttgaggatgtgggtttacaggaggcagatgcggaaaatgctgccatagagtcaccaagtgtagctttggataacatggttgagatgcatgaaactcaagttgacaataggctgcaagatgaggcaggacgggatgcaagattttggcagccatctctggacgactcacttgataggtggcccaatgaaactgcagaggatgctgaaagaaattgggaagataatgcagaggaactacacagtgaaactatggaggatgatgccagggagcatgatcatcttcaagatgagcatgatgaatggcatgatgacgagtctcatggtactgagaactggcaagatgatttccaagattctccacttgacatgggccccattcctagaactgaaaatagattcatcccgccagatgatgacaatgtgtacagcatggaactgagagaattgcttagcaggcgaagtgtatccaatcttcttagtaatggttttggtgaaagtttggagcgattaataaggtcatatgttcaaagacgtggtcgtggacccctcaattggaatctcgatgcagctattccatctgtgaattcaccaaacgaaaatcaggaacaagagaggaatgctgaaactcggcaattccaagctcctgttaacagacctgcgcttgttatccctcccccacctttgccaccccgacagccactatggcacagagaattgcgtcataacaactggagcactagacacagggaatgggatgctattaatgatttgaaagctgacatgggtagacttcaacaagggatgagcagcatacagaggatgctggaggcgtgcatggacatgcaacttgaactccaacgctcagtgagacaagaagtgtcggcggccttgaatcgctttgcaggacctgaagggtatccgacggatctatctgacgatggatcaaaatgggatcaagtgaggaagggaacccgctgcgtatgctgcgatgcgcaaattgattctctattatacagatgcgggcacatgtgtacttgctcaaaatgtgcaaacgagctaattcgcagtggtggcaaatgcccactatgccgagcgccgatcgcggaggtggttcgggcatattcagtaatgtaaagttgtggaaatacagtagggaagggaataaaactgatggaaaaagcgaagttttgctgcacgaagctttgttcaggaaaaaggggaaacaagagctctgctgctgcttcttcttcattctttttcttcttccatttttgtctgtcctctctcgtcttcttcttgtgtatctatcgatctactacaggtttacatatttgttgccttgctgttggccgcagcgcgagcagcaaagggcgtgttaaaaaaaaaaaaaaaaaggccacatgtgctcgagc

SEQ ID NO: 7648 - DNA, 1909 bp, Oryza sativa
  ref <308>: DATABASE ACCESSION NUMBER: AK104996
  ref <309>: DATABASE ENTRY DATE: 2002-08-28
gctgcggaattcctcgagcactgttggcctactggctgtacgaccgcgcgctcgcgctgtgccccgacagcgccgcgtgccgtgccaaccgcgccgcggcgctcatcgggctcacccgcctcggcgaggccgtcgaggagtgcgaggaggccatccggctcgatccgtcctacggccgcgcgcaccagcgcctcgcgtcgctgcaaataaggcttgggcgcactgctgatgctcggaagcaaattggcatgggtggcctgcagccggacattgtagagttgcacaaattagaagcagtggataaacacttggggagattcgctgatgcgcgcaagattggcaactggaaaagcgcgctgagggaatgcaacgctgcaatcgcggcaggagcagactcttgtgcaatgctctttgcttctagagcggaagctcttctccagatcaatcaacttgatgaggctgatttggcaatctctagagcatccaagcttgattgttcatcctcatgctcccaggacatgatgttctgtggatttcagtccaactcatatctctactatgtacatgcccaagttgacatagcttttggaaggtttgatagtgcgatgtcatcaatggagaaagctaggaaaatagattctggaaacgttgaagtgatggccatgcataagagtgtgagaactgttgcccaagcacgaaccttagggaatgaactttttcattctggaaaatttgcagaagctttcctagcatacggcgaagggctcaagcatcaccctgcaaattcagtcctctactgcaatagggctgcttgcatgttcaagttagggcaatgggagaagtctattgaggactgcaatgaagcccttaagattcaacccaactattggaaggctctcctaaggcgtgcagcttcctatggcaagattgaacaatgggcagattccgtgaaagattatgaggttcttaggagggaacttcctggtgacactgaggtagcagaggggcatttccatgcccttgttgctcttaggtcatcacgaggtgaggatgtatccaatatgaagtttggaggagaggttgaagcacttgtaggagcagaacaattccagatggctacaaccttgccaggcacaatattattgaagatcttcccatttcattgtttccatgtgcaccatgctgcaaaaccacaatccagaccatggaccaatgaagtcataggacagcaggtatgttagattttatagcaaactttaacaattaatagagtattacatttttgcaggtgtttctgttgttcatttcatggcacctttaaatcagcaatgctctgatatcgccccatttgtggatgcactgtgtaccagatatccatctgttaatttcctcaaggtggatataactgagaaccccacagtgacacaattagaaaatgtcaagacagttccaaccttcaaaatttacaaggatgggacacgagtgatggagatgatctgccccagccatcagctgctggagtcctcactgagacaatacgaggtccagaccatgacttcaattatttaatattacctgcaagttcaacatccccaaaattgacacatgatagccacagctaagaaggcaatatttgtttgccctctgcgaaggcgagtgaatataagcgagtgatgtgaaaatttaccccatttcggccaaccacattcttctgtgcatttttaccatccccattgttatttatgtatcttatttattctttccatatataatgtatatgcttgcactgttcttctaaaacataaacaatgtcttacattcttgtatagaataggtgtaaattcttgttttcattaaactcgtatatttaagttaaaaaaaaaaaaaaaaaggccacatgtgctcgagc

SEQ ID NO: 7649 - DNA, 1952 bp, Oryza sativa
  ref <308>: DATABASE ACCESSION NUMBER: AK104997
  ref <309>: DATABASE ENTRY DATE: 2002-08-28
gctgcggaattcctcgagcactgttggcctactggctcctactcgacctcgcgctcgctcgctcgccctacaggccaccgccgcaccagggggggcagcgagcgagcccgcgaggtagtcggcgacgaccaggagggggactgggatgggttgctgcgggtcgtcgctgcaggccgggacccacccggagaagccgccggggatggcggcgccgccgcagcgcccgtccttctccctgaaccagcaccaggcgccggggtcggcggcggcgcagggcgtggggagaggggaggtcccggcgttcgcggagttctcgctggcggagctccgtgccgccacgggcgggttcgccgcggagaacatcgtgtccgagagcggcgagaaggccccgaatttcgtgtacaggggccgcctccagcgcacccgccgcgcgatcgccgtcaagaagttccccaagatggcgtggcccgatcccaagcagttcgaggaggaggccaagggggtggggaagctgcgccaccgccgcttggcgaacctcatcggctactgctgcgatggggacgagcggcttctcgtcgccgagttcatgcccaacgacaccctagccaagcacgtcttccattgggaaaaccagactatcgaatgggctatgcgtttaagagttgcacaccacattgctgaagcacttgactactgcagtagcaatgaacggcctttatatcatgacttaaatgcatatagggtcctttttgatgagaatggtgatcctcgtctttcatgctttggcctgatgaaaaacagcagggatggcaaaagttatagcacaaaccttgcatatacacctccagagtatttgagaaatggtagagttactccagaaagtgtcatattcagctttggtactgttctcctcgaccttctaagtggaaagcgcatacctccttcccatgctctcgatatgataagaggcaaaaacattcaagtgctcttggactcacatttggaaggaaaatactctacagaagaggcaactgctttggtagatcttgcttctcagtgtttacagtatgaacctagggaccgtcccaatacaggaaagctggtctccatacttgatcctttgcaaacaaaactagaggtgccttcctatgagatgcttggcattccaaagcatgaagaagaagcacctcctgctcctgctcctgctccagctccacaaccacaacaccctctatcccccatgggtgaagcctgttctaggatggacatgacagcaatccatcagattctagttgccacacattacagagatgatgaagggactaatgagctatcgttccaggaatggactcagcagatgagggatatgttagatgctaggagacgtggagactttgcgtttcgtgataaagattttaagacagccatagagtgttacacacagtttgttgatgtgggaacaatggtatcaccaacggtatacgctagacggagcttatgccacctcatgtctgaccaacctgatgctgccctccgggatgcaatgcaagcgcagtgcgtataccctgattggccaaccgcattctatatgcaagctgttgcgctctcaaagttaaatatgcagagtgatgctatggacatgttgaatgaagcttcgcagctagaagagaagagacaagagcgtctctggtctaaagatgcgtctgctcagtctcctttgcggctcaaaggtttatgttgagacgtgctgctcttccttcagaaaattgtgatacattccaggttaaagagttgggtgtaatggggggaaggtgctgcagaatccttttttttttctctttcggaccagatgttgtagatcctgtgattgtaactatttggtttgccatttctattatgcattttttggggggcaaaaaaaaaaaaaaaaaaaaggccacatgtgctcgagc

SEQ ID NO: 7650 - DNA, 1701 bp, Oryza sativa
  ref <308>: DATABASE ACCESSION NUMBER: AK104998
  ref <309>: DATABASE ENTRY DATE: 2002-08-28
gctgcggaattcctcgagcactgttggcctactggcttcagatgcagggatggataatatgccaggttgcctaagtggaatgactgaatcaatagagccggtttcctctcaagagatcaaagagaggcatctagatcctatattagacaataatgagcgaggagtagagttcagaagattggctacacctccgacagcaaatgatgttgcagtgactgaacatgttcagttattttcagatgcttgtgagaacattaagcatcaggagcgtgtgtcttcatcagaaacagaggctgaggaacatcagaatggcactgggatcacagatgtaatggattcacacccaccaaaaccattgtttctagttccatcaatcagccagcagggccttcaggggtccgtttttccttcggatacttcagacaatggtgagcattctagttatacttctcgagcggtatcagaggatgaaaaaacagtggatgaccacaatgctgcatgtgccatggacttgcacataacaagctcttcggcatcaagccatgtttcagagaatgggtgtaaccagcaatctcatggtgaatcgctcccagtgacttcagttgataaagtgcatacttcagatgcatcatgcgaggacaacaaactaaaaaaccattttatcacaagcgaggtgtgttcagacgcaacaaatctttctgcatcaggcttgctgacggaagaagaaaatatccataatgtggaggatcagtatgaaggcccattacctagtgaagaatcatcaggatgtctagattacccacatgatgaccacaattcggagaaagaggacatacaccagccagatgggtatgcagcaagccctggcaataataaccactttgatagctctcatgaaggtggctatttacatgccgagcagccaccagtcatgggctggactgtgagaccccagatgcttcatccaaattacggcatctcaatggaagagaaccaatttgaaccaaaggttgaagatcatctactaatcaagaaaccagtttcaattagaaatatcccaaggaatccactggttgatgctgttgctgcccatgatagaagcacgatgcggaaggtttcagaacttgtggccccaactgataagtcaaaacctaatgaaagaaacctgttgctagagcagataaggaacaagaccttcaacctgaagccggtgagttcagctaagcagccaacaatcagaacccctcctagagtctcaacaaggaacttgaaagttgctgccataatagagaaagcgaacgccatacgacaggcggttggaagcgacgatgaagacggagataattggagtgaatcgagtgacacatgaacgcgcacattttgccccatttttgtggctggaaggtgccgaaacttcacgaagctcctgccttcctggacaggctgcacagccaatctcatcttttggatagcgttgctagtcttgtgtatagtatatgcccatacatcttgtctttttttgcattcttttagcccgcatttgtatgtatactttcctctcccagcagcaaaggctgctgatggtagtcatgttccgaggactgtattattcaggcctatatgtaaattatcaatctgtttgtttcagttaaagctgatttatctaaaaaaaaaaaaaaaaaaggccacatgtgctcgagc

SEQ ID NO: 7651 - DNA, 1248 bp, Oryza sativa
  ref <308>: DATABASE ACCESSION NUMBER: AK104999
  ref <309>: DATABASE ENTRY DATE: 2002-08-28
gctgcggaattcctcgagcactgttggcctactggttcaagacgaagaaaatatttgttggtggattaccatctgctttgaaagaagatgaattcaaggagttcttttcgaaatttggaaaggtggtggaacatgaaatcattcgtgaccattcaactaaccggtcacgaggatttggatttgtagtctttgatgcagaaaaaactgtagatgaattattagctaagaaaggcaatatgattgatctaaatggttctcaggtggagatcaagaaggccgaagcaaagaaaccctctaacccacctcatcgttcatttgatagtgaacctaggggccgtccacatgcggatggttatgatggattgggcaactcttataattatggtggtagctttggcccctatagatcacctggaagttttggcactaggcctggtggttacagtagttcttatggccctggtgactatggtagtggctatggtgcttatggtggagcattaggaggatatcgtggagaatcatctctctattctagtcgctttggtagcacttatggaggaagctttggtggtggttatgctggtggcagttatgctggtggtttaggtggtgcatatgggcgtgatgctgggggtttggtggttctagctatggccctagttatgactcttcttcaggtcctggtgctggtgttggctttggcacgggtggactctatggtgctagaggaggctatggtagcagtggtgctggtgcttctggtcgttatcatccatatgcaaggtagacagcttcagatgctgccatgtgtgtgttagataagcttgcagaaggtcggtactagacaaggcaagataaattatctgcagctagaaaagaagagttgaagtttaatctgctaaggttatgtacctctcctgctagatttggctctgctaaggtttatgtacgcctgttagattggctctgctaaggttgctgtaccactcctgactcctgttagattggcttgtagaatttaaaatcactttttcagtgtttagaattcaagagatcgcacatatgctttgattagatagcaaagtcactatggctgttagtttagctcgtatttagtcgatttgagatgcaactggagcatattttctgtggatctttcctgtcataggcttgatatgatggcgatgaagtatcttgaattcatagtagtaaaaaaaaaaaaaaaaaggccacatgtgctcgagc

SEQ ID NO: 7652 - DNA, 2060 bp, Oryza sativa
  ref <308>: DATABASE ACCESSION NUMBER: AK105000
  ref <309>: DATABASE ENTRY DATE: 2002-08-28
gctgcggaattcctcgagcactgttggcctactggttttatgcaccatctgttgtacttaccactggaacattcatgagtggtaagatttgggtaggtaggacttcaatgcctgccgggcgagctggagagtcagcttcacatggactcactgaaaacttgcagcagttgggttttgaaactgaccgcttaaaaactggcacaccaccacgaattgatcgcaggactgttaacttttctggattggaaccccagcatggtgatgaagaggttggctggtttagttttgatcctgaattccatattgagagggaccaaatgtgctgctatttaacaaggactacaaaagagacacatcaaattgttagagataacttggatgaaacaccaacttatggtggttgggtagaagcaaagggaccaagatactgtccagcaattgaagacaagattgtaaggttcaaagacaaagagtcccatcaggtatttcttgaaccagagggcagagatgttcctgagctttatctgcaggggttttccactgggcttcctgagcgattgcaattatcacttgtgagaacactaccgggactggagaattgtgtgatgctaaggccggcttatgctgttgaatatgattacttgccagcttaccagtgctcaagatcacttatgaccaagaagtttgagggcttattcttctctggccagattaacggaacaacaggatatgaagaagctgcagctcagggtataatttccggaataaatgcagctaggcattctgatggaaagccacttatcattcttgagagagaaagcagttatattgggactctgattgatgatcttgtcacaaaagatcttagggagccttatcgcatgttaacaagccgttcagaacaccgtctattgcttcgagctgataatgctgatagtcggttgactcctttgggacgagatattggtttgatagatgatagacgatgggagctttatcaatcaaagcaagcccggattaaagaggaaaaagaacgattgaaatctacaaaaatcccaggaggtgaatttgctgctgcggttacctctgtatccaaccaacctgtaaaagaatcatctacacttgaagccatactgaagaagccacatgtacagtataaacttcttgacaaacatggatatggaaatgaacatttgtctcgaattgagaaagaatgtgtggagattgatattaagtacgaaggttttatagcacggcagcaaagtcaattgcagcagattgtaaatcaggagcacaagaagcttcctgaagacttagattatcattcaatgacaaacctgtcacttgaagctcgtgagaaactttcaaaggtaaggccacaaacaataggccaggctagcagaattggcggggtgagcccagctgatatgactgttcttctcatttggatggagagcaaccgtcgcatggctaactacaagagacagcaaagcacgttgagatctgctgcgaccaaggcagatgattcttcagacgaagtggttcatgccagtgccaccaatgcataattgagcgccccccgactatatcaaccaactgaattggaccactggacttttctgagccaaaaatgtgtactctctgaagataatttccagacgcctgtggaagagttatacaggacatgcatcaaggcaccttttgctacttgaaggaagttggtggtggcctctgtcagttatggtgtttctcccctacgacgctgaattgctgatgtggttttagaatgtcggatcgtattggtaggatttactatatctttatagtggataagaatgtaaagagcgacaaaaatgaaagtggtagagcagagtagcaatgtttatgtatatatacatctaattcgcgaatgcaagggagcaatgtcatttacagagaagtgaatggtgtatgtaatctgtaaacagaatgagtataaagaggttgcagtatcactgtgtcctatcacaaaaaaaaaaaaaaaaaaaaaaaaaaaaaaaaaaggccacatgtgctcgagc

SEQ ID NO: 7653 - DNA, 1913 bp, Oryza sativa
  ref <308>: DATABASE ACCESSION NUMBER: AK105001
  ref <309>: DATABASE ENTRY DATE: 2002-08-28
gctgcggaattcctcgagcactgttggcctactggttctctccgtataaagttgatactagctttttcttctctctgcgtttgctttgctttgcttcgttgcgagctatggttggtggtggtggtggtgtggtggttgttcgggctgtgctgctgctgctcgccgccgtggccgcggcggaggcgctgagcctggacgtccaccaccggtactcggcggcggtgcgccggtgggcggccgccgccgcgccgccacacgggaccgcctcaacgatttcggatttttgcattacgcggtggtggcgctggggacgccgaacgtgacgttcttggtggcgctcgacaccggcagcgacctcttctgggtgccatgcgactgcctcaagtgtgctcctttccaatcccccaactacggaagcttgaagttcgacgtgtatagccctgcgcaatcgactactagccggaaggtcccgtgcagtagcaacttgtgtgatctccaaaatgcctgccgttctaagagtaacagctgcccctacagtatccagtacttgtcggataacacctcatcctctggggtattagtggaggatgtcttgtacttgacatctgactccgcgcaatcgaaaatcgttacagctccgataatgttcggctgtggacaggttcagacaggatcgtttctaggcagtgctgcgccaaacggtctgcttgggcttgggatggacagcaaatcggttcctagcttgctagcaagcaaaggacttgctgctaattctttctccatgtgctttggcgatgacggtcatggtaggatcaattttggggacacaggaagctcggatcagaaggaaactccattgaatgtttataaacagaatccatattacaacataactatcacgggaattacggtgggaagtaaatcgatcagcacagagttcagtgctattgttgactctggcacgtctttcacggctctgtctgatccaatgtatactcaaatcactagcagttttgatgcacaaatccgttcgagccgaaacatgcttgactcttccatgccgtttggattttgctactcagtaagtgccaacggaattgttcatccaaatgtaagtctgacagcaaaaggtggaagcatatttcctgttaacgatccaataattaccataacggacaatgcttttaatccagttgggtactgcttggctattatgaagagtgagggtgttaacttaataggagagaatttcatgtctggactgaaggtcgtctttgaccgagagagaatggtgttgggctggaaaaacttcaactgctacaacttcgacgaatcgagcagacttccggtgaaccccagcccttcagctgttccttcgaaacccggtcttggtccgagtagctacacccctgaagcagccaaaggagctttgccaaacggcacccaggtcaatgtgatgccttcagcaagctcaccgctgcaaccgcagagcgtttccgccaccattgttctcctattcctcatcgttctctgaattctgaattctgatcagctcagctccagccaccatagcttcagagctccattatcctatattgatgatttgattacacataggatcacattctttttcttccttgtttttgtagttgctgtagggctataggagttgtagagttgtagagaggatagatcacactcacaagaatcgtcatagagaggccatttttcagttgattttttttacgtgttcatatgtataaacctcataataatgcattccactgagggtttgtttcaggtggattgatgcacatgtatacaggattttgatgtattgactcaatagattaatgatgatactggcctatatataaaaaaaaaaaaaaaaaaaaggccacatgtgctcgagc

SEQ ID NO: 7654 - DNA, 2036 bp, Oryza sativa
  misc_feature (1924)..(1930): "n"=any one base of a, t, c, or g
  misc_feature (1932)..(1932): "n"=any one base of a, t, c, or g
  ref <308>: DATABASE ACCESSION NUMBER: AK105002
  ref <309>: DATABASE ENTRY DATE: 2002-08-28
gctgcggaattcctcgagcactgttggcctactggaggcaagggaagtcggcaaaacggatccgtaacttcgggaaaaggattggctctgagggctgggctcgggggtcccggccccgaacccgtcggctgccggcggactgctcgagctgctcgcgcggcgagagcgggccgtcgcgtgccggccgggggacggaccgggaacggccccctcgggggccttccccgggcgtcgaacagccgactcagaactggtacggacaaggggaatccgactgtttaattaaaacaaagcattgcgatggtcctcgcggatgctgacgcaatgtgatttctgcccagtgctctgaatgtcaaagtgaagaaattcaaccaagcgcgggtaaacggcgggagtaactatgactctcttaaggtagccaaacgcctcgtcatctaattagtgacgcgcatgaatggattaacgagattcccactgtccctgtctactatccagcgaaaccacagccaagggaacgggcttggcggaatcagcggggaaagaagaccctgttgagcttgactctagtccgactttgtgaaatgacttgagaggtgtaggattagtgggagccctcgggcgcaagtgaaataccactacttttaacgttattttacttattccgtgagtcggaagcggggcctggcccctccttttggctctaaggcccgagtccctcgggccgatccgggcggaagacattgtcaggtggggagtttggctggggcggcacatctgttaaaagataacgcaggtgtcctaagatgagctcaacgagaacagaaatctcgtgtggaacaaaagggtaaaagctcgtttgattctgatttccagtacgaatacgaaccgtgaaagcgtggcctatcgatcctttagaccttcggagtttgaagctagaggtgtcagaaaagttaccacagggataactggcttgtggcagccaagcgttcatagcgacgttgctttttgatccttcgatgtcggctcttcctatcattgtgaagcagaattcaccaagtgttggattgttcacccaccaatagggaacgtgagctgggtttagaccgtcgtgagacaggttagttttaccctactgatgaccgtgccgcgatagtaattcaacctagtacgagaggaaccgttgattcacacaattggtcatcgcgcttggttgaaaagccagtggcgcgaagctaccgtgtgccggattatgactgaacgcctctaagtcagaatccaagctagcaagcggcgcctgcgcccgccgcccgccccgacccacgttaggggcgcaagcccccaagggccacgccaccatcttccaggccttcacccccaaatgaggagttcttcaggtgttggagtgttagcaatggctgccaatggaggaagatgaaaagactgttcgtcgacgcgacttacctctcttttttgggatcggagtaggctgtgaatggtggtggtgtattgggatgtaattgtggatggagcactgcatgccttgttgattgtgtacctgtactatgatgtaaccgatgtaaaaaacaagttgatactcttttagaaaaaaaaaaaaaaaaaggccacatgtgctcgagctgcagggtcgcggccgctagactagtctagagaaaaaactccaaacctcccctgaactgaacataactgatgcctgttggtgtcactgttattgcgctatatggtacaatacgcattgtacaattccaataagcgtttactgctcagtcggtgcacctaagttaatggtggggcggacagcgaaatcttcgtatcacgacacgagggaggggagtaaacaggcagcaacggtggaaataagaagcacgggtttctccacttcgtgtcttctctctctttatgtttnnnnnnngnacagatatacaagcacagatagacaaagaacagtaacgaagaagaacaagcacaagacaaacaagtagtgagaaccaacaagcaagagatgagagaagagaaag

SEQ ID NO: 7655 - DNA, 1588 bp, Oryza sativa
  ref <308>: DATABASE ACCESSION NUMBER: AK105003
  ref <309>: DATABASE ENTRY DATE: 2002-08-28
gctgcggaattcctcgagcactgttggcctactggcaagaggaaaggggacgagcagagaaactggagggtgagcaaggcacacgatatcaaggagctgagggatcatctcgctgaactgaaaaggcgaaatgcgatagagaagaagaaagctgagcaggcatcacgtgatctcagagagagaacggcattgttgaatttggcttttgtcacgctgaaaaagaagcgaaatgattcatcggtgatgcacaccaatgccatgaaagcagcacagatgggtcttatggcaactacctcagagcatttaaaaatgcagtcaaaagctatgaagcaactttgcagattgttcccattgcgacgagttattaaggatggcgaacagaatgatggctacaatggtccatatgatgtaatatgcaacgctcgtctacctcgtggtctcgacccacattcagttccatccgaagaattatcagcttctttggggtacatgttacagctcctcagtattgtagttcctatcctagccgcacctgtcctccacatatctggctttggggcttcgtgttcacgtgtatggcagcgtagttcctactggagcacacgacagtcccaaagcaaagtctacccactttttatacctaggaaaaataattgctctgttggtgaggataattcatggacggaaagtggttcgggtaactttggtgttcaatctgttgattcagacaacaaatcggttcttgactccaagagaagcaatagctttaacttctctattgcatcttctcactccatggagaggcaccaagatttgcaaagaggaatatcattactaaagacaagtgttactgccattactacctattactataactcattgggtatggatgtgccatccaatctttttacttttgaagcatttgcaaagttgctccatatgctatcatcattaaaggtccttcgcacaactcttcaatcgaacgttgcttcaaggtcagagaagcaaggacagcaactaaatagatctatatggaaagcgagctccgctatctcatctaacagcagcctgatggacagtgtgaacacagctataatgcctagttctctggacaacctcctgctgaactccaacacgagcttcctgtatagcggtaaaccgacgaagcatggtggagttccagacaacattttagaaggctgggatatggtagagcgcgacgtcctaccaccaccaccgtcgcgggttgaagacgttgcgcaatgggaaagagcccacaccttcaatcgcactggctccaaaaagaagtgatggttaggcgctcatgtattctctgaagccaggctgttaatttaggacactgcaagcctctgcataggctttcagctgatcataaggtttttggttgatgtacagaactgaccataacctgtgacaatgaatatgcagagaagagggtgtaattgatcagctggcatctgtaaagcaccttcaatttgtaaatatacatgtaattgtacagtacttcctatccaataaaaaaatatagttgaaaaaaaaaaaaaaaaaaggccacatgtgctcgagc

SEQ ID NO: 7656 - DNA, 888 bp, Oryza sativa
  ref <308>: DATABASE ACCESSION NUMBER: AK105004
  ref <309>: DATABASE ENTRY DATE: 2002-08-28
agctgcggaattcctcgagcactgttggcctactggagaagagaaaatgaagtcaccatgcatcacaaattaatttgtgatgatgcaggctgcagtgcgagttaggagctcactgattggatcaatccgatgaatttgttttaccaaaggagcaactgacagattgagctggctagctgtctgggtacatatacacacgacacaaacacaaattttgacaatttaaccctttgcaaaaaatatttttacaaatgaacagctaccaaaacttatttcaaatctgacccttttgcttaacgccaaatcgtgtggcgctgaatttagacacctcagcgccaaatagtatggcgctgaatgtacgttggcacgctgacttagtctcccatccgccgtggcacggcattcagcgccagctgacgtggcgctgaggtgtctaagttccgcgccacatgatttagcgttgagcaaaaaggtcagatttgaaataagttttggcagcggttcatttgtaaaattagtttttacaaagggttaaattgtcaaaatttgtgcgacacaaacacactcacaagaagacatgaacatcaagtgaagcagggaggggcacggtttctcacctggatttgtgccatttggttgtacttgtacagagatgatctatgttgttggattgacagacaccaaggaacacatgtagtagtaaatgatttttgttttactttgtcaaagttttacacttgtattcctgacctgtttcttgtctagcacagtagtgttaagaattcagtaacctcagttgatgagattaaaatggatattggccaattaagctaaaaaaaaaaaaaaaaaaaaaaaaaaaaaaaaaaaaaaggccacatgtgctcgagc

SEQ ID NO: 7657 - DNA, 2036 bp, Oryza sativa
  ref <308>: DATABASE ACCESSION NUMBER: AK105005
  ref <309>: DATABASE ENTRY DATE: 2002-08-28
gctgcggaattcctcgagcactgttggcctactgggatgcgaacgtgttacctgcagctgctgactcgagtgtgtggctgaggcggggatcatgtcgaagttgcaggaccgccacggtggcgaggcggcggccgacgtcggccgccgagcgcgtcaccagcggctgctgctcagcttcccggtgttcccgatcgtgctgctgctcctcgccccgtgcaccatcttcttcttcacgtccggcgacgtgccgctcccccgcatccgcatcgagtacgctcgccgtgacgctccgacgatcaccgcggtggcagcggacacgtcgccgccaccaccttcaccaccgtcgtcgtcgccgccaccgttgtcgtttccgcctccaccgcctccgccatcatcaccacctccgccagctctgcctgtggtcgatgatcacagcgacacgcaacggtcgctccggcggctgcggcagctgacggacagcccgtacacgctcggcccggccgtgacgggctacgacgcgcgcagagcggagtggctgcgcgatcacacggagttcccggcgtcggtggggcggggccggccgcgggtgctgatggtgaccgggtcggcgccgcggcggtgcaaggatcccgagggcgaccacctgctcctccgcgcgctcaagaacaaggtggactactgccgcgtccacggcttcgacatcttctacagcaacacggtgctcgacgccgagatgtccgggttctggacgaagctgccgctgctgcgcgcgctgatgctggcgcacccggagacggagctgctctggtgggtggactccgacgtggtgttcaccgacatgctgttcgagccgccgtggggcaggtacaggcgccacaacctcgtcatccacggatgggacggcgccgtgtacggcgccaagacgtggctcggcctcaacgccggcagcttcatcatccgcaactgccagtggtcgctcgacctgctcgacgcctgggcgcccatggggccgccgggccccgtccgcgacatgtacggcaagatcttcgccgagacgctcaccaaccggccgccgtacgaggccgacgaccagtcggcgctcgtcttcctcctcgtgacgcagcgccaccggtggggcgccaaggtgttcctcgagaactcgtacaacctgcacggcttctgggcggacatcgtcgacaggtacgaggagattcggcggcagtggcgccacccggggctcggcgacgaccggtggccgctgatcacgcacttcgtcggctgcaagccgtgcggcggggacgacgcgagctacgacggggagcgctgccggcgaggcatggaccgggccttcaacttcgccgacgaccagatactggagctgtacgggttcgcgcacgagtcgctcgacaccatggccgtgcgccgcgtcaggaacgacaccggccggccgctggacgccgacaaccaggagctcggccgcctactgcacccaacattcaaagcccgcaaaaagaagacatccagagcagccaggcccatgtaatgacgaagatcatatcgaaaaccgtgtaattatggagatatgatactttgattaggttgtattttcgtttggagatatttcttgaatattgatgtaaaaaaaagaaaaaaaggccacatgtgctcgagctgcaggtcgcggccgctagactagtctagagaaaaaacctcccacacctcccctgaacctgaaacataaaatgaatgcaattgtagtagtaacttggatattgcagcttataatggttaccaataaaggcatagcatcacaaatttcacaattaagcattttttcaccgcgtcctagagtggttgtccaacacttcaaggatttataacggtcggatcccgggaccggtcgaaaatcactcccgggaccgcaaagacacaggcaggccaaccagaggaagagaagaacccaagggggacggacccgcagggcaccgaaaaagcgacacgagcaaccaacggagtgataagccccccgaaaacag

SEQ ID NO: 7658 - DNA, 1724 bp, Oryza sativa
  ref <308>: DATABASE ACCESSION NUMBER: AK105006
  ref <309>: DATABASE ENTRY DATE: 2002-08-28
gctgcggaattcctcgagcactgttggcctactggaatcagaaggccagaccacccccaaaacctcctcgttggccgtccagtgcggcggagagagagagggagggaggaaggaggccgccgcgcgatggggggcgacctgtacgcgctcgacttcgacggcgtcctctgcgacagctgcggcgagagctccctctccgccgtcaaggctgcgaaggtgaggtggccatgggtgtttgagcaggtcgacgctgccatggaggagtggatcgtggagcaaatgtatacccttcgcccagtggttgaaacaggatacgagaatctgttgcttgtcaggttgcttattgagattcggataccctctgcccggagatcatcggttgcagatgggcttagcatccaagaaatactggagaactggttaaaactgaagcccacaattatgagtgaatggaatgaagatagggactctctagttgatctctttggcagcataagggatgactggattgaaaatgacttgtctggttggataggtgctaacagattttatcctggaacagccgatgcattaaaattttcaagttcagaagtctacatagtcactacaaaacagggccgatttgctgaagcactattaaaagaattagcgggaatagaatttccctctgaaaggatatatgggcttggcactgggttggtgcagtattttttttattttttattttcacctgttaatcattttattgaatccgtgagtttatgctccagtccaaaggtaaaagttctccagcaactgcagcaaatgccacagcatcaaggcctgacacttcactcctgtgcttgcgctggagagctggccacttccccagtccccactgctgctgacctccgactgatcctgcacaagcttcactctgtatgtgagcttctgcggatggcgatggaagggaactatgtggcggcaatggggatgcgaaggctggagaactccatgaccttgatgccttgatggtaagcgcactgctggacaggatgaaggctgtgagcttggaggcggaggagctgttgctggtgcctctagtgttgatgaggaggttaggccattgggtttcaccaggtaggaatggacgggcacatgaggccctatgtgggtcttggtgagcaataattgagctggcgtcggctcagctcaggctctgatggtgttgatcaagctccactgcaaccaccggacagcaatggtcctgcttcgctaatcgtcacctcttctttctagaccgagctccaagtaactttcttccccttggcttgagctccaccttggtcagccaggttggaagcagtcaagcacatggaagccagaggtccacagtgccagcccaatggctgtgggtaagccaacaagaggaggttcagtgctggaggaaggagaagagtaaacttgatattttgctagggtaaatgttattagttagtgaaaggatttgcaccaaattatgtggcaaaagagcaaagccgatgaagtgtgtggcaaatataagtacgccactgacctttgtggcaaaggagcaaatttctcaaaagaacgatgttcccttgtcagatgacaataactttgtaaatcatattttgaactatttagatatattgtttacaaatgtataacatggacaaaaaaaaaaaaaaaaaaaaaaaaaaaaaaaaggccacatgtgctcgagc

SEQ ID NO: 7659 - DNA, 1722 bp, Oryza sativa
  ref <308>: DATABASE ACCESSION NUMBER: AK105007
  ref <309>: DATABASE ENTRY DATE: 2002-08-28
gctgcggaattcctcgagcactgttggcctactgggcgcgccgtggccgaggcatcatccaatcaaggcgaggccacctcgacctcgtcctcgtgccgtccgcccccttcggcgagcgcgagcgcgcgcgcgagggtgagagggagggagggagcaatgccgctggcgctggcgcagctgcaggacatcggggaccgcatcaccgaccgcctccgcccgtggagccgctccgcggagttctgggtccgcgctgccgacatctacaccagctacaaggtgtgccagctgcgcgcggggttcgtcaaggatgaggaggagcgggaggccatgtgggagcagcagcacgagcttggtgcccagaagatgtactccctctgctccgagctcggcggcctcttcctcaaggctgcacaaattctgggaaagcccgatttggcgccaatggcttgggtgaaaaggcttgtaaccttgtgtgacaatgctccagccacgcccattgatgtagttagagatgttgtggaaaaactgatgatggttgacatccggaacatgcaagcatttgcattgttcttgcagaagtatgatatcaattttgacctgtactctgcgacaaaggagatggaaaagcagatatgctatgagtttgactttgtgcgcgaagcaaaggcgatggaaagaatacgagaattcttacgcgtgaccaacaagaaaaagcctccagttatagtgcctcgtgtgattcctgaaatggttagcagggaggttttggtaatggagttcattgaagggacaccaataatgaatcttggcaatgaaatggctaaaaggggcattgatcctggtggtaagattgcaacaatggcaaagcagtaagccccttcatctcgaaagagaaaattttaacagatcttacacttgcctatggtcaaatgattttgaaggatggttttctccatgcagatccacacccaggaaacatccttatctgcaagaacacagaggcaagacttctctttctcttcctttttttggcaatggtattttcttgttgaatatagttttgtggtggcctctgttaggtagctttgcttgattatggacaagtgaaagcaatgccagaggatttacgacttgcttatgcaaatcttgtaattgcaatggctgatgatgattttttgaggactaaagaaagtttcagggagattggtattgaaacatggagtatagctgataatgagctagaagaattatttcaattatcccttagaatgtttgatactagattaccaccaggagtaactgctatgtcacccttcgccgaggattcttcactaaataaagttggagtgcagagcttccctgaagagctattttcagtgcttcgaactatacaacttttacgtgggttgactgttgggatgggcctcagattctcatgtgctcagcaatggaagcctattgccgaggaagctttgttgaagtctgggagactaaaagctgcaagatcaagaaggccgcggagaagttttgtcaggagactgttttcgagtgacaacgagaaccaaggaacatgatattacaattgtttcatataacaaatatcatgtattttgaagtgacattaataacaggctcaagcccaattttttatgatgcatatatgcatataagactacacaaaaaaaaaaaaaaaaaaaaaaaaaaggccacatgtgctcgagc

SEQ ID NO: 7660 - DNA, 2062 bp, Oryza sativa
  ref <308>: DATABASE ACCESSION NUMBER: AK105008
  ref <309>: DATABASE ENTRY DATE: 2002-08-28
gctgcggaattcctcgagcactgttggcctactgggtctaacaagaggtggtgtcagtaaggcatcaaggagtatcaacttgagcgaagatatttttgcaggctataattcaactctccgtggaggaaatataacacatcatgaatatgtgcaagttggtaaaggaagagatgtagggttaaaccagatctctaagtttgaggctaaggtggccaatggaaatggagagcagactcttagccgtgatatctaccggcttggacaccgcttcgatttcttcagaatgctttcatgctacttcactactgtgggattttatttcagtactctgctgacagttgtcacagtttatgtatttctgtatggacgcctttatcttgctctcagtggacttgaagaagggcttttaacacaaaggagatacattcataaccacccccttcaggttgctcttgcctcacaatctctggttcagctaggttttctgatggccctgcccatgatgatggaaattggccttgaaaaaggatttggtcaagcactaagtgaatttatcatgatgaacttgcaattggcagctgtgttctttacgttttcacttggcactaagactcactactatggacgaatgttgctccatggaggtgctcagtacagagctactggtaggggctttgttgtctttcatgctaagtttgcagagaattacaggctttattctcgcagtcactttgttaaaggcattgagttgttgattctgctcatcatttaccaactatttggtcaatcttaccgctcaaccattgcctatatttttgttacattctctatgtggttcctagtgttgacatggctttttgcacccttcctgttcaatccatcgggatttgagtggacgaaaattgtggatgattggtctgattggaataagtggatcagcaatcgtggtggcattggggtgtcaccagacaagagttgggaatcctggtgggagatcgagctagagcatttgaaatattctgggacaattggactttttgttgagataattttgtccctgaggtttttcatataccagtatggccttgtttaccacttaaatatcacaggcgacaaaagtatattggtatatttaatttcgtggctcgtgattttggtggtattgcttgttatgaagactgtatctgtcggaaggcggagatttagtgcggattttcagctatttttccgtctgattaagtttatgatatttgtttcgttcatcgccatcttgattgtactgatagcaatacttcatatgaccttacgagatatatttgtgtgctttctggcattcttaccttccggatggggaatattgctgattgcacaagcttgcaagcctcttgctcggcgagcagggctatggggatctgttcgtgcccttgctcgggcatacgagataattatgggagttcttctctttacaccaattactattttggcatggtttccctttgtgtccgagtttcagacacggatgctatttaatcaagcgttcagtagaggactgcaaatctctcggattcttggtggtcagaagaaggagcgggagcggtcctctcgcaacaaggactgatcttctctacccattttgtgcttgtggtcttcaagatttaagtattttggcgtatgtatgttgtaaatattccacagggcatattgtatctattgtagttacaacttcgctcaaacagtgaaatatatcctcttacttgtaacataagatgtataattggatagtgtagtgtgtaagaaacgccagcatgtcaattccgtgtgtaaataccgtatttgcttatacgacctttagcaatgatcagggttcaggacattagttcttaattacttttatggagttcatgtgtataaatttgtattattctccacagataaatagttaaatctgtactaatatcgctgaacggctatacccgtgcatcccgcatttcaattgaattcttggttcgcatgaacaagttgagcagaaaaaaaaaaaaaaaaaggccacatgtgctcgagc

SEQ ID NO: 7661 - DNA, 1526 bp, Oryza sativa
  ref <308>: DATABASE ACCESSION NUMBER: AK105009
  ref <309>: DATABASE ENTRY DATE: 2002-08-28
gctgcggaattcctcgagcactgttggcctactggttatagtttgtttgatggtacgtgctactcggataaccgtagtaattctagagctaatacgtgcaacaaaccccgacttccgggaggggcgcatttattagataaaaggctgacgcgggctccgcccgctgatccgatgattcatgataactcgacggatcgcacggccctcgtgccggcgacgcatcattcaaatttctgccctatcaactttcgatggtaggataggggcctaccatggtggtgacgggtgacggagaattagggttcgattccggagagggagcctgagaaacggctaccacatccaaggaaggcagcaggcgcgcaaattacccaatcctgacacggggaggtagtgacaataaataacaataccgggcgctttagtgtctggtaattggaatgagtacaatctaaatcccttaacgaggatccattggagggcaagtctggtgccagcagccgcggtaattccagctccaatagcgtatatttaagtacaccaaggcaacacacactaatacacaatcaaattaattccgagttctaattaacgtacgtaaaagaaggagaagagatggctgcttctcgccgcgtcgcgatctccctcctcctcctggtcgcggccatggcgagctccttctccttctccccgtgcaccgcgcagtcgtcgtcgtcatgcgcgagctacaccttctccagcaaccagcagtacggctcgtgcgccaccctgccgcgcctgggcgccacgctgcactacaactacacggcggcggccagcaccgtcgccgtcgcgttccgcgcgccgcagccggcgggcggcaaggggtgggtggcgtgggggatcaacccgagcggcagcgggatggtgggcacccaggccgtggtggcgttccgccactccaacggcagcctcgtcgcgtacccgacggtgctcggcagctacgcgccgtccatggcgcccgcggcggccaaggacctggccctccccgtctccggcgtgtcggcggaggagaacggcaaggcgaaggaggtggtggtgtacgcgacggtggcgctgccggccgggaaggggaccaagttcaaccacgtgtggcagcagggcagctcggtggccggcgacgtgccggcggcgcaccccacctccggggacaacgtcctctccgtcggcagcatcgacttcagcaagtgatcgatcgtacatatatactggtatatacgtacacttgttcgatcgtatacgtacgtacgcccggctgcttgtaatgttggtatacaagtatattcatgtacacatgtgttaattatttatgcttctggtagatcggctcccattagatgtgtggagtatatgtatgatgattatgtcagtgagactccatgtatgtattgtctatatatatgtacagccggaaagtttgcaatgtactatttcttcccttgtttgtgtttaaaaaaaaaaaaaaaaaaggccacatgtgctcgagc

SEQ ID NO: 7662 - DNA, 1225 bp, Oryza sativa
  ref <308>: DATABASE ACCESSION NUMBER: AK105010
  ref <309>: DATABASE ENTRY DATE: 2002-08-28
gctgcggaattcctcgagcactgttggcctactggcctccccgcttgaagggaaagtaagaaagaaagaaaagaaaaaaaaaaggaaaatcgtgtctcgtctcgtctcgtcttcgtctcccccgattcccgagcagcttctcgaaaccctcgcggcctcgattccggcgatggcggagcccaacccgcaagtggagagggaggtggaggtggaggaggtgaggaggccgaagctgaggtacttggagttcgtgcaggtggcggcagcgcaggcgacgatctgcctcgcggggctctacgcgcttgccaaggaccacgccggcccgctccgccccggcgtcgacgccgtcgagtccgccgtcaagggcgtcgtcggccccgtctacggccgcttccatggcgtccccctcgacgtcctcgccttcgtcgaccgcaaggtggatgacacggtgcaagagctggaccgacacctcccgccgacgctgaaggccgcctccgccaaggcttgcgcggtggcccgcggcgtgccggacgtggcgagggagctcaccgcggaggtgcagcagtcgggcgtcaccggcgccgcgcgcgtcgcgtacgccaaggtcgagcccgtggccaagggcgtgtacggcaggatccagccggcggccaaggacctctacgtgcgctacgagccggcggcggagcacctcgccgtctccacctggcgctcgctcaacaacctgccgctgttcccgcaggtggcgcagatcgccgtgcccaccgccgcctactgggccgagaagtacaacaaggtgatcgccgccgcggccgacaagggttacaccggagcacagtacctccccgccatccccaccgagcgcatcgccaaggttttcggcgagttatcgccggaggcccagccgtcgaagagcgagtcggcgaagacccagtaggtgaggtcaccgcgcctgaaggtgagaggtagccttcgcctgaagtcctgaactgaataagtaagagtggggcgcttatggcagcagaaaaatggtgttttagatgtatgcatgtgacgacattttcgtggatgatgatgttctacttagctcttttactttgtgttgtggcgtacgtttaatcctcctggttttgtataaaagctgtggttgatgtcgcaatcttttagctaatccagtgcaattaggcttgaaaaaaaaaaaaaaaggccacatgtgctcgagctg

SEQ ID NO: 7663 - DNA, 1453 bp, Oryza sativa
  ref <308>: DATABASE ACCESSION NUMBER: AK105011
  ref <309>: DATABASE ENTRY DATE: 2002-08-28
gctgcggaattcctcgagcactgttggcctactggagaattcagcgagagagagcgaatcagccactgcacttcttgttcttgttctcttcctcctcccgaatccgatccatccattggccgctgccgccgccgccgcctcgtgcgtcgcgtgttcgtgtccagagacgatgggcagcctcgccgccgagaagaccgtcaccgggtgggccgccagggacgcctccggccacctcaccccctacaactacaccctcaggaagactgggcctgaagatgtggtggtgaaggttttgtattgtggtatctgccatactgacatccaccaggccaagaaccaccttggtgcttccaagtaccccatggtccctggccatgaggtggtcggcgaggtggtggaggtcgggccggaggtgaccaagtacagcgccggcgacgtcgtcggcgtcggcgtcatcgtcggctgctgccgcgagtgccatccgtgcaaggccaatgtggagcagtactgcaacaagaggatttggtcctacaacgacgtctacaccgacggccggccaacccagggcggcttcgcctccgccatggtcgtcgaccagaagtttgtggtgaagatcccggcggggctagcgccggagcaggcggcgccgctgctgtgcgccgggctgacggtgtacagcccactgaagcacttcgggctgatgtcgccaggtctccgcggcggcgtcctggggctcggcggcgtggggcacatgggcgtgaaggtggccaagtcgatggggcaccacgtgacggtgatcagctcgtcggcgaggaagcgcggcgaggccatggacgacctgggcgccgacgcctacctcgtcagctccgacgcggcggcgatggcggccgccggcgactcgctggactacatcatcgacaccgtgccggtgcaccacccgctggagccgtacctggcgctgctgaagctggacgggaagctgatcctgatgggggtgatcaaccagccgctgagcttcatctcgcccatggtgatgctcggccgggaggccatcaccggcagcttcatcgggagcatggccgagacggaggaggtgctcaacttctgcgtcgacaaggggctcacctcccagatcgaggtcgtcaagatggactacgtcaaccaggccctcgagcgcctcgagcgcaacgacgtccgctaccgcttcgtcgtcgacgtcgccggcagcaacatcgacgacgccgacgcgccgcccgcctgatcgccgccgtgcaccctcatggcagcatccgtatgatccgttcttgaacttgtttgtgtgagactctgacgacttgtccatgtaacgtccgtgtgcctttccggtataaattcggcctcgcaatatatggaccattttgcatttccgatcaaaaaaaaaaaaaaaaaaaaaaaaggccacatgtgctcgagc

SEQ ID NO: 7664 - DNA, 1317 bp, Oryza sativa
  ref <308>: DATABASE ACCESSION NUMBER: AK105012
  ref <309>: DATABASE ENTRY DATE: 2002-08-28
agctgcggaattcctcgagcactgttggcctactggaaagagaaggatagtggcttggtgcaagtgcgatcccccccccccccccccacatctcccgcagagtccacggccgatccatcccctcgtgcaggccgccggcggcggggaggaggaggaggaggcgatggcgtcgtcgcaggccaacctcgacaagatgcagctccgccagagctaccgcaacctctggcactccgatctcaccagcaccatccaggccgacttcccatattgctgcctcgcgctctggtgtggaccatgtgtgtcatacatgcttcgcaaaagggctctgtataatgacatgtcaagatatgtctgctgtgctgggtacatgccatgcagtgggaagtgtggtgaaagccgatgcccagagttctgtcttgctactgaggtgtttctgtgctttggtaattcagttgcttcaacccgcttcttgctccaagatgaattcaacatacagacaactaaatgcgataactgcatcattggcttcatgttctgcctccaacaaattgcttgtatcttctctatagttgccgctattgttggtagtgaagagctttcagaggcttcccaaatcctttcctgcttgtctgatatggtctactgctcggtttgcgcctgtatgcagacccaacacaaaattgaaatggacaagagagatgggaagttcggcccacagcccatggcagtgcctccaatgcagcaaatgtcgcgcatcgatcagcctattccacctcctgttgggtacacaccacaacagccagcatacggtcagccttatggtggctatcctcctgctccgcctgctcaaggttatccaccagctgcttaccctccggcaggttacccccagggtggtgcataccctccccctggctcttatcccccacctggttcctacccgcctcagggctcctaccctcctccacaaggttactacggcaagtaaaggaaatgcagaaattggagatatgtctttgtgacgaaatcggtatattgtgaacaatgtaaacattagggtggttgtagtgttattataggtgatgtcgatatattaatcgatctgtgactggtctgggtggtaaactgcaaacataatttggattcctccgggtgtggtatactgtgaacccgtttcgtagaaattatcagctccccgtgttgatcattcttgaatacgttcttctctgaataaaggatcgccatgaaatgtcaacttaaaaaaaaaaaaaaaaaaaaaaaaaaaaaaaaaaaaaaaaaggccacatgtgctcgagc

SEQ ID NO: 7665 - DNA, 1332 bp, Oryza sativa
  ref <308>: DATABASE ACCESSION NUMBER: AK105013
  ref <309>: DATABASE ENTRY DATE: 2002-08-28
gctgcggaattcctcgagcactgttggcctactggattaaaacaaagcattgcgatggtcctcgcggatgctgacgcaatgtgatttctgcccagtgctctgaatgtcaaagtgaagaaattcaaccaagcgcgggtaaacggcgggagtaactatgactctcttaaggtagccaaatgcctcgtcatctaattagtgacgcgcatgaatggattaacgagattcccactgtccctgtctactatccagcgaaaccacagccaagggaacgggcttggcggaatcagcggggaaagaagaccctgttgagcttgactctagtccgactttgtgaaatgacttgagaggtgtaggataagtgggagccctcgggcgcaagtgaaataccactacttttaacgttattttacttattccgtgagtcggaagcggggcctggcccctccttttggctctaaggcccgagtccctcgggccgatccgggcggaagacattgtcaggtggggagtttggctggggcggcacatctgttaaaagataacgcaggtgtcctaagatgagctcaacgagaacagaaatctcgtgtggaacaaaagggtaaaagctcgtttgattctgatttccagtacgaatacgaaccgtgaaagcgtggcctatcgatcctttagaccttcggagtttgaagctagaggtgtcagaaaagttaccacagggataactggcttgtggcagccaagcgttcatagcgacgttgctttttgatccttcgatgtcggctcttcctatcattgtgacacgccgctgggcaagttcatggacgagcgcgacgccaagatccgtgccgagctcggcggcgtcaaggacgcgtccgaggaggtgcggcagctggaggagcaggccgccgccgtgctgaaggcggcacgcgccgagatcgccgcggcgctcaacaagatgaagaaggagaccacccaggagctggaggcgaagctggacgaggggcgccgccgcgtcgaggccgagctcgtggaggcgctcgccaacctcgaggcgcagaaggaggaggccgtcaaggcgctcgacgcccagatcgcctccctcagcgacgagatcgtcaagaaggtgctcccatccgcgtaatggccgccccgccgccggccgttcttgcctcccaaacaccaaccatctctcgtaaagattttctccgtgttttatccgtgtgtatacgctgcttctcctaagaatgtaatttcagtgaacttctcgtgataagtataaaatcaatgatccttttgctagaaaaaaaaaaaaaaaagaggccacatgtgctcgag

SEQ ID NO: 7666 - DNA, 1934 bp, Oryza sativa
  misc_feature (1702)..(1702): "n"=any one base of a, t, c, or g
  ref <308>: DATABASE ACCESSION NUMBER: AK105014
  ref <309>: DATABASE ENTRY DATE: 2002-08-28
gctgcggaattcctcgagcactgttggcctactgggcaacacagaattccccaattccccttctcccatcccaggaggagccgccggaaccctcaccgtccccccaagatccaaccaatctaccggtagacccggtgttgtgccgtgatggatccattaggcggtcgccgccgccgtactgctgcatctgagagtggaggaggatggatgaagggttgtaccagtgtgagggcgagagatacgaggagcaggaataggaagaggaagaggactgtagtaccacctgcagcagctacttttcctgatctgctgccggaggagattgtggtggagattctggctcggctgcccgtcaaatccctgctacgcttcaagtccgtctgcagagggtggcgtgcaatcatctccgagccatccttcatccgaacgcaactccagtgctcggcttctaaacaggagccatccatcctcatcagcccccacaccctccttgggcgttgcgatattcaacccccagttggaggactaggtgattggcccaacaacttctccacccaaatcagcttctaccaatggcagcgaggtgcctccattgccaggttcatggatgccacggccttccctgccaacgagttccacctcgtctgccacttcgcccactgcgatggcctagtgctcgcccccacagacaccaacctctacctcttcaacccggccacgagggacaccatcactctccctgacggccatggtgataaccaccaccatggcacggaaatggaagcttgctacgctgcagggctaggcctagatcctgtcacacgcaagtacaaggtggttcgagcattctaccgttcaatggaccccatccgcatggggatggaggtgttcaccgtcggtgaaacgggcgcaggctgtggctggagggagaccgtcactgatcctccctaccctgtcagtagatggctcactgccttcactgtcaatggtggctacttgttctggtacatggatcggtttcgctaccctaatgacactctccatggtggcctcctttggtttagcctgcaagaccaagcgttccgcgtcactcttcttcctcattcactggaccctgccctagatgacaaggtcaggccggacgtgctacacggcgaattgtgcgtccttcatgccaacagtgacaccatgcctgtgacgatttggacgacaaattcgccgtcttttgatgattgggagcggcgatactgcatctatgtctcgagactttgccatccaatgggccttcttggtgatggcgggatgttgctgtgggcaaaacacaccatccaccgctacgacctgtggagcgatgagctgacggccgtgtgcgagctgggtggcatcaggtatcagggtggtaggccgccaaggtggaagaatctcttcaacttcagcgtaatgccatacaccgagagtcttgttagaatcactgctgctgcttaaggcatccggaatccggatcctataggcttgtacttaatgtatatctcactctatttatcacctaaatacagtgcaattgccaggatctgatactgacagtgactgttttgcgtgttgtattattaatttatctgtttactactgaggtactggctaaagttattttgcaaaaaaaaaaaaaaaaaaggccacatgtgctcgagctgcaggtcgcggncgctagactagtctagagaagaaactcccacacttcccctgaactgaacataaatgatgcattgttgtgttacctgttttggccgtcatatgggtccaatatgccctgcttcctaattcccagtaagcatttctccctggtctcacttggtgggcacccgcactgtttataagtgggtcaccgggcgagcgaatattcactccgggcaccccaataactggccgcgactgtg

SEQ ID NO: 7667 - DNA, 1915 bp, Oryza sativa
  ref <308>: DATABASE ACCESSION NUMBER: AK105015
  ref <309>: DATABASE ENTRY DATE: 2002-08-28
gctgcggaattcctcgagcactgttggcctactggatcacttccctaccactccactactagccactggccattgctcctctcctcccactcttcttctccatctcctctcctctcttctctcattctcttccctgcaacttgcaaacagtgctctgcagaatgaccaaagatgaggatttcaagctggtcaagatccagacccatgtactgagggtgaacatacactgtgatggctgtaagcacaaggtgaagaagctgcttcagaagattgaaggcgtgtactcggtggccttagatgtagacaaccataaggtcacagtgactggcaatgtggactccgatacattgattaggaagctcaccagaggaggtaagcatgcagagctgtggtcacagcagaagggtggcagcaaccagggccacaagggcagcaacaaccagcagaagcagcagcagcagcaagggcagcagcagcatggacagcagcatcagaagcaaggtgccaacccaagcaaggatggcaacaagaacaacaacatcctcaaggaccagggcaagcaaggaggtgttggaggcctcatccagggcctcaaggccttcaagaaccagcacagcaagaaccagctccctgagcttgattcagaggatgatgacttgtatgatgacgaagacgatgagtttgatgatgactatgaggacgatctccgctttcttggagacaagatgagccagcttggtttcctcaggcagcaagctgcagctgcagcggcggccaatgtcaagaacaagaatgccaacactgccaccgtcaacaaccaccacaacaacgtcaatggcaagaaaggtggtggcggcggtggcagtgctggaggtggaaatcaccatcagaacaaccaccaccagaaccagaagaatcccaatgtgatcaacatggcagcagccaatgccaagatggccaatggtgcccagaagaacactggcgccatcaatggaatgatgggcctcaaccatggcctcggaacagccggtgccactcctggttttcagggctacaccggcttcaaccacccgtcctatgcttctgccggctatggagggcttcaacaacagcacctccagcaacaacagcagagcaacaatctcatggcaagcatgcagggttaccatcatcacccagcagccacggcggcgatgatgaacaacctgaggggtctaaacaacaacatgatgatgatgcatcagccacaacagcagccacagatgatgtaccaccggtctcctcagattagcccttacaccgcctactacaacccttacagctactactaccaccctggcgccgccggttatcatcccgccagcaatggcgatgtggagaccatgttcagcgatgagaataccaagggttgtgttgtcatgtagtagggatgctgttacagtgttacaatgtagaggttggtgatgaagcatgggaatggttatgcaatcctactgtttttttcttcttctttttcttcattgtttttctgcttttattggtttctcctgtatcaagaatgaatcatgcatgttgacttagatgtcgtgtttgaaagtagtagcacttcagaggatgatcaaaagtgtaatgtaatagttttaccgcctaaaaaaaaaaaaaaaaaggccacatgtgctcgagctgcaggtcgcggccgctagactagtctagagaaaaaaactcccacacctccccctgtaactgaaacattacatgaatgccactggtgttggtaactgtgttatgcgccttatactggtacaactaagcaatagctttccaatttcacaattaagcattctttcccgcactcaagatgtgtgtgtgcccaccatacgggttctatcagtcgggaccccgggcccggcccatt

SEQ ID NO: 7668 - DNA, 1603 bp, Oryza sativa
  ref <308>: DATABASE ACCESSION NUMBER: AK105016
  ref <309>: DATABASE ENTRY DATE: 2002-08-28
gctgcggaattcctcgagcactgttggcctactggaatgaacatgccacctttagcagaatgaaacaagacagaaacgttacaaggaaatgagcatcgatggagtcacaggggattaccaaacccaaattgacatcaatcttctcgccgaccaactagaggcaaaactatgcgacgttcctttggacgacggcggccggcgacacggctcgccggagtgccacatttccatcgtgaagccgcaagtccgcctcgtcgacgtatcgcagtacgctccgcaggtgctgctcgtcggcgcctaccaccacaggtcgctggaccggtgtgagctggacaagctggcggcgctccggcgtgccctccccgacggcgacgacgagcgggcgtccacgctgaggcgctacctggcggccatcgccggcctcgaaagcgaggcgcggagctactaccgcgatgacacggatgacatgggcgcggaggagtttgcgttgatgctgctgctcgacgggtggtacatactccactacttcggcgtcggcgtcggcggcggcgggagagcggtggacatcttcgccgtgcgcgacgtgttctacctgctcgagaaccagatacccttcttcatcctcgagaaggtctacgagctgatccactctccccctccttctccgggagctacagccatcgccggcggcgggtcgtcgtcttcctccgtcgtggttgtcgatgggttcgtgcgccatctccggtcactcctccgagaccagggctactcgaatctggaggtggacatcaccagcacacgcccctgtcacctcgtccacttactccacatgcacttcacacccatggcgatggcgccggccgccgacgacgctgccgctgtccccatccccaccaggcgcgcgcgcgccaccgtgtaccgctggcgcggggcgacgcagtaccacgccgccggcgtgaggttcaagagacgggccctcggcctcggcgacgcacggtgcgtcctcgacgtggagctccggcggctgacgctgcacgtcccgacgctgacggtggacaacaacacgtggcgggtcctgcgcaacctgatggcgctggagcagaacaacccaaacctgggcagccacgtcacggcctactgcctcttcatgtcgcatctcgccggcacggcgaacgacgtcgcgctcctggcgagcaaaggcgtcgtcgtgcacttcatggggtgcgacgaggacgtcgctaagggattcgccggcctgtgcaggggcgtggcgctcagcgtcgacgacgcgcgccagaactacctgcagccgacgtgggagaagatggagcggcggtacagcagccggccagtcaactggatggcgctgctgcggcggcggcatttgagcaacccgctggtggcgaccgcgctgctcgccgccattgttggcctagtctgtgaagttcttcaggctgtgtatgccgtcaagagctacaagactagaagctaagccactgagacgtatgcccctgtatgcctaccgattttacgttcattatcgaagtaccaatcattctccgctgcaaaaaaaaaaaaaaaaaaaggccacatgtgctcgagc

SEQ ID NO: 7669 - DNA, 1783 bp, Oryza sativa
  ref <308>: DATABASE ACCESSION NUMBER: AK105017
  ref <309>: DATABASE ENTRY DATE: 2002-08-28
gctgcggaattcctcgagcactgttggcctactggagctcaacctcacgctcaagctgcatctctctctctctctctctctctctctctctctctcctccagctccggcgaccatcctgcccgccgccattcgccggaagagcccaccagctgcaccggcgtggcatcgtccacttggcgagagtggcggagctagatcggctatcgatatatacataggtggtggatgcgtgcgtgcgaggtggtgagggtgagatgaggtctccggtgggccgcagggaggtggtggtctccggcgtcttcaccgcgctcctcgtcctctccatcctctccctcccgtcgctcctcctcaccggcccggcgtacaagagctggccgttcttggcggcggcgagggacgactccaccaccgggagcggcggcggcgcgggttactacccggtgtcgttcgcgtacctcatctcggcgtcgacgggcgacgcggcgcgggcggcgcggctgctggcggcgctgtaccacccggccaactgctacctgctccacctggaccgggaggcgccggcggaggagcaccggcggctggcggagctggtgtccgggcagcccgtgtacgcgcgcgccgggaacgtgtggatcgtggggcgccccaacctcgtcacctaccgcggcccgacgatgctgtccacgacgctgcacgcggtggcgatgctgctccggctcggccgccggtgggactggttcgtcaacctcagcgcctccgactacccgctcgtcacccaggacgatttgatggatgtgttctccaggttgcctagggatctcaacttcatacagcataccagccaccttggctggaagataagagggcgcggccggtgatcctcgacacggcgctgtacgaggccgaccggtcggagctcatccgtccggcgaacctcaccaccaaccggcgaaatctccccaccgccttcaagctcttcacaggttcagcgtggacgatgatgtcgcggcagttcgccgagtacttcaccgtcggctacgacgacaacctgccgcggacgctgctgctctactacaccaacttcgtctcctcgccggagttctacttccagacgctggcctgcaactcccggcggttcaggaacaccacggtgaaccacgacctgcacttcatccggtgggacagcccgcccaagcagcacccgctctacctcggccccagggactaccgccggatgctgctcagcgccgcgcccttcgccaggaagttcagggaggacgaccccgtcctggacaggatcgaccgggacatcctccgccgcgacggcgccgccccgggccgggctttcgcctacggcgggtggtgctccgaggggggcgtcaggctgtgctccaacccgcaggaggccgggaggaagggcatgataaaggccggtgcagggtccaggaggctcagggccatgctcaacaagatgatgaatgcgagaaatttcaggaggcagcagtgtaggtgaaactagaggcatttttatatacagtctaattctgatgatcagtgtgtgtgttcatgtatataatagaggagaaatcgaattacaggaagaatttgaggcagttttggttgtctggagggaggttaaaagtagagtgacagtgtaatctcacagaaataagaacatgggggtcattagtaaggttgtaaaaaaattgacaggattaacgttcagcttgtgccttggttggttcttaaaaaaaaaaaaaaagccacatgtgctcgagctgc

SEQ ID NO: 7670 - DNA, 1679 bp, Oryza sativa
  ref <308>: DATABASE ACCESSION NUMBER: AK105018
  ref <309>: DATABASE ENTRY DATE: 2002-08-28
gctgcggaattcctcgagcactgttggcctactgggcgcctatttattgcggcctcttcttcctcctctcctcgcctcgcctcgctcttccactgttcatctgcgccacgacacgacacgacacgacacgagacgagagaggagtcggcaatggcggaggggtcgcggtcgccgctgaggtcgttcgtggaggtggcgccggggtcgcacttccccatccagaacctctccttcggggtcttccgccgcaggggctcgccggagccggagccgccgcgcccggccgtcgccatcggggacttcgcgctcgacctcgccgccgtctccgacgcgggcctcttccacgggcccctcctctccgcctccccctgcttccgccaggaaacgctcaacatgttcctggggatggggcgtccggcctggaaggaggcgcgcgccacgctgcagaagatcctctcagctgatgagccggttttgcgtgacaacgaggccttgaagaagaagtgccttgttcccatgagcgacacagagatgcttctgccaatcacggtaggagactacaccgacttcttttgttctgtgcaccatgcaaggaattgtgggttcatcttccgtgggccacagaccccagtcaacccaaattggtttcagcttccagtaggttatcatggtcgtgcatcctctgtgattgtatctggaacagacatcattcgacccaaagggcaaggccatccaacaggagattctcgaccttattttggtccttctaagaagcttgattttgaacttgagatggcagccattgttggaccagggaatgaattgggaaaacctatcgatattaatgatgctgaagaacatatctttggcctaatgataatgaatgattggagtgccagagatatccaagcttgggaaactatacctcttggacctttccttgggaaaagtttcagtaccacagtatcaccctggatcgttactatggatgccctaaagcctttcacctgtgaagctcctaagcaggaacctgaacctttgccttacttagctgaaaagaaccacgtaaactacgatattcctcttgaggtctggattaagcccaaggagcaaagtgaaccatcaatggttgcaaagagtaacttcaagcatctgtattggactttaacacagcaactagcacaccacactgttaatggatgcaatctgagaccaggggatatgtttgcaactggcacactaagcggacctgagacagaatctttgggatgtttgctggagctaacatggaatgggcagaaggagatatcagttggaaactcgacccgcaagttcctagaagatggggatgaggtcatcttgacagcttgttgcaagggtgaaggctacaatgtcggattcggaacctgcactgggaaggttctgcctgcacttccatgatccaacatatagaggatagcctgctttcatctcatcagtgtgtcaataatctctgaagaaagcatgcaatgaggcaatgtatctagctagttacatctatattttagtgcttagtgatggtaaaaatactaataaggtatgcttccctgagctttacagaagggatgtaattaatgttctccagttacaataagaacttatttgaaaaaaaaaaaaaaaaaggccacatgtgctcgagc

SEQ ID NO: 7671 - DNA, 1826 bp, Oryza sativa
  ref <308>: DATABASE ACCESSION NUMBER: AK105019
  ref <309>: DATABASE ENTRY DATE: 2002-08-28
gctgcggaattcctcgagcactgttggcctactgggcgccccagatccactcgctcgtctcgtctctccgctctcttccggacttccactagtcgcacactagcactcgccactcgccagtcgctacgactagtagctccacctctgtagcctaaagcccaccccccaacaccaccctctgtgaagtagcttgtcctcttcgccgaggccgaggtgacgcacatggcgctgcctcctcctctgctccgcttcttcatcgtcgccgtgctgctcagctcggtcgccgcatgggtggcggcggcgacgacgctgcacgagcgcgacgcggcggcgctcagggacgtccgggcggggctgcgggacctgccggggtcccggttcttcgaatcctgggatgacgccaccgacccgtgcgactatgccggcgtcgtgtgcgagcccgacgaggacgacccggccgcgctccgcgtgtccgtgctgacgctcggcaccggcctcaccgactctcccggcctggctggcacgctcccggcctcgcttgccagcctcactgcgctcacggacttcgtcctttatccaggacgcgtcgcgggagctattccgacggacattgggtcgggtctccggcgcctcaggctgctgtccatgtccggcaaccagctgaccgggcagatacccgagtccctcgccgggctgccagatctgcacacgctcgacctcggcaataaccacctcgacggctccattcccagcggcttgctgctgccgtcttcgcagagcctcaaggtgctcatcctagcgaacaatggcggcctctccgggcagattccagaccaattttccagctcacagcttttccatgtcgacctaagccggaattccatcactggctcgctcccaccgctggcgcagacagtccgctacttctccgtcgcggcgaactcaatgcaggggagcctcgacggcgcgttcggcaacggttcggctccgaccgacttggccttcctcgacctctcgatgaacaacttctcgggttcaatcccgcgggagttgttcgcgctcccgagcgcgtcgtcccttcttctgtcccgcaataacttcaccgggtccctcgccgtgccagcgttcgcatcggagcgtgccgcaacgccgccgtggtcggttgtggacgtcagccacaatggcatcacgggggaggtcccggaggagctagcggccgtggagagcctgtacgtgaacaacaaccggatgtacggcgaggtgccggaggcggtggcccgtagcgtgttcgccggccgcatgacgaccttctacgcgcagcacaacttcctgacgggcttcccggtgccgccgctgccgctgccggactccgcagcgctgtgcctctcttacaattgcatggagctaccgtccgcttctgccgccaacgggtgccccaccatcggcggcccaatggagtccaggcccgccgaccagtgccggagcagcaccgcagccaacgccggcagcagcggaggggacggctgagccgccaacattcctcaaggctgacaggtggggcccacctggttcagctcatcagctgggcacaggtgggggcgtgaggaagggacggccaggatagctaagcctggctcacacattttcgttttgtccgtttgtttcgggtgtggttttcatgtgattgggtttgaattcatcggcatccgggcttgtcgtcgggcgcgcaacggttacacggctacaaggttagcgcgttcttgtgcgtgtgtgcaattactcgctctggtaaaaaaaaaaaaaaaaaaggccacatgtgctcgagc

SEQ ID NO: 7672 - DNA, 1403 bp, Oryza sativa
  ref <308>: DATABASE ACCESSION NUMBER: AK105020
  ref <309>: DATABASE ENTRY DATE: 2002-08-28
gctgcggaattcctcgagcactgttggcctactgggaacatcaccgccacctggaccggccatgacatctgcggcaacacgacctacctcggtttctactgtgcagcattgcctgggcgtactaagaagcccacggtcactgtggtgatctttaacggttatggcctgcgtgcaccgaagctggaaggatttattgaccatctccccgatcttgcacttttccatgctgcctccaacgacttcggtggtgacatcccctacctcacaggccccgcctacaactacaagatcaatgtcgacagcaatctccaaatacaggatgattttagtcgtgacatggtcgggtcgcatgtaacaactaaagttcatggttattgcgttaatttagatctagatatcacatttcacctccggcccggaaaagacgacaagaaaggacgaagcatccccggtgccacagattctaaggcgctcctcctcaactacaatcacctgtccgggccattaccggtgaacatcggtttctccaagttaagctacctggccctcgccaacaacaggctcaccggcgcaatcccgccatcaatcttgcatttgcaagactccctcctcgaggtgctcctcctgaacaaccagctctccggctgcctcccccacgagctcggcatgctcaccaaggccgcagtgttcgacgccggcatgaaccagctcaccgggccgatcccctcctctttctcatgcctcaccagcgtcgagcagctcaacctgggcggcaaccgcctctacggagagatccccgacgcgctctgcaagctcgccgccgtcccagccggccgcctcgccaacctcacgctgtcgagcaactacttcacgtcggtcggaccggcgtgcttgtcgctgatcaaggacggcgtcctcaacgtcaggaacaactgcattccgggcttcgccaaccagcggcggccggcggagtgcgcgtcgttccacagccagccgaaggcgtgcccggcggcgagcgccacccacgtggcgagccccgccggagctgccaacgctgcggcggcgccggcggacagggtggtcaaggactactccagctacgtgacgtacgccaccctgcacgagtgagcccggcgccacggcacgggcgcacgacgtgcgtgcatgcatgcagtaggggacagctagaagctagcgtctcggggtggtatttgctcttgtattcttgtgttcgtttgttgtgctcgtgagtcgtcattgtggtttgttttctctgcacgtgtggctagctatggctgtcacgtctagatctcacctcctgtactcttgtgtactgtactatgtgaaaatcattggtgattactaaaaaaaaaaaaaaaaaaaaaggccacatgtgctcgagc

SEQ ID NO: 7673 - DNA, 1842 bp, Oryza sativa
  ref <308>: DATABASE ACCESSION NUMBER: AK105021
  ref <309>: DATABASE ENTRY DATE: 2002-08-28
gctgcggaattcctcgagcactgttggcctactggagcaaatcgcggagccaccggtctctcccacctctccctcccccgcgagcgaatggcggcgagccgctcgcgggagcggagctcgcgcacgccgctgctcaagctcaacaaagcgcgtccccgcgcccctcctcgagatgaggcctcaaaccctaagccgcgagagcaccaccaccgccaacgcccacgcccgccgccatggccgtcgtctccgagagctcgcgcaaggcgctgctgcccagcttcctgtacgcggcccctgccgcctcctcgtcgccgtcgttcgcggccgccgcagccgtgggtgtacgtggggtccccgcgccgtcgctggcggggccggcggtgtgggctcgctcgccgagagagccggcggggaagattgagatgtactcgccggccttctacgccgcgtgcacggccggcggcatcgccagctgcgggctcacgcacatgaccgtcacgccgctcgatctcgtcaagtgcaacatgcagattgatccagccaagtacaagagtatctcatctgggttcggtgttctcttgaaagagcaaggagcaagaggtttcttcagaggatgggtgcccacactgcttggttacagtgctcagggcgcgtgcaagtttggtttctatgaattttttaagaagtactattcggacattgctgggcctgagtatgcagctaagtacaagacattaatttatttggctggatctgcttctgctgaagtaattgcagatattgcactctgccccatggaggctgtgaaggttcgtgtgcagacacaacctggctttgcgagaggtttatctgatggtcttccaaagtttgtcaaggcagaaggctatgctggattgtataaagggattgttccactctgggggcgacaaattccttatactatgatgaagtctgcgtcttttgaaaccgttgttgagatgatatacaaatatgcaatccctgcccccaagagtgagtgcagcaaaccactgcagctcggtgtgagctttgcaggtggttacattgcaggggtgttctgtgcaatagtttcacaccctgcggacaatcttgtgtctttcctcaacaatgccaagggcgcaacagttggcgatgctgtgaataagcttggtatgtggggtctatttacgcgtggactccctttgcgtatcgtgatgatcggtactctcactggagcgcagtggggactctatgacgctttcaaagtgatggttggactgccaactactggtggagttgctccaacaccagccaagtgatggttggactgccaactactggtggagttgctccaacaccagccattggtgaagagcagctgaaggcctgatgcttgattctatacttccgaacttctaacaattccgtgccaacttggatgatggcgaaataggttcttagtttagaaacaaaaaggattttgttgacgaatgcttatagttcattaattcaatcgctgctaaaaaaaactgagataagcatgctcagggcttacaaattataagggtattgcggtacagagtttaggatagtagtatagatggccattcgatgaatgatgcttgcgtgaatgaccgtggcatccttcaatttttgtaggtctattttttttattgcagtagaaatgttgattacgccttgggccttggctctatcttttgctggccggttgttatcgttgtaactctccgcggtattcgttctttccttcagatgtcaataatgcaatctgtgtagtgttccattcaataaaaaaaaaaaaaaaaaggccacatgtgctcgagc

SEQ ID NO: 7674 - DNA, 1720 bp, Oryza sativa
  ref <308>: DATABASE ACCESSION NUMBER: AK105022
  ref <309>: DATABASE ENTRY DATE: 2002-08-28
gctgcggaattcctcgagcactgttggcctactggagggttccaggccgccgccctccgccagcagttccctgaccggcgccgcgacttctccgggccagtggaacgaagttgccgcatcggcgtcccctgcatcccaccgcatcgagaagggacagggttgctgagagcagcagcgccaccagcccaaccgtggtgatggcttcgtcgccggagaagaaggatcctcctagttgtggctctcgggattcccagcccatcccttgcacggacgatccccccttgtctgaatccccaacgacggacctaggctgccacgatccgcgcgacgaggacgccgaccacccggcaccacccatgggcaaaggtgacatcgacgaggatagtgatgatgatggttacgcagacgaggagacaacttgcccagggcagaacttcacgaaggagcaggcaaaggaaataattcgcaagtggctagaaacatacgacaagaggaatagagaattcatggtggcgtgcgaggagttccaaaagcagggaggggatgagacgagtgcttcttgtccagtatttcctttgaaaccgctcccggagacaacagatttctgtaccaccaagagtttgtgctatcaccgtgaatacaagaccaatgatacttctgagactgcatctactattgggtggcttgaacccaaggagatgctccagatcttctctttgaggttgtccagctccatgtcctatcctattagtgtttacggaatctttgcagtacgtgattacttggaccctttgaggaattatgtcttcaaccgtaccagagatgatcctgtcatagttgaacaggattccttcacattacctctttgcagcccttgtcgaggaatgtatgtagtagaatatgcattgtttgaggttgatctttgggtgaaaatggaaggtggagtatctaatgacaagcaattagtatccgcgtatgtcgagatttttgcccgtggcgtgtttaataaggagataagggggcggatattaagcgaccattgctatctggacatacactatatgtatctttcacagagtattgaagctgtcatacaagtatccacagagattgacagtaacgatcctcgtcatgtgagattcactgcattttgtagtggctttgaccgtgagattttgctgttcaatgggaaattctgcaaggacaagtctttccagcacattgtggcaatgaagtccaagggaaaactggttgttcacttggagtttgagggatccctgttttgctggacttttaacaatggtgagcttggagctgttaattctcccgatgattcagtcctgaagcaatttcatgtcagggtgttgttttctccaaaataatgtgtaccagcctataatagcttctttgggtgaaggagaggaagtaaatcagtataaaaagcttgatacaatgtagtgcttgtgttaagatgcttatctgggtaataaactagaccagtacttgcattcagatttgcaaattgcatccagggccgagattgttggaggcactgttcacaaggaggcttaatctttgaaacctggatgggatgtccatccatcattgtgctctagcctctaatccaaacattgatggattgtacacaatttgtgctttatgggcttaattttacctccaaaaaaaaaaaaaaaaaaaaaaaggccacatgtgctcgagc

SEQ ID NO: 7675 - DNA, 1385 bp, Oryza sativa
  ref <308>: DATABASE ACCESSION NUMBER: AK105023
  ref <309>: DATABASE ENTRY DATE: 2002-08-28
gctgcggaattcctcgagcactgttggcctactggaaaggctgaagaggcatcaaaagcattgcgcccggagaaaaatatttctggtaaacacgctgaatctgaagaactagtttttggtgaagattacgaagatttgcagaaatctctggagcaagcaaggaaattagctctaaggaaacaggaagagactgctgcatctggtcctctggctgtagcagaactggctactgcaagaataggtcaaaaagatgcagatgctgccgaaggagatgcacaacaaaataaggttgttatcacagagatggaagagtttgtgtggggcctacagttgaatgaagagactcgcaaaccagaagcagaagatgtttttatggatgaagatgatgacatgatcatgtcagacactgtggcaaaagatgacatgagtgggctggccgtggtcaaagaggaaactagcgttgaagtcccagtaaagaatgaagaggaagaagagctaaaaccagatgagattgtacatggagctgcagttggcaagggtttggctggtgctttgaagtttctgaaggaacgaggaaccctcaatgagggcacagattggggaggcagaaccacagataagaagaaaagcaagcttgctggtattgaggatggaccaaaagatattcgcatagaaagaattgatgaatttggtcgagtgatgacaccgaaggaggcatttcgggatctttcacacaaattccatggcaaggcacctggtaaaatgaagcaggaacggcgccaaaaaaagtatcgggatgagttgaaaaccaagcgaatgatatcttctgacacaccattaatgtctgcgaagaagatgagagaggctcaagctctcagcaaaacaccataccttgttttaagtggcaatgcaaaatcaggtcaaacgagcgatgccagtggctttgctacagtggagaaagagcaccctgggagtctgacgcccatgcttggggccaaaaaggtcgagcactttctgggcatcaaacgaagcgcccagggtggaggattgcctccaccacctccaaagaagccaaagaactgaacctgcagtggacttggctgagtagaaatcaggtgttttttagtgcatttgctactgtaggtttggagcagatttcgagggacctacaccagcagataccaacgacccatgaagcagccccaaatgagttaacatgtaagaacctgtgaatttttattccaagttgattatgttaacattctgacatgggcgatgtaacttttgtaaccagctgtacttacaaggctgcaccacaaatgcagtcagaactacagaggtggatttaaaaaaaaaaaaaaaaaaaaggccacatgtgctcgagc

SEQ ID NO: 7676 - DNA, 2074 bp, Oryza sativa
  ref <308>: DATABASE ACCESSION NUMBER: AK105024
  ref <309>: DATABASE ENTRY DATE: 2002-08-28
gctgcggaattcctcgagcactgttggcctactggcagaatggtttcttcaacggcttctcagtggattctatcaatactccaatggcaactaatcattatcataaccaacgttcttcaaagtttccaggagaacctcaatatcaaaagcattccccactccatggtgtgaatctgaatgatacccctcaagatgtcactgctattcaggaacagggaagtgagaattcaccggttgatatatcttggctcaggaaggaccctgtagatctgatgaagtcacaagtgcaaccaagttgtgcaaatggccaatcccagatttcattaggttccacagcttattcagaaggtagcacaagagtactcggtttccctatcaatgcagccgctgaaagaaacaccgaaccattgatcaagcgcgaagctgacatggaaatgcacaagaaagatgatgcaaatgcgaggaatctcattgacctcaatgccgcgccttccatggatgagccagacattgatgtccatcagtcagaaggtggcactgttcctcagcaaccagatgatccttctgaggactctcttgctagaactgcagcagagagcctagtagccttgtgtaaagatgtctttcaagcagggtctccccttgctgacattttgcattggttcgctgacctcgctattgcatcgaaggaggatgcagtggtctgtagtagcgaaagtgacagcgatgatgaatttgaagctttgacactgcagctagaagaaaccaaaggctatgagctctactcaacaccgaaaacaccagtagagcataagagcaatgaagaccatggctctgttgcagcctcactgcttcagacaaaacctcgaagaggccgagcacgaaagcgtccccagaagaaagatttccagaaggacattctaccaaacctcgcttcgctgtcgaagcacgaggtgtcagaggatcttcacacccttggaaggtcaacgccatcgaagcggggaggtcgaaacggatcgcagtccagggggaggcgccgagcaagaagcgtggctatcgctgttgaggaagttgaggtaagcccacctccagctccagcgccgccacctcctcccccagctgacttggacgctaatgctctcggcataactgggtggggaagaacaaccaggcgctgccgtcgaccgagatgccctccggcgaacaatgcgtcattgcgtctagcttgagagagaattttaggtgccttagctgacgggaaatgatcttgaaactgtatttttgggtggagttgcagaaaaatttgtgtccttggtagcttgacagtaatcaatcaacattgtacatgctgctcagcccctaatttggggctccagaaacctgcattggataaaaaaacatggtgtacatctctttgtttcggtataaactctgattctagatagcaatgcacctgaagaacaggccttgtgaaacctggaatatcagttgtaattagatttagctccttgaatatcagtctgtgatgtcatgttctgagttcagaaaaaaaaaaaaaaaaaaaaaaaaaggccacatgtgctcgagctgcaggtcgcggccgctagactagtctagagaaaaaacctcccacaactcccccttgaacctgaaacataacactgacttgccattgctagttgttaacctggttctattggcagcctttattatgggtaccaatacagcaatagccatcacaaattttcccaattaagcattttatcactgcatccaactggtgggttttccaactcctcagggtttcctctcctgttctggtccccgggttcgcggtcgattattctcttcgcgtccccgtccgtactcctcgcccgtcgtcgggctcgggcgcggtacccccccccagggcggaaacgggatcccccaacacagggaaacccgcaaaaaactttactaagctgacaagaggtgcggcacccgacacaagcgcgcgggagaggggacccaagcagccccctaaaagaccccacaaggcccccatcgtggagaacaaggctcaataacacggacc

SEQ ID NO: 7677 - DNA, 1551 bp, Oryza sativa
  ref <308>: DATABASE ACCESSION NUMBER: AK105025
  ref <309>: DATABASE ENTRY DATE: 2002-08-28
gctgcggaattcctcgagcactgttggcctactggacacccagtaccaagtgcacagccgcagcgccgcatcaccgccttccatttccacatctagggtttcagttgagtcgagttgagtccccctccccccacggccccacctcgccaccgccggccatgcccgacgcggcggccgccgccgccgccgcccaggacgccgacgccgtgatgcgcgacgcacccgccgacgcagcagcaggcggcggcgacaacgacgacgacgacggggatgacggcacagaagaggacgaggaggaggatgacgacgaggagggcgatgaagaggagctgccgccggccgaggatccggcggccccggagccggtctcggcgttgttgccggggagcccgaaccagctgacgctgctgttccagggcgaggtctacgtgttcgaatccgtgatgcctgagaaggttcaagctgttctgttattgttaggaagaagtgaaatgccaccaggtttagctaacatggttttaccaaatcaacgtgagaacagaggttatgatgatttacttcagagaacagacattcctgccaaaagggttgcttcactcattaggttccgtgaaaagcggaaggaaagaaatttcgataaaaaaatacgttacgccgtacgcaaagaagtggcactcaggatgcaacgtaggaagggtcaatttgccggaagagcaaatatggagggagagtccctatctccaggctgtgaacttgcttcccagggttcaggccaagattttctatctcgagaatcaaagtgtcagaattgtggcactagtgaaaaaatgacaccggcaatgcgccgtggtccagctggtccaaggactctgtgcaacgcctgcggactgatgtgggctaacaagggtaccctgagaaattgccccaaggcaaaagttgaatcttctgtggttgcaactgagcagagcaatgcagctgtctctccgagtggaatcgacaacaaggaattggtggtaccaaaccctgaaaacattaccgcaagccatggcgaagtcatgggcgacagcactccggcaaatgaagccgagataggagcgccaaaggcgcagtcacaataagtttatgtttaacctgtcatgattgaaaccaaaagattctggattctttgcctacaggctatacagctaaacatcacaatagaaggtctttttcctgaccaaagtatactgattctcctcaagtgtacaattcttgcttgccagcacatgtaaatgtaattgtaattaacataaagagcctgattggtgcctgttgtgtaaacccctcattctcatgacatctaagatagcacatcaagcagactgtcatgtacttccggctttggagctgcttctgaaggggagttgtctgatggtgcttagtgtcccttcctaactactacgcctgtaaagttgtaccaactgatccttgtacagtttgtattaatgtgtcgtctctgtctttcgttttccaaaaaaaaaaaaaaaaaaaaaaggccacatgtgctcgact

SEQ ID NO: 7678 - DNA, 1917 bp, Oryza sativa
  ref <308>: DATABASE ACCESSION NUMBER: AK105026
  ref <309>: DATABASE ENTRY DATE: 2002-08-28
gctgcggaattcctcgagcactgttggcctactgggtggctgcgtgtgcttgcgctactgcttggtctcactgtgtgaacaactgctgccgccgcctgccggcggtgtgctccggccgcgcgcggtcgtgatggctgcacggcgagcgaactgcgcgctggtgctggtgctggcgctcgcgctgttggcggcgcgggatgctggtgccgcggcggtgcccaagcccaactggctgggcgggctgagccgcgccgcgttccccaagcggttcgtgttcgggacggccacgtccgcgtaccaggtcgagggcatggcggcgtccggcggccgcgggccgtccatctgggacgccttcgcgcacaccccgggaaatgttgcaggaaatcagaatggagatgttgcgacagatcaatatcatcgctataaggaagatgttaatctcatgaaaagtttgaattttgatgcctaccggttttcaatctcatggtccaggatcttcccagatggtgagggacgagttaaccaagaaggcgtagcatattacaacaatcttataaactaccttctgcagaaaggtatcactccttatgtcaatctttaccactacgatctccctcttgcgcttgagaagaagtacggaggctggttgaatgcaaaaatggcggatctattcacggagtacgcggacttctgtttcaagacctttggcaatcgtgtcaagcactggtttacatttaatgagccaaggatagtagcacttcttggttatgaccaaggaacaaatcctcctaaaaggtgcacaaaatgcgctgctggtgggaactcagcaacagaaccatacattgttgctcataattttctcttatcacatgctgcagctgttgcaagataccggactaagtatcaggcagctcagcaaggcaaagttggaatagttctggacttcaattggtatgaagctctttccaactcaactgaagaccaagcagcggctcaaagagccagggacttccacattggttggtatcttgatccattgataaatggacattacccgcagataatgcaagatcttgtgaaagataggctgcccaagttcactcctgaacaagctagattggtcaagggctcggctgactatattggcatcaaccaatacacagctagctacatgaagggccagcaattgatgcagcagacaccgacgagttactcagccgattggcaggttacctatgtttttgcgaaaaacggcaaaccaattggaccacaggcaaattctaattggctttacatcgtgccatgggggatgtacggatgtgtggactacatcaagcagaagtacgggaatccgacagtcgtcataactgaaaacggaatggatcaacctgcgaacctcagccgcgaccagtacttgcgcgacaccacgagggttcatttctacaggagctacctcacccagctgaagaaggccatcgacgagggcgccaatgtggctggctacttcgcctggtctctcctggacaacttcgagtggctgtcaggttacacgtccaagtttggtatcgtctacgtcgacttcaacacgctcgagcgccaccccaaggcgtcggcctactggttcagggacatgctaaagcactgagaatgaaagacacgcagactgaagttgaagttgccatccattgatcatcatgttcagttctaggctgccgcttggatggcatcagagctggctatgaactatgtgatggaaataaaaggactgcaaattgattcgattatgcaattcgtgtctatgatcagaattgtggccgtctagtgaacttgtagaagtgtactcttgatgtgtgatcgatcttgagtaatcaatgtttgatcaaaaaaaaaaaaaaaaaaggccacatgtgctcgagc

SEQ ID NO: 7679 - DNA, 1317 bp, Oryza sativa
  ref <308>: DATABASE ACCESSION NUMBER: AK105027
  ref <309>: DATABASE ENTRY DATE: 2002-08-28
gctgcggaattcctcgagcactgttggcctactggctgaggaataagcatcggctaactctgtgccagcagccgcggtaagacagaggatgcaagcgttatccggaatgattgggcgtaaagcgtctgtaggtggcttttcaagtccgccgtcaaatcccagggctcaaccctggacaggcggtggaaactaccaagctggagtacggtaggggcagagggaatttccggtggagcggtgaaatgcattgagatcggaaagaacaccaacggcgaaagcactctgctgggccgacactgacactgagagacgaaagctaggggagcaaatgggattagagaccccagtagtcctagccgtaaacgatggatactaggtgctgtgcgactcgacccgtgcagtgctgtagctaacgcgttaagtatcccgcctggggagtacgttcgcaagaatgaaactctccaccacacacccatcaatccccaattcatgaagagaattctctaatccatcggagaaatcgacgtcatcccctctgccccatcgatcaccagttcgccggcggctgccttcctcttccccgacctgcgttcttccccacccaccacctgtgattgtagggttgccccgtggtggttgccgctgattatagtcgtcgtccagctatctccatcggtcaggctgtcagcgcgctggccgtacccaacaaggctcccgattgttgccctggtcgagcggctgccatctgccagcccgtctgctctggacggctgcctccatcctcggttttcttcacaaactggccagggagctttctctaggaacgatagccagggagcaacaggggcagtcctacgagatgttgatgggaggttcaaaggcggccgggctagatggcatcctcatggcctggatgctttgatgatggaggcccttgcctgccgggatgggatacaacttgcccgggagaaaggagtcttaagaatccaggtggagacggactgccaagagctaaccaaactgtggaagcagggtggctctcaaagatcgcatgttgcgtcgattatcagtgatgctatagagcttagctccagttttcatggttttactttactgtacaccccccgatcttgcaatcatgtagctcatgtattagcgaagcaagtcacggctgatgacaggctgggtgagtggcagtcagccccagcttgtatcgagcaccttgtgactgaagattgtaatcctgctgttccctgacgaatgaaatggcttcactatcggcaaaaaaaaaaaaaaaaggccacatgtgctcgagct

SEQ ID NO: 7680 - DNA, 1750 bp, Oryza sativa
  ref <308>: DATABASE ACCESSION NUMBER: AK105028
  ref <309>: DATABASE ENTRY DATE: 2002-08-28
gctgcggaattcctcgagcactgttggcctactggaccaactttgacccgtcctcctcctccgcatcccccatcccctcctccccggcggcggcggcggcgcggaggcggcggcacgggagcggctagtggtttcgtcggcggaggcggaggcggggccaagatgttcgggcgcgcgccgaagaagagcgacaacaccaagtactacgagatcctgggggtccccaagaccgcctcccaggacgacctcaagaaggcgtaccgcaaggccgccatcaagaaccaccccgacaagggcggcgaccccgagaagttcaaggagcttgcacaagcttatgaggtattgagtgacccggagaaacgtgaaatctatgaccaatatggtgaagatgccctcaaggaaggaatgggtggaggcggatcccatgttgatccatttgacatcttttcatcattctttggaccttcttttggtggtggtggcagcagcaggggcagaaggcaaaggaggggagaggatgtgatccatccgcttaaggtttctctagaagatctttacaatggtacttcaaagaagctctctctttcccgcaatgtcctctgcgccaagtgcaagggcaagggttccaagtctggtgcttccatgaggtgcccaggttgccaggggtctggcatgaaaatcaccatccgccagctggggccctccatgatacagcagatgcagcagccttgcaatgagtgtaaggggactggagagagcattaatgagaaggatcgctgcccaggctgcaagggcgagaaggttattcaggagaagaaggttctggaggttcacgttgagaaggggatgcaacacaatcagaagatcactttccctggtgaagctgatgaggcgcctgataccgttacgggagacattgtattcgtcctccagcagaaggaccactccaagttcaaaaggaagggcgatgatctcttttatgagcacaccttatctctgactgaagcactttgtggtttccaatttgtcctgacacatctggacaacagacagctgctcattaagtcaaaccccggtgaagttgttaagcctgaccaattcaaggcaataaacgatgagggaatgccaatgtaccagaggcctttcatgaaggggaagctctacattcatttcacggtggagttccctgattccctggcgcctgaacaatgcaaggctctcgaggctgtgcttccaccgaagcctgcatcccagctgacagaaatggagatagatgaatgcgaggagaccacgatgcacgatgtcaacaacattgaggaagagatgcgcaggaaagcccaagctgctcaggaggcgtatgatgaggacgatgagatgcctggaggtgcccagagagttcagtgcgcgcaacagtaagcagagtatgtcatctaggaaactcgtcattggttcacaaatcaacgtcgtcgcaaaggtttgccgtaaatttttggacccaaagatgattgtgctctgtttcccgttgcggcgaacatgaagatagtgaagctgattttacaccccttaagccgggactgtatcccttttgtttgcgacttaaaaaatgctactcgtatctagtaatagctggctacgttttactatgctgtgagactcgtagagttttacctcctaaaaagaaactcggtatgttgtgaatgccaaaaaaaaaaaaaaaaaaaaaaaaaaaaaaggccacatgtgctcgagc

SEQ ID NO: 7681 - DNA, 1368 bp, Oryza sativa
  ref <308>: DATABASE ACCESSION NUMBER: AK105029
  ref <309>: DATABASE ENTRY DATE: 2002-08-28
gctgcggaattcctcgagcactgttggcctactggaaccgcagcagttgtctcgtctcgtcagttgagttgagtagtgttgacttgagattcatcacatctgagtgagtaagagtttggaaaatgggcggcggaggagacggcgaactgtccccggcggaggccaggctggcgatgatggagctcgccaacatgatctccgtccccatggcgctcaccgccgtcatccgcctcggcgtccccgccaagctctgggcgggaggcgccaacgccccgctcgccgccgccgacctcctccccgcgggccacccggacccctccgtcctcgagcgcctcctccgcctcctcgcctcccgcggcgtcttctccgagcacaccggatcatcctccccctccccgcgccgcttctcgctcaccgccgtcggccgcaccctcgtccccggcggcggcggtagcccctccggctccggcgcgtcctacgccgactacgttctgcagcaccaccaggatgcgctcgtccgcgcctggcccctcctccacgaggccgtcctcgacccctccggccccgagcccttcgcccgcgccaacgccggcgtccccgcctacgcctactacggcaaggacagggaggcgaacgaggtgatgctccgggcgatgacgggggtgtcggagccgttcatggaggcgctgctggagggctacggcgacggcgggttcgagggggtgagcacgctggtggacgtgggaggcagctccggcgcgtgcctggagatgatcatgcggcgggtccgcaccatccgggacggcgtcaacttcgacctgcccgacgtcgtcgcggcggcgccgcccattcccggagtgaggcatgttggcggggacatgttcaagtccatcccctccggtgatgccatcttcatgaagtgggttctgacgacatggacgaacgaggagtgcacggcgatcctgagcaactgccacaaggcgctgccgggcggcgggaaggtgatcgcctgcgagccggtggtgccggacacgacggacggcagcacgaggacgagggcgctgctggagaacgacatcttcgtcatggccacctaccggactcagggcagggagcgatccgaggaggagttccgccacctcggcctcgccgccggcttcgcctccttccgggccatctacctcgaccctttctacgctgtcctcgagtacaccaagtagtagtcattcattcatgctgcatcaatttgctgctgaaatcaacaaccacgtttccttccttttctttttggtctcgtgacactgtcaaataagcagtatttcaattgtgcaaaaaaaaaaaaaaaaaaaaggccacatgtgctcgagc

SEQ ID NO: 7682 - DNA, 1708 bp, Oryza sativa
  ref <308>: DATABASE ACCESSION NUMBER: AK105030
  ref <309>: DATABASE ENTRY DATE: 2002-08-28
gctgcggaattcctcgagcactgttggcctactggcccctctcccatctcaccccgccgccgccgccgccgcagcctcctcaaggctgctcccatcctctccttcgagttagcttcctccttattcaaccatgggtaaggagaagacgcacatcaacattgtggtcattggccacgtcgactccggcaagtcgaccaccacgggccatctgatctacaagcttggaggtatcgacaagcgtgtgattgagaggttcgagaaggaagccgctgagatgaacaagaggtccttcaagtacgcgtgggtgcttgacaagctcaaggccgagcgtgagagaggtatcaccatcgatatcgccctgtggaagttcgagaccaccaagtactactgcacggtcatcgatgcccctggtcaccgtgacttcatcaagaacatgatcacgggtacctcccaggctgactgtgccgtgctcatcattgactccaccactggtggttttgaggctggtatctccaaggatggccagacccgtgagcacgctcttcttgctttcactcttggagtgaagcagatgatctgctgctgcaacaagatggatgccaccactcccaagtactccaaggcccgttacgatgaaatcgtgaaggaagtctcatcctacctgaagaaggtcggctacaaccctgacaagattcccttcgttcccatctctgggtttgagggtgacaacatgattgagaggtccaccaaccttgactggtacaagggccccaccttgcttgaggctcttgaccagatcaacgagcccaagaggccatcagacaagcccctgcgtcttccccttcaggacgtgtacaagatcggtggtattggcaccgtgcctgtgggtcgtgttgagactggagtcctcaagcctggtatggtggtgacctttggtcccagcggcctgaccactgaggtcaagtcggttgagatgcaccacgaggctctccaggaggctcttcctggtgacaacgtcgggttcaacgtgaagaacgttgcggtgaaggatctgaagcgtgggtacgtggcctccaactccaaggatgaccctgccaaggaggctgccagcttcacctcccaggtgatcatcatgaaccaccctggccagatcggcaacggctacgccccagtgctggactgccacacctcccacattgccgtcaagtttgctgagctggtgaccaagatcgacagacgatctggtaaggagctggagaaggagcccaagttcctcaagaacggtgatgctggtatggttaagatgattcccaccaagcccatggttgtggagaccttctctgagtaccctcctcttggtcgttttgccgtgcgggacatgaggcaaacggtggctgttggcgtcatcaagaacgtggagaagaaggacccaaccggtgccaaggtgaccaaggctgccgccaagaagaaatgagcctcgttcaagtggtgctttccatatctgcatttgagatatctagctcttttagtactcgttaagttttgtcgacggtcatttcagttgttgcattgaccgttaatatctgctcgctttgtgcactatgtcagtcatttaaaactctattttctgttcggtttaaacttggatgttaagacttattattgccaaaaaaaaaaaaaaaaaaaaaaaggccacatgtgctcgagc

SEQ ID NO: 7683 - DNA, 1960 bp, Oryza sativa
  ref <308>: DATABASE ACCESSION NUMBER: AK105031
  ref <309>: DATABASE ENTRY DATE: 2002-08-28
aaaaaaaaaaaaactcaaaattaaagagcaaaaccatttcatcgacacagcgcccacaaaaccgcaaaatcctccgccgcctcctccggccggtagcgcacgccgccgaccacccgccgccgcggacgcgacgcctcctctccccgattcggccccggatcacatgcggccactaccccgatgtcatccttccagcttctcctccactccttgctcttgcttctcgtcgttggcggcgtcgcgggcggcggcggcggaggtggtcgcctgagggcgccttcgctggaattccaccaccggttctcttctccggtgcagcggtgggcggaggcgcgcgggcacgtgctccccggaggctggccggagcacggcagcgccgattacgttgcggccctgaacgggcacgaccgccgccgcgcgctctcagcagccggcggcgacggtggaggaggaggagacaagcccccgccgctcacgttttctgagggaaacgccaccctcaaggtcagcaacctcggattcttgcactatgcgcttgtgacggtcggcacgccgggccagacgttcatggtggcgctggacaccgggagtgacctcttctggctgccgtgccagtgtgatgggtgtacgccgccggcttcggccgcttctggatcggcttccttttacatccctagtatgtcgtcaacaagccaagcagttccttgcaacagccaattttgtgagctgagaaaggaatgctctacaacatcacagtgtccatacaagatggtttatgtttctgcagacacatcttcttctggttttctagtagaggatgtgctctacttgtcaacagaggatgccattcctcaaattctcaaggcgcaaatactatttggatgtggacaggttcagacaggatcatttctggatgctgctgctccaaacggtctatttggacttgggatagatatgatatcaattcctagcattctagcacaaaaaggtctgacatctaattccttcgcaatgtgctttagccgtgatggtattgggagaattagctttggagatcaaggcagctcagatcaagaggagacaccactagatgttaacccacaacatcctacatatacgatcagcatcagtgagattacagttggaaatagcctcacggacttggaatttagtactattttcgacacaggaacgtcgttcacatacttggcagacccagcttatacatatataacacagagtttccacgcacaagttcatgcaaatcgccatgccgctgactcaagaattccttttgaatattgctatgatctgagctccagtgaagataggattcaaactcctagtataagtttgagaacagtgggtggaagtgtatttcccgttattgatgaagggcaggttatctccattcagcaacatgagtatgtttattgcttggcgattgtcaagagtgcaaaactcaatataattgggcaaaatttcatgactggtcttcgtgttgtgttcgatcgagaaaggaaaattcttggttggaagaaattcaattgttatgacactgatagttcaaatcctctttctatcaattcacggaattcttcaggtttctccccttcagcacctgagaattactcccccgaggaaacaaagggtgggaacccagcaagcgttacacagttgagaccccttagtaattccaacccagtaatgtggtatgatagtttagtcttcaggtttcttttggtcaatttggccgctctgatcctcttctaatttgtttcgggatgacctgaatgtaaattagttatcacgattactgtagatgcactagaagctgactagagaatacaacatagagaacagtactgtatacacgtcctgtaaataccgtcctttgtgtcgacaatattgtgtcaaaagcaattaatttgtgatgccgatttttgatggctcacactgt

SEQ ID NO: 7684 - DNA, 276 bp, Oryza sativa
  ref <308>: DATABASE ACCESSION NUMBER: AK105032
  ref <309>: DATABASE ENTRY DATE: 2002-08-28
cgtgagtaccttacaaggtttaagggtatgatacttacctgcaatggtcttggcatagaccattcttcaaaatgggcccggcatttgagggaattggagccccattgatctataggtacatcttatttgtccatgagcttcttcagtactttctttgaggccaattggatgcttagctgtttcttttaacacaactatggatacggcagggcatctctctgttctttgtaacacaacaatggattctgtcgtatactaatgtatttttgctgcaag

SEQ ID NO: 7685 - DNA, 264 bp, Oryza sativa
  ref <308>: DATABASE ACCESSION NUMBER: AK105033
  ref <309>: DATABASE ENTRY DATE: 2002-08-28
ttcattcatctactcctggagttggagagcaacgatcgcaactacttgcccttgatcagcaaatctcggaatttatgtgggtccaattgttcatcttccaaaagatatcgactcgaaggatgccgctgcaacaaaatgtaaatgcagtgtcgcaccaggactgtaacatatgtatgattcgaaggagattgtaggtcgccattttattttcgccaatctgttgttacccaagaaactttgctctggcagtgttgttttctcttg

SEQ ID NO: 7686 - DNA, 652 bp, Oryza sativa
  ref <308>: DATABASE ACCESSION NUMBER: AK105034
  ref <309>: DATABASE ENTRY DATE: 2002-08-28
aaaaaaaaaaaaaaactacacaagtcgactatcattacaaggaaatttaagcgaccacgaagagtatgacgctggtgaagattggtccgtggggcggaaatggagggtcagctcaggacatcagtgtgccacccaagaagctgttaggcgtgacaatctacagctcagatgcaatcagatccattgccttcaactacatcggtgtggatggacaggaatatgccattggtccatggggtgggggcgaaggcacctctacagagattaaactgggctcctctgagcagatcaaggagatttctggaacccatggcccagtctatgatctggctgacattgtcacctatcttaagattgtgacaagtgctaataatacatacgaggctggagtcccaaatggaaaggaattcagcattccactgcaagactctggccatgtcgttggattctttggaaggtctggaacgcttatcgacgcaattggcatctacgtccacccttgattcccagtggtcaaagaattactacctactaccatatctacgaaataatgttccatggtgttgttgtacttcatgcaatccccccattgtctgtgtacgtgttgcaccgatccgtagtacaataaagttggcgatatatatgttgtccc

SEQ ID NO: 7687 - DNA, 753 bp, Oryza sativa
  ref <308>: DATABASE ACCESSION NUMBER: AK105035
  ref <309>: DATABASE ENTRY DATE: 2002-08-28
aaacaactgtagggcaaaggttgctgactttggatttgccaaactagctccaactgatgctagccatgtctcaacccaagtaaaaggaacagcaggctatcttgatcctgaatatctcagaacataccagctcaatgagaagagtgatgtctactcctttggagttcttctggtggagttgataacagggaggcgcccgatagaaccaaggagagctatcgtcgagcgtgttactgcaaaatgggcaatggaaaaatttgttgagggaaatgcaatacaaacgctggatccaaatctagaagcaactgatgcgatcaacctggccgtcgagaaaacgtacgagctggctctgcagtgcttagctacaactaagaggaacagaccaagcatgaggcgatgcgctgagatcctatggagcatacgcaaagatttcagggagttggatataccaaccgcatccctgaactgaactgagacagttcacttggagcaatcaagaaaagctgcactccagtttgcctctcttcaaagcgtggtggtatgaatcacccgattgctggatgatgaatttattccttcaggatgtggtctaagtagttgtgattgtgaacgggactggtgatcttcctaggaattgtgtgttcaccagctagcaactaggaacaattgcatagcatattctgtacatgataaattgttgctgtgagcaagacagacacagatactatataatggtatattggttgaggatgc

SEQ ID NO: 7688 - DNA, 584 bp, Oryza sativa
  ref <308>: DATABASE ACCESSION NUMBER: AK105036
  ref <309>: DATABASE ENTRY DATE: 2002-08-28
tgatgaggtttatgctgtccacttcaaatgcaacaaaaggctcctcagggaataccccaatctgttcaattacaccaaggacatctaccagattcctggcatcagcagcacggttaacatggagcacataagaaagcactactatggaagccatccgtccataaatccctacgggatcatccctgcaggccctaacatcgattacaacgctccacacgacagagagaggtttagtgcctaggagaagataagtagtactccctccgtttcacaatgtaagtcattctagcatttctcatgaacgtgagaaatgctagaatgacctgtaaaacggaggaagtatctcttatggtactttctgtattgagtcactatgcttcgttgctatggtatcgaggctgtggctaataatgcttggagggttggtttgtgttttggttgttgtattgtaatacagggattggaaaaaaaaaagttaccgatagagaataagaagtatcactcgaccaaacagagacaagcaaaagttatgtggtaataaataacaaaaagtttttggttccaaaaaaaaaaaaaaaaaaaac

SEQ ID NO: 7689 - DNA, 1275 bp, Oryza sativa
  ref <308>: DATABASE ACCESSION NUMBER: AK105037
  ref <309>: DATABASE ENTRY DATE: 2002-08-28
aacaagggcaacgccgaatcaggcgtccgttctctgttgccgaagtggaagcccttgtgcttgcagttgaaaagcttggaaccggaagatggcgagatgtcaaacttcggggcctttgataatgcaaagcaccggacttacgttgatcttaaggacaaatggaagacgctcgtgcacacggcgagcatctcgccccagcagcggcgtggcgagccggtgccacaggagctgctcgacagggtcctggcggctcaggcctattggtctcagcagcaagccaagctccagcctaagacgcccccgctggctgaggctctcctgctcacctaataacctgatctcagctaatggtctcttaggaaaccattccagcttttgtataaagtcagtcagtccattcaaaggaggttaaggaagatattagaaaaaaagatatatataaaaaggtacaagaaatattgaccgatttgttgtaatatctactcaccaattattctttcaagccaaaaaaaaaaaaaaaaaaaaaaagcatcgagtcggccttgttggcctactggaccaaggacacgcgactagcagaagccgagcgaccgcctcctcgatccatatcttccggtcgagttcttggtcgatctcttccctcctccacctcctcctcacaggttcttggtgtagcttgccactttcaccagcaaagtttcatgtctgatctcgacattcagatcccaactgccttcgatccctttgctgaggccaatgctggagactctggtgcggctgcaggatcaaaggactacgttcatgtacgcatccagcagcgtaatggccgtaagagcctgaccactgtccagggattgaagaaggaattcagctacaacaagatcctcaaagatctcaagaaagagttttgctgcaatggtactgttgtccaggacccagagcttggccaggtcattcaacttcagggtgatcagaggaaaaacgtatcaaattttcttgttcaggccggcattgtgaagaaggaacacatcaagattcatggtttctgagcaactgccaaaaccattgcaaagactatagtttggggtggagtatacttggttgtgtacatgcctgcgtgttccattgtacacacaaaacctagccacctcttgactcttgagtgtatgcttgttacccgtgtgttgaagtttgtaagaggcaccatcactatagatgatggcttgtgtccctctttcatcaagattgaataatatatgctactttgagagcgct

SEQ ID NO: 7690 - DNA, 455 bp, Oryza sativa
  ref <308>: DATABASE ACCESSION NUMBER: AK105038
  ref <309>: DATABASE ENTRY DATE: 2002-08-28
caagagtgctatcaagtctgcatcagagggaaagctcaagggaatcataggatatgttgaggaagacctggtttctactgactttgttggtgacagcaggtcgagcatcttcgacgccaaggctggaattgctcttaacgataactttgtcaagcttgtcgcctggtacgacaacgagtggggttacagcaaccgtgtcatcgacctgatccgccacatggccaagacccagtagaatccttttgcttgccatggtattccatggccgccgagccggagataccggtatgctttgtctatgctgagaataaaacgtggacggtgttcatcaggacccaccccctctgttaatgctagttgggataatgagttgcattttgttttccaatctacctacttgtaagttgtaacgatgctgatgatatggacctgagtctacttttttgcttgtgaag

SEQ ID NO: 7691 - DNA, 329 bp, Oryza sativa
  ref <308>: DATABASE ACCESSION NUMBER: AK105039
  ref <309>: DATABASE ENTRY DATE: 2002-08-28
ttgctttgagaagttctgcttctgggagagcatgttatggcactggggtgaatccaagaactcaacgaaggaaaaccctgtgccggccacacctaccgcgagcctcacaagttcatgagatgtgtagatagccctataccagatacaaacttctaagctccatacatacatagcaacagcttgtaaaggtagctatgcttaggtttctcgacaaaactataccttgtgtttgctatcatggcttcggctccactctggctgctttgatagctcacaatttttttggttttttggccaataattcatcagtataggtaaattttctgttc

SEQ ID NO: 7692 - DNA, 2278 bp, Oryza sativa
  ref <308>: DATABASE ACCESSION NUMBER: AK105040
  ref <309>: DATABASE ENTRY DATE: 2002-08-28
acagcccgtccgtctcaaaccctaactctgcaagacgcgcgtccgccgccgcaactagcaatgcccaagcggcgtcgcggggttcgcccccctcctcccgatccttccccggctccggcgacaatcgactatagccttacttataaggagatagccgccagtggggctccaggtgctgtggactttgtgaagaatcatggcttgtacttgctgctgcttgagacaccctctggcttctcaattttctctctttgtggggtctacatccacttaccagatgcgatacaaaatatttgggcgatgttcggtacttacaggtcttcacatgacgttatctggctgaaggaatttcagaaatttgatgacaagtctagcgccattaatgttgatactggtgttaacaaacagcttactgagatgatcatgaggtggcgtcgccctaggcagaaattggttgttggaaagccggagtataaatcaatcattgaaaataccttaggaataccctgcctgtgtgatgaagttgtgatggacgtaatgtgggccatgaagcgtctcattcgctattttgtgcccactgaaacacccgagctggctgaagaggacagcctcactatgagtcaaggactacggatgtttttaagtcgttatggctttgaaatcaaaccagagatggtctacaacgatattgttcgtgctgcatccatcgtgtttaggtgtgatgctgttgaggacctttacgagcacttgcaacatcttggtcgccacctcaagaatgtgtctggcattgactatgagaattggggcactgtgaaactcgcgacagcttttaagatcatatgcagccgcaaaattgataaatctgatgagatgttttcagacgacgtgcgatcgaagttgctggatgatgcagataaatacaaagatcttgttttttcgacaggttgcattgcaaactataaaaaaattttaggtctcaatatactcaggaatgataaaatggatcaattggctgagttggttaaggtagctaggattaaagctgaacacgtgagggtgcctgagaatgtgcctgagaactaagatcactacaagcttgctcaatatctcgctgaacctcttgcaggctaaataatttggtttgccagttaggaagcgtttggtatgcatgtggcttaatccagattcttctgagtgtcgaggttgtgatctcggttggcttaaacattattgtgcatcttttgtaaatctagtctggtatttgagaagctaaggtccgtgctatccaaaactttgcatcgtttagctgtcaaacaaacgaccgtgctcagtggtgattaacgtgctctgtgatgaatgacgatcttgatttgattaaaaaaaaaaaaaaaaaaggccaagcatcgagtcggccttgttggcctactgggaagcagcattgatgtcgagatcttatcttccgagcaaagtccctgagattgtaacattatggaaaaaggatctccaaaaggtaaaccccaaagcagcagaatcattggcagatcctgacgagtacccaaacttgtttgaagactggcaaattgctctcaatgtagaagctaatgtcgcgcccaaaaggggtatttatccaccagctgaggagtacattatccatgctgagaggcccaatgagactctggtggaagctttcaaaagtatgcatatacatctagaggaggtgctgccagatgaaaatggagatgacactcacgaggctattgaggaaaatggagtagaagagagccaagaagatgctgttgaggttgatgttgaagctgatggttcgactgatggtgctgtccttgtgaacggaaatgataccgaggaacagtggggtacgaacaacgaagaatcatcagcataaaagctgtagttgagcaagttattgactcctgaccaatagtgaatcagcgggacagcaacctgatacactgattcagcttgtaaaggttgctgacttctactgaaactatgtgaaggccgttttcctccacttgtataatcattgggcgtgctttaagatcggcatatccgacgataaaacccacagaaattagtcatcgctttgtccttgtttgagatagaaaattttgtacctttttacacacataggtccttactgtgggttctcaggatgctttatatatacgagggatgttcccttcttgttgaggttgaatttgattagctaaaccggatccatattttacacaaagtacatagggtaaaatgttaaacc

SEQ ID NO: 7693 - DNA, 352 bp, Oryza sativa
  ref <308>: DATABASE ACCESSION NUMBER: AK105041
  ref <309>: DATABASE ENTRY DATE: 2002-08-28
ctgaggatgcaattaaagctgccgtgaaagactatgaagcaaagaaggcgaagctagcacaaaagggtgaagagaaggctgccgaagcatgagtgccagaggttctgtcatgaagaatgttgcagtgccctgcgtactcgtagtaaagaacctgtcatgaagaagtctctgctctgcttcttgctggcgggaaatagtgtgtaacgctcacaaactctatgcagcatgtatcataaggatgaaggcaaacatttttgaataaatgtgctgtcatcttgaaagaaaaaaaaaaggtgtatgcgtgtgtatggcctagtaatgaacatatggtacggaattacggtcgcgagat

SEQ ID NO: 7694 - DNA, 2090 bp, Oryza sativa
  ref <308>: DATABASE ACCESSION NUMBER: AK105042
  ref <309>: DATABASE ENTRY DATE: 2002-08-28
aaaaaaaagaaaagaaaaagaaaaaaaaaactcgagctcacgcgcacacgcacgcgacgcgacgcgaccccgaatcggaggcgaggccgccgactccgagcggatcgggccgaggtcgacggcatgggcggcggaggaggcgaggccgggggcggcgacggaggggagtcctctcctgctgcggctgcggcggcggcggtggcgggggccgcggcgctgcacatccggtgcgcgaacgggtccaagttcaccgtgcgggccgacctcgacgccacggtgggggcgttcaaggaggtggtggcggggagctgcgacgtgccggcggcgcagcagcgcctgatctacaagggccggatcctcaaggacgagcaaaccctagaaagctatggtgttgaaacagatcataccattcatatggtgcgtggcgctggtcccccagccggatcagctgcacctgctgcagccagcccccaagcttcagctgctcctagcagcggcccaacagatggtcttggaagtttgtttcctggccttggtggtacaggaactgctggtaccaggccatctggtctttttgggtctggatttccagaattggatcaaatgcagcagcagttaagccaaaaccccaacttaatgagggaaataatgaatatgccaatgatgcagaatctcatgaataaccctgatttaattcgtaacatgatcatgaacaatcctcaaatgcgtgatatcatcgaccggaatccagatcttgctcatgttctcaatgatccaggtgttctccgccagacccttgaagcagccagaaaccctgaaatcatgagggagatgatgcggaacacagacagagcaatgagcaacattgagtcttctcctgaagggtttaatatgctccgacgcatgtatgaaactgtccaggagcctttcctaaatgcgacaacaatgggtggagaaggcaacacagctccaaacccattctcagctcttcttggaaatcagggttctaaccaaccaagggatcctgctacaaatgctccaaatactggctcagagtctacaacaggaacccctgctccaaacactaatccacttccaaatccttggagctccaatgctggaggtgcgcaaggagcaacacgggcaggttctactggcaatgcaagaaccggtgccactgggggccttggagggttggggtcagctgatctgagcagtttatttggtggtcttgccggtaatacaggaactggtgctactggtggtctaggagggttgggttcagcagatttgggaagtttgcttggtggttctcctgattcttcttccttgagccagattttgcaaaaccctgttatgatgcagatgatgcagaatatcatgtctgatccacagtccatgaaccagttgcttaacttcaacccaaatacacgcaacctcatggaatcaaacactcagttgagggaaatgttccaaaatccagaatttattcgccagcttacatccccagaaactatgcagcaattactctcgttccagcagacattattatcacagcttggtcaaaatcaacctaggcaggatggtagccaaggaggcaatgcgacaggcatgcggggaaatgttagcctcgacaccttgatgggcatgcttagtgggcttggtgctggaggtggcataggtgtacccaatacatccaatgttccaccggaagaactgtatgcaacacagctcactcagctccgagagatgggtttcatcgacactgcagagaacatccaggcgctagtcgcaactgctgggaatgtgaatgctgcggtggagcgtcttcttggcaatcttggccagtagctaaagcgtaccagacgctgcccataacgtcaccaactccgctcttttgcaagaggttttttagcccctccaagttcaaacgcagcgtctgtctacagtctcaggagaaaataaaacaaagaaatcccacccccaccattaacttttccgtacatggtcgtcatgcctttgtttttaccgtgttgtatttgactatttgggttgatgtacatacatatgaaattatcggatcttaccgc

SEQ ID NO: 7695 - DNA, 1012 bp, Oryza sativa; identical to SEQ ID NO: 2171
  ref <308>: DATABASE ACCESSION NUMBER: AK105043
  ref <309>: DATABASE ENTRY DATE: 2002-08-28

SEQ ID NO: 7696 - DNA, 1025 bp, Oryza sativa
  ref <308>: DATABASE ACCESSION NUMBER: AK105044
  ref <309>: DATABASE ENTRY DATE: 2002-08-28
tcagatcagatcagaaatccccaaaaaaaaaaaacacaacaaaaccaaacccgacagatcttctcttcttcctcctccctttcccatcttcgacgaggcgacccggcgcgagagaagaagagatcgatcgatcgatcaaccgatctcgccggagaaggaagaggagcaaagatgtcgtcggtgttcagcggcgatgagacggcgcccttcttcggcttcctcggcgccgcctccgccctcatcttctcatgcatgggtgcggcgtacgggacggcgaagagcggcgtcggcgtggcgtccatgggcgtgatgcgcccggagctcgtgatgaagtccatcgtgcccgtggtcatggctggtgtgctcggtatctacggcctcatcatcgccgtcatcatcagtacagggatcaaccccaaggctaagccgtactacctctttgacggctacgcgcatctgtcgtccgggctcgcctgtggcctcgccggtctcgctgccggaatggccatcggcatcgtcggtgatgctggtgtcagggcaaatgcacagcaaccaaagcttttcgtgggcatgatcctcatcctcattttcgcagaagcgcttgccctgtatggtctcattgtgggcatcatcctctcatcccgtgccggccaatctcgtgcagattaggcactttgcggtaccataccgctgttattccactggctatattcttgagaaaacctgaaacttacttgggagctctagtttaatgtattaaaagatcgatttgtagcttaaggaaggtggcacttccagtcctttttgtttcttttgtggtggttcatgcaaagttttttgggttaggctggatttgctgctcctgagcaaacggatttaatctcattcgtggtgaataaaaaacacggcattgtagcaaaataaaatcattacaatatattatgttcatcccttcactctaatgtattggattgcaaaaatcatcaatgctcctttttgttatgagttcaagtcatcattatatc

SEQ ID NO: 7697 - DNA, 1703 bp, Oryza sativa
  ref <308>: DATABASE ACCESSION NUMBER: AK105045
  ref <309>: DATABASE ENTRY DATE: 2002-08-28
agtggaaatcagtttccacttttttccaaagccgaaaaatcgagagagaaagagcaaaaccctaaccgcggcgctccgcccccttccgccgccggattcctcctcctccttcgtccgccttcgccggcgccgccctgctccgaaggagcccaggccttgtcgccgcgtcgcttgccccgccgccggtttcagcagcagccacccccaccaccatgtcttctcaggtcgacaaccgtagccaatctgctggaaagcgtgcccgcaccgacggtgggcggcgtgaggacgactgggtttgccccagctgccagaacgtcaacttcgccttccgcaccacctgcaacatgcgcaattgcaaccaatccaggcccaccgactatacggatatgcagaaacctatgcagacaccgccgccccatttccccatgtcagggggatacatgagcccagggacgccgccatccatgtacctcgggggtggtgctcccccttatggcacctccctctatggcggacctgctttaccacgttatggtattgctcagttccctgggggttctggatatccatatggctatggtggccgcctgccaatggggagcccctatgggccgccgatgcatatggcagggcctccatattctgctggatccatgatgggaccaggtggaatgtatgggatgcccatggacagatatagcttgggcttacctgctggtcctggtccaatgggcgcgagggctggttcatattccgaggaaggatcccagaagaagcctgcaggagctgggcgtgataatgattggaaatgccctaattgcaacaacattaactttgcattccggacagtctgtaacatgagaaagtgcaatacaccaagacctgaaaaccaggggtccaaacctgatggtgcaagaggtccaaaaccaaagatgccagaaggtagttggaagtgcgagaagtgcaataacataaactatccattccgcacaaaatgtaaccgtccaagttgcgaggctgaaaagccatttcagacaaacaatgctaatgagtcatctgctgatcaggacaatcagttgttgtcatgtaatattgtgaagcttttatcaaagctgcaactttcacatgactttcaagacaataatgagcaaacaaaggtggatcctcccggtggccctgctggagtaccgacaagttcgcacgccctgcgaatggcagctctcagtgagttgcagaacagtgttaagagctgatacccttttcattttccaaacaaggtgagaactttgatccatgtggatgtgcttctatcaggagcagctgacagtattgcatgcagtgatcttgctaaggaagttggagatgggaaacatcgtgtgatggccagccttgatgtaagaatgcaaatcagtcttactccgtaccatatctgtgtggagtgtgcacaccggaagcatagtcattttttgaatggtcgattgcttcttccacagtaaagtctataataccagtgtgcaggtgtttttttccctttctttcagtgtgaaggtgtttttttacctctttctttcgttcattcattctttttctttttccttgttgagacggtatcctggagcactttgtaatactctaatgtgcttcggaaagtagaatataagttgtgcttatgggcgggccaaaatgctttggccgttagttgc

SEQ ID NO: 7698 - DNA, 1022 bp, Oryza sativa
  ref <308>: DATABASE ACCESSION NUMBER: AK105046
  ref <309>: DATABASE ENTRY DATE: 2002-08-28
tatgaatgggatattggacattttcaaggagctcagcgacctaatgtggactgcttcaggagcacatcctttgggctctcagagtcagagcaggagatggattcttcagatcctctaaatggtatagacaaagaaaatacagatatattaatgtactgcactggtggcataagatgtgatgtgtattcaacaattcttaggaagaagggcttccggaacctgtatacattgaagggaggagtgtccaattatctgaaggaggaggggtctgcaggatgggtggggaatttgttcgtgtttgatggacggctctccctgccaccggcaacgtacaagcctggagcaggtgatgatgatgatgaggaggaggaggaggggagaaacagaagcagttcagagctggggagatgctatgcatgtgggtcagaggtggttgagttgaggcaccggaactgcgcaaacatcgactgcaaccggctttacctgtgctgcgggcgatgcgtggaggagctgagaggatgctgcggtgagggctgcaccgccgcgcctcgcctgcgaccgctgctgccatcacaccagagataccacaagtggcatctctaccgccatttggacctgggggcaccatcatctccatcctagcttactagtatagtactccatgctgccatgcatttggatggattggattggattttcctgttgtttcctgcacgcttaactgtgcgtgtagtctcatctgtcatgccccaagtctcaaatctgcctgccttctttcagcttcagttggtaccaaagctgactcacctccacgacgaccttctcttaattttcctcttggccagcctcctctttactttcggtggattcctatgtatagtccctttattgattatgtatattttgattagggacacgtctacacggcgaccacttcatcccaagtgtaaaccctccttttcagcttctaaaaatagcaaaagaagcactttgcatggaaaaaaaaaaaaaaaaaaaaaaac

SEQ ID NO: 7699 - DNA, 1489 bp, Oryza sativa
  ref <308>: DATABASE ACCESSION NUMBER: AK105047
  ref <309>: DATABASE ENTRY DATE: 2002-08-28
attatccccatttctcccgtatcctctctctcctctcctctcttctcgagcgcggcggcggtggtggggaggaggagggccagcggcagcaagcggcggcggcgacgcgatgatgatgacgcgggcgtcgatgggggcgatggaaggcgcggcggtggacgaggtggtgcggcgcctcgtggagggcgggcgcggggggaggcaggtgcagctgtcggaggcggagatccggcagctctgcgtcgaggcgaagcgggtgctcctgtcgcagccgaacctcctgcgcatccacgcccccgtcaagatctgcggtgatatccatgggcaatttgttgatcttctgaggctgtttgatttgggcggttatcctccaacttccacttatcttttccttggagattatgtggacagaggcaaacaaagcttggaaaccatatgcttgcttctggcatacaaagtgaagtatcctgataagattttcctgttaaggggaaaccatgaagatgcgaaaattaacagagtgtatggtttctatgatgaatgtaagaggcgattcaatgttcgactgtggaagattttctgtgattgcttcaactgcttgcctatggcagcactcattgacgataagatactctgcatgcatggtggcctctcacctgaactgaatagcttggatcaaataaaggatatcgagaggcccactgagattcctgactatggtcttttgtgtgatttagtttggtctgatcctagtcctgactcagaagggtggggagagagtgacagaggtgtttcctgcacttttggtgcagataagcttgtagaatttttggagaagaatgatcttgatcttatatgccgcgctcatcaggttgttgaggatggctacgagttctttgcgcaaaggagattagtgacaatcttttcagctccaaactattgtggggaatttgataatgcgggtgctctgttgagcatagatgaaagtttaatgtgttcttttcaaatcttgaagccaaatgatacaggggctccacattcaaggaaaccaacttcaaacaagaccccaaaaactggaaacgcttaacttatattatatcaagctacaaagcataattgttgtcagcccgaagggggtgatctcttttatgtctcggatccaccagggcatggcattagtcttctccagccaatatcatttcctccttgagtggcatgctctccgctgctcgctggatatgtgttgactccacaggcggtactgcattgttgtacagcagcagtctatctgactcagcagctcattcattctgatcctcttttttttgtttatcttgccgctgcaatgtttggcggcacaatgtgttttgtcgtggatgcagtagttcctctttttgttgtttcttagtgtggtttctttgcctggttgctgtgagctgtgtttgcttatgtatcatcttaattagatcatgagatatatgcttggtgg

SEQ ID NO: 7700 - DNA, 1277 bp, Oryza sativa
  ref <308>: DATABASE ACCESSION NUMBER: AK105048
  ref <309>: DATABASE ENTRY DATE: 2002-08-28
ggttctacatcttgcctcgccgtgcaccgcagtccgccgcactaccagcgccggcgcttaccgtcgttaccgacgcagcctcgcctacactacaccctcgatccttccccaaccaccaccgcagcaaatacaccgccgcggcgccgcgcctcttggaggcttcgacgcgcgcccaaaaagcgaccgcggcttcccgttcccgaacaccaccacccctcccccgaatcgaatccaatcaaatccaatcgaatcgcctctccgtcctccgcggcggcgggccgccatgccgctgccgacgatgacccactcctcctccttcctccgcctccccgccacctcctcgccgcacccgccgcccgcggatgatgcttccgcggcctacgccgtcgtcgtcctcaaccagcgcctgccccgcttcgcccccctcctctgggaccgcgcgcggctgcgggtgtgcgccgacgggggtgccaaccgggtgttcgatggaatgccggagctgctgcccgccgaggacccggaccaggtccgcatgaggtacaagccagatgtgatcaaaggggatatggactcaataaggccagaagtgaaggaatattattccaatctgggtgccgaaatagttgatgaatcacatgatcaggacaccactgacctgcataaatgtgtatcatttatcaccagaaatccacctggctctgaagagtctaatctgtatattcttgttcttggtgcacttggaggaaggttcgatcatgagatggggaacatcaacgtgttatatcgcttctcaaacatcaggattgtcctcctgtctgatgactgctcaatctttctgctcccaaagacgcacagccacgagatccatatcgagcgatcaatcgagggtcctcattgtggattgattccaatgggttcaccatcggctagcactaccaccacagggctccggtggaatttagataatactagcatgagctacggtggactgataagcacatctaacatcgtggaagaggaaacagttaggatcacttcagattctgatctgatttggacaatatcactccggaactgagctttaaattacccataaatgtatcttgatccaaattttggctccttagtatagcatggatgggctacatttttgtaacttagattttttttttcattgatctactgttagtaaacaggaaaggtatccatatgtgtaagcctcttggacatgcatccattatagaaaaaaatattattaactgtgttgttcaattctc

SEQ ID NO: 7701 - DNA, 1916 bp, Oryza sativa
  ref <308>: DATABASE ACCESSION NUMBER: AK105049
  ref <309>: DATABASE ENTRY DATE: 2002-08-28
tcaacagcaattacaacagcagattcattttcttaccccgcaacagcagcagcagcttatgttgcaggctcagcaaaatatggcttccccaacatctagtgatgttgacagcagacgattaaggatgatgcttaacaacaggaatgttgggcagacaaacagtggtggtgatattattccaaatattggttctcctagtctaagtggtggagatgtagatatcctgataaagaagaaaattgctcagcagcaacaattattacagcagcaaagcaacagccagcagcatccacagcttcagcagcctgctgtctccagtcagcagtctcaaagctcaaatcagtttctccaacaagaaaaaccaggaatcggaactatgcctgttgatgggggcatgccaaactctttcggtggagttgatcaaactacaaagaagaggaagaaacctggttcatcctctggtagagccaatagttcaggaactgcaaatactgctggcccttctccaagttctgcaccatcaacgccttccactcatacaccaggagatgcaatgtctatgccacagctgcagcagaatggtggttccgcaaaaccattggtaatgtttggctctgatggtgctggaagtttgacgtctccagcaaatgcactggctgacgtggatcgtttgctagaagatggttcattggatgaaaatgttgaatcttttctatctcaggatgacatggaccctagggattcattggggcgctccatggatgctagtaaagggtttggttttgctgaagttgcgaaggcacgtgcaagtgcaaccaaagttacctgttgtcacttctcctctgatggcaaactgctcgctactggtggacatgataaaaaggttcttttatggtgtacagagcctgctctaaagcctacatcttcattagaagaacattcggcattgattacggatgttcgatttagtccaagcatgtcacggcttgctacatcttcctttgacaaaaccgtgcgggtttgggatgctgacaatacaagttattcactccgtactttcacgggtcattcagcatctgttatgtcacttgacttccatccgaacaaagaagatatgatttgctcctgtgatggtgatggtgaagtccgcagctggagcataaataatggtagctgcctgacctttgttaaggtctttaagggaggtgctactcagatgcgatttcaacctcaaaagggaaaatatcttgcagctgcctcagagaaggccatctacatacttgatggagagacacaacttgcttgtagaaaccctctgcaggggcacacaaagaatattcactcactttgttgggattctaccggtgacaatctggcttctgtcagtgaagatagtgtcagaatatggtcgtttgctcctggacatgacggtgaatttgtgaatgagttgagttgcagcgggaacaagttccagtcatgcgtttttcacccctcttacccatatttgctagtaattggatgctacgagtctttggaactctgggacattagggagaagaacgccatgacggtccacagtgctcatgatggtttagttgcagcgctagcagcatcgagcgcaacaggcaaggttgcctcagtaagccatgataggtttgtcaagctctggaaatgacttgctccaggtgaccacatgacaaaagagggtagctaacaaaaaaaaaaaatcttgaaccgctttgggtgcaagaactaacctggtttgtgttttgtggttgtcttcagttgtaccgtgtatgctgctctattagcttctgaagtttgtaactctgtagaaatgtttgttggcgtgctgtaactctcaacatgtctctgatttgtactgatcataagttacaaagtctgttagtcttttt

SEQ ID NO: 7702 - DNA, 330 bp, Oryza sativa
  ref <308>: DATABASE ACCESSION NUMBER: AK105050
  ref <309>: DATABASE ENTRY DATE: 2002-08-28
tttctgtagagctacttgtgtattcttcgaggtgacgccttcagttgctggaataattcttcttcgctcgaagtcgagcggttaaggccagatttatttgtgagaatgtttagccatccgtacctccgtcccgctagagtgttctgggttgccgtgtgtttgaaacctcactgagacctcactgtacatgtgcttacttgcatgaagataatcgttgttggtttgtgtgtcagtgtcacacacctcttgtgaattaacctgtgtagtttgctcaaaccaagcttgctgtacagttaacctggattaatccgaaggttatttgttgtgctt

SEQ ID NO: 7703 - DNA, 1233 bp, Oryza sativa
  ref <308>: DATABASE ACCESSION NUMBER: AK105051
  ref <309>: DATABASE ENTRY DATE: 2002-08-28
aaaaaaaaaaaaaaaaaaaaaaaaaaaaaaaaatctccccatccgccattgttgtgttctcatcctcttcttccatctctctctctgtgcgtgctctccgacgtctctcctctccctctcgcgtgcttggtcgctgtaggagggggttcaattgatttgaggtagccatggctgaggcactgtgcagcggcagcgtcgcgtccccgtgcggggaggtgggtgtggggttcgccgccggccttgtgaggggcgccgcggcggcggcggcgctcgcggagtctgtgccgattggtgggtacagcagcaagagcacgttcccgagtgggagggtggcgctcacggagaggaaggcgaggcccctgccacggaatctcgaagcggcgcatgggcagatgaacctgacgattgggaaggccatgaggtggtgggagaagtgcctgcagcccaacatgagggagatcgagtcggcgcaagacctcgccgactccctcctcaacgccggcgacaagctcgtcgtcgtcgacttcttctccccgggctgcggtggctgccgcgccctacaccccaagattgctcaactagccgagaagaacccggaggtgctgttcttgcaagtgaactacgagaagcacaagtcaatgtgctacagcctccatgttcatgttctgccattcttcaggttctacaggggagctcagggccgtgtcagcagcttcagctgcacaaacgcaactatcaagaagttcaaggatgcacttgccaagcatggtccggacaggtgtggcctcggcccggcgaaggggctcgaggagtcggagctcatggcgttggccataaacagggacctgaacttcacctacacaccaaaccaagaccttgtcccaattgcagacgccctcctgaaggaagctgctgcacctggaggtccatggctgccattgcccgcaacggcgacgcagctgttcattcagggatctgagaattcgctgttgtcatctggaagatagccggtggttcgacggcaagattggcttcaatttgtacatatttttccgcttgttctagcctgatgttatgacatgctgatgcgcaggctcatgatttttgtttatgagcctgctgagtgctggaggcatgaaattccttgcctgacggacctgtatgcgtgatgcacgtctgcatcgaaaattgaacatgctagattcattcatgattgaatcccgtaatccctgt

SEQ ID NO: 7704 - DNA, 347 bp, Oryza sativa
  ref <308>: DATABASE ACCESSION NUMBER: AK105052
  ref <309>: DATABASE ENTRY DATE: 2002-08-28
gattgcttgtcgatgctcctctccttcccgtttctcccttgctttgttgatgcccttggttcccgacgcaaggggggagagatcttgtcctccgtgaccaaaacggtggatttctgtatggggccctcaccaaatagacagtgtcagggtagtatctatctacagtgccaaaataaaccaagaggaaagcaagttggtagtttagtatcgttgattgcattcacagaagtgaaagtcttgtattccgctggtggccgtgatacagcagatgccattgtgttcaccggtttttgcctcccctacccttctatggactcttttcttatcaggaattgcttctttttatt

SEQ ID NO: 7705 - DNA, 2001 bp, Oryza sativa
  ref <308>: DATABASE ACCESSION NUMBER: AK105053
  ref <309>: DATABASE ENTRY DATE: 2002-08-28
gtgcagcgagacaccgatagctagctaactaatcttccccttcgtctccggcattattccacttggacgaacactagctcaccggccggccatggcgtcttcttccgttctgatcaagctgctcgtcgtcgtcggctgcgccgccgcggcctccgcggcgacgctcaccgtgggtggtagctccgggtggacgcttggccagaactacgatacttgggcaagtggccaaaccttcgcggttggagacaagctcgtgttcagcttcgttggggcgcacacggtgacggaggtgaacaagaacgattacgacaactgcgccgtcgcaagcaactcgatcagctcgaccagcaccagcccagccaccctcgacctcgccgccgccggcatgcactactacatctgcaccatcagcggccactgcgccggcggcatgaagctggccatcaacgtcggcagcggctccggctccggctccggctccgggacgccacccagcaccaccccaggaagcagcggcacgccgccggccaccccttcttccccctccaagccgaccggcggcgcgtccgccggcctgcaggccagcgccgccgtcgccgccgccgccggcgtcctcgtcaagctcgccctcttctgatcgggcccacctgccaggatagaggcagtgcatatgattcttgtttcttgatcatttcgtctgacggccggcatgcatgtgtgtgagagagatgagtggtttgctagctagctagatgatgatggtgatgatgatatggggttgttgttccgttccatcgtgtacttagtactgtaattacgagctgtcatgtgatttgttttctcatctcaaaaaaaaaaaaaaaaaattgcatcctccaacatgacattgcttaagatgttcggtgacttccagaaggatacgcctgaggagcgcaatgtccgatttggagtcagggagcatggaatgggcgccatttgcaacggcattgctctgcacagcccaggactcattccatactgtgctactttctttgttttcactgattacatgagagctgccatgaggatctcagccttgtgtgaagccggagttatctatgttatgacccatgactctattggtcttggagaagatggtccaacccatcagcccattgagcacttggtgagcttccgtgcgatgcccaacattctgatgcttcgtcctgctgatggtaacgagactgctggggcatacaaaatcgcggtcctcaacaggaagaggccatccgtccttgctctctccaggcaaaagcttgctcagctgcctggtacctcgattgagggtgttgagaagggtgggtacatcgtctctgacaactcaactggcaacaagcctgacttcattgtgatgagcactggctctgaactagagattgtcgccaaggctgctgatgagttgaggaaggaggggaagactgtccgtgtcgtgtcatttgtttgctgggagcttttcgatgaacagtcggctgagtacaaggagagtgttctccctgaggctgttactgcaagagtcagccttgaagcagggtctactcttggatggcagaagtacgtcggaagcaaaggcaaggctattggcatcgacaaattcggtgcaagtgctcctgctggaaagatctaccaggagtatggcatcaccgcggagaacgtcatcgcaacagcaaagagcctgtaagattcaaaccgcgcgttttgagtttttgtcatcgttgatgccaaggaacagtatacatgaagccatgaaggtcttgtgcccaaagcttggaataatgaagggagagggatgcctgcattggagcgtgagtggtattttaggcctgtaataagcactgcttttccatttacgtttgttttgttggatcactccttagatgattcatcaagttgagcctgattcaattggggactggttttggtaatatttacatttgactatagtccagctacaatattccgttc

SEQ ID NO: 7706 - DNA, 525 bp, Oryza sativa
  ref <308>: DATABASE ACCESSION NUMBER: AK105054
  ref <309>: DATABASE ENTRY DATE: 2002-08-28
aaaaaaaaaaaaaaaaaaaccgaaaccctagacgccgccgccgacctcctcccgtgctcgcgacttctctcgacgccggtggagtgagagagagagagagagatcggagatggccaagtcgaagaaccacacggcgcacaaccagtcgtacaaggcgcacaagaacggcatcaagaagcccaagcgccaccgccagacctccaccaaggggatggacccaaagttcctcaggaaccagaggtactcgaggaagcacaacaagaagagtggtgaggctgaatccgaggagtaaggtggaggagccttttggttatgaatgtttcttgtatctctggatctacagttttgaacctatttcactgttctgtaagggcaaaggagattactatggtacttaagttttatcatgcgtagtttggctctgtgcaacccagttccatgctgttggattgcacctgaaatattatcttctataagaattggttatccatttttaaggttgtcttgtttgcattagcacatctc

SEQ ID NO: 7707 - DNA, 640 bp, Oryza sativa
  ref <308>: DATABASE ACCESSION NUMBER: AK105055
  ref <309>: DATABASE ENTRY DATE: 2002-08-28
agcatcgagtcggccttgttgcctactgggctttgcatccatccatccatcagagatcaggtagaacagtgagagtgaggtgcagaaaaatttgagctgaagctgaggatggcaacatccatgatcacctcgccgctggtggcgccggcccgggccaagggccttccgtccatctcccgccggggatcctccttcgccatcgtctgcagcggtgggaagaagatcaagaccgacaagccctacgggattggaggtggcatgtcagtcgatattgatgcatctggcaggaagagcacggggaagggtgtgtaccaattcgttgacaagtacggcgcaaacgtcgacggctacagcccaatctactcgccggaggaatggtctcccaccggtgacacctacgttggtggaaccaccgggcttctgatctgggccgtgaccctcgccgggctcctcggcggcggcgccctcctcgtctacaacaccagcgccctcgccggctaaatttcacccaaatccagtctatgtatgtaacaccaagctgggtgtctgcatattcatctgtaatctaagatagccttcctctgaatgcgatgtgatgatgcccactgcttaatcaaactgcattgtgattaatctatgt

SEQ ID NO: 7708 - DNA, 323 bp, Oryza sativa
  ref <308>: DATABASE ACCESSION NUMBER: AK105056
  ref <309>: DATABASE ENTRY DATE: 2002-08-28
gctgcttgcaagatgctagcgttggcctgctgattctttactgtgaatgacgggatgatgcaagccacgagttttctgtagagctacttgtgtattcttcgaggtgacgccttcagttgctggaataattcttcttcgctcgaagtcgagcggttaaggccagatttatttgtgagaatgtttagccatccgtacctccgtcccgctagagtgttctgggttgccgtgtgtttgaaacctcactgagacctcactgtacatgtgcttacttgcatgaagataatcgttgttggtttgtgtgtcagtgtcacacacctcttgtg

SEQ ID NO: 7709 - DNA, 2283 bp, Oryza sativa
  ref <308>: DATABASE ACCESSION NUMBER: AK105057
  ref <309>: DATABASE ENTRY DATE: 2002-08-28
gacccacccatctctcctattctctcttcaaaaaaaaatcaggaaatttaatcgcgaggaggagagagaaaagaaaaaaaaaaggaaattcgcaggagaaatccctggaagcctctagagaccgcgcgaacaggagaccccgaggagcagagcagagcagagcagaggcggcgccagctttgggagctctcggattgatcaagaactggggatcctgagttgaatatgatatcaaatccggtgaattggtacagtttcggtcccggatagaatttgtagtgatgccagattggagggtgggcgagtttgaaggtaagctcaaggatggatttgctcggagcaataatagcgaacatgaaaatggagccgggactgtgagtatatccagcaagaagtcgaagcatcgggttgacagtgaaaaaaaaccccatgttgacatctctggagtgattgattcagattcgcagaaatgtaattcagagcaaatccattcagctaatgggatagtatcccgggatgtcaaccatgatcacatagaaaactgcaaagttgaatcaaatgattttcccttgaatactatctctgaaacaagatatccaacagacaattggaacagttctcagtttgctctgagcaatgatggttcacctgttctcaataatcagagtactccacaaactggtcatggctatggagataatgatctaacctacattgattggcctgctattgataattttgaggacgtcgacaacttattcaggaggtgtgattccacgtacggtcagcagcaacttccgaacacggatggactgtcatggattccttcttcagatgtcatgtactcttctgatgttgctatgcaaccagggtttgaatcctcgtattctgattatggtatcctggatgacctctccgcattcaattgtacggaagataaatccctgacaacagctgatccttcaagtgctgtatgtgacgagcaattcgatgactcttatctgttcaatgagcaaaaacctgaagatgtttatggcgaacaggcttaccaaagggatgcgatggaattgttgtccagcgaccagatatgcactgggcaggaaaacctagatatgattggaaatcgatattcatcggaaaatgccatggaacagcctgaagatcagaagttttctatagcttcaggttctcaactaagctcttctcagaatttattgaaccaaaagaaccacttggattcaacttcaccaagtaacataacttctgagtcctatccagaaagaaattgccagatcattccatctggggcttcctttgcagagagaaacttgaaggtgcagaagaaagtggccagttcggcatcaggacaacttatcagtgataatgtgactggacatcctggtcatcaaacattgacaagaagggcttcatatccttgtgagaatcatgaaattggaaagaggtccttaggaaaaagaggtttgggtcattctgatgttgcaatgggcacctcaatggtagttgatgggtccttcgtatcgtctatttcttctgataactcagttgaagagaacagctttcggcagcttcaggatgcagttagtcagttggatgtgaaaacaaaaatgtgcattcgagatgggttataccgcctggcaagaagtgcgcagaataggcaagtcttcccaaatacaatgaacaacaatggagatagccacaatgtaaaggacatgcaaaatgcagaaacttcgggaaagtttgttgatcctgggagcatcgagacacagacaaatccaattgatcggtccatagctctgttgcttttccatcagccatcagagcatgtcactggagctgttgatgaagcggcttcactaaagtcacataatgataaccaccaggctgctgctaaaaaccaaagagtgatgcatgcttcatctgtacattcaccaagagggcagggagaccccatggatgcaaaatcttgcagaaacaactgaagttatctcatgaagcttcaacaactgtgactgttaatattgtacttgttgctgcaaacctttctccgttttgatccgatcatgcagttagcagctgtgtagtgtgtactactactctagtcgattagtcaggtacaggcaaacttgtaacaccaatttaacaagttagattggcttttgaccattagctttgtatcttaattattgagaaggtcgtctgtgccgtggccattcgtgtctgttctcactcacattttgtgtaatctcaaacatagattttttt

SEQ ID NO: 7710 - DNA, 383 bp, Oryza sativa
  ref <308>: DATABASE ACCESSION NUMBER: AK105058
  ref <309>: DATABASE ENTRY DATE: 2002-08-28
ccactgaacgaggcgaagctccctgcggctattgagcgatataggcctaagattaggaagatctccaagtagttcagctctgttcttttttccaagttgtcttttggaactttgtacctaaatgattgcagtaacatacttagatgctggtagtaacataattagttggtggcagtaacaggagactgttaggaacattgccacgttttttaagtaatgaaggtgtacagtggcagtaacgtacttggatgctggtagtaaaaatacttagttggtggcagtaacaggagactgttaggaacattgccacatttttgcagtaacgaattatatagtggcaggaacataccatatattataagtcttttgtgtaattccctgtt

SEQ ID NO: 7711 - DNA, 1681 bp, Oryza sativa
  ref <308>: DATABASE ACCESSION NUMBER: AK105059
  ref <309>: DATABASE ENTRY DATE: 2002-08-28
ctccactgcgcactgcaccagcaacgcccccccctgatccctctccacggctgcaccggagatggcttccgcccccttcgccgtctcctcctcaccggcggcttccgccgtggccgcgcgctccaaggtgttgcgaggagggaggagcgaggcgaggactggatgccgcctggggatcacgaggaagaattttggacgtgtcatgatggcccttgcagtagatgtctctcgttttgaaggagtgccgatggcccctccagacccaattctcggggtttcagaagcatttaaggcagatcaaaatgatctgaagctcaaccttggtgttggtgcctatagaacagaagagttacagccttatgtcctcaatgtggtcaagaaggctgaaactcttatgttggagaaaggagaaaacaaggagtatctgccaattgaaggcttagctgcatttaacaaagcaactgcagaactattgtttggagctgataatccagtactcaagcaaggacgtgttgctactcttcagtctctctcaggaaccgggtcgctgcgccttgctgcagcatttatacaaagatatttccctgaagcaaaagtactgatatcatctcccacttggggcaatcacaagaacattttcaatgatgcaaaggtaccttggtcagagtaccgttattacgaccccaagactgttggcttggattttgagggaatgatagctgacatacaggctgccccagatggatcttttgttctgctgcatggttgcgctcacaacccaactggaatagacccaactccggaacaatgggagaaaattgcagatgtcattcaagagaagaaacacatgcctttctttgatgttgcatatcagggttttgccagtggaagccttgatgaagatgcatcttctgtcaggctttttgttcaacggggactggaagtgtttgttgcgcagtcttatagcaaaaaccttggtttatatgcagaaagaattggagcaataaatgttgtctgctcaacacctgaagtcgcaaacagggtgaagagccagctgaaacgattggcacggcccatgtattcgaatccccctattcatggtgctaggatagttgccaacgttgttggggatccaaccatgtttggtgaatggaaacaggagatggaagaaatggcagggcgtatcaagaatgtaagacagaagctttatgatagtttgtctgcaaaggacgacagtggcaaggactggtctttcattctgaggcagataggcatgttctcctacacgggcttgaacaaaactcagagtgataatatgaccgacaaatggcacatatacatgacaaaggatgggagaatttcgttggctggattgtccctggctaaatgcgagtacctagctgacgccatcatcgactccttccataacgttagctagacgaggattcaggtcactgctattgtggttaatccttcaatatgctgggatttttggttccttccagcttgagttcttagccaggattgtatatccggcgctacgtaatttggagataataatgaattttgtctgtgcaacaaactttgcatatgctttgtcgaatgtacactggcactatgttagaagcttgaaatatcgaattgaataataatgagactagcaataagccaaactaattcc

SEQ ID NO: 7712 - DNA, 706 bp, Oryza sativa
  ref <308>: DATABASE ACCESSION NUMBER: AK105060
  ref <309>: DATABASE ENTRY DATE: 2002-08-28
tggccgctaaaagcagagaatgttgttcttgaggcaggaggctgtgtcctcaggctagcaggactctataaaatagatagaggtgctcattttttttggttgaggaaaggaactttggacacacgaccagatcatattatcaatcaaattcattatgaggatgctgcttcccttgcaattgccataatgaaaaagggatacaggggtcgaatctttttgggctgtgacaataagcctctttccaggcaagaaataatggactctgttaacagaagtggaaaatttgacacgaagttccaaggttttactggtacagatggtccactgggtaagaagatggagaattcgagaactcgttctgagattggttgggagcccaagtatccaagcttcacagaattccttggtcttgacagttgacatgcttgtgtatgcttgcaaaaatcttcaactctaaatgaacagcaacacgttgtgaaccagttattttgttttgtttccattgcgttttttttaaaagacgtaaatactgtatatcttgttctgctatgtgcttatatcagttagcgttctaagtctgaccgttgtacaatggtttcggccagagaaatatttccacccgtgtcatgttggcctcgttctggtccgtccaacatctatttgtctctttgtaaccacatttgttatgaaaacttggtttcctttc

SEQ ID NO: 7713 - DNA, 1245 bp, Oryza sativa
  ref <308>: DATABASE ACCESSION NUMBER: AK105061
  ref <309>: DATABASE ENTRY DATE: 2002-08-28
ttgaccgtacaaccaagccgcagagaagaggaaggcggaatcagtcgagggcgaggcggcggcggcggcggcgatggcgacggcgaggaaggcgccgcgcatggtggcgatctgggcggtggtggtggtggtggtcgccgccgatctgttcggagcggcggtcgcgcggtcggcgtcggcgcgtcacgcggtggggaagaagcagcgggagttcgactacttcgcgctggcgctgcagtggcctggcaccatctgcgcctcaacccgccactgctgcgccatcaacggatgctgccgctcggagccgctccagacgttcacgatccatgggctgtggccggactacgacgacgggacctggccggcgtgctgccgccacaccagcttcgacatggacaagatattgcccctgaagccgacgcttgagaagtactggccgtccctctactgctcatcctcttccacttgcttcagtggcaaggggcccttctgggctcatgagtgggagaaacatggaacatgctcatccccggtagttaaggatgaattagagtatttcaccactgctcttgacctctacttcaaatacaacgtcacggaaatgttggcaagtggtggtatccatgtttcaaatggtaaacaatatgcgctaactgatgtcattgatgccatcaaatgtgcttttggggcctcaccgcaaattgtttgcaagaagggctcagttgaagaactgaggttatgctttgacaaagatttgaagccccttgattgccttactactactgctaccaatgaaaacgtatcgaagaagaagtattgccctcgatacatcaccctgccaacatatgaccccatagtacatgctaattctactcgggagatcataacagtcgaaagtgaggtctatggatatctttacacatcctaagatacgattaccgcgagcaagaattacatggccatgatgaagccggtagttcagggctcttagctgcttaagacatactggggccggcattgaggttcaaggaaatgtatatctagataactcgattattacatttgtaagcacggcacgccagaacaacggagaatgtgattgtgtctgaaaaatcaattgctttatgtactatgcaaggttggaaaatagttcgtccatgtatatagtcattggtcagggtcatctgcgactgcaatctgctgaattataatggacagtggcaatcggtctgaacttttctggct

SEQ ID NO: 7714 - DNA, 360 bp, Oryza sativa
  ref <308>: DATABASE ACCESSION NUMBER: AK105062
  ref <309>: DATABASE ENTRY DATE: 2002-08-28
tgagaatgttagggagatgtggactgaggtaccaaagactggtaaaggcaagaagaaggctcttccagtgaacaaggacaggttcattagcaagatgttcctacgtggggattcggtcatcattgtgctcaggaacccgaaatgagttatatggtcttgtatccaggattgtctctttgctacgtcgctcttagtaatgtccaaacacctttggctaagattgaccagaatcagctatatttgatggttcagtgttgtagttggagttgttatggattatgaacgtctcttgtatctaagttgcatcgttagcatctgtttgaatcatcaatatattagctgaagacaatttggaactgc

SEQ ID NO: 7715 - DNA, 1718 bp, Oryza sativa
  ref <308>: DATABASE ACCESSION NUMBER: AK105063
  ref <309>: DATABASE ENTRY DATE: 2002-08-28
aaccgagcgccatcgcgatgccacctcccgccgtgagcacggcgccggtagctccggtcgtcgcgtcgtcgtcatcggcggcggcggcggcgccccgtagacctcgctcgctccgcctccgcgtgaccccgtacgcctccgtatcctcgtcgtcctccccttccaccttcgccgtctccatcccaccgccgcctccagcgaggcattcccgcaagcagctggtgggcagggacggcgcccccgcgaagcccgcgaaacctcgggtgttcttcctcgacgtcaaccctctctgcttccgcggatcccagcgcagcctcggcgccttcgcgcgctggctcgcgctcttcttcgcgcacgtcagcctccgcgaccccgtcgtcgccgttttggacggggagggcgggaacgagtaccggcggcggctgctaccgtcctacaaggcgcaccgacctcgtggccctggtacaggcgccgattcgcgcgttatcgatgttcttcgcgagtgcaatgttccggtcgtcagagtcgatgggtatgaggcagatgatgtagtggctaccttaacagagcaagttttacagaaaggttttagagttgtcattggctcaccagataaagacttcaagcagctgatatctgaagatgttcagttagttatgcccattcctgagattggccgttggtccttttatacgctgaggcattatgttgcacagtacaagtgtgacccaaccgcagatttgagcctcaggtgcttcataggtgatgaagcagatggtattccaggaatacagcaccttgttcctggttttggtcggaaaactgcagtgaaacttctaaagaaacatggttcattggaaaatttgcttaatacagctgcagttagaactgttggcaaggactatgcccaggatgctctagttaagcatgcagattacctgcggaaaaattatgaagttctcagcttgaagagggatgtaaaagttcagcttgatgacagatggttatccacaagggactcttgcaacgacagcagtgttttgtctgacttcatccttaaatttaacgaagggcagaatatcagaggaaattagtgtattcttggatccatcaaataactccttgctacgggattcctgataagttattcttcttttagcggcctattgttgtagtatcatttcagaaatgcagttcattatagatgcagagtagaaatcgcattgccagcattacagtcgttttcccccaagtcactcatgccctgggctagatatagcatacgtgagatgtactgcctcttcagtttggttaatgttgtagtctagtgctaggactgtaattttgtatcagtagccgttcaaggttctagaagagcaaggagtagtatctaaccaagtaccaacccacattttgataccaagtgcgtggttatgtgcaagctatactgagtcatcaaacagctgcctactcaattcttctcgtctgtcacactatcaacatagcttaaaccaagaagattcaagaagtagcaaagtgtgcattctgaagggcagtcgtgatgatatattgatatgaagtgtcctccgatgcttttagtgagaattggatcttcagggttttttctttctggcattctgcaatgttattaaggtgtagcggcagtttagggtactactccctccggtcacaaataaataacattttgaaatgcgtac

SEQ ID NO: 7716 - DNA, 848 bp, Oryza sativa
  ref <308>: DATABASE ACCESSION NUMBER: AK105064
  ref <309>: DATABASE ENTRY DATE: 2002-08-28
aagttctgaagtgctctctctctctctctctcggtgtttccccttcggccttctcgtccgccccttctctcctccaccatccgcctcaccggcgtacggctccgacgagatggccgccccgctccggcggagcctcccctccctggggcgcacgctcctctcgccgtcccccgcgcccgcgcggatgctctccgcggcggcgtccgacgccctcgtcgagatcaagccaggcgagatcggcatggtctccggcatccccgaggagcacctccgccgcaaggttgtaatatattcacccgctaggactgcatctcagcagggttcaggcaaagtcgggaggtggaaaatcaactttgtgtcaacccaaaagtgggagaacccattaatgggatggacatctactggagatccatatgctaatgttggtgaagcagggcttacgtttgacagtgcagattcagcaaaggcatttgctgaaaagcatggatgggattatgtggttaggaaacgccatacacttcttttgaaggccaaatcttatgcagagaacttcaagtggaggggtcccccgaaggcagagcaagcctgagcactaatcttgcatgctacattgctagcaggacatgcacaagatggtgtttacccccatatgtgttgtttttggtttctccaatctgttgtgcgagtgtgggcttagaccgttcctcaaccaactctcaattataataagcgtgcactgtgatcaaatagaatgatttcctgtgtactaaaattgtttaccattatccttccacatcatttcataaagatcctttacctgtttgcttaggttgttaaagcaaaacttg

SEQ ID NO: 7717 - DNA, 1267 bp, Oryza sativa
  ref <308>: DATABASE ACCESSION NUMBER: AK105065
  ref <309>: DATABASE ENTRY DATE: 2002-08-28
actttgaccttttacttcgtcatagattgcacattgttggagaggtccgtcttgctgttcgtcattgcctgttagccaatcccggtgtcaagattgaaaacttgaaaagtgcaatgagccatccccaggctcttgcacaatgtgagcacacattgacagagttcggaattgaacatagagaagctgttgatgatactgctggtgcagcaaagactgtagcagaacaaaatctccaagataccggtgcgattgccagttcactggcagctgaactttatggactgaatgttcttgctgaaaatattcaggatgacaaagataatgttacccgttttatgatgctggctcgagaaccaattatacctcgcaccgataaaccattcaagactagcatagtcttttcacttgaagaaggacctgggcaactctttaaggcacttggggtgtttgcactgagggaaatcaacctaaccaagatagaaagccgcccacacaagaaaaggcctcttcgtataactgacgacagcttttccacaccgtcaaagcagtttgactacctcttctatatggaccttgaggcatcaatggctgatccaaaaactcagaatgctcttggaaatttgaaggagtttgcaacctttttaagagtccttggaagctatcctacagatgtaaatgaagcttaaatagcaagcaccttctgcatatcacatgctagattaccagggatggattgagcgtgggctgtcaatttcacagcgagttgggaagtcatcaataatttctagactgatgctaatttgaagagcaataaagcatatccatgtattatcggcaaggaagctgcatgtgacttggttagaagatggaaaagaacaaaatagtgggttttacgttttactaagagctttatagtgatatacttaccaccatccatgccctatagtccttatgttgtaacttatgttcttctaagcaatcatgttcaacagaggtagagctcaaagggttgaatgtttggtaggtgccggtggttataggtagtggtgtagaacaatttcgctcgttcccaggggatgcgctggtcaaacccttcagtcggcttgccacccaactgttgtattttcttgtcctgtatgtgctcatggactcttagtcgtgagctcgtagcagatagttcaatcatgtttccctcgtgccaacatggcacagtacctcaaaattatttgctgtgtctttgaaattcttatggcggtattggaaggac

SEQ ID NO: 7718 - DNA, 1230 bp, Oryza sativa
  ref <308>: DATABASE ACCESSION NUMBER: AK105066
  ref <309>: DATABASE ENTRY DATE: 2002-08-28
aaaaaaaaaaaaaaaaaggacatgatagattggatgcatgggggaggacaggtcggtatatttgatgcgacaaacagcacaagaaaacgaaggtatatgctaatgaaaatggctgaagggaactgtaagattatatttctggaaactatctgtaacgatccgaatataattgaaaggaatgtacgtctgaagatacagcaaagtcctgactatgctgaccagccagattatgaaactggagtgcgggacttcaaggaacgcctggcaaactatgaaaaggtgtatgagccagtgcaggaaggttcttacattaaaatgattgatatggtaaaagggcagggaggccagttacaggtcaacaatatcagtggttatctccctggaaggattgtctttttcttggtgaactctcatcttacacctcgacctattttgcttacaaggcatggtgagagtttacacaatgtcagaggaagagttggtggtgacacggtcctgagtgaagatggagagctttactcgaagaaattagccaacttcatagaaaagaggctcaaatctgagaaaactgcatctatatggaccagcacgcttcagaggacaattttgacagcaagtccaatagttggattcccaaagatacaatggcgtgctcttgatgagataaactctggggtgtgtgatgggatgacgtatgaagagataaagaaagttatgcccgaggaatttgaatcacgcaagaaggacaaattaagatatcgatacccccgtggagaatcttaccttgatgtgattcagagactggaacctgttatcattgagctagaacgccagcgagcaccagtagtcgttatttcccaccaggctgtattgcgggcgctatatgcatatttcgctgacaggcctctgagggaagtcccagatattgagatgcctctccacaccataattgagatacaaatgggagtcacaggtgttgaggagaagaggtacaagctcatggactgaatatacatacatctaggctcagtaggacagcaagtctttgctgttttcagatagtcatacagtaacacagatatacgatcgagtcactacaggtctacagctaccacattgtcatttttctcccgacggtgcaaaaacaaaaactagcacctccggtgtaaaactgtaacccactatacccatgaatcactgtaaaaagaagcattcacccaatcagtagtt

SEQ ID NO: 7719 - DNA, 1763 bp, Oryza sativa
  ref <308>: DATABASE ACCESSION NUMBER: AK105067
  ref <309>: DATABASE ENTRY DATE: 2002-08-28
acatgtgaatatcgcacatgctcatcgctgcttctttcctccgacgactcgccgccgcctgaaatctctttcttgattcgtgcgctcctgagctaccccgatggccgcccaatcttccactccctcgccgcaagatggttctggtagaggtgaattctcagacaatttggtacttcaaaccccacagccaatgcgggaggattacatacagaatgctgttaactttcttggacatccaaaagtgaagggttctccagtattttacaggcgctcttttctggaaaagaaaggccttacaaaggaagaaatcgacgaggccttccgtcgggttcctgatccacagccaaacagtacagatgttgcagctgttgcttcacaacaagccggcatcgcaaatcaatctgctggagtacaaccttacgagacagttcaagcaccacaagccattaacactggtcctatcgttccacatgcgcagccgcaacttagctggtcccgtactctcattggtgtaggtgttttcctcggagttggggctagtgctgctgtcatcctcaagaaattgtttgttcctaggctaaaatcttggatccaaggagcccatgttgaaggggatgaaatttctgggaatgaacttaaatccaagtttatgaagaaatcaaagcagccatacaagattctgcatcagcgttttctgatattgctaaaacaaaccaagagttgcttgcttcaaaggatgaaggtttcataattttccgttgatacattagcatgttttagcagaagaaatgtacaatagctatcactgtttcgggtttgatcgtcttaatgaatctcacttgtttatagataagaagatacttacaaagttggcacaagcatttgattcgcaagcagaggcgtttagatccttgagtgattccttgaatcgtatgagtgagaataggttttaccagtacaatctaatggaggatcattttcaatctgccccatggaatgggccaactacaaattcatggagagcttctcagcaaacaaacgcatacaacacatcaccacgcagtgattttgactccgggaggcatccgttcatgccagtaccgggagaaccttcacctggagcatttccggcgagatcctatgttgagcagcagcggatgcagaggcctgggtacggatttcagcctcagatgagcaatgacaggtggaaccctggctcgccattgacgaactaccacggtgctcctccgtatcagcagtatcaccatggatccaccaacgccatcgatgaagctccagctccagctccagttccagctccagctccaccagctgaaagcccgttccagcgtcgctgggttcccccacagccaccgggcgtcgtcatgccggaggccgtggccgccatacggcagccgaggcagcaagttgcagcggcatcgagaccgtcggaatccgccgcggcgacagagcagccacagtcaggtgacgtcgccggtggcgccgccatggccaatgcgggcaatggcgaggccgagcaagagcgggaagctgctgcttaattactccatttcttttttttttgtttgccacgcgatgcatgcgtctctcgtgtacaaaatacagactagtgacgattacctatgagaaaaagaagaggaacaaatgttgtgtattcattcactgtgggtgtgaatactgactctactgagattatactctgtctgtctctaaatataagggattatactatgtctgtctct

SEQ ID NO: 7720 - DNA, 721 bp, Oryza sativa
  ref <308>: DATABASE ACCESSION NUMBER: AK105068
  ref <309>: DATABASE ENTRY DATE: 2002-08-28
aaaaaaaaaaaaatgctggaaacgatctttcaaaaagtttgacatataggtatgaccttgttgacctgacaaggcaatcactgtcgaaattagcaaatgaagtgtaccttgatgccatgaatgcttaccgaaagaaagattcaaatggtctaaacttttacacgaagaaattccttgagctcattgtggatattgatacactactagcttctgatgataattttctgctggggccttggcttgaagatgcaaaaagccttgctaggactgaaaatgaacgaaagcagtatgagtggaatgctagaacacaggtaacaatgtggtatgacaatacaaagaccgagcagagtaaactacacgactatgccaataaattttggagtggactgctgaagagctactatctaccaagggcatcgaaatacttcagtcgattaacaaaaggcctacaagagaaccagagttttcagctggaggaatggacgaaagattggattgcctactcgaatgaatggcagtccgggaaggagctctatgctgtgaaggctacgggtgatgctttggcaatttccagctcactattcaaaaagtacttcagttagctgcaattgtccacttcgaattattagatgattgaaaatatcacatttccagcccctgcactaggtgcacacgccctaactgttggaataaagccaactgtctactttgttgatgtggt

SEQ ID NO: 7721 - DNA, 1304 bp, Oryza sativa
  ref <308>: DATABASE ACCESSION NUMBER: AK105069
  ref <309>: DATABASE ENTRY DATE: 2002-08-28
aagtatctctctctaaagattcttggacgactcgtgctcgtgcgtaaaagaaagaaatctcccgtctcctcgtcgttcctggcgagcagagcaggagaggggaggagatcctgatctggaagaagaaggagctcttctccgaatttcagaaccctaaacctcaatacaagcaacagtttgtttgttcccccaaagtacccccaccaatgtcccaagctggatcggaatccgccgctgccaaggagccgtcgttcaaggagggcgagagagtgctcgcctaccacggcccgctcctctacgaggccaaggttcaaaagtccgaaaacaaggaggatgagtggcggtatcatgtccattatcttggttggaataagagctgggatgaatgggtcacaaatgatcgcttactgaaattgaccgacgaaaatatccgcaaacaacaagagcttgaaaagagccaagtagttgacaaaagcgtaaaatctggacggtcagcgcagcataagccaaaaggctctaatgatgcaaaaactgataaagaagacaccaagattattatcaaggggaagaaacgcaaaagtcagcctggtgggactgaggagaaagaaagaaaatcatctgagagtctcttcatgtcacattttccttcaacgctaaaaaagcaacttgttgatgattgggagtttgtcacgcagctgggtaagcttgtgaagctacctcggtcccccacggtcgatgatattctaaagaagtacttggagcaccggacaaagaaggataacaagataaatgactcttacgctgagattttgaaaggattgcgatgctactttgataaagcattgcctgcaatgcttttgtataagaaagagcgacagcagtactctgaagaggttaaaggcgatgtttcgccctcaactatatatggagctgagcatctactgcgcctttttgtgaaattgccggagctacttgcgtctgtcaacatggaagaagatgcactcaacaaactacagcagaaattgctggacattctcaagtttctgcagaagaatcagggtccgttcttcctttctgcgtatgatggtggttctaaaggtactgatgggataaagaccaaatagaagcaaactgttgcatctgtatgttgactgtacttaactgtctcgctgagtaattttaattttcatgtgattgaacaatgtgtcgatgaacatcgtagcactgtttgctaatgctaatttcatgtagtgcagcagaaggtttccaaaaaaaaaaaaaaaaaaaaaaaaaaaaaaaaaaag

SEQ ID NO: 7722 - DNA, 1267 bp, Oryza sativa
  ref <308>: DATABASE ACCESSION NUMBER: AK105070
  ref <309>: DATABASE ENTRY DATE: 2002-08-28
aaaaaaaaaaaaatcagacgtaaagaaacttgagcctacaaatggcactgaaaaagaaaatgcccgccccaagaaagggaaaaataatgaagagggtaacaattctgataaaggcgaggaggatgaagaagaggaagctgcacgcaaaaataggcttgcgctcaacaaaaaaagtatggatgacgatgaggaaggtggaaaggatctggacttcgatttggatgatgaaattgaaaaaggtgatgactgggagcacgaagaaacattcactgacgacgatgaggctgtggatatagacccagaggagcgggcagatttagctcctgagattcccgctcctcctgaaattaagcaggatgatgaagagaatgaagaagagggtggtctgagcaagtctggcaaggggttgaaaaagcttcttgggaaagctgctggacttaatgagtcagatgccgatgaggatgacgaagatgatgacgaggatgagtcatctccagtgcttgctccaaaacagaaggatcaacccaaagatgaacctgtagataacagccccgctaaaccaacaccatcaggacatgctcgtggcacacctcctgcatccaaatcgaagcaaaagaggaaatcaggtggtggtgatgattcaaaagcatctggcggtgcagcttccaaaaaagcaaaggtggaatctgatacaaaaccatcagtggccaaagatgagacaccatcttcctcaaaacctgcatcgaaggccactgctgcatcaaaaactagtgcaaatgtatctcctgtcacagaggatgaaatcaggactgttcttcttgctgttgctcctgtcactacacaagatttggtatctagatttaagtctagactacgaggtccagaggacaagaatgcttttgctgaaattctgaagaaaatatcgaagattcagaagactaatggccacaattatgtcgtccttagagatgacaagaagtgaagagcaaaactaaagtggtgctttcttaaaatgcaaccttttgctttgctgtgccttttggcataacatgtttgtaagataagtgtattggaagaattggccttgtaacctgatgtatttagggcctatttggattgttaccctaccaattttttggtagtgccaaaatgtaggcaagttttggcactaccaaatctttggtaaagtaagattgcattgatcatatttggtttgctaccaatatatagctaaaatgtaaaattgtagtgaagaatattctagatg

SEQ ID NO: 7723 - DNA, 2822 bp, Oryza sativa
  ref <308>: DATABASE ACCESSION NUMBER: AK105071
  ref <309>: DATABASE ENTRY DATE: 2002-08-28
agccgcgatgctcctgacgcgcgcctcccccaccttcctcccctccacctccgccgcctcgccctcgccgcagcaggcgccgtcctccccgaccttcgggaggagccagtaccgccggggaggtggattggtctccgtttcttctccggtggccggtcagcgctgtgctgccaggaggaggtccgtgatggcggcggccggcgcggtccccgcggcgaagctggagaacgccgacgcgctcatcgactccgtcgagacgttcatattcgattgcgacggtgtgatttggaagggcgacaagctgatcgacggagtgccggagacgctcgacatgctcagatcaaagggcaagaggctggtgttcgtgacgaacaactcgaccaagtcgaggaagcaatacgggaagaagtttgagacgctgggactaaacgtcaatgaggaagagatcttcgcttcgtcgttcgcagctgccgcgtacctgcagtccatcgatttccccaaagacaagaaggtttatgtgattggagaggacgggattctgaaggagctggagctggctggatttcagtacctcggcgggccatctgatggagacaagaagatagagctgaagcctggattttacatggaacatgacaaagatgttggagcagttgttgtgggattcgatcgctattttaactactacaaagtacagtacgggacactgtgcattcgtgagaatccagggtgccttttcattgccacaaaccgggacgccgtcacccatcttactgatgcccaagagtgggcaggtggagggtcaatggttggtgcaattcttggttcaactaaacaagaaccgctcgttgtcgggaagccgtcaacattcatgatggactacctggcaaagaagtttgggatcacaacatcccagatatgcatggttggtgaccgtttggataccgacatcttgtttggccaaaacggaggttgcaaaactcttctggtcctttcaggtgtcacttctgtacagatgcttcagagccctgacaactcgatccagccagatttctacacaaaccaaatttctgattttctcaccctcaaagcagcaactgtctgaagaaatgggaagtaaatgtgttacagatgggcgaggccccttacttttgtataggcggcatccgccaatttttagcaactaaggtcacaaggatgctttttctttccacattgttttgtaaccatgagacaaatgtttatacactattatatgtaacacaagtgcatatcacaatggatactattgaccacttgtccttagctcaaaatcaacaatgagcaaccataattgtttataataaagaaaagggcagtcaagtacaaaaaaaaaaaaaaaaaaaggccatggcctactggagagcctcggcccctcgcctcgcctcgcctcacctccacccaaacccaatccgaaatctttccctccactcgccgccgccgccgccgccgctgttgccggtgacccgccagccatgtcgtgctcgcacctctccaccgcctggtcctcctccgccctggccacccgccgccgctccgctcctagctgcggcagcagcggccgcctgcaggtggtgcggtgctcgctgcgtgagctgcggagccgcatcgactcggtgcgcaacacgcagaagatcacggaggcgatgaagctggtggcggcggccaaggtgcggcgggcgcaggaggcggtggtgtcctcccgccccttctcggaggcgctggtggaggtgctctacaacatgaaccaggagatccagacggaggacatcgacctccccctcacccgcatccgccccgtcaagaaggtcgccctcgtcgtcctcaccggcgagcgcggcctctgcggcagcttcaacaacaacgtcctcaagaaggccgagacccgcatcgaggagctcaagcagctcggcctcgagtacaccgtcgtcagcgtcggcaagaagggcaacgcctacttcatccgccgccccttcatccccaccgagcggacgctggaggtgaacggcatccccaccgtgaaggactcccagtccatctgcgacctcgtctactcgctgttcgtgtccgaggcggtggacaaggtggagctcctctactccaagttcgtctccctcgtccgctccgaccccatcatccagacgctgctccccatgtcgcccaagggggagatctgcgacatcaacggcgtgtgcgtggacgccaccgaggacgagctgttccggctcaccaccaaggaagggaagctgaccgtggagcgggagaaggtgaagatcgagacgcagcccttctcacccgtggtgcagttcgagcaggaccccgtccagatccccgacgcgctcctcccgctctacctcaacagccagatcctccgcgcgctccaggagtcgctcgccagcgagctcgccgccaggatgagcgccatgagcagcgccaccgacaacgccatcgagctccggaagaacctctccatggtctacaaccgccagcgccaggccaagatcaccggcgagatcctcgagatcgtcgccggcgccgacgccctcgcctaaatccaatcaactcatttcttcatcccatccacctcgcttgagctgctgaggttgctgctgttatatatactactctattcttttttacttcctttttctctcttgctattgtgtctgtaatttctgtgatagcacgaaaaaaaaaaggaaaaaagatcgatccgactcgatcgatgtaattgttaatcgcgcgagatacacaagatttcaattcagcgatgccaaatgtac

SEQ ID NO: 7724 - DNA, 940 bp, Oryza sativa
  ref <308>: DATABASE ACCESSION NUMBER: AK105072
  ref <309>: DATABASE ENTRY DATE: 2002-08-28
aaaaaaaaaagagtttcagtggaacaagattacagtatttctaaaattagcatcagcaaggggtaacttcaggtataatactggcgttttgcctgagaggaagggtttggatgttgcaaaacttgtagagatcagtgatgcatcttcttcactccatcttaaccgtgctacaccagaaagagcactacatactgcaaatctgtgcttgcggcttttactatcgaaggagagcattgtgataaggagacttgtaatgacagcgaacgcgaagtcacttgctcgtgacctgatctccaaagatgcatcgatttaccgggtgctcttaagtcgggtacttgccgatgtcatcttccagtggatggtgaaggcaactggttttaaacgagccggacagctcgagcctcacccacgcgtgacagcaggaaagaacgatgaagacctggggctgtccaaagaagcaccagccttggtgacattccagacagcagtaagagatcgcaggctgaaggtgatattctccaagttcgtcagggacataagagaggaccccatcctgatggtcagagtgagctggaacatgtttgctatctcggtggtctccgctgcaattggcgttcaccgtttcatcgtcgtcttgtcggaggaatttctgtctacattaccaccgcctgtgcctccgccgcggctagttattcagagcatatgaagagcagcaactatgccttggtgcatgaagtaacttttttactgggtatcccgtagctgtatataaacgttttcaggagcagaatcagccatcctgtagctgacagtagctcgatcagagttctccatggctagttctccgtaaatttgtcttctactattacaggcttcctttgaaaagggaattttgtgggaattaaactgatttttgtgaaagtactgtaaaattcttgtc

SEQ ID NO: 7725 - DNA, 1755 bp, Oryza sativa
  ref <308>: DATABASE ACCESSION NUMBER: AK105073
  ref <309>: DATABASE ENTRY DATE: 2002-08-28
aaaaaaaaaaaaaggggggattatttggccctctttctctttcctttcgcaggaagatttggtgattcttcttctgagggctcctctaaggatttgggaggatggggaagaaggggaagtggtttggagctgtcaagaaggtgttcagccctgaatccaaggagaagaaggaggagagactgaggagaaaattagcagctagtaacccgaacccgccagatctaaccccttcggcttctctggaagtcaatgtttcggtgccaccccctccacctcctccacctgttcaacagattgaagaggttaaggtccctgaagttgagcaggagcaaagcaaacatgtcactgtggaggctgtacctgaggctgtccccgtacccgcacagacatcgtcattgccacctggtgtatcaagggaagagcaagctacaatcaagatccagaccgccttccgaggttacctggcaaggagggcattacgagctctgcggggacttgtcagattgaagtcactggttgagggtaactcggttaagcgtcaagctgcaagcactctgcgttgcatgcagactctagcacgggtgcagtcgcagatacgttcaaggaggctgaaaatgtcagaggagaaccaggccctccagcgccagcttctgctgaaacaggagctggagagtttgaggatgggggagcagtgggatgacagcactcagtctaaggaacaaattgaggcgagtcttataagcaggcaagaggctgcagtaagaagggagagggcgctcgcatatgcattttcacatcagtggaagagcacttcaaggtcagtcaacccaatgtttgtagaccctaacaacccacaatggggatggagctggttggaacgctggatggcagcaaagccttgggaggggcgtgctgggaccgacaaggagagcaaccttgaccgtgcatcagcgaagagtgcaagcttgaatcttggagagggtgagatcacaaaagccttcaaccgtaggggatccaagccagacaagtcatcaccaacaactccaaagctgacccgtccagcctcccgtcaatccccttcaactccctccgctaaagtgtcaccgatctttgcaaagaagaaatccgcgacaccgaagaatgggctctcacaggttgatgacgacgcgaagagtgtgttcagtgtccagtctgaacgaccgaggaggcacagtatagccacgtcaaccgtgcgtgacgacgagagcctcgcaagctccccatctgtgccaagctacatggctcccacaaaatctgcaagagctaagttgcgcctccaaggatctgcagtgaccgatggtgcagagacaccaccggagaaagtagcctctgttggttcagtgaagaagaagctgtccttccaagctggaatggcgccgccttctccgatgaggcggcattcgggccctcccaaggtggaggtggtgaaggacattgctgagccaccacagccagaggccttggtgatcaatggtggaagcaagtgactcatatgacaagtaccaggagggagcaatggattctgcagatatatttcatccaatgaacaaaggtttaagattatatatcagctgtatgagttgccggcattgtttttccagttataaccacattatttgctctagcagattcgcaagtaccctgccagtcgattccatttgttgtttctgtaaaactatatcgatttgtcacttgaaacctttggtgtttgtatgt

SEQ ID NO: 7726 - DNA, 356 bp, Oryza sativa
  ref <308>: DATABASE ACCESSION NUMBER: AK105074
  ref <309>: DATABASE ENTRY DATE: 2002-08-28
atcgttcgagcgtgcactgaagcagagcctcgagagggtccgtatcagcgcgagatggatcgagagcatcaggagcgagcctaaccttgctcagacagtgaacgagctgctgcagcacgacatgtagccttccttttgggctaaagctatttgtacgctcatggaggatcgtacaacacaaatgttcttcgaaaggttgtgccgggtgtggctgttctaacgatcatattttaaagtttgtttagttctatctctatcttttgcttgggcaatcgaaaagacatgtttggtcctcgcagcgaggtgtgcttggttcagcttttgtcaggactggcaatgaaaatcacaaatcttgt

SEQ ID NO: 7727 - DNA, 672 bp, Oryza sativa
  ref <308>: DATABASE ACCESSION NUMBER: AK105075
  ref <309>: DATABASE ENTRY DATE: 2002-08-28
ctcacccacccccaaaccctagctccccccgcgccgccgccgccgccgccgccatgaagcgcaacccacgcgtgacgagctcccggcggaagtgccggaaggcgcacttcacggcgccgtcctccgtccgccgcgtcctcatgtccgccgccctctccaccgagctccgccacaagtacaacgtccgctccatccccatccgcaaggacgacgaggtgcaggtggtgagggggagctacaagggccgcgaggggaaggtggtgcaggtctaccgccgccggtgggtgatccacgtcgagcgcatcacgagggagaaggtgaacgggtccaccgtcaacgtcgggatccacccctccaaggtggtcgtcaccaagctcaagctcgacaaggaccgcaaggccatcctcgaccgcaaggcgagcggccgcgccgccgacaaggccaagggcaagttcaccgccgaggacgtggccgccgccggcgcctcgctccaggagatcgattaggagctggttttgtaccaccttgtcagttgtcactccttcctctgttacaagtttatgctacttgcttgaaagaattattatcataatctatcttttctaagagttttgaaactgatatttgtcttccattttgatagattaaaaactcattatgtgttaattgatc

SEQ ID NO: 7728 - DNA, 1467 bp, Oryza sativa
  ref <308>: DATABASE ACCESSION NUMBER: AK105076
  ref <309>: DATABASE ENTRY DATE: 2002-08-28
attgtgagacatgggatgcatccggtgatcttggattagatcagacagtggagctaagtactggagtggcaataccaagaattggagcaatacctactccactggtagctcgaatatcatttctctctgaggactggttgaagtcctcactcagagaacacatgatgggtgtttctgttggtttgctctccaccatgaaccataacctcgcttacaatctgtcatggcgaactataacagaccgagcactgatgtcatccaattccataagggggcagttagggcatagccttttgtcctctattaaatatgcatacaaggttgaccagagagattcaagaattcgaccgacgcgaggatatgcttatctattttcttctcaagttggaggccttgcaccagagagcaaagatgcacgttacattagacaggaacttgatcttcgagtggctttaccgctgggtgtgttgaatggcgcccttaatgctggagtggctgctgggatcatccacccattggcaaggggatcgacgggctctatatcgccactttcagagcagttctacttgggtggcaataggtctcttatgtgccgcttgggtggaccatcatcactattaggtttcaagaaaagagggctggggacagacttgcaaagcagtaccccagagaattctgaaaatgttgcttccacttctcctgagctaagtgcacggggaggtgacattgcggtcacagcctttgctgatctgtcatttgatatacctctgaagccgctcagggagctgggaatccatggccatgcatttgtctcagctggaaatcttgccaaactaacagagcctgatctcaggaaattccctcttgctgagtttctacaaacattcaggagttctgcaggatttggtgtagttgtgccaacaagattatttcgcatagaggtgaattactgccacatcctaaaacagtttgattatgacctcgggaaggcggggatacagttgaacttttcttcgccctaatttctttctgccacaagattaatagctgtactttccttttcccctcactatgaccctcagctttgggtctttttcttcctccacaattaatctctccagaaaaaagggcccagaaactgtgggtgatgaattcttgtcctggcctatgatatgatattgacacctgtaaagtttacaatcaaaatggaaatgaaagtcgtgaggagcatcagtttgcaatgcttttctccatgctagtggaagtgacagtcacatgataattctgttcaagtatgattgtcaatagaacagctgtggtgaaaaacatcgactgtgcaagctacgacatatagtattgtacattgttggaattttgttaaagacccacatgttctaatgtgagtcccaacatgtaagattttacactgcaatttcatcaaagaaacactatacagtgcaccctgtg

SEQ ID NO: 7729 - DNA, 1538 bp, Oryza sativa
  ref <308>: DATABASE ACCESSION NUMBER: AK105077
  ref <309>: DATABASE ENTRY DATE: 2002-08-28
cactaagagaagagctctatgatgtaccatacaacaagatcaattggaacaatgctcgcatttcttgttgcaaggacgacattatttatcctccttcgtggttccaaaacattgctatggcttctttacataaatttatggaaccactatttaatatgtggccaatgaacaagctaagaaaaagagctttgaccaacctcatggatcatattcactatgaagatgaaaacagcaattatgtgggtttatgcccaattaacaaggtattaaatatgatttgctgctggatagaaaatccgaactccaatgcattcagacgacacgttccaaggattcatgatttcctatggcttgcagaagatggaatgaagtcaaaggtgtacgttggtagccggtgctgggatactgcccttatagttcaggcctactgctcaaccggccttactcaagaatttagtgaaactatcaagaaagctcatgattttataaagaatgcgcaggtaaccaagaattgtcctaattacaaaagatattaccgtgaaaggtcaaaaggttcatggacattatcaaatggagaaaatggatggcctattgcggatactcttgccgaatgccttaaggcggtgttgttgttatcaaagattccaccaacccaagtaggagatccaattcaagaacaaaggttgtatgatgctattgactgcctactttcatatgtgaacaaggatggcactttgtcctctgcagaatctaagagaacaactccatgggtggagttcatcaacccttccgagagtttccggaacataattgtggattacccgtaagcgagacatgtacgtggaatgcacatcatcactaattcaagccttgatactgtttaaaggcgttcatcctggataccgccgtgaagagatagatagaattatcaaaaatggtgtgttgttcatcgagaaaaaacaaaaaaatgatggatcgtggtgtggatcttgggctgtctgttttacttatgctaccttctttgctataaaaggactggttgcggcaggaagaacattccaaaacagtttgtctattaggaaggcatgcaacttcttgctgtcaaagcagctaagtactggtggatggggagaggattacctcggttgtcaagttgaggagtatattgacagtgggaggcctcatgtagttcacactgcgtggggaatgttgggcttaatatatgctggacaggttgaattagatccggcaccattataccgtgcggccaaagaattaatcaacatgcagctggagacaggagaatttccacaacaagaaattcttgggagcttcaattcctccctcttcttcaattacacaaactacaggaacttgttcccaatctgggccctaggaaagtttcaccgccgacttctagcaaaaagggcttaaaggaatccctcattacctacatatattgtacttcatctaaaaataatcagacatgtattgtaataaacgtatccaccatagctcaaaagatcttgctatcgact

SEQ ID NO: 7730 - DNA, 1504 bp, Oryza sativa
  ref <308>: DATABASE ACCESSION NUMBER: AK105078
  ref <309>: DATABASE ENTRY DATE: 2002-08-28
agtgagaaagaaatgcatagagactctcgacgtgagaccttgagtccgccattttcaatcttcgggaaattgacaactatgatgagtatgaacgctcgatgcttatctcccagatgagctttgagaagtcgtttggactgtcatcagtgttcatagaatcaactcttatggagaatggaggcgttcctgagtccgcaaacccatctacactgatcaaagaggccattcatgtcattagctgtggatatgaagagaaaactgaatggggaaaagagattggctggatctacggttcagtcacagaggatatcctgactgggtttaagatgcactgccgtggctggcgatccatctactgcatgccgataagacccgcgttcaagggatcagcgccaatcaacctttctgatcgtctccaccaggttctccggtgggctctcggttccgttgagatcttcctcagccggcactgcccactctggtacggctacggtggtggtcgtctgaaatggctccagagattgtcctacatcaacaccatcgtctacccgttcacctctcttcctcttattgcatactgttgcctgcccgccatttgcctgctcacaggcaaattcatcattcccacgctctccaacgctgcaaccatatggtttcttggcctcttcatctccatcatcgtgacgagcgtcctggagctgcggtggagtggcatcggcatcgaggactggtggcgcaacgagcagttctgggtcatcggtggcgtctccgcccacctcttcgccgtgttccagggtatcctcaagatgattgctgggctggacaccaacttcaccgttacggccaaggcgacggacgacaccgagttcggcgagctgtacgtgttcaagtggacgacggtgctgatcccgccgacctccatcctggtgctcaacctcgtcggcgtggtggccgggttctccgacgcgctcaacagcggctacgagtcctggggcccgctcttcggcaaggtgttcttcgccatgtgggtgatcatgcacttgtaccccttcctcaagggtctcatgggtcgccagaaccggacgcccaccatcgtcgtgctctggtctgtcctgctcgcctccgtcttctccctcctctgggtcaagatcgacccgttcatcggcagctccgagaccaccaccaccaacagctgcgccaacttcgactgctgagcgacatttgtgctccaggagcatcccgtttggcggtgttttgccggtattgcaaatgtgtgtatctaatgcgacgaagacgatgggtggtttcctctctctgggctttgtcctcgatctgagaggtgttgtaggttagtactccgcatgaaaatgttcattgtattgttattgtctgtgatataagaagttttgatgttgaagccgctgaaactatgagagggcaccgttaaatccgtttaatcatacttgtagaaaaaagagggggaaagaaaaggttttcttcggtg

SEQ ID NO: 7731 - DNA, 1418 bp, Oryza sativa
  ref <308>: DATABASE ACCESSION NUMBER: AK105079
  ref <309>: DATABASE ENTRY DATE: 2002-08-28
cttcccccacctccgcctctctctcgatccatctcccccctctctcctctcctctctctctccgttcccaatctgcggaggcggaggcggagctagggcgcggcgtcgccggcgaggagttccgcaggcgcggtgtggacggggctcctctgcttccgcacacggcgggcggcgacggcgagcagggttggaggggcggcgcggcgacctcctcgttcctgccttgcctgcctccatctggtgttggaaatatcataagttttgggacaagcaagagaggacatggagccatcatcacaacctcagccggcaattggtgttgttgctggtggatcacaagtgtaccctgcataccggcctgcagcaacagtgcctacagctcctgctgtcattcctgccggttcacagccagcaccgtcgttccctgccaaccctgatcaactgagtgctcagcaccagctcgtctatcagcaagcccagcaatttcaccagcagcttcagcagcagcaacagcgtcaactccagcagttttgggctgaacgtctggtcgatattgaacaaactactgacttcaagaaccacagcttgccacttgctaggataaagaagatcatgaaggcagatgaggacgttcgcatgatctccgcagaggctcctgtgatctttgcgaaagcatgtgagatattcatactggagctgaccctgagatcatggatgcacacggaggagaacaagcgccgtaccttgcagaagaatgacatagcagctgccatcaccaggacggatatgtacgatttcttggtagatatagttcccagggatgacttgaaggaggagggagttgggctccctagggctggattgccgcccttgggtgtccctgctgactcatatccgtatggctactatgtgccacagcagcaggccccaggtgcaggaatagcgtatggtggtcagcaaggtcatccggggtatctgtggcaggatcctcaggaacagcaggaagagcctcctgcagagcagcaaagtgattaagaagagtaaatgatccctgtgaattgtcaagaagcttaccacctgattcagaattttacttttagccaggttgtcgtctattctgaatttatgaataggattaggattctctcatggtagttgcatttctgctgtagtggaaaaggatttatgacatgagagtatgagactaatgggtttcagttactataccgtttcctgtcaatccaaaagttggcctttgcgaggccattgatattgaacctaatgtggttgaactgcccatgccaacgtttgtaagctctgatgtgggtcattctgtatttcatgtttgcatggtttcatggaatcttctttgtttagacaatgaaaatgttttacattcgtggcatctgccataacac

SEQ ID NO: 7732 - DNA, 359 bp, Oryza sativa
  ref <308>: DATABASE ACCESSION NUMBER: AK105080
  ref <309>: DATABASE ENTRY DATE: 2002-08-28
acgtcggcgagggcatggaggagggggagttctccgaggcccgcgaggacctcgccgcgctggagaaggactacgaggaggtcggctccgagttcgacgatggtgacgagggtgatgagggtgacgagtactagagaggttcagggttcttgcctggtgccttggcaatgcttgattactgctgctatcctatgatctgtccgtgtgggcttctatctatcagtttgtgtgtctggttttgaaaaacatttgcttttcgattatgcagggtttgcttgtagctttcgctgctgtgacctgtgttgtttatgtgaaccttctttgtggcatctttaatatccaagttcgtggtttgtcgt

SEQ ID NO: 7733 - DNA, 643 bp, Oryza sativa
  ref <308>: DATABASE ACCESSION NUMBER: AK105081
  ref <309>: DATABASE ENTRY DATE: 2002-08-28
aaaaaaaggatctcgcggaggatttatggcaaggaagctcagtgcaagaagggtgagatgggaacgcagtatatcatcctcgacatgggtggcatacaggttctgttttttttcgagatttcaaagagtcagaagcatatttctacacataactgtgtactcttctaagtatatctgggcttctattgagtcagtattggatataatcacatggtttgttatgtcactttcatgggtggtgtcattttgggacgaagtatcctgttgtcgcatcgagccatctgctatcgcactatcagttgtggatggaaaaaaaataaaaaggatcaaaatctagggagtcaaactaggatcacattcctcaaatcggctataccgttctagattattgttctgaaacatattccatagttttagaagagatataccccctctcggtccacttcctcaatccatcgatgcaagaacttttgagacttagacaaaaacatctttttggctgctttagctatgatactttaagcttaattcaccaccaaaatatggtccaaatgtttctatttgaatgcaaggatgtaaagtcggaacctttttaagttatgtaaacacaccttggatcaagtgaaatatgttgtgacgtgct

SEQ ID NO: 7734 - DNA, 2062 bp, Oryza sativa
  ref <308>: DATABASE ACCESSION NUMBER: AK105082
  ref <309>: DATABASE ENTRY DATE: 2002-08-28
tatgcttgctgatcccaaggaggcaagagccggtatcagggaagtgcacttcttgcccttcaacccagttgacaagaggactgctctaacatacatcgatgccgatggtaactggcaccgtgccagcaagggtgctcctgagcagatcctgaccctgtgcaactgcaaggaggatgtaaagaggaaggtgcatgctgtgattgacaagtatgctgagcgtgggcttcgttctcttgctgttgcaagacaggaagtacctgagaagtcgaaggagtctgctggtggaccatggcaattcgttggtctgctgcccctgtttgatcccccgaggcacgacagtgctgaaactatccggaaggctctccatcttggtgttaatgttaagatgatcactggtgaccagcttgctattggtaaggagactggtaggaggcttggaatgggtacaaacatgtatccttcatccgcattgctcggacaaaacaaggacgcttcacttgaggcacttcccgtggatgagctcattgagaaggctgatggttttgccggagtcttccctgagcacaaatatgagatcgtgaagaggttgcaagagaagaagcacatcgtcggtatgaccggagatggtgtcaatgatgcccctgctcttaagaaggccgacattggtattgctgttgctgatgctacagatgctgcaagaagtgcttccgacattgtgctcactgagccaggtcttagtgtcattatcagcgctgtcctcactagcagatgcatcttccagaggatgaagaactataccatttatgcagtttccatcaccatccgtatagtgcttggatttttgcttattgctctgatctggaaatacgacttctcacccttcatggtccttatcattgccatcctgaatgacggtactatcatgacgatctcgaaggacagagttaagccttctcccttgccagacagctggaagctgaaggaaatcttcgctaccggtattgtgcttggaagctaccttgctctgatgaccgttattttcttctgggccatgcacaagacagactttttcacggacaaattcggtgtcagatcaatcaggaacagtgaacatgagatgatgtctgcactgtacctccaagtcagtattgtgagtcaggccctcatcttcgtcacccgttctcgcagctggtccttcatcgaacgccctggtcttctcttggtcactgcattcatgcttgcacaactggttgcgacattcctcgctgtctatgccaactggggctttgccaggatcaagggcattggctggggctgggctggcgttatctggctttacagcattgtgttctacttccctcttgacatcttcaagttcttcatccgctttgtgctgagtggaagggcctgggacaacctccttgagaacaagattgcattcaccaccaagaaggattacggtagggaggagagggaggcacaatgggccaccgcacaaagaacacttcacggccttcagccaccggaggtcgcctccaacacgctcttcaacgacaagagcagctaccgcgagctctctgagatcgctgagcaagccaagagacgagctgagatcgcgaggctgagagagctgaacactctcaagggccacgtcgaatcggtggtgaagctgaaggggctggacatcgacacgatccagcagaactacacagtgtgaggaaccccctcggcattcaacgagagatcgtcatcagcgctggagcgggaattgcaaacggcgctctggttaaaggaaattttcgatgaatgattggaagaacaaaaaacaaaaaaacatggctgatctgaacagccctagttgtaaagtgctaccaaatatatggtccggtttccctcttctagagaggttttacgttctagtggagtaccgtacgtacgtgttggagtacgacgacgtgttgtgatcgtttttggtctttttttactcttttccccctaactagcggtcttcttgcggaatgcaagatggagaaataatggatgaaaaattttctgccacgtt

SEQ ID NO: 7735 - DNA, 441 bp, Oryza sativa
  ref <308>: DATABASE ACCESSION NUMBER: AK105083
  ref <309>: DATABASE ENTRY DATE: 2002-08-28
cctccctttcccaccgccgccgccgccgccgaaaaagaagaagaagccgacgaggaggcgaccatgagggccaagtggaagaagaagcgcatgaggaggctgaagaggaagcgccgaaagatgaggcagagatctaagtaggcgaaggagatgggcgatcatggtgatggcgtgtcgcagtgatccatgtcttcggctgccaagctcgttgatatgtcaagctgcttggcgtggtgccaccattcgactgttgaatggcttatttacctgtgctgttatcatcttatatccctagttttaccaagagttttgcaccaagacatgtcggttcagttatgtgaacttgttatggagccgtatttgctgctaatgtttacctaccgttgagtaattgctttgttggctctgtggtaacatctattgattgctgctttatctgtt

SEQ ID NO: 7736 - DNA, 1171 bp, Oryza sativa
  ref <308>: DATABASE ACCESSION NUMBER: AK105084
  ref <309>: DATABASE ENTRY DATE: 2002-08-28
aaaaaaaagaaaaaaaaaatgttatgggcaacgtcgaagcatgatgtctacttcatgtcaaattccacagtaggccactggtcatcattgtctcacaatctatcagaggttcttgatttctccgggcatgttgctcctgcgcagaaacaccctggcagtttactggaagggtttagcggggttcaagttagcacactttcagtgaatgagggtttattggttgctggtggttttcagggagaactaatttgcaaggttgtgggagaccgtgatgttaagttctgcacaaggacaactttaagcgacaatgctatcacaaatgcgatagatatacacagatctgcaagtggaagcttgcgtgttaccgtgtccaacaatgattgtggtgttcgtgaatttgacatggaaacatttcagctcttgaaccacttcagttataactggccagtaaatcacacatctgtgagccctgataggaaacttctggcagtagttggagatgatcgggatgctcttcttgttgattcaagaaatggaaaggtaacctctaccctagttggccatctggactattcgtttgcttcggcatggcaccctgatggccgcaccttcgcaaccggtaaccaagacaagacctgccgcgtctgggacgtacgaaacctgtcaacctccctctcagtacttaggggcaacattggcgctatccgttgcatccgctactcctcggatggccagttcatgctcttctcggagcccgctgacttcgtgcacgtctacagcgccgctgcggactacaagaagaggcaggagatagatttcttcggcgagatctccggcatctcgcttagcccagacgacgagtcactgttcgtcggagtgtgcgaccgtgtgtacgccagcttgctgcactacagaatggtccactcctttggatacctcgactcgttcatgtagagagggaataaaagtggtgtttctgtatgtgataggccacccatctcggtggcgattctgatgtgcgtgttcagggaatgtatctgcctgttcaagtgcatgtttagtcaaaggctcaagcgtgcagcgtgatccttgccttgtgaatagttagctagtaaatcatagactgtatggaccaatactctctctgggcaataatgcagaagtaatctat

SEQ ID NO: 7737 - DNA, 1120 bp, Oryza sativa
  ref <308>: DATABASE ACCESSION NUMBER: AK105085
  ref <309>: DATABASE ENTRY DATE: 2002-08-28
aaaaaaaaaaaaaaaaaaaatctagagacaagtgatgacaactacaacgaggcaccgtccgctgaggactggaaaaaagttgaggctgcctgcaattacttgaagctattgtatgactcagcacatagcatcatggctgcagcaaatccaacttcaaatctctttttccatgaggcatggaaacttcaactagagctgtcaaatgctacagggcatgaagaccctgttttcagcagcattgccaaggatatgcacgagaggtttgacaagtactggaaagattgcaaccttgtgttagctattgctgttgtgatggatccacgcttcaagatgaagcttgttgagttcagctactcgaaaatttatggtgttgaagctgcgaagtatgttaaggtggtggatgacgctgttcatgagctttacaaggagtatgttgcacagcccctccccttgacgccggcctatgttgagcaaggggaaggtaataatgcacctgctagcgagaatagtactcaaacaactgctccttcgaccggcgatggacttgtggactttgatatgtacctttctgagatagctacaagccagccaacaaaatctgaactggaacagtaccttgatgagtccctcactccgcgcatccaggaattcgacattctgaactggtggaagctcaacactctcaagttccctactctctcaaagatggcccgggatatcttggccattccgatgtcgatggtgagcagcggcaactctattttctctgctggaacaggaactcgcacgcttgatgactacagaagctcattgcgtccagaaattgtggaggcgctcttctgcgccaaagactggcttcagtattcaccagctaccccggaggcgccgagtaccgcgctggtcaaggtggatgcaccataggatcgccgtgattcccccccttttgtgaagcaacagcatgtaccaatggtacctatttgtgaagttaactgctaggcgtattttaggcagggactatgaactgattgtgatctgagcttatccacctagggtgtaatttgttgtatcgaactctgttaactcgttcatgttgttatatacgctttgtctgtagtatgcc

SEQ ID NO: 7738 - DNA, 443 bp, Oryza sativa
  ref <308>: DATABASE ACCESSION NUMBER: AK105086
  ref <309>: DATABASE ENTRY DATE: 2002-08-28
agccatttgccgcggacggacattccatgcgccgagtgagatttccttctaggtgacctgtgacacaaacagctctgtaacttcaaatttgtggaacagtggcagagaaaggattgcaggatttcatctcaaacagaaaaaaaaaaaaagatcacagggtttccattttccctatgtcatgggatgaatggatgctgtacagttcagtgagctcctcagatattggccgggttgttttatgttgtgtcatctgtgagtattgtaatgtagcccccaaaattctaaggccatcttgattttcacacaaaaacatttgtgtggcagtgccattttggtttctcctgtagtcctgtgttgctcccatgtaatctgtagatgttttttcccccttcaaaacaatatagatctttgaatgcccatgatttcatttcagagaaacatgc

SEQ ID NO: 7739 - DNA, 834 bp, Oryza sativa
  ref <308>: DATABASE ACCESSION NUMBER: AK105087
  ref <309>: DATABASE ENTRY DATE: 2002-08-28
aaaaaaaaaaaaaaaaaaaaactcttccatccttcgctcgctccgccgccgccgccgccgcctcctcctcctcggcgcctctccgccgccgcctcagccatggtgaagtactcgagggaggcgaacaaccccaccaagtcctccaaggccatgggccgggacttgcgtgtgcacttcaagaacacccgtgagacagcttttgctatcaggaagttgcctctgggcaaggccaagaggtaccttgaggatgtgattgcccacaagcaagctatccccttccgtaggtactgcggtggtgttggccgcactgctcaagctaagtcacgccattcaaacggtcagggacgctggcctgccaagtctgctagattcattctggatcttcttaagaatgcagagagcaatgctgaggtgaaaggtctggatgttgatactctttatgtgtcccacattcaagttaaccaggcccagaagcagaggcgccgtacctaccgtgctcatggacgcatcaacccttacatgtcctccccgtgccacattgagcttatcctgtcagagaaggaagaaccagtgaagaaagagcctgagtctcagatcgcagccaggaaggcctagagaaggaagctttgccccccttctgcctgtttgttagatcagattattatatagcctgtggcttttggctgagtgaaaattttggctggttgtccgcttgtttggcctatcggaaattcggaatactactagctcatacttcgtcaaaaccgttatctctgtgtactgaatctattactatgttctcagaacgcaaatcttggaggtgtttggattttc

SEQ ID NO: 7740 - DNA, 1228 bp, Oryza sativa
  ref <308>: DATABASE ACCESSION NUMBER: AK105088
  ref <309>: DATABASE ENTRY DATE: 2002-08-28
aattggtttggaaagagcaaaagagggctgataatgggaatctggaatgctcatacatctgtgggaaacatatctggttccttaattgcagctgcaatgttgaagtttggatggtcatggtcgtttgcagtccctggagtgatgatcgcagtcgttgggcttgcagtgtttctgttcttgcctgtcggtccggagatgattggaatcgaggaggatatccatgagaaggatgctgagaaggatgacatgagtgcacctctgttggaagaacgatcggcatcaaaagaaaaggcagtcgggttcattcaggcttggagaattcctggtgtagcgccatttgctctctgccttttcttctgcaagcttgtggcttacacattcctgtattggcttccgttttatatcagccacacagcaatcggtggagtgtacttgtcagacaccgcagccggtgtactgtcaactctgttcgacgtgggtggcgttgtcggcggcatccttgccggccacatctccgaccgcctcgacgcacgggcgctgacggcggcgagcttcacgttctcggcgatcccggcgctcttcttctaccgcatatacggcagcttctcgctgtactcgaacatcgccctcatgttcgtcaccgggacgctcgtcaacgggccgtacgccctcatcaccaccgccgtctccgccgacctcggcacgcacagctccctgaacggcaactccagggcgctcgccaccgtcacggcgatcatcgacgggacggggtcgatcggcgccgcggtcggcccgctgctgatggggtacatctctgccaagagctggagcggcgtgttcacgatgctcatggcgtccgctttcgtcgcggggctgctcctgtcgaggctggtcatggcggagatctccgcgaagatggagtcccggaggcctgacgctgctgctagtgatctgccagtgtcctccatggaacaatcttaggctccattagacactttggaaattgtgtccctggtgaaatgctgagaaattttacaagcgaaaaagcctgaaaatggagacttgagaggtgtggcaggaagagcaaacccctcacaaattcccttttttttttacacctgaggagcaaggtgctctctccagccccaggattgcatcttggctatgagcgatttctgttgcttgtgatgtgtatatggaactcctaccgtatgaagtgatgattgtc

SEQ ID NO: 7741 - DNA, 1126 bp, Oryza sativa
  ref <308>: DATABASE ACCESSION NUMBER: AK105089
  ref <309>: DATABASE ENTRY DATE: 2002-08-28
tttggtatgctgctggttaccatgatgtttgctgtcttgggtttcctttctccatcaaaccgtggaggattgatgactgcgatgctgctcatttgggtcttgatggggctgtttgctggatatgcttcttcccgactctataagatgtttaaaggatcagaatggaagagcatcaccttgaagactgctttcctgtttccgggaattgcttttggtattttcttcgtcttgaatgctcttatatggggggagaaatcatcaggtgctgtccctttctccacaatgtttgccttggtgcttctttggttcggtatctcggttccacttgtctttgttgggagctatcttggtttcaagaaacctgccattgaggctccagtgaagaccaacaaaatcccgagacaggtcccagagcaggcttggtacatgaaccctgccttcaccattcttattggcgggattcttccattcggagcagttttcattgagctatttttcatcctcacttcaatctggcttcaccagttctactacatcttcggcttccttttcctcgtgttcattatcctcatcatcacttgtgcggagattgcaatcgtgctgtgctacttccagctctgcagtgaggattacatgtggtggtggaggtcctatcttacttcaggatcatctgccatctatctcttcctgtatgctgggttctacttcttcaccaagctgcagattactaaactggtgtcaggcattctgttcttcggctacatgcttctggcctcattctctttcttcgtgctcactggcacaattggtttctgtgcctgcttgtggttcacgagattgatttactcatctgtgaagattgactaggcgcagagttgctatacatccggcttccaatagttctgtatgattattgtggagaattgtgagacgaggatcagaatccactttgtattttgccgattttcaagaaaatttatatcgtagttcttagtttataaaccacttatgttcattcactataaatgagatgatacatctttgatatgaggttatataaggctaattacgattgttaatttcatatggcagagcatatttctcaattagaaaagaaaaaaaaaag

SEQ ID NO: 7742 - DNA, 1306 bp, Oryza sativa
  ref <308>: DATABASE ACCESSION NUMBER: AK105090
  ref <309>: DATABASE ENTRY DATE: 2002-08-28
aaaaaaaaaaaaaaaatcttcaatttctctcgatcggttcgatcccatgaccatgtgagggggatgatgccggaggcggctctgagctccggcaagccgatgccgcgggtcggcatgggcacggcttcgttcccgctcggcgcgaccgacccgtcgacggtgaaggatgtcgtcctgcgcgccatcgaggccggctaccggcacttcgacacggcggccgtgtaccagacggaggccatcctcggcgacgccgtggcggaggcggtgcgcgccggcctcgtcgcgtcgcgggacgagctctacatcacgtccaagctatgggttgcccacgcgcaccccggccatgtcctgccatctcttaggcgtgcgctccggaagatgcagatggagtatctcgatctgtacctgattcactttccggtgagcatgaggttggctgaagatccggagtcaatgacatattccaaggatgaccttgtgatgatggacatggagggagtgtggaaggagatggaggagtgccaaaggctaggactcaccaaggctattggtgttagcaacttcagttgcaagaagctcgagacactgctctccttcgcaaccatctctcctgcagcaaatcaagttgaggtgcacccctactgtcggcaaaataaattgagggagttctgcaaggagaaaggaattcagctctgtgcctactctcctttaggtggaaagggtacaccatggagcaacaatgctgtcatggattgtcctcttctcaaacagattgccatggagaggggtaaaactattgcccaggtatgcttgaggtgggtgtatgagcaaggagattgtgtaatcgtcaagagcttcaacaagagcaggttaagagagaatctaggcatctttgattgggagctcaccaatgatgatcgtcacaagataagcaccctcccagagtggaggggaactcttgacatcttcgtccacaaaaccggtccatataaaacagttgatgagttttgggacggcgagattactggtgacaagactttttctaatggtccctgatcaatgctagcccagccaatgaatggactgctcaagaagaattcaaatttcgtgtaccagagtccaacatacttttcctcatgatgcacacatgttatgtccttttgtgaatgaaagtatactagtcgtcaaaatctccaatcttgtccacatcatagagatcgttttaaatctaggaacgttattttcttattttccatcagataagactaataaccaacgcaagcctgatctgaccacgtgttgtacc

SEQ ID NO: 7743 - DNA, 1431 bp, Oryza sativa
  ref <308>: DATABASE ACCESSION NUMBER: AK105091
  ref <309>: DATABASE ENTRY DATE: 2002-08-28
tcagcattccactgcaagactctggccatgtcgttggattctttggaaggtctggaacgcttatcgacgcaattggcatctacgtccacccttgattcccagtggtcaaagaattactacctactaccatatctacgaaataatgttccatggtgttgttgtacttcatgcaatccccccattgtctgtgtacgtgttgcaccgatccgtagtacaataaagttggcgatatatatgttgtcccaaaaaaaaaaaaaaaaaaaaaaaaaaaaaaaggccacagcatcgagtcggccttgttggctggtgaatcttagtagatgtggagtatatgacgaaggctgtgagcatttggaaggtcttgtcaagttgaaggttctcaatttagggttcaactatattacagatgcctgcttggttcatctaaaagaactgatcaatttggagtgtttgaacttggactcatgcaagattggtgacgaggggctagcacatttgaaaggacttctgaaactaagaagcttggaactttcagacacagaagttgggagcaatggacttcgtcatctctctggcctacggaatttgcagagcatcaatctctcttttacattggttacggacattggcttgaagaaaatttctggcctgaattcactcagatcccttaatcttgataatcgccaaatcacagataatggtttggcagctcttacatgtctcactgggttgacacaccttgatctatttggagctcgtataactgatgctgggacaaactgcttgaaatatttcaagaatctacagtcccttgaggtctgcggtgggttaattacagatgctggagtgaagaatatcaaagacctcaaagctctgacgctgcttaacctatctcaaaatggcaacctcactgacaaatccttagagctgatttcccgcctcactgccttggtctccctgaacgtgtcgaactctcgggtgtcgaattctgggctccaccatctgaagccactccagaacctgaggtccttgtctctggagtcctgcaaggtgaccgcgattgagatcaagaagctccagttggctgccctgcccaatctcgtcagtgtgcggcccgagtaatctggtagctgcacatgtgtccacatgtaaatatccacctgcttagagcaggacaaatgtacatattcccacaagaacaagctcgagtgatctgtacgtcagtcctgcttgtatcggtgtgtctggtcgccctggtgctgaagggtctgatggatggcctagtggtgaagggctggcacgtatttaggccgtgtaaatatgtagcggtgctgatgggaaggaacaactgtaaatatggcgtgcttcctctgcattttcgatgttatgtaatgtttcgtgttatcgtgttaatgaactggtattgttgct

SEQ ID NO: 7744 - DNA, 624 bp, Oryza sativa
  ref <308>: DATABASE ACCESSION NUMBER: AK105092
  ref <309>: DATABASE ENTRY DATE: 2002-08-28
ctcaaggatacagtaatgcttggtgctgatttctatgagactgatctggaaagaggagaactgctggctgaaggaaaggttcctattggaatcggggagaatacaaagattcagaactgcataatagacaagaatgcgaggatagggaagaatgtaacaatttccaactctgagggtgtacaggaagcagataggacctctgaaggcttctacatccgatcaggcatcaccatcgtattaaagaactcgataattgcagatggattagtcatctgaggtggaataaagccctcccttatccaaccagaaaaagccagccatgaccatttgcggcaggaatagaataaaatcatcagagctctttgttcttagttgtgtacttagcattcaagagcttctgcatgtctgtacaaaatcattgtctcgtgaatctaccgtgtgtgttttcacactaaacacatggtcatgaagctcgaaaaaaaaaacaaaattttatgatctggggtattggttgttccatgtaatctgcaggcgaagaaaaccttacctatctacaggtgtactctctccgtcaaaaaaaaaaaaacttaatctagatgggaatttgacacaaccttgaacaac

SEQ ID NO: 7745 - DNA, 1109 bp, Oryza sativa
  ref <308>: DATABASE ACCESSION NUMBER: AK105093
  ref <309>: DATABASE ENTRY DATE: 2002-08-28
aaaaaaaaaaaaaaaaaaaaaaaaaaaaaaaatcaccaccggaatcgcgcgcgcggcggagagaaattaatcgatcgatcgatcgatccgattccggccggccatggcagctgctgctccggcgacggcggctcggcgtcgattgcgtagacctttactaccagcaccgtgtcgacaagaaggtgcccatcgaggtcacgattggtgaactcaagaaactagttgaagaaggaaagataaaatatattggtctatcggaagcatctgcatcaacaatcagaagggctcatgctgtacaccctaccactgcagttcagctcgagtggtcattatggtctagagacgtggaagaagatataattccaaattagtttatccattgaaaaaaatcacatgccccattttaactatttttcttatttccatttcagagaacttggaattggaatagtagcttacagcccacttggtagagggttcttttctggtggagctaaactagtggagtctatctgttcaggatgttcgcaagcatcttcctagatttcaaccagcgaatctcgagaagaatgctgaaatatttgagcgtgttaacgcaatggcagccagaaaaggatgcacaccgtcacaactcgcattggcctgggtccatcatcagggaagcgacgtatgccccatacctgggacaacaaaaatcgagaatttcaatcaaaatgtagcagctctatctgtgaagctcacccctggggaaatgactgaacttgagtcctatgccagcacagatgttgttcaaggtgaccgctatgctcagacggccggcacttggaaggattctgagacccctccattgtcgtcttggaaagcagagtaaacgttttcatatgttcaaatacaaaatcccggttcaaatttagctcaaatggcagagcacacaccagattttgtataagtgttcattgtatcagacgcgttgctcgctcttgttaaaccatcgcttatgcttgtttgtgtctaaaacctagctagtggtgttgtaaagtgtggttttattagtttgtgcgcagtacgtgtgcgaataataaataaagttctgaggtcacatttttttt

SEQ ID NO: 7746 - DNA, 1866 bp, Oryza sativa
  ref <308>: DATABASE ACCESSION NUMBER: AK105094
  ref <309>: DATABASE ENTRY DATE: 2002-08-28
attcccctgtggttctactctcccatcccgtccggttctagctcagactgaagcgttttccttcatttgaagtgaaatgcaacacagccacagcgttacaccggttcggatcagcggcaaatgtgcccggcgaaaaccagctcatggatgaggcagctcacaagctcttcacggcaaggccaccacggcgacgtcctccgcctcttcttcaccggggtcagactccaagctggcagccgtggcacggtggacccctggccgggggccgtgcccacggccctccgcgcctgcgcgcacctcgccgacgtcgcctccggccgcctcatccacgcgctcgtgctcacccgccccgccctcgcctcggacgccgtcgccgccaccgcgctccttgacatgtactccaagtgcggcctcgtcgccagcgcccgcaaggtgttcgacgaaatggcgtcgcgcggggacccggtcgtctggaacgcgctgctcgcgtgctacgcgcgccacggcctcccggagcacgcgctggcgctggccgtcaagatgcggggcatcggcctgtgtcccgacctggtcacctggaacatcgtcgtctcaggcttcgcgctggcgggcgatgacctgatggccggcgatttagtcggcgccatgaaagacgacgggttccagccggacgtggtcacatggacatcgcgcgtctccggctctgtactgaactttcagtacggcagagcacgcgcactgttccgagcaatgatggttgccggcggccgtgtcctgccaagctcggcaacgatcagtaccatcctgcccgcgttcgccaatgtcgctgacgtgaagcatggcaaggaagtccacggctactctgtcgtggccggcgtcgagcaagagctcaccgtcagcagcgccctcgtcgacatgtacgccaagtgcggtctcgtgctcgaagcgcgccggctattcgacaagatgccacagaggagcacggtgacatggaactccatgatcttcgggctggcgaactccggccactgccaagaagccgtcggcctcttcgaccggatgctgcgcgacggcgcaaagcccgaccacctgacgttcaccgccgtcctgactgcagctacggcggcatggtcgaggtcgggaagatcctgtaccgagccatgcaggtggagtacggcgtcgagccgaggctggagcactacgcctgcatggtccacttgcttggccgcgccgggaggctcgacgaggcgtacggtttcatcagggcgatgcccctggagcccgaccgcttcgtctggggcgcgctgctgggagcgtgccgaagccatggaaacatcgagctcgcggagcttgcggcgtcgcgcctgcttgcagtcgagccagacaatgcggcgagctacctcctgctctcgagtgcgctggcgaacgctggcaagcaggatgatgtcttcaagatcaagaggttggtgaaaagacggcgtctgaagaagcttgatagctatagttgggtggagacttctttgtaatggggatgatcagccagagacgagcagaaacaagaaggtttgtaggttgggggtaacgcagaaatgcagaatagtcggaggaaatgatctattcacccccaggttaattgattcaacatctttttaacatgtgatgcagagataatttcagcctgtattctccttccacatacaacataacatgtacagggtgacttctattttgggcgctacatttacatttcatactatcaccccaccatcgtttaggtctcttacacaaaagtatttcgcatttctattgtataatgagactacacactgctaaacatcagacatattatacactgctgaacatcac

SEQ ID NO: 7747 - DNA, 2757 bp, Oryza sativa
  ref <308>: DATABASE ACCESSION NUMBER: AK105095
  ref <309>: DATABASE ENTRY DATE: 2002-08-28
aaaaaaaaaaaaaaaaaaaaaaaaaagtacacactcctatctatccaacaagctaattaagcgaggagcttggtagacggcggcaatggcgggcgcggcggcggcggccttcgcggcgcaggtgctgcgggggcggtggttcatggcgtacggctccttcctcatcatgtcggcggcgggggcgacgtacatcttcgccatctactccaaggacatcaagtccaccctcggctacacccaggagcagctcaacaccgtcggcttcttcaaggacgtcggcgccaacatcggcatccacgccggcctcatcgccgaggtcgcgccgctatggttcgtcctcgccatcggcgccgccatgaatctcgggggttacctcatgctctacctctccgtcaccggccgcgtcggcgccaggaccccgctctggctcgtctgcctctacatcgccgtcggcgccaactcgcaggccttcgccaacaccggcgcgctcgtcacctgcgtcaagaacttccccgagagccgcggcgtcatgctcggcttgctcaaggggttcgtcggcctcagcggcgccatcttcacgcagctctacctctccttctacggcggcggcggcagcaacaccaagccgctcatcctgctgtcggctggctcccggccgccatctccgtcgccttcctcggcaccatccggatcatacgcgcaccgcgctcgccgaccgcggcgcgccgcgagtaccgcgcgttctgcggcttcctgtacgtgtcgctcgctctcgccgcctacctcctggtggtcatcgtcctccagaagcggttcaagttcacccgcgccgagtacgccgtcagcgccgccgtcgtgttcgcggctctcctcgcccccttcgccatcgtcctccgcgaggaggccgccctgttcaggaagacgccctccaaggaggaagccgacgacgtcccggcgctgtccgcggccacgaaaccatcgcccgcggccgccgagacgccaccagcgacggcgatggagagggtggtccgcgcgctgaggccgccgccgcgcggcgaggactacacgatcctgcaagccctggtgagcgtggacatggtgctgctgttcacggcgacggtgttcggcgtgggcgggacgctgacggcgatcgacaacatggggcagatcggggagtcgctggggtacccgcagcgcagcatcgccaccctggtgtcgctgatcagcatctggaactacctggggcgcgtgtcggcggggttcgcgtcggacgcgctgctgtcgcggtacggcatctcgcggccggtggtggtcaccggcgtgctgctgctcacggtggcggggcacctgctggtggcgttcggcgtgccggggtcgctatacgcggcgtcggtgctgatcgggttctgcttcggggcggcgtacccgatgatcctggccatcatctcggaggtgttcgggctcaagtactactcgacgctgtacaacgtggggaacgtggcgtgccccgtggggtcctacatcctcaacgtccgcgtcgccggcaggatgtacgaccgggaggcgaggcggcagggggcggtggccgtggcggcggggaagaaggagctgacgtgcattggggtgaagtgctacaaggattccttcttgatcgtcgccggggtgacggtggccgcggcggtggtgatggcggcgctcgcgtggcggaccaggaagttctacgccggggacatctacgcgcgcttcagggaggaggcggctgccggtggcggtggcgctggcaatggcaccggcgccggagaagatgagaaggtggaatccaaggaggagaaggcggtgatgacgccgacgagcacctgagctgcaattctgctgctcgatcagaagatctgagagatagaggagcaaaaaggactccttttttctttataactgttcttttagtttttaagaagtgctatactacaacattgcaacacccacatttagagggataattgacccacattttcaacttatctgggctagcccgattcctccaaaacaaaaacactttttatggctggctataaggggaaagattcaatcggctgttcaactgaagaaatttaattgggaaggctctgaattctgtcaactgtgtgatagaagtgaagatgcagttcatatctgttttaactgtcctattgcgacttttgcttggtgtgtatgtcgggatgctttggactggggaaggatcccttttaattttgaggacttctttagactctatggttttgatacttctaaaacctctagacttaataccatgattttggctgctttgatttggactctttggtctgctcgcaatgatatgatttttagaaacaaactaatctcctcacccctgattatctctttccgcttgattggttttcttttacagtggaagattccattaaagccggagaaggcccatgacctggaaatgaagactcaagctatgcaaggagtactggtgtccttacgaagagctgggattggataattctgctcccatctgtttagttttcgtctctgatctgctagataacctttatcctttaccctttcttagagtcatccttcttcttagagtcatccttctttggatgcttatgttctgatgcctgatggtaatgcctttaattgaaaactggcagccccagtattatgtaaaacggtttgtaagacttatgctttctataaaaagctgggccatctggcctcccctct

SEQ ID NO: 7748 - DNA, 1873 bp, Oryza sativa
  ref <308>: DATABASE ACCESSION NUMBER: AK105096
  ref <309>: DATABASE ENTRY DATE: 2002-08-28
acatgttgattccctaaaaacgctgcagctctgctttccaggaaacctcacccgcctgaaaacactagtagtgttgggaaaccaaagtttaacatctctgcagctccattcctgcacagcactccaagagttgataattcaaagatgtgaatcacttaattctctggaaggtttgcaattgctcggcaatctcagggggctgctggcacacagatgcctcagcggccatggagaagatggaaggtgtatccttccgcaatcacttgagaaactttacatctgggagtactctcaagagaggctgcagctctgctttccaggaaacctcacccgccagaaaatactaggagtgttgggaagccaaagtttaacatctctgcagctccattcctgcacagcactccaagagttgatgattcgaagctgtgaatcgcttaattctctggaaggcttgcaatggctcggcaacctcagggtgctgcgggcacacagatgcctcagtggttatggagaatatggaaggtgtacccttccgcaatcacttgaggaactttacatccatgagtattctcaagaaactctgcagccctgcttttcagggaacctcactctcctgagaaaattacaagtaaaggggaactcaaatttagtgtctctgcagctccattcttgcacatcactccaagagttgataattgaaagctgtaagtcaattaattcgctggaaggcttgcaatcgcttggcaacctcaggttgttgcgggcattcagatgcctcagtggttatggagaatatggaaggtgtatccttccgcaatcacttgaggaacttttcgtcagtgagtattctctagaaactctgcagccctgcttcctgacgaatctcacctgcttaaaacaattagaggtatcaggcaccacaagtttaaaatctctagaactgcaatcatgcactgcactcgaacatttgaagattcaaggttgtgcgtcgcttgctacattggaggggttgcaattcctccacgccctcaggcatatggaagtattcagatgccctggcttgcctccatatttggggagttcgtcagagcagggctatgagctatgcccacgactggaaaggctcgacatcgatgacccctctatccttaccacgtcgttctgcaagcacctcacctccctccaacgcctagagcttaactatcgcggaagtgaagtggcaagactaacggatgagcaagagagagcgcttcagctcctattgtccctgcaagagctccggtttaagttttgctacgatctcgtagatcttcctgcggggctccacagccttccctccctcaagaggttggagatctggtggtgcaggagcatcgcgaggctgccagagatgggcctcccaccttcgttggaagaactggttatcgtagattgcagtgacgagctagctcatcagtgcagaactctagcaagcaagctgaatgtcaaaattaatggggaatatgtgaactgattactcggtggcttgttaggcgcacctttttccacctgcccaactggcgtgggctcgttcaggcgttcaagctgctgtaaattccattgccgcaatgacgaccttcagaaccgttacacaatacaaaggacatatgatggctagatcaactgtcgcagagctagctttggttcacctgaaaacataaggccaaacgcgtggttcttttaatcagaagtatcaaaaattggttttggtttttaacgaaaagatgttagaaattggttttaatgtgccagattctgtaccagaattctgtattttgctccgtaattctgtgctacgactgatgttgtatttaactgatagcaatcgaccggc

SEQ ID NO: 7749 - DNA, 2569 bp, Oryza sativa
  ref <308>: DATABASE ACCESSION NUMBER: AK105097
  ref <309>: DATABASE ENTRY DATE: 2002-08-28
atcatccctccgcgcaaaagcctatcaacagcccaaacagggtcaggagccggagccgtccgggagagggaacactcgagcgatccgtccgtccgcccgcccgtcgtcgtcgcgcgccatggctgaggaggaggccaagaaggtggaggtggaggtcaccgaggcgccacccgccgctgccgctgccgcggagacggagccggctgccaaggacgtcgccgaggagaaggccgtcatccccgcccccgcgccgccggccgaggaggagaagcctcccgtcgacgactccaaggcgctggccatcgtcgagaaggttgcagatgaacctcctgccgagaaacctgctcaagggggctctaatgacagagatgttgctcttgcaagggtggaaactgagaagaggaactcattgatcaaagcatgggaggaaaatgagaagacaaaagctgagaacaaggcttcgaagaagctatctgctattctttcctgggagaacacaaagaaagcaaacatagaagctcaactgaagaagattgaggagcaactggaaaagaagaaggctgaatatgcagagaagatgaagaacaaagtcgcgatcgtccacaaggaagctgaggagaagagagcaatggtcgaggcaaagcgcggcgaggaagtcctaaaggccgaggagatggcagccaagtaccgtgccaccggccatgctcccaagaaactcatcgggtgctttggggcctaaagaaattttcgattcacaacgagcaaacgtgaaagtgttcatcagtatctgcatatatataatcgtcttcgtcgtcatgtagcaagcagcagagtaagagccagagatctgtactgactactgctacggcatcgagatcagatcattggcaatggatggccgccatcttctcctcctccatgtcctcgcgcttcttcttcttgcggtggtggtcgccgccggcggaggcgccgtcgtcggcagggacagcgcagtgcttcagctgcgcgagctgcaatggggctcgtccggccaggtccggtattcccaatcaaagcgctttgagaagaagatgacaggggaacacaagaaagcagcagcagcagcaagaacgaggactaggagcaccaccgtcctagggctgaagcaccactccctcaccgccatccccgaccaccccgccgcccaagaaacctacctccgccgcctcctcgccgccgacgaggcgcgtgccaactcgttgcagctccgcaacaaggcagcgttcacgcagtccggcaagaaggcgacggcggccgccgccgccgccgctggcgccgaggtccccctgacctccggcatccgcttccagacgctcaactacgtcaccaccatcgctctcggcggcggcggatcctcccgcgccggcgccggcaacctcaccgtcatcgtcgacaccggcagcgacctcacctgggtgcagtgcaagccgtgctccgtctgctacgcgcagcgcgacccgctgttcgacccgtccggctccgcctcctacgccgccgtcccctgcaatgcctccgcctgcgaagcctccctcaaggcggccaccggcgtgccgggatcctgcgccaccgtcggcggcggcggcggcggcgggaagagcgagaggtgctactactcgctggcctacggcgacgggtcgttcagccgcggcgtgctcgccacggacacggtcgcgctcggcggcgccagcgtcgacggcttcgtgttcggctgcgggctcagcaaccgcggcctgttcggcggcacggcggggctcatgggcctcggccggacggagctctcgctggtctcccagacggcgccccggttcggcggcgtcttctcctactgcctccccgccgccacctccggcgacgccgcgggctccctctccctcggcggcgacacctcctcctaccgcaacgccacgccggtgtcctacacccgcatgatcgccgacccggcgcagccgccgttctacttcatgaacgtgaccggcgcgtccgtcggcggcgccgcggtggccgcggcggggctcggtgccgccaacgtcctcctcgactccggcacggtgatcacgcgcctcgcgccgtcggtgtaccgcgccgtgcgcgccgagttcgcgcggcagttcggggcggagcgctacccggcggcgccgcccttctcgctgctcgacgcgtgctacaacctgaccgggcacgacgaggtgaaggtgccattgctgacgctgcgcctcgagggcggcgccgacatgaccgtcgacgctgccgggatgctgttcatggcgaggaaggatgggtcgcaggtgtgcttggccatggcgagcctctcattcgaagaccagacgcccattattggcaactaccagcagaagaacaagagggtagtgtatgacactgtgggctcaaggctaggctttgctgatgaggattgtagctatgcataattagtactattccctaactagaatttgaactgcaaatcaactgttgagtaaaaaacaagaaaaaactttgaaatggagatgatgagaaaatggtttgtttctct

SEQ ID NO: 7750 - DNA, 3390 bp, Oryza sativa
  ref <308>: DATABASE ACCESSION NUMBER: AK105098
  ref <309>: DATABASE ENTRY DATE: 2002-08-28
acaaattcacaaatccatcctcgcctcgcctcccacctctcgttcccctcccctcccccggcgaccggccgccgccgccgcgcgccgccgtcatggggtcggagcgcgcggagctggcgagggtatgcggggggcgcaactggtccaaggccatccgcatcctcgacgcgcacctcgcccgctccccgtcctccatccacgacctctgcaaccgggccttctgctactcccagctcgagctccacaagcacgtcgtcaaggattgcgaccgcgcgctggagctggacccggcgctgctccaggcctacgtgctcaaaggcaaggcattgtctgcattagggaaaagagaggaagctttggctgtttgggagcaaggacatgaggttgctgttcgtgatacaatggacctgaaacaattgcttgagttggaagaattggtttcctctgttaaaatctgtgagacgatcgagtgtgaagaccgtgtcgtggatgcatcaccatgtgataccaaagttgttatatccgaagatcgtgttgttgacacatcatgcactgcaactacaatggctgatacaaaaactgttgtttgtgaagaaaacatcgggaactctggagttatatcgaatggtgctgtgatattggctaatgataataaagcggacaacaataaagaatgcagcagtccaacaaaagatacaacagggacacatcatactcccaagaaaacaacaaagccagataagaaaagcaaagcaaaaggtagaaaagaaataaacagccaaatcgaagatgtggcagatagcataagttccggtgaaactgtagcagtagatcaaacactatttgcttcaaaaatatcaaaatcatcaaaatccataagcttggatttccgcctttccagaggcattgcacaggtgaatgaaggaaggtatgaccaagcaatatccatttttgatcagatactgcgagaaactccaacatatccagaggcactgattggaagaggaacagcttatgcatttcaaagagaattggattctgctatttctgacttcaccaaggctatacaatcaaacccatcagctggtgaggcatggaagcggcggggacaagctcgtgctgctttaggagagttcaccgaggctgttgaagacttgactaaagcattggaatttgaaccaaattctcctgatattttacatgaaagaggaattgtgaacttcaaattcaaggactacaatgcggcagtggaagatctctcaacatgcgtgaagcgtgacaagaaaaacagttctgcacacacctacttaggactaactctttcggcacttggggagtacaaacgtgctgaagatgagcatctccttggcataaaatatgatgagaacttccttgacagttgggctcacctatctcagctttaccttgatataggttgtccagagaagatgttgaataatgttgagaaagttcttcaaattgatgtcagctttggaaaagcataccatctacgtggaattctctaccatggaatgggtagacataggagtgctatcaaagatctgtcggttgctttaaaacatgagagttcaaatatagagtgcctatacttgcgtgcctcctgtcatcatgcgattggagagtacaaggccgcgatcaaagattatgatgatgtcctcgacttggagcttgactccatggataaatttgtgctacaatgtttggccttctatcagaaggaaatcgctctgtatactgcttcaaaggccaatttagagtcctctcagtttaacattgatgatgatgttgacccactgttcaaggaatattggtgcaaacgactgcatcctaaaaatgtggctgaaaaggtctatcggcaaccaccgttacggatctcactgagaagtggacgccttaacaagcaagacttcaaattcacaaagcatcagacaactcttatcctagctgcagattcaattgggaagaagatacaatataattgtcgtggcttcttgccgaatcaacgccagtaccgaatggctgggttggctgctattgagattgcccagaaagtttccaaagcatggcgctttctgagaaatccaaagaacaatgcaaagttagttaggagaagggataagcttaacgcgtgccagaacaggggagggtattgcagcacaagtactttgtctggatcaccaacatccagtccaaatgaagacaggatttcctctggaatttctctctcctggcatgatgtctataatattgctgttaaatggagacaaatttctgaaccttgtgacccagttgtttggatcaataagctaagtgaagagttcaattctggatttggttctcataccccgatgcttctaggccaagcaaaaataattcgttactatccatattaccaaagtgttttggaagctgcaaagaatatcatgcttgacttgaaatatgtcaataatgcggaggatcgtgcaatcttccttacagatattgaaaagttgaagaagatagaagttgcatcgtcgtgctcggagttgtaccatatagttggtgagacctactgggtctctactagatgcgacagcattgcatttcaggggaggcgtcttgaagggacaagaattaccactcaaaacatgggcaagacaggattcgactttgcaatacgaacaccttgtacaccatcaaggtgggaggaatatgatgaagaaatgtctgcagcttgggaggccatttgcgaggcatattgtagtgacacgaacccgacgcgtgaccctgatatgcttgatgctgtgaaggcagcaatattgcgtatgacatattactggtacaacttcatgccgctttcaagaggttcagctgtcgttggttacgtggtgttgcttggcttatttctggcagcaaacatggatgtcactgctagcatccctcatggggttcaggtagattgggaggccattctgtctcaagatcctgacacatttgttgataaaatcaagccctggctgtatccatcaataaaaacaagcaggaacctgaaagactatgcagatgtcagcgtggcattcagcaccacaggatcggttgtagcggccttaacttgtgttgacacatgagtttgatattgatttcagcggatactataggttggctgaattgttagcgtctttgtttcaccataatacccccatgaactgttaaaacagctttgtctagattgtcgagcatttttcggtttgctacagtttttcagttgcttcatagagctgtatacctgtatgttgtaatgctgtttgtttgacacaataatgtcattctttttcccttgaacgatggctttgtaataataattaccaataattcatgaaaacgtttgac

SEQ ID NO: 7751 - DNA, 1417 bp, Oryza sativa
  ref <308>: DATABASE ACCESSION NUMBER: AK105099
  ref <309>: DATABASE ENTRY DATE: 2002-08-28
aagaagcagctcagctcgccgtgccctgcagctctaccggcagcatcatcatcacctgtatccccgaaaggcagcttcttccggttgtagctaccgagctaccagtaccacccaccctgagagccaagaaatggcggcctgattgggcccccccgtgagctccgaatccgccggcggccaactgccggatctcctcgcagccagcgcgccgccgggagggacggagattggcggcggaggaggggaggtgtccaggccaggtcaggtgggatctccgcttgcttcgccggcttagaaatcggcatctttgtcttgcagatgtgagcttgcaagtgtggggtctccgcgtctttttccaggtggcaggcatggaggtgaggctgctgcttctagtgttcatatgtctgcatgctcttctttgggcggcttcggctcagcagccagaggaggcgacggtcatagttaagggatcgacaaaaatcgctgaaacgaataaaaattatatatgtgctacaatcgattggtggccaccagagaagtgtaactataatcagtgtccatggggccaatcgtcaattctaaacttggatttggatcatcccttcctggctcaagccattcaagcatttgataatttgaggattagactgggaggctctttgcaagaccgagttgtttatgatgtgggtacaaacagtccatgcgccccgttcacaaacatgtcaaatggtttatctggtttctcagatggttgtctaagcatggataggtgggacaaactgaatgctctattccaaaaaacaggtgcaattatcacatttggtctgaatgcgctctatgggaggtacaatgtccgtcgttctttctgggctagcaaatggaactctacaaatgcatataattttgtaaaatacacaatctcaaagggatatccagttgactcatgggaatatggtaatgaactgagcgggcatggaattggggcaagagtcgatgctacactgtatggaaaagatgcaattgaacttaaatccatctttcaacagttgtacaaggcaccactctcccagccatccctgttagcccctggaggattctttgatcagcagtggtacactcagctacttcagacttctggtcatggcgttgtcagtgctttgacgcatcatatttataatcttggtggagggaatgatgcccaccttataaggaagatattagatccaaagtattcagatcgttcagaagatacttatagggatatgcaactcacccttcaaaggcatggaacatgggcttctgcctgggtcagcgaaagcggaggtgtattcaacaatggcggtgaacttgtgtcaaacactttcatcaatagcatctggtatcttgatcagcttggaatggcatctaagtacaatac

SEQ ID NO: 7752 - DNA, 372 bp, Oryza sativa
  ref <308>: DATABASE ACCESSION NUMBER: AK105100
  ref <309>: DATABASE ENTRY DATE: 2002-08-28
tgatgcttcgttgcacatcaagaaggggataagacggccatcgctgcagcgaagagctcgcgcaggaagaaggagcagcaacaacagcagcagcagcaggcgatgccttgggtgaagctgctttcgcggtcctcacaagtacatgggaaaaaaaactatagtgtgtaattaggagttctttatggtatgggtattgcagggttggaagttaaatctggggcttttggatactgaactctaaagattcaatcttgacgatgccttgggtagaatttagtgtacatgtggtgtctgtatgagcttttggatgctgttctttgtaaagattcaatcttgaagatatttagaatggaagttagtattcgtgtggtg

SEQ ID NO: 7753 - DNA, 1725 bp, Oryza sativa
  ref <308>: DATABASE ACCESSION NUMBER: AK105101
  ref <309>: DATABASE ENTRY DATE: 2002-08-28
gatgcgaacgtgttacctgcagctgctgactcgagtgtgtggctgaggcggggatcatgtcgaagttgcaggaccgccacggtggcgaggcggcggccgacgtcggccgccgagcgcgtcaccagcggctgctgctcagcttcccggtgttcccgatcgtgctgctgctcctcgccccgtgcaccatcttcttcttcacgtccggcgacgtgccgctcccccgcatccgcatcgagtacgctcgccgtgacgctccgacgatcaccgcggtggcagcggacacgtcgccgccaccaccttcaccaccgtcgtcgtcgccgccaccgttgtcgtttccgcctccaccgcctccgccatcatcaccacctccgccagctctgcctgtggtcgatgatcacagcgacacgcaacggtcgctccggcggctgcggcagctgacggacagcccgtacacgctcggcccggccgtgacgggctacgacgcgcgcagagcggagtggctgcgcgatcacacggagttcccggcgtcggtggggcggggccggccgcgggtgctgatggtgaccgggtcggcgccgcggcggtgcaaggatcccgagggcgaccacctgctcctccgcgcgctcaagaacaaggtggactactgccgcgtccacggcttcgacatcttctacagcaacacggtgctcgacgccgagatgtccgggttctggacgaagctgccgctgctgcgcgcgctgatgctggcgcacccggagacggagctgctctggtgggtggactccgacgtggtgttcaccgacatgctgttcgagccgccgtggggcaggtacaggcgccacaacctcgtcatccacggatgggacggcgccgtgtacggcgccaagacgtggctcggcctcaacgccggcagcttcatcatccgcaactgccagtggtcgctcgacctgctcgacgcctgggcgcccatggggccgccgggccccgtccgcgacatgtacggcaagatcttcgccgagacgctcaccaaccggccgccgtacgaggccgacgaccagtcggcgctcgtcttcctcctcgtgacgcagcgccaccggtggggcgccaaggtgttcctcgagaactcgtacaacctgcacggcttctgggcggacatcgtcgacaggtacgaggagatgcggcggcagtggcgccacccggggctcggcgacgaccggtggccgctgatcacgcacttcgtcggctgcaagccgtgcggcggggacgacgcgagctacgacggggagcgctgccggcgaggcatggaccgggccttcaacttcgccgacgaccagatactggagctgtacgggttcgcgcacgagtcgctcgacaccatggccgtgcgccgcgtcaggaacgacaccggccggccgctggacgccgacaaccaggagctcggccgcctactgcacccaacattcaaagcccgcaaaaagaagacatccagagcagccaggcccatgtaatgacgaagatcatatcgaaaaccgtgtaattatggagatatgatactttgattaggttgtattttcgtttggagatatttcttgaatattgatgtatgaacgaggaccggagatatttaatgtgttgtttttacacccaaaaaaattctcactttatgtacgagctaattccggttacttgacttattaaaaaattgcgagcaatgttttgttgggg

SEQ ID NO: 7754 - DNA, 2163 bp, Oryza sativa
  ref <308>: DATABASE ACCESSION NUMBER: AK105102
  ref <309>: DATABASE ENTRY DATE: 2002-08-28
atgcttcttgttcatccaagctaagctgagctgagctgagatgggcgagagatgtagaagtagatagaattaagctagctagagaggtagatatatagctgtggtgaggaagtttccagaaggttctagaagatcgccatgggcaacacgtgctgcgtcgctccggctaccaccgatgaggtgggcgcgccgccgcgagatcatcatcacgcggccaagaagtcgccggcgccgtcggcgacgacgacgacggcgacgaggcagaggcatggccaagaacccaagcccaagcccaagcccagggcgagggcgaagcccaacccgtacgactgggcgccgccgcgggtgctgccggcgaggggcggcgccgccgcgtccgcggtgcgcgtgctggagggcgtggtgccgcaccacccgcggctgcgcgtcacggacaagtaccagctcggccgcgagctggggcgcggcgagttcggggtgacgcacctcgccacggaccgcgcgacgcgggagcggctggcgtgcaagtccatcccgaagcgccgcctccgcaccgccgtggacgtcgccgacgtgcggcgcgaggtggccatcatggcgtcgctcccggaccacccggcgctggtgcgcctccgcgccgcctacgaggacgccgacgcggtgcacctggtgatggagctctgcgacggcggcgagctgttcgaccggatcgtggcgaggggccggtacacggagcgcgccgcggccgccgcggcgcggacggtggcggaggtggtgcgcgcgtgccacgcccacggcgtgatgcaccgcgacctcaagccggagaacttcctctacgccggcaaggccgaggacgcgcagctcaaggccatcgatttcggcctctccgtcttcttccgacctggggagaggttcagggagatcgtggggagcccgtactacatggcgccggaggtgctccggcgagactacggcccggaggtggacatctggtccgccggcgtcatcctctacatcctcctgtgcggcgtcccgccgttctgggccgagacggagcagggcgtggcgcgcgccatcctccgcggcgccgccgacttcgaccgggagccatggccgcgcatctcccgcgccgccaagtccctcgtccgccagatgctcgacgtggacccgcgccgccgccccacggcgcagcaggtgctcgaccacccctggctccaccacgccgcccgcgcccccaacgtccccctcggcgacgtcgtccgcgcccgcctcaagcagttctccctcatgaaccgcctcaagaagaaggccatgcgggtgatcgcggaacacctgtcggtagaggaggtggaggtgatcaaggacatgttcgcgctcatggacaccgacaacaacggcagggttacgctccaggagctcaaggacggcctcaccaaggtcggctccaagctcgccgagcccgagatggagcttctcatggaggccgcggatgtggatggcaatgggtacctggactacggcgagttcgtggcggtgaccatccacctgcagcgcctctccaacgacaaccacctccgcacggccttcctcttcttcgacaaggacggcagcggctacatcgaccgcgccgagctcgccgacgccctcgccgacgactccggccacgccgacgacgccgtgctcgaccacatccttagagaagtcgacaccgacaaggatgggcggatcagctacgaggagttcgtggcgatgatgaaatccgggacggattggaggaaggcgtcgcggcaatactcgagggagcggttcaagacgctcagcaacagcctcatcaaggacggctcgatcaccatggcgcgctagctagctcgacgaattcagtcgattcaggcttgagaattcattgagaatatgaggtcgatgcaatgctcgaattttttttttttttgatgcatacttcattcgaatttgaatttgggttttccatttcgtccaatttttcttttgtacaatctactgtagatcgatcggtcgtctatctgaaccttctttgtgtaggatgtgttagtgaacgctgggattgtttcagcattcgttgtacgtgtttgaaattgcgtcgggtgtaattatgtggtaacggtggtaatcaagcaaatttacagc

SEQ ID NO: 7755 - DNA, 2519 bp, Oryza sativa
  ref <308>: DATABASE ACCESSION NUMBER: AK105103
  ref <309>: DATABASE ENTRY DATE: 2002-08-28
tgtccctcaacctctcctccaaccgcctcgctggccccatccctgatggcctctggtcgttgccttcgctccggtcgcttgacctctcgggcaacgagctctccgggagtgtccccggaggcttccccgggagcagctcgttgcgggcggtggacttgagccggaaccttctcgccggggagataccggcggacgtcggggaggcggcgcttctcaagtcgctggatgtcgggcacaatctcttcaccggcgggttgccggagtcgctgcgtcggctgtccgcgctgcggttcctcggcgtcggcggcaatgcgctcgccggggaggtgccgtcgtggatcggggagatgtgggcgctggagcggctggacttgtccgggaaccgcttctcgggcgccatccctgacgccatcgcgaaatgcaagaagatggtggaggcggacctcagccggaacgcgctcgccggcgagctcccctggtgggtgttcggcctgccgctgcagcgcgtctcggtcgctgggaacaagttgtacgggtgggtcaaggtgccggcggatgccgcgctggcgctgcgcgcgctggacctgtcgagcaacgggttctccggcgggatcccgccgcagatcaccgcttttgcgggtttgcagtatctcaacatgtcctcgaattccttcgcgaggcagctgcccgccggcattggcgggatgaggctgctcgaggtgctcgatgtgagcgccaaccgtctcgacggcggcgtgcccccggagattggcggcgcagtggcgctccgggagctgcggctggggcggaattcattcaccggccacatcccgtcgcagattgggaattgcagttcccttgttgcattggatttgtcacacaataatctcacagggtcaatccttagcaccgtaggcaatctgaccagtcttgaggtggttgatctatcaaagaacaagctgaatgggaccttaccagtggagctatctaatctgcccagcttgcgcatctttgatgtctcccacaacttactatcaggggacctcccaaatagtcgtttcttcgacaacatccctgaaaccttcttgtctgacaatcagggcctctgcagctcgcggaagaacaactcctgcattgctatcatgccaaagcccatagtgctcaatcccaactcctcgacaaacccattgtcgcaggccacaccgactgcccctagcagcatgcaccacaagaagatcatattaagtgtttccaccctcattgccattgcaggtggtggtaccattattatcggggtgatcatcatatctgttctcaaccgtcgtgcccgtgccaccacctctcggtcagctcctgctactgcattatctgatgactatcttagccaatccccagagaatgatgctagctcagggaagcttgttatgtttggaaaaggcagcccagagttcagcgctggtgggcatgccttgttgaataaggattgtgagcttggtcgaggaggttttggtgcagtctacaagacagtgctgagagatggccaaccggtggccatcaagaagctcaccgtttctagcttggtcaagtcgaaggatgactttgagagacaggtgaagttgctcagcaaagtgcgacaccacaatgtcgtcgcactaagaggcttctactggacttcgtcgctgcagctcctcatctatgattacctgcccggaggaaatttgcacaaacacctccatgagtgcacggaggacaactcgctctcttggatggaaaggtttgacattatccttggagttgctaggggtctgacacatctgcaccagcgtgggatcatccattacaatctcaagtccagcaatgttctgctggacagcaatggtgaacccagggtaggtgactatggtcttgccaagctgttaccgatgctggaccggtatgtgctgagcagtaagatccagagtgcactggggtacatggcaccagaatttgcttgcaagactgtgaagattaccgagaagtgcgacgtgtatggctttggagtgctcgtgctggaggtcttgacgggcaggaggccggttgagtacttggaagatgatgtagttgtgctatgtgatttggtgagaagcgcactggaggaaggtaggctggaggactgcatggatcccaggttatgtggtgaattccccatggaagaggccttgccaatcatcaagctgggccttgtttgcacctcgcgggttccatcgaaccggccagacatgggcgaagtggtgaacattcttgagctggtgaggagtcctcaggatagtctagaggacgagctggtttaatgtctcttgccaactctgttctgaacggttctaggcgtttttttttcctttttgttttaatgagatgcatatagtgtaatgctaggtgggaagaaatcagagaaagcaaagagtggtatggatcgtgaaatgcttgtagtttgcttgaagttttagggaggttgcaaggctattttgttgcttctcggc

SEQ ID NO: 7756 - DNA, 1994 bp, Oryza sativa
  ref <308>: DATABASE ACCESSION NUMBER: AK105104
  ref <309>: DATABASE ENTRY DATE: 2002-08-28
gttcatcatataaaaaattatactttagcggaacactggctccagaaagtaaatatgcctatgattgtttcttcaaacccagacttctggagaataaactgctttcaatcactataaatatctggcacctacctgatttgtgcatatgtttctttctgttttgcccttacctcagctctgcttgtgaatgtgtaaatctgtgataggtttgtgaagaatgtattggagaaaaagagagctgtgcattggttgagaagctcaattatcagaatgaagatatccaggtttatcttgtccgtggtaaagaagcgccaaagtcaattagagaggcatcggcagctgttcctgtaccagatcgtaggacttcaaagcgttcccggagaacaacctcaggaaattcgatcagtttgaaagtctctggttctacaaccgtatatcagttgaaactcatgatatgggaatctttaggggtatgagacggactgaaaccataaatttttttttgcaagaactgctattgtttacttgttgcgattcagataataaagagaccataaaagaaataagcctataggttctgttaattgtcacttctacaactttatgttatttcagcttaaaagtttgcagagttgtcaatcctaactaatgagtaatcataagttgtgagacttgtgattggtactacatactttcaaacatttagaagaagctaacttcgtttgcaacttgaacaaacagttatagttgtcaatttgagatcctttaggacctgcatgatcagttgatcacaccttttggactttaccgtgcttctattttcaagtataattaatattcaaggttttaagtcagtcagctacagttatgggcttacctatccagtatttttttgggttgcaaattaaattttcatatattattgtcaaaagttattgtatgtagtttgctgtagataactgcccctttctccattttttttattgaaccttgctccttatttgatttacattatgcttgtttactttagattgcattcaaattattactgttgccatattcagattgttaaggagaaccaggagcttcacaaaggctctgttgagattgaagatgattttgctactcttgctgacaagtgtatttttcctggagatgttctatgggttaaagattccgaaatctacgagaaccgtgacatagcagatgaaatttcggagcagaaggttgtagtacagactgaggaaggctttcgtgggactctgttgacatctagtgcttcagctcagctttgccaggatatatcatttagcgattgagttctccaatgtcagctacatcactgcctgcatatgcttgcttcagctagttaagcttgcttggaggtcagattgactttcttcctagtttttcttagttgaaaaatcagcctgcagtttcacctgattccaaacaaaggttattgcatgtatgcaatgtcgttaatattttattttgtccattttgacaccaaatacccagcttacatttaagtttcctaatcagaaatgtactaacttgctctcatgacatgcaggagtatgctgaggattaagtcacaacaagttgttctaaatacatggcggttctgcacttgccgtcaccgtgggtgaaaagttttgtctgccccttatctccatactctgtttccaccttagggtgtgcgtcctgctgttgtatcagcatgccaaaatgagcggaaaaagagggtatgtaattatttaggtagttaatccttgtactaccttttagtggctatgcagaggttttatgaaggagagccggaaactatatgtagagcagttcgctgtgtgttcttacgttgtgggatctgcaattcttcagatctcatccctgcagcttttctcccgtttatttgtttgtgggctcgcccctttcctaagcctttccttgggtgcatgcatattcaattctactaccgagaagttctggtt

SEQ ID NO: 7757 - DNA, 1568 bp, Oryza sativa
  ref <308>: DATABASE ACCESSION NUMBER: AK105105
  ref <309>: DATABASE ENTRY DATE: 2002-08-28
aatggcaaagcgagcctagtcacggaggcgaacgcgaagccgagccccacaccgcgccacgcggcccgctccgccgcgcgacaccgcgacgccaccaccccatcatccgctccaccgcggcgagcaccgcgcgctgctgctgctgcgtccaaagtccaagctcccaaaccaaacctgcgcgtgcccaatcgatcggcgccatggccgcggccgtcgtcctcctccgccgcctgcgcggcgtcacggcggcgccccggcgcgcggcggcggcgctgcccctgaccacgagcgtccggggtgtctccgattcgacggagccgctcaccatcgagacctcggtcccctacaagtcccacatcgtggacccgcccccgcgcgaggtggccaccacggcgcgcgagctcgccaccttcttccgcgacatgtccgccatgcgccgcgcggagatcgcggcggactcgctgtacaaggcgaagctgatccgcggcttctgccacctctacgacggacaggaggccgtcgcggtgggcatggaggcggccaccacccgcgccgacgccatcatcacggcctaccgcgaccactgcgcctacctcgcccgcggcggcgacctcgccgccctcttcgccgagctcatgggccgccgcggcgggtgctccagggggaaaggcgggtcgatgcacctgtacaagaaggacgccaacttctatggcggccatggcatcgtgggcgcgcaggtgccgctcggatgcggcctcgcgttcgcgcagaggtacaggaaggaggccgccgtcacgttcgacctctacggcgacggcgccgccaaccaggggcagctgttcgaggcgctcaacatggcggcgctctggaaactgcccgtcgtgctcgtctgcgagaacaaccactatgggatggggacggcggaatggagggcatcgaaaagccccgcatactacaaacgcggcgactatgtgccaggattgaaggtcgatggtatggatgttcttgcagtcaaacaagcttgtaaatttgccaagcaacatgctcttgaaaatggaccgattattcttgagatggacacctacagataccacggacactctatgtcagatccagggagcacttaccgcaccagagatgaaattgcaggcataagacaggagcgcgatccaattgaaagggttaggaagctactactggcccatgactttgcaaccacacaagaactcaaggacatggagaaagaaataaggaagcaagtcgacactgccatcgcgaaagcaaaggaaagtccaatgcccgatccatctgagctctttacaaatgtatatgttaatgactgcggtttggagtcatttggtgtggacaggaaggtggtgagaactgtacttccctagggtagccgacggccaccagaatcttggctgccttgtgctgtagttacatatacaagaggagaaataattaataatacaggtcaaggcatccttagtgttaatcttcctttttctgtcactaaataaattatgtataggtgaatcaattgccggaattaatcctgtcatttc

SEQ ID NO: 7758 - DNA, 1501 bp, Oryza sativa
  ref <308>: DATABASE ACCESSION NUMBER: AK105106
  ref <309>: DATABASE ENTRY DATE: 2002-08-28
gacgacccattcccccatctccgcgggaaacaaaccggagctcgccttggcctcgccgccggcctcctcctcctcctccatcgccgcacgctctccctccgaaccctaaccctagctcgctcgctccggggtcccgggccatgctctccacggcggcgccatcctcaacctccctcgtcgcctcgttcccgtcacgcgcgcgccggcgggggctcccgggccgacgcggcgtggtcgtcgcggccgcgggggcggggccgggggcgggggcggcggagaggttcgcggcaagcagcagctccatcaccgactacctgcggtaccgccgcccggggtccgccgggggaggtgggggaaccggggtgtgcggcggggagctgcagacggcggtggtgcggtacgagaagcggctcccgtggtcgctcatccaccccttcctccatgttgatttggtttctactgtccacattgctgacaaagaatacttcgatagactccagcaagcacttcaagattatgattgtgttctttatgaaatggttacaagtcgggagaacttaaacaatcgcaaggacccaacctttgcgaagaagctgaaatcttcacgtaggggattcagtattcttggcttcatacagaagcaaatggcaaacatcctttcattggattaccagctagattgccttgactatggcagtgaaaaatggcaacatgctgaccttgattttgagacattcaagcagcttcagagtgaaagaggtgaaagtcttttcacgtttgcggtagacatgacactgaaatcaactaaagccttggtacaaccaacattgcctgatggtcttgacttctggaggtctaagctgctttgggcctcacgtgttctaccaatgcctcttgttggactgttccttatcagtgggctttgcttaccaatcgacgatcaaggtggatatcctgagcttgaagcattgtccaggctagattttggagctgcactgaagatttttctggctaagcaattgacctccgatttcacatctatgacctcacccattgaggaaaagtcagttatcattggggaaaggaatagagttgctactgagaagatacaggaagcaataaaccatgggtacaagagaatagctgtcctttatggaggtgggcatatgccggacctgggaagacgtcttcgtgaagagctcaatatggtcccagctgacgtccagtgggtgacagcatggtcaattagaagccgggagctagacagggaatctcttccattcctgaagaccatggctgaagtctcagggtggcctttgaatagatacgagacacttgctctgcttatcttttcttcagttctcgcagtggatctttggttctgggagcttcttgtgggtactgccgtgaactgggcatctttggctggctcatggattgaacaatttaatggtccattttgacatctaatgggcagaagcgaaagaaaaaggaaacaaac

SEQ ID NO: 7759 - DNA, 1668 bp, Oryza sativa
  ref <308>: DATABASE ACCESSION NUMBER: AK105107
  ref <309>: DATABASE ENTRY DATE: 2002-08-28
tctgctcgctggaaatctggtggtaagctacttccttatctgtatcagtccaggaacaacactggtcatttttcaagtaaagagttaccaggtagctccaaccagtctcaagatcttgccccactgccaaaaatgatacaaacgccacaaagtccagtaaccagtacttctggtgttgtcagctttcaacaacgctgcaacagcacaaaaatctgttcacaaccaggatgtgcaaaaggtgctagaggttcttcagggcgctgcattgcacatggtgggggtagaaggtgccagagagaaggttgcaagaaaggagccgagggaaaaactatcttctgtaaagcacatggaggtggcagacgctgcgagcaccttggatgcacaaagagcgctgaaggccgcacagatttctgcatagcccatggaggtggccgccgttgtagccgtgatgggtgtagaaaggcagcaagaggaaaatctggcctttgtattaagcatggtggggggaagagatgccaaaaactgaactgcacaaagagtgcagagggccaatcaggcttttgcatcgctcatggtggtggccgtcgctgcaaacatgatggttgcacaaagggaggtcagggcagcactaatttctgcaaagctcatggaggtgggaagagatgcacacatccgaattgcagcaagggtgctgagggaagcactgctctctgcaaggcccatggaggagggaaacgctgttcagctgaagggtgccctaagagtgtccatggtggcactgagttctgcgttgcccatggaggcggaaagcgatgtgtggtaccaggatgcaccaagagtgcaaggggacggactgactgctgtgtccgtcatggcggtggtaagcggtgccagtttaccggctgcagcaagagtgcacaggggagtacagacttttgcaaggcacatgggggaggtaaacgctgcttatggggccaatcagggtctggccttggagacggcagcggtacttgtgagcgctttgcaaggggtaagaaaggcctgtgcgttgcacacaatgcgctggtggaagatagtcgagtccgtggtggtcagacagttggaactattgccctgcctggttctactggtgctgattctgatgttagtcatgggacccttcctggaaactctttcaactctggtgagacatttgccgctaacaccaagcaggctcttcatcatgttcaatcacctgttccagaaggcagggtgcatggtggcaacattgcggctatgcttgctaacagtatggattatcagaagcaattgaactttagcaccggggctagcacctctgatcgcaactggctgtaatacagttcatgcattaaaaacaccaaccattcccttcgctgggccctgtttcatttcaactggcaagtaacttatatgttcctaccgtgctgtgtatttaggaactgtggatcctgatgatttagtggtgctgtgttaatagggggcttctagtgcttcgtttgtagccatcttgtgtcataaataaaaggggaaagtagtgtaatttatattagtgcgcaattgtaaaattctaatgtttgttgaagatgtaacatatcttcgaaactcatgttgagtgtttgtgattgcaatattagcattatggttggt

SEQ ID NO: 7760 - DNA, 2041 bp, Oryza sativa
  ref <308>: DATABASE ACCESSION NUMBER: AK105108
  ref <309>: DATABASE ENTRY DATE: 2002-08-28
ataaagggactcttgatgatgactatgatcttgttgcggtgaagagatatattagcaaagatttaaggaaagagtttatggaagaagtaagcatccatagtcaaatgagtcacagaaatgtggtggagctcataggctattgcattggagaaagtactctaatgattgttactaagtatatctccaaaggaaaccttgatgacatactccacaacagtgacatttccatccctttggatgtaaggctgggtattgctataggatgtgcggacgcattgagctacatgcattcgatgcatttatcgaatggcagtcttatttgtcatggtgatattaagcctgccaacatacttctagatagcaatctgacatcgaaattgtcagactttggagtgtcaaggcttctttcaggtggtgtcactcagtacactgtacatataaaaggaagcgtatcttacatggatcctatatactttcatgagggttgtcttactccgaggagtgatgtttatagtttcggaatggttctcttggaactaatagctcgaaaaagggtaagaaaaggtgacattaacctcattgggggtggagaaatatttgatgctgagatagcaaaccggagcaatatgaagattctaaaagaaatgaggaaattggcaattgaatgcctaacactggacattcataaacgtcctcaaatgaatgttgtggcaaaacgccttcgtacacttaaaaaagaattaaaagacatgcatggaagatactcagaacacattttggcatcacaccgctcatggcgaaaaaatgacaaccaggggccgagctataattctaggatgcaactgaagaagagtttgagcattttcaagagaaatcttagcaattcttctaagatcctattgggactcggcaatatgagaattttcacacaggaggagctaaatgaaatcacacagaattactcgtgtctactcagtggaggtacttcgggtaaggtttacaaaggaacgcttgaggacaatacggtggtagcggtgaggatattttccgaggcacttgagggtttcgaagaggcgtttatcaacggagggatgatcctatctcaaattgtccacaagaacatcatcagactcttgggttactgcttgaatgctgattgtcccgcatttgtgtacgagtatgctgctagaggaaccctctctgacattctagatggccgtgaagatttcccactgcatttacgcgtgaagatcgcagttgagacagcagaagcattagagtacctccattcctcagcagctggtatgatcagacatggctatgttgcaccatccaagacacttgttgatgacagtttcacgccaaagctgacgggattctcatgggcgcagaggctcaacaatgatgacagcgcaattcatgatcatgataagtactgtgtgtcactaaaactgaaaaccgatgtgtatcagtttggtgttcttgtcttgacgctcattagtaggaagaactttgcgttttatgcggatcacgaacaccttgtctcgcaattccttgcagcttacaaggcagataacagtggaagggcatttttcgacgatgatatcacaactcgtagcgaagatgttgctctcctcgaagagatagggaagctattgctcaagtgtatttgtttggaaatagatcaaagaccaacaatgaaacaagtggcacaacaccttcggatcattcggagatgttggaagaataattgcacagccgatggagcttcactggtaactaattaaatctcatatatatcactagagctgatcaaggaactgaacttgacagtacacttggttcactctaagtgatcgtgtacaagcattgtgtgtgaattgtaatatattatttgttaccagaacatcttgcagtatatgctgccattcggatgatgttatctgaacttgcatgcaatctgcttcttatgcggtcgatcccatgatgtttatctgaacttggttctactagtggatatagaaaattcatgttcaatgtt

SEQ ID NO: 7761 - DNA, 1292 bp, Oryza sativa
  ref <308>: DATABASE ACCESSION NUMBER: AK105109
  ref <309>: DATABASE ENTRY DATE: 2002-08-28
ggtgttccatgccaaatttgcggagaactatcgactatactcacgcagccattttgtcaagggtattgagttgctgattttgctaattgtgtatgaaatctttgggcaatcatatcgaggagctatcgcgtacatcttcattacattttcgatgtggtttatggttgtaacctggctctttgcaccattcctatttaatccttctgggttcgagtggcagaagattgtggatgattggactgattggaataagtggatcagcaaccgtggtggtattggtgtaccaccggagaaaagttgggagtcatggtgggagaaagagcaggagcctataaaatattctgggaagcgtggaattgttctcgaaatagtgcttgcattgcgcttctttatctaccaatatggtcttgtttatcacttgaacataaccaaacacacaaagagtgtcctggtctattgcctgtcatgggttgtcatctttgtaattctgcttgtgatgaagaccgtgtcagttgggaggcggaaattcagcgcggacttccaacttgtgttccggttgattaaggggttgatatttataacatttatctccatcattataatcttgataacaatccctcatatgacagtccaggacatctttgtttgcattcttgccttcatgccaactggctggggtctgctgttggttgcgcaagctatcaagccagtaattgtgcgcatcgggttgtggggatcgatcaaggcgcttgcgaggggatatgagatcatcatggggctcctgctcttcaccccgatcgcgttcctcgcttggttcccgtttgtatccgagttccagaccagaatgctcttcaaccaggccttcagcagaggtctgcagatctcgcgaatccttggcggccacaagaaagaccgagctacacggaacaaggagtagtagcctgtctgccattcactggacatgtattctgttgtgtcttcttccctcctgttgctgctgtaatttgttactcctattctactactccacttatcttgattgagagacccgaaaaaaaaagaaaaagaaagaaagcgtgcattttggtagttgctaatcgccgcgctgctgaggccgcttattgtgcggcccagggagcgatgtgttgtagaatagtacagtagaatgtgtaaagttgctgtttggtagtgatgtgatgtgtgtgtatgaaaacaaacttgggaagagaaatgcaattgtaagacaaaataccttgcctgatgtgatgaatgtttttttttttgacatgtgt

SEQ ID NO: 7762 - DNA, 1775 bp, Oryza sativa
  ref <308>: DATABASE ACCESSION NUMBER: AK105110
  ref <309>: DATABASE ENTRY DATE: 2002-08-28
gtacattgcacccatgcatctacacacgcatcaagctaaggacatggaaacgcttgggaggaggaggagagtggccgtccttgcatggtgcaatgccattgcaatggcgctagctctagcgacaccggtggcggctgtcgctgccaaccacggcgacacggcggcggcgaaggacaatgtggccgtcgtcccgaggattgccgcctcggcggcggcggcggcgtcgagcgtgaacgtcacggccatctgcatggcgacgccgtacccgagcgcgtgcgagacggcgctctcgtcggcggcggcgcggggcgcggccaacgacccgttcgcggcgtcggtgcagttcgcgatgacccgcgccgagtcggcgcgcgcgctggcgcgcaacctgtcggcgtcgtcgtcgaggccacgcgtggcgccgagcggcatggacgactgcgccgagctgctcgacatcagcctcgaccagctccacgacgcgctcgccgcgcgcgccgcggacgcggccggcgtgacgacgtggctcagcgccgcgctgacgaaccagggcacgtgcggcgacagcctcgccgccgttcccgaccccgcggcgcgctccgccgtacgcgcccgggtcgccgcgctcgagcagttcatcggcacggcgctggctctccacgccaagctcaacaatggcggcagcgggagctcctcgccggcgccgccgagccgcgccgcgttcccatcctgggtcaccaagcacgacaggcacctcctctcatccccggcgagcaccatcgcgccggacgccgtggtggccctcgacggcagcgggacgcacacgagcatcagcgacgcgatcgccgccgtgaccgcgccgccgccgccggcgcaccaccccacggcgagcggcggcggcggcggcggacggagccgaaaggtgatctacgtgaaggctgggaggtacgaggagagcgtgagcgtcacgagcaagcagaaggacgtggtgctgctcggcgacggcaaggggaagacggtcatctccggccaccggagcgtcgccggcggctacaccacctacgcctccgccaccgtcgctgcaatggggtcggggtttatagccaagggcctgacgatcgtgaacagtgccgggccggggaagggccaggcggtggcgctgcgcgtcggcggcgacctctctgtcgtgtacaattgcggcattgaggcgtaccaggacacgctctacgtgcactccaaccggcagttctacgccgccgacgacatctccggcacggtggacttcatcttcggcaacgccgcggcggtcatccagggctgcgagatccgggcccggcggcccagcccgggccaggaggacaccgtcacggcccagggccggtccgacccgaaccagaacaccggcatctctatccatcggtgccggatcaccggcgcgccggacctcggcggcacgccggtgtatctgggccgtccgtggcggaggtactcacggacggtcgtgatggggacgttcctggaccgttcgatcgcaccggccgggtggctcgagtggtcgggccagttcgggctcagcacgctctactatggcgagtacggcaacaccgggcctggcgcggggacacgtcggcgggtgacgtggagcggcgtgcacacgtcgatgtccacgtcggacgccacgaggttcaccgtggcaaactttatcgttggggatgcgtggctacctgccactggagttacctacacttcaggtctgtagtggcgtactagtagcg

SEQ ID NO: 7763 - DNA, 2203 bp, Oryza sativa
  ref <308>: DATABASE ACCESSION NUMBER: AK105111
  ref <309>: DATABASE ENTRY DATE: 2002-08-28
aaaaaaaaaaaaaaaagtcgaatcgacaagcaaacaagctagctgcgccacggcgaagtgatgcaaacaccatgcttcgtgagcctttccactgtttcactctgctcctgctcctcctcgcggctgccgaccgctgcgccgcggccaccggcggcagcggcggcctgcagttcgcgtacgatggcttctcgggcgccaacctcaccctcgacggcgcggccacggtcacggcgagcggcctcctcatgctgaccaacgggtccatccagatgaaaggccacgcgttccacccgtcgccgctcccgctccgcgcggcgaggtccttctcgacgacgttcgtgttcgccatcttcgggcagtacgccgacttcagcagccacggcctggccttcttcgtctccgcgtccgcggacgcgttcgccgccgcgctgcctggccagttcctgggcctcttcaacggcaccggcgccaccaccggcaaccggagcgccgccggcgtcttcgccgtggagttcgacacgctcttcaacgccgagttccacgacctgaacagcaaccacgtcggcgtcgacgtcaacagcctgacgtcggtcaaggccgccgacgccggctactacgatgacgtcaccggccagttccggaacctgaccatgatcagccggaagcccatgcaggcgtgggtggactacgacggcgggagcacggaggtcaccgtggccatggctcccctgggcacggccaggcccaagaagccgctgctgcggaccaacgtcgacctccccgacgtcgcgacgggcgcggcgcacgtcgggttcgcgtcggcgacgggcatcctcttctcgcgccacttcgtgctaggctggagcttcgcggtggacgggccagccccgccgctgaacatctcgtcgctaccgccgttgccgcgggcttggcccaagccgcggtcgaaggtgctggagatcgtgctgcccatagcgtcggcggcgctggtcgccgccgtggccatggcggtgtacgccatggcgaggcggcggctcaggtacgccgagctgcgggaggagtgtgagaccgcgtttgggccgcaccgattctcctacaaggacttgttccatgcgaccaagggattcagcgacaagaacctccttggcacgggagggttcgggagcgtgtaccgaggcgtgctccgcaagcccgacatggaggtcgcagtgaagagggtgtcacacgaatcaagacaagggatgaaggagttcgtcgcagaggtcgcgagcatcggtcgcttgcgacaccgcaacctcgtgcaactactcggctattgccgtcgtaaaggtgaacttctcttggtgtacgattacatgccaaaaggtagcctcgacaaatacctttacgatggaagcaagcacccactaagttggcctcagagattccacatcatcagaggagtggcgtctgggctactgtaccttcacgaggattgggaacacgttgtcatccaccgagacgtcaaggcaagcaacgtgctcctcgacgatgagatgaacggtcgactaggcgactttggcctcgcaaggttgtatgatcacggagctgttgcacagacaacacatgtggtcggcactatggggtacctagcccctgagttggggcacaccggcaaggcaaccccatcaaccgacgtgttcgcgttcggcgcattcctcctcgaggtcacctgcggaagaaggccaatcgtgcaggatgagcacggcaaccgtgccgtgcttgtggactgggtgactgagcagtggagcaagggtgcacttgttaacgtggtggacgcgaggattccgagctgttttgatcctgacgaggtttctctggttctaaaacttgggctgctctgctcgcatccattgcccaatgctaggccaacaatgcggcaggtcgctcagtacctcgacggtgatatggccctaccggatttgtcaccgacgtacctaagcttcacttcactagagcggatgtacaaggagttcaaccgcaattccatttcatacatctcatcagcaagcatgggtgccatttctgatatctcgggaggaaggtgacaaaggaagggagctcgtgattttgagaagcagttggtgaggatatgaaaaatcgggtttctcagtttattacttctagtttattttctgaattataatggactgtttagggggct

SEQ ID NO: 7764 - DNA, 2571 bp, Oryza sativa
  ref <308>: DATABASE ACCESSION NUMBER: AK105112
  ref <309>: DATABASE ENTRY DATE: 2002-08-28
acgaagacatcatgatggcatagaggagcttgtcgctggtggcgttcatggcggcggtggcggcggcggccgcggcggcgggcgatgaccggaggccgtacgtggtgcggatggacgtgtcggcgatgccggcgccgttcgcgacgcacgacgggtggtaccggtcggtgctctcgtcggcgtcggcgagggacgcggcggcggcgccggcggcggagcacctgtacacgtactcgcacgccatgaacgggttcagcgcggtgctgacggcgaggcaggtggaggagatccgccgggcggacgggcacgtcgccgtgttcccggagacgtacgcgcggctgcacaccacgcgcacgccggcgttcctcgggctcagcgccggcgccggcgcgtggccggcgtccaggtacggcgccgacgtggtcgtcgggatcgtggacaccggcgtgtggcccgagagcgccagcttcagcgacgccggcgtggcggcgccggtgccggcgaggtggaagggcgcgtgcgaggccggcgcgtcgttccggccgtccatgtgcaaccggaagctcgtcggcgcgaggtcgttcagcaaggggctgaggcagcgcggcctcaacatctccgacgacgactacgactcgccgcgggactactacggccacggctcgcacacgtcgtcgacggcggcgggcgccgccgtccccggggcgagctacttcggctacgccaacggcacggccacgggcgtcgcgcccatggcgagggtggccatgtacaaggccgtgttctccgccgacacgctggagtccgcgtccaccgacgtgctcgccgccatggaccaggccatcgccgacggcgtcgacgtcatgtcgctctcgctgggcttcccggagtccccctacgacaccaacgtcgtcgccatcggcgccttcgccgccgtgcggaggggcatcctcgtgacgtgctccgccggcaacgacggctccgacagctacaccgtcctcaacggcgcgccgtggatcaccaccgtcggcgcgtcgaccatcgacagggcgttcaccgccaccgtgacgctcggcgccggcgccggcggcgcgaggagcatcgtcggcaggtcggtgtacccggggcgcgtgccggccggcgccgccgcgctctactacggccgcggcaaccggaccaaggagcggtgcgagtccggcagcctcagccgcaaggacgtccgcggcaagtacgtcttctgcaacgccggcgagggcggcatccacgagcagatgtacgaggtgcagagcaacggcggccgcggcgtgatcgcggcgagcaacatgaaggagatcatggacccgtcggactacgtcacgccggtggtgctggtcacgccctccgacggcgccgccatccagaggtacgcgacggcggcggcggcgcccagggcgagcgtgcggttcgccgggacggagctcggcgtcaagccggcgcccgccgtcgcctacttctcgtcgcgcgggccgagcccggtgagcccggccatcctcaagccggacgtggtggcgcccggcgtggacatcctcgcggcgtgggtgcccaacaaggaggtgatggagctcgacggcggggagacgaagctgtacaccaactacatgctcgtctccggcacgtccatggcgtcgccgcacgtcgccggcgtggcggcgctgctccggtcggcgcacccggactggagcccggccgccgtccggtcggccatgatgacgacggcctacgtgaaggacaacgccgacgacgccgacctcgtcagcatgcccggaggctcgccggggacgccgctggactacggcagcggccatgtcagccccaaccaggccaccgaccccggcctcgtctacgacatcaccgccgacgactacgtcgccttcctctgcggcgagctccgctacaccagccgccaggtcgccgccatcgccggacaccgcgccggctgccccgccggcgccggagcagcaagccaccgcgacctcaactatccgtcgttcatggtcatcctcaacaaaaccaactcggccacacggacgttcactaggacgctgaccaacgtcgccggctcgccggcgaagtacgccgtgtcggtgacggcgccggcggggatggcggtgaaggtgacgccggcgacgctgtccttcgccggcaagggcagcacgcaggggttcagtgtgacggtgcaggtcagccaggtgaagagatcaagagatggtgacaattacattggcaactatgggttcttgagctggaatgaggtcggaggccagcatgttgtcaggagccctatagtgtcagcatttgcccaatgagaagaacagatgttagcatagcaggatcaaaaataagagcatggaaatagaaaatgacactaaaacaaagtatactacatacaactaataatcatgatcaggaatataaagagtacatataatggaaagagagaaataattctcaccaggatactgatattgcacgtgtatttttgtactctctgcttctgaattctagttttgttactgttcttctcaacgtatc

SEQ ID NO: 7765 - DNA, 3525 bp, Oryza sativa
  ref <308>: DATABASE ACCESSION NUMBER: AK105113
  ref <309>: DATABASE ENTRY DATE: 2002-08-28
aagtctcctgctcacaatgatggtgcaggaactttgggtaatcagagaacaactggtgtttcaggtcttggagagggcactccaaagagtgagagatcggcggatatgttttgtgatgacatttttggagaatcacctgctggcatccggaaattgggcaaggatgatggtttgcgcatcgagaaaaatgctcttcatgacaactgggatgatgccgaggggtactatacttaccgttttggggaattgctggatgggcgctatgagattacagcagcacatggaaagggagtgttttcaacagttgtccgagcaaaagatcttaaagctgggaaggatgatcccgaagaggttgctattaagattattcgcaacaatgagacaatgtacaaggctggtaagcaagaggtttcaatattagaaaaactggcaagtgcggatcgtgaagacaggcgccactgcgtgcggtttatttctagtttcatcttttcatcgccctgaagcatctgaaaaactgcaaagtgctgcactgtgatataaagccagataatatgctggtgaatgaggctaagaatgtgctgaagctctgtgattttggcaatgcaatgcttgctggaatgaacgaggttacaccttatcttgtgagccgtttctatcgtgcacctgagataattcttgggttaccctacgaccacccattagacatgtggtcagttggctgctgtctatatgaactttacaccggaaaagtcctatttccaggtccatcaaataatgacatgcttcggcttcatatggaactgaagggccccttccccaagaaaatgcttcgaaagggtgcctttacgatgcaacattttgaccaagatctcaactttcatgccactgaggaggatcctgtgactaaaaaggctgtgacaaggatgattttgaacattaagccaaaggatattggttccttgatttcaaacttccctggcgaggatccaaaaatgctatccaactttaaagatcttcttgaaaaaatatttgtcttagatccagaaaagaggataaccatatcacaagcacttagccatccatttatcactggcaagtgaaaagatgttgattactcttggcattgctaacttagcataccttgtaaactacattttgggtcgctcttgtctaatcattggcatttctgtcttgtgtcctcggagctatgagatcagagtatgtgggcgaagctcggaaatatggaagagatggctgtcttacagaccttggtgcatgcagttatcatttggatatgttctgttgcttgaattctgccagggcctctgctgtgaaagtgcacattttgtatgctaaagggccaacataagaaggtaccctgattgatatctgggtaactaagtagtttgcacccatgagtgatacattctcttttgacgacatgattttttgatttaagttgtcaagatgagtcagcatgtgacactgaattgattttttaatatgaatgtgcatatgacctcttccatagtactaaaaaaaaaaaaaaaaaggccacagcatcgagtcggccttgttggctggtaaaaaggtccagggcttctgacattgaccctgttgttgcagacactctctcagaatctgagtccaaaagaatgaagtctgccaatgatgaggaagcgatagataaggatagcattattcagaaggcagatgatttagcagttagggttgaagaggagctgttcaaactatttggtggagttaataagaagtataaggagaaaggtagatctcttctatttaatctaaaagataaaagtaatcctgagttaagagagagggtattgtctggagatattacacctgatcgcctctgttcaatgactgcggaggaacttgcttccaaggagctatcggagtggcggttagctaaagctgaagaactagcacaaatggttgtccttcctagtaccgaggttgatgttagacgtttggttaggaaaacacacaaaggagaatttcaagttgaagtagaagaaacagatggtatctcagtggaggttgagcttggaggtaatcttcttactcaagttccatcaaaagcccctgaagatcagaccaaatcagacgataaagaaagtacagatgataaaacaggcatacaagacaatgacaaggcacctgatgggacttcacaagatgaagataatggggcaggcaagaacgatccacaagatgatttagaatatgttgataatgagaaaagtgaccttatgcaagaacttatggtggatgacttgaaagacactgaaaaccttccaccgatcccttcactagatgaattcatgcaaggtttagattctgaaccaccttttgaaaatctctcagctgggacgccagaagaagattcagatgatcgagacgaagctgacactactgcagaatctgcggaacttcctgaggaagaagttaaagtttctgcagcagagaagattgtatctgaagctgacctgccatcttcgcaggataaatctgagtccaagttagagtcacccaaagatgaggtgggttcaaatttgggccctgttgagcagcgtgaaggaaagctgataaaatcctccccagatagtgttgaagtcaaacaaacaactactgaaaatgtgctgaatcgtgactctactgtgcataatatggcaactactcttcctatgatacgtgaaagtatatgggagggtgcaattcaacttaccatgtcttcgctcacaaatgtcgttgccatcttcaaaagtggtgaaaagccaccagtaaaagaatggcggagctttgttgaaatcaaggggagagtcaaacttagtgcctttcaagagtttgttgaacagcttcccaaatctaggagccgtgctataatggtaactgagttgtgttggaaggaaggttctcatgagagtggtcgccaacatctcttgcaggtttttctatcgtagccctttttctttcagagaaagaccttccttcaggagctagcttaatgaatgtttgtggatttgatcattaaatttgcctattcttctgcagacaattgactcgtatatttcagatgaaagagtagggttagctgaacctgcagatggaatagagctgtacctgtgcccttctcaagggaaaactgtggagattctctctcggcacctgccaaaggagcatttggagagtcttgctgtgtcagcatcctccatcatcggggtcatcgtctggcggaggcccaacgttcccaggatgccggcacaccctaggcatgatggttcccggaggccgtcgattttaaagaaaccgcaggttactggttctactccaggccctaggccctccctgcctatgagctcgcacggcgcgccgccgggttttccagttcagcgtcaccgccacgaggaagatgtaactgatgatgtccctccggactttggccctggtgttgctagggatgaagacgatcttcctgaatttaattttgttaactcgtcc

SEQ ID NO: 7766 - DNA, 2058 bp, Oryza sativa
  ref <308>: DATABASE ACCESSION NUMBER: AK105114
  ref <309>: DATABASE ENTRY DATE: 2002-08-28
atcatttccccaatctccacctcacctgagccgtcgccggagctccggcgaacccacggcggcgggcgggcgggcccgagcttcgcagatgagtggcgtgaggagggcagcggggcggcccaagatcggcgacctcgcgaccagcgacgtggtggtgcggctgcggacgccggagggccgcgacgagtggctctactgccactccggcgtgctcgccgccgggagcaggtacttcgccgaccgcctctccgacgactggcccacgtgccagatcctcggctcccgctactgcgtcgaggtccactgccaggagctggacctcagcccccacgtcaccgcgctccgcctcctctacgccgccgagccgtgctcccgcttcggcgtccgcggcgcgctcggcgtcctccaggccgccgcccacctcgcctgcccgcgcgtcgccgccgcctgcgtcgactacctggagtccgcgccgtgggacgaggccgacgaggaggagatcctcaggaccatcccttgcctcggcccccagtacgagtgcgtcctcgcgcggctccgcccgatcgatcccgcgccggtggccggcatcctcctctcggcgttccggcacgcgacgtcgacgcgctcgccgccgcaggagctcaagtccgcggctcaggagcagctggagtacatgctcaccgaagacgacgacgcgccattgttagccttcgatgatgacattgtcaggtctcaagtgaaggattgtgttgcagctttgctgagcaggttcagtgggttcacgagttcaatcctgatggaacagggagaggcgcctttaggccacggcgacgccgaggttcagcaggagctgcattctcttgtttcagatatctcctgggtctgtcagatcttgagcaagctggagatgatgaaatgtgttgttgtttactggattggggtttcatccgatgtcgttgaagctgtcgacaaagcttgtgggggaatcagctgcctgaagactagattgaaggtgattgaggtgtctgcaaaggtcctggaggcgattgcatttggcaacattgttctcccaaccgagaaacgttgtgatgctgtcaatgtttggattggctttgcaaggagaacaaagcctttggtcggacatcccgaacacgatgacgatgacggtgatgctgaagcacctaagatcaacctagacagtgaggtctggcagagcctggaatcagctattgtttcaattgtgctaacgctaccgtcgaacagtcaagctgacattttgtcagattggcttcagtcgaagcatgctaagtatccagacttgacggaggcgtttgaagtgtggtgttatagatcaaaggctgctaagagaagactctccttcttgagccatgccaatagggtatcttgattcttcacttgtccttcaaaatcaaacacaggggaaatgtcctggctgtttgtactcactacaggcagcacagagtgcctttgaccgacatcaaatatcatgaaattccaatttgtccttccttttatcactgttgtcatcggagttgcttgagtatatcactgttgtctaaaatgatagataaacaagatgccataacagtttggttgacaaaaaaacagtgagaatatatgttccaaattccaacaagcatatttccacatggatagcagcttctggaaggatatctgggtaggaaaagtacctttaaatcttgtgttggcaaatattttctcaacatgtgagggtcctgatttaaggtggctgaatgctgggacgatggctcttggagcataacttagaacctttggacaaatagttcatgtatgcttgcactcacagaagcggctaatgtttgcatgatctagctttgcaagtcttgaattatctacttacaagttacttggaaggttctaagttgtacaatcagccggccacatatatcttcctttgctacatggttctttaataacctgttcatccgctcaggatttcagcagcttattgaagtcttcttgaaggaaccgaagactgtccaaaaagaaagaaag

SEQ ID NO: 7767 - DNA, 861 bp, Oryza sativa
  ref <308>: DATABASE ACCESSION NUMBER: AK105115
  ref <309>: DATABASE ENTRY DATE: 2002-08-28
agatggatcgttcggggcgggggcgagacgatggaggcggccgggaccaagcgcatgcgcaccgccgccgccgccgccgccgccgccatgagcaacggaggagaaggagaaagagagggagaggaagagatggcgagccaggggagcgcgggagggggagcggcggcttcctccggggtcgccgtcaccatcaccaccgcgcccatgacggagacggaggacgacatggccgtcgccgaggaggaggaggtggcggcggcgtcggcggagacggaggagcacgtgcagcgcatcctcctcgccatcgacgccttcactcgccaggtgtcggagatgctggaggcggggcgcgcgctgttcaagaacctcgccgccgacttcgaggaccgcctctgctcgatccacaaggagagggtggagaggtgggaggaggagatccgggagctgcgcgcccgcgacgccgccaacgagcaggcacgctccctcctccacaacgcccagctccacctcctcgccaccgtccgccacgaccacacctgacctgcttgctccctccagctccacccaagtcaatagcagcagcagtctcatctcagttagtagtgtagtaaccaattgcacattccatcgtttacagcaagcagcagcagctgcaccacttgtgagttggtcagcgactgaaatttactactactagcactatgaatgtatgtatgaaccaatatgcatcaccattctaaaacagacagacagatgctaattcactcgatcagcatatgtgtatgcatcaaaaccggtttcacaaaccctatctacatcaatattagatggtgctatgtatgctagcacaaatttgacctg

SEQ ID NO: 7768 - DNA, 3510 bp, Oryza sativa
  ref <308>: DATABASE ACCESSION NUMBER: AK105116
  ref <309>: DATABASE ENTRY DATE: 2002-08-28
gaaaaaaaatcccccacaaaaaaaagaaaaaaaaacccaaaccccctcgcgcggaggccgagagagatcccccgctccgctccgatccccaggcgtgcgcgcgtgcggggctcgccgcgcgtcgcatggtggcggcgcggccgccggagcacacgcctcggcctcgataccccccaccacagccatggcggcggcggcggacgcgcggcgcttcgcggtcgtgccgcagctagatattgcgcagatactgaaggaggctcaacaacgatggttgcgtcctgctgaaatttgcgaaatacttaaaaactacaaaagtttccgtattgcaccagaaccaccaaacaggcctcaaagtggctcgcttttcctatttgatcggaaagtattgagatactttaggaaggacggccataattggaggaagaaaaaggatggaaagactgtcaaagaagcacatgaaaggctgaaatctggaagtattgatgtgcttcactgctactatgcacatggagaagagaatgagaacttccaaaggaggacttactggatgttggaagaggattttatgcacattgttcttgtacattatcttgagaccaagggtgggaaatctcgtactaggggcaacaatgacatgcatcaagcagctgttatggatagtccattaagtcaattaccttcacaaactatagatggtgaaagctcacttagtggacagttctctgaatatgaagaggcagaatcagatgtttattcaggaggaaccggataccactctttcactcagatgcagcagcagcaaaatggaattggacctgtgactgatgcttctatgttcagttctcgtgtttctgcttcatccataggtaattatcagggacaacatgctatgggacatacaacaaacttctattctagtagtcaacatgattcacctcttgttctcagtgatccaaaccttgaacttgcaaataatggacatgagtcattgtggaatggggttatgaaacctgatgaagggactgttcaaatgactcatctacaacctcctgttcatcctgagcaaggcatgttcaccacagaaggccaaggggttgaatatttgacattcgatgaagtatattctgatggactcagtctgaaggatataggtgctgcaggtgctgatgtagaaccattctggcagctctctagtgctactgctgatatatctgcaacagagaacagcgtccaacaaaatgatggatctctaggggcagctattggcttcccatttttgaaaactcagtcatccaatctatctgacatcctgaaagacagctttaagaaatctgacagttttacaagatggatgagcaaagagcttcttgatgttgaggattcgcaaattcagtctagctcaggggcatactggaacactgaagaggcagatagtatcatcgaagcatcaagccgtgagccactggatcagttcaccgtggcccctatggttttgcaagaccagctattcagtatagttgatttttcgccaagctggacatatgcaggctcgaagaccaaggttttagttactggtagattcttacatgctaatgaagtcacggagagatgcaagtggtcatgcatgtttggagaagttgaaattcaagcggagatttcagcagatgggactcttcgatgttattctcccccgcataaaccaggcagagtccctttctatgtcacctgttccaacaggttagcctgtagtgaagtacgtgagtttgaatttcgaccaagtgactctcaatacatggatgctcctagcccgcttggtgcaaccaacaaagtttatttccagatacgtcttgacaacctattgtccctggggccagatgtgtaccaagctactataactaaccccagtaaggagatgatcggcttgagcaagaagattagttcactgttggcaaacaatgatgagtggtccaagttacttaaattggctgatgataatgagcctcttagccatgatcagcaggatcagtatgctgaaaacttaattaaggaaaaattgcatgtctggcttctccataaagtaggcgatggtggcaaaggacccagtgtgttagatgatgaggggctgggtgttcttcatcttgcagctgcccttggttatgattgggccataaggccaactgttactgctggtgtgaacataaatttcagagattttcatggatggactgcattacattgggctgcattttgtggcagagaacggactgtagtagcacttattgcactgggagcagctcctggagctttgacagatccacatcctaattaccctgctgaaagcacaccagcagaccttgcatctgctaacggacataagggcatctctggtttcctggcagagtcctctctgacaagtcatcttcaagccctcaatctgaaggaagccaatatgtctgaaatatctggtctacctggtattggagatgtaactgagagaaatgcatctcagcctgcaattggagattccttaggtgctgttcgaaatgccgctcaagctgctgctcgaatatatcaagttttcagggtgcaatccttccagaggaaacaagcggtccaatatgagggtgacaaaggtggcatatcggacgaacacgcactttcactcctgtctatgaagccatccaagtcaggccagcttgatcccctgcatgctgcagcatctcgtatacaaaataaatataggggatggaaggggagaaaggaatttcttctcttcagacaacgaatagtgaagatccaggctcatgtgcgaggccaccaggtgaggaagcattatcggaaaatagtttggtctgttgggatagtggagaaagttatattgcgctggaggcgaagaagggctgggttacgtggttttaggcctacagaaggtgcaatagagagcagcagtggtggcacaagtagcaatttggtcaaagataaacctgctggagatgattatgatttcttgcaagaaggacggaagcaaactgaagaaaggctgcagaaagctcttgccagagtgaagtccatggttcaatacccagaagcaagggatcagtaccaaaggattttgaatgttgtttcgaaaatgcaagagtctcagaccgtgcaagaaaagattttagacgaatcaaccgagatggatgaaggtgatttcatgagtgaattcaaggagctgtgggatgatgatacaccactccctggttatttctagtgttctagactaactggtggtgtctctgtaaatctcttctcttcagttctgctgaattgacacctgccgataacccaaactctcaacatagcatgaatagcatgatcttaaaatcttgaatgcttggatttggattcagttgtggtattcttgcttttatgttatagcgttatgtacagtagaatcttattttatcattgaaggagccatgtatatgcagtatgaaactaatgcagaaagttggtggttgtatc

SEQ ID NO: 7769 - DNA, 1954 bp, Oryza sativa
  ref <308>: DATABASE ACCESSION NUMBER: AK105117
  ref <309>: DATABASE ENTRY DATE: 2002-08-28
aaaaaaaaactcctttccttccattctcgtcgtcgtcttcactcccaatctcctcctccgcctccgccgctgccgcgtcagccgcgccccgccgccgtggctccttccgtgcgcggtgccaagttaagtcgccgcctgcttctgcctggccttcccttccccgccccgagcggattccggcgccgctgctgtcgcttcccgaagaagacgcgtaagccctagttggtgctagtttgctgctgcttgcgagaaggagagagtggagtgagtcagtaagatatctgaggtggagggggaaacgaggattttatttatttttatttttggttcgctcgtgatctgcgtgctcgtttcttggagctgagttgcatcgtcggatggagcgaaagctacctgctggcccatactgacctgagataggaggcttcttgtgaggcaaccacagaggtgtttggcttggtcaaagaagagctcatctcccttgtttttgtctttcttcatgggggtgcttgatgacttgctgtgaggcctgagccgtcctgtttgttgttcttggatagaatataacagtattccagaagcagtgtttttggtgctaatattggaagagaaacagtattttggggcttggctatgtcagtttcagagaaggtggtaccaccatcttctgtgtcttcgtcggatttggatccgctgttgaaggatcttacagagaagaagttaagctttaggagaaacgtggtgtctttggcggctgagctcaaggatgtgaggaacaaacttgcttcacaggagcagttgtttgttcgggaatcccaaaccagaaagtttgctgagacaaaggcgaggagcatggaggaagaaatcagtaagctgcagaaatgcttgaatgataaagatgagcaactgcgttcgtcgacaggttgcacagaacagtacttccacgagttggacgatcttagatcgaaactgtcagtcacccaagctacagcagaagcaagtgctgcatcagccaaatcagctcagtcacaatgcttgtcattattaaaagagctgaatgagaaggacagctcgctaaaagaacacgagcgtcgagtcaacaagctaggtgagcagctggatcatctccagaaggatcttgaatcaagggaatactcacagaggcaactcaaagatgaagttttgaggatcgaaacagatatcatggatgcagttgccaaagttgggtctaacaaagataatgagcttctaaagatcttatctgatgtatcaccaaggaacattgataatctcaataaacttctgaacgctaaggatgcagagattgccagattgagagatgaaattaggatattatctgctcactggacgaacaaaacaaaggaactagagtcacagttggagaaacaaaagagaaccgaccaggaactgaaaaagagaattctaaagcttgaattctgccttcaggaatcacggtcccagataagaaaacttcagagagctggtgagaaaagagacaagcaactgaaggagctgaaggatcaggtgggcatgaagcaacccagtgtcccataccgtgatgacaagcacaacttctgggagaaccagagcttcaagttcatcgcctccatgtcaatgctcgcactagtgatgctcacaaagcgatgaaacagcatcctgtgtaaagaatgctacttagtagtatattccagtgttaggtgagcaccttgctcatagtctatagttcaggaagccagagatgtagtcaagtaggtcattgctgcatgatcagtcgtcagatgatgccccaactgaatttgccgacatccaagattagtctgtagtattgtagtactgtagtgcagttgctgctagcttatgtaagctcataattaagcaatattgtagttacagatctaccttaatttatgtctggccgcgttgcggttatgtt

SEQ ID NO: 7770 - DNA, 1843 bp, Oryza sativa
  ref <308>: DATABASE ACCESSION NUMBER: AK105118
  ref <309>: DATABASE ENTRY DATE: 2002-08-28
gggagatttggagacacttgttttcatttcgctaaaaaaaaaataaaacaaaagaaaaaaaaaacaccacacgagcaaaatctccttggcccgccgccgccgcctccgccgtcgcgcggcgatctccaccaccgcgacgcgagcggcggtgcccggcggcgtccagctgctcccgccgccgcgtaccctcgcctctggctcctcctcgccgcgcccaagccaatctctccccacccgccacctcggcctctcgactcgcgagcgagttcgccgatctccatccatcacccctcgagccagcggcgccggccgacggcgtgcttccggtcctcccctgccaaagtgttggtgttgatttgaagcctcaaggattcgagcgaaatgacttcttccatgagcaaatccgacaagaagaaggtgctagattttgcggcatggagtttcaacatcaccacatccgttggaatcatcatggtcaacaaggctctgatggctacacatggattcagtttcgccacaacattaactggtcttcattttgtgacaaccaccttgatgactatcgtgtttcggtggttaggcctcagccagccctcccacttaccaataccagatctgattaagtttgtgatcttttcgaacttgtcaattgttggaatgaatgtgagcttgatgtggaactctgtgggattttatcagatagcaaagctgtgcatgatacctgcatcatgtctcctggaggttgtcttcgatcgtgtacattactcccgggacacaaagctgagcataatggttgtgcttataggtgttgcagtctgcacagttactgatgtcagtgtaaatgcaaaaggtctggctgctgctgttatagctgtttggagcacagctttacaacaatattatgttcattttctccaaaggaagtactctctgaactcattcaacctcctgggccacactgctccagcccaagcgggatctcttctgctagttgggccctttgtagatttcttgttgacaggcaaaagagtggatcactttggtttcacatcgattgctttgtttttcctgactctctcatgtgtcattgccattggtgttaatctgagccaatttatctgcattggtcggttttctgccgtatccttccaagtcctgggccacatgaagacagtgctcgtcttgtcccttgggtttctcttctttggcaaggaaggtctgaattttcaggtagtccttgggatgatccttgctgttgttgggatgatatggtatggcagtgagaaataagaagataactttgaaaggcaatttcatctttggctgcggagcaggttaccttttacagtggattcaatgctggtataattggttgagcctgatgtgatgatcaaatggaaattgatccgtatgtacctccaagatgacaacagagttgaacaacaagaagaatctgatcaaatgaggttgttgtcattggtggaagaaaaatgatcccaaagattcaagaactaattatcaaggattactttgatgggagctgaatacagaattgaggcctgacgaagctgttgcttgtggaactgctctagccatcctacatcacatggatatctttgtattgtatgggagtagacaataattatcagatagggtgttttacatatttgtattatgcttactgaatgtgatgttcagttgcagtgttgtagtttggaactttggatgaaccctattcggcgtatatatgcgttcctctcgctgggattcagttaattgcactgcttaacttcttgtataaagtattgattgaagttattggtatatatactgtatattaacg

SEQ ID NO: 7771 - DNA, 1251 bp, Oryza sativa
  ref <308>: DATABASE ACCESSION NUMBER: AK105119
  ref <309>: DATABASE ENTRY DATE: 2002-08-28
acccaccccttcccttcttccatcctccgcctcgcctcgcctcgccgcgccagaatcctctccgatgagccggagccggagatgaggtgcaagctccacccctacgccaacgccgtcggcgtctgcgccccctgcctccgcgaccgcctcctcgacctcgccgcccagcgcgacgccgccgccgacgccgccgaagccgacgaccaccaccacagcagcagcagcagggcctcctcatccctcttcgcgcgctccgtctccccctacgccgcggcgcgccgctccgacgcctgcgcctacgcgtcatcctcctcctcctcggccgccgccgcccaccaccaccaccaccaccccaacctcctcttcttccgcacgccgcaggtcggccccgcccgcgcggcgggtggcggcgatgagcccgagccgcgcggcaagaaggtcgcgcgccgcaggtccttcctcgccgcgatcttcggcggcggcggcagggggcgacacgcccggggcgacgacgacgtcgtccgcggcggtggcgtgagcgcggaggatcctccccgacggtccacctcctggctctcctcgatagtccgacgcaagcggcggccggaggccgcggcgacggcggcggagtcgctgccgccgccgctggacgaggcgcccgactcccccggaggcagtaccaccagtagctggtggttcccttccccctcgccggcgaggcagcaccgccgcaggcacaccggcgtgggcgccagcggggacgggatctcggggttcgccgtgtgcctcagcccgctcgtccggcccacctccggcggcggcggcggacgccggcgatgccagccgccggatccgtcccccctgggcgacacccaccggcgcaacctgtcggccggcggcgccgcctcgttcggccgcaacacctcccggaagctcgccgacatgggtaggttccgatgacgccatcttcgctcgctcgcgcgctttttttttccctccttttctttttcatttttttttcgggggcaattttatctttgatttttttttcctacaaaatttgaccaaacatttcggtactctcgaggaggagatgtgacgatatgaatggtagtgtttgccgctacgtgttgacgagaggcgaagagaaatggaaaaaagaaattcagtggaaatttgggtttgtttatggttaggcagtagcagcaatgtagcatactatacaaatattgatattgggaagaatccttc

SEQ ID NO: 7772 - DNA, 1040 bp, Oryza sativa
  ref <308>: DATABASE ACCESSION NUMBER: AK105120
  ref <309>: DATABASE ENTRY DATE: 2002-08-28
aactctctccatcgatctgcttccccgcccgcgtccttctctcgatcgatcgagcgaaacgccgcgcgactccgcgactccctctcacgcctctaaaacagcaaccgcacgcacgcacggacgaacggtggtggagactgaaggagatcgagaggccgatccgaccgatggccggcgacgagtggcgctgccggaagcacccggcgccgccctgcggcggcgtgtgcccgtactgcctccgcgaccgcctgctccggctctgccccgagtgcgcgcacgcgcggccctgcccctgcgccgcgtcgtcctcgtccccgtcctcctcgtcctcctccgcggcctccggcagcgccgcggtggtcgggagggtgtacagcctcatcgagcgggagcggcggatgggactgcggtcccgatccgtcgccgcgggcggcggcggcggcggccgcggcatcgtcgtcagggacgagaggcccaagtcgagggcgtttgggtgggtgtcgttccggaaggcgacgtcggacagggtcgtggaggtggacgacggggcggcattggcgcggtcgagctcggtgtcggcgacggccgtggagacgagggcgcctcccaagtcgagagggtgggggcggttcatcccgggctcgatcaaggcgctgcgccaccgcaagtcccgcgccgccggcgattgccgcgagggtgtcaggtgagatcgcccgatcggcgcgtgaatgcgtgatcattccgggcgattttcgcagcagcgtggaggatctaatcatcatcatcattcggttggtgctttctgtgcgcttacgatgccgttaattaatttgctgattaaatctgtttgtccccccccccccctgtaatctgaggatccgagctgattttggtgtcacaagaaaagagggtgtaaatatttgatgtgagttcattagcgttcacaatgggtgattgggtgttctaataaacaggctgttttgatcttttgtaatccgatgacgcgttggtgttcttggcaatgtccctcaatttctgct

SEQ ID NO: 7773 - DNA, 1099 bp, Oryza sativa
  ref <308>: DATABASE ACCESSION NUMBER: AK105121
  ref <309>: DATABASE ENTRY DATE: 2002-08-28
actcaccctgccatggacgggtagaaaggtacagtggcggcgccgacacgcggtggaggaggaggcggcggcggcggcggcgatggggctgctgtcgaacagggtggagcggtcggagatcaggccgggggatcacatctacacatggagggcggtgtacgcctactcccaccacggcatttatgttggaggaagtaaagtggttcattttactcgaaagaaagaagcagaaggatcagattcatccaattccacctccagcctattattagagccttcatcagagtgcccaacgttcccagattgtgggtttcagctgcctgatagtggtgtcgtcctcacctgcttggattgcttccttcggaatggctctctatactgcttcgagtacggagtgccatcagccgttttccttgcaaagctgcgtgggggaacctgcaccattgcccaatcagatccatcagaagttgtggtacacagagccatgtacttacttcaaaatggctttggaaattatgacatatttgagaacaattgcgaggactttgcactctactgcaaaactgggcttcttcctgttgaggaacctggcattggaacaagtgggcaagcatcttccgccattggagtgccattggcagctcttctgtccactccacttaagctttttgctgctggtccacttggaatggccactgtcacagctgggatgtactgtgctggtagatacatcactgacataggagtaagaaaggatgtggcgaaaattgaagtggagaatttatcatcacaccttggtagacgcctgattgaagatgaaggatcagtgaacgtacggtcagagaaaccgaaaaccttgctgcctatgaagagaaagcgtgagaggtgatggcgactatataccgctcttcgtcgataattggttcagaactgtgcataatttaaactttactcttcgccataataagtttgatatagatatgtacctctgaagcgtgttctgattcagttaagaccacacttcacatgatcaattgagctacattccaaactgaatatgtgatggaaatgtgataattgaatcgttggagtcaaaagt

SEQ ID NO: 7774 - DNA, 796 bp, Oryza sativa
  ref <308>: DATABASE ACCESSION NUMBER: AK105122
  ref <309>: DATABASE ENTRY DATE: 2002-08-28
tcttcccgatagagatgaggcttgccgcccgtttcagatgtcatatcccgtgctagtgtatacgtgcttacgtgctagttagtgctaataattactcaccatgcgtctgcctttcatgtgttttgcaggaggactgggtgctatgcagggtgtttcagaagaggaagggcgacggcgacggcccgcaggacagcggcggcgccgcctctcccaccttcaccggctcgatgtcgacgacgacgttgtcacagctacagccgccggaccaccgccgccatgcagccgcagcggcgggcggctactacgtcggttcccagcagctggctgctggctacgactccgccgccggcttcgcgaaccccacgcagccggcggtgccacattaccaatacggcggcgcggttatcgggttcccggaggagttcggcggcggcggcggggtagcagacgagtacgggtttgggacatacttggacttgggcttcgagctcgacgacacggcgagtgttcttggaggcatcaggtcgttcccgcagggttggaattgatcgatcccggcactaaacaaatttattttgcgtacgtacgtacgtacgtatacgcgtcatatacagggtccgatcgttgaattaattaattccattaattgtttatacagagtttgtataggtttacgtcgtcttagagtatctgtccgggtttcgaaagattgtgtgagcttgagatatgatctcaattgatggatcatcgcgtatgtgtaaggcgaaaaatcaaatgtaatataaagaattcaagt

SEQ ID NO: 7775 - DNA, 572 bp, Oryza sativa
  ref <308>: DATABASE ACCESSION NUMBER: AK105123
  ref <309>: DATABASE ENTRY DATE: 2002-08-28
gaacaaaaaaaaaaacaacacaaaacaaaaactcccgtctcgtctccgctccttgcgcctgcgccgatctccgtctcgcgagcagaatccagagcaaggggaagccgccgtcgtccgtcctgctgcatcctggtttttgagtcaagcacatgtccaaggcacggaacgttttagttgccactggtttgttggcctttgctggtgctggcttagcatttccattctattttgtgaaatcaaagaacaaacccatcattgattcatcaaagcctctacctccacaggctacatttcgaggaccatatgtgaatactggatcgcgggacattggacctgattataccgactaccccaagaagtgatctatctatccaaaaatcagagggactcttcttggacagatgatattgttagattattgggacctataactttgaagttgtactgacattgttatgtgtactgtagtcaaggattgggcttccagacttttgaatgttcatgcacccacccaagcagcgcaaaaccagcagtgaataattatttccagttgggactgtcttgtcctgtgc

SEQ ID NO: 7776 - DNA, 688 bp, Oryza sativa
  ref <308>: DATABASE ACCESSION NUMBER: AK105124
  ref <309>: DATABASE ENTRY DATE: 2002-08-28
aaaggcctcttcttctagtcgtctccctccctgctcctccttccattgcctccggcctctccaatggcgaacccggcggccgcacccacgaatgactagccctgtcattgcctagtctcggccaatgtaggtgtaagagggtgcggccgccgccgccgccgccaccaaaggcagacaggatggagccaggcgttacttgtagttgtactactgtctactaccaacgatgagaggatgcgaagggagatcgagaagaaggctacgtgcgtgtgtgcgttcgtaccgtatatacaaggcgtataggtacggccggaggcggcggagtattgtacggatctaaaaggttctttgcttgccaccgctctccgggtcattggtgatgttttcagttaattttccttttcagtagtttatatattgttgggtggaggatatctttgagcaaagtcctctgaattttgaaccattttgctagtattatttttgttccttcttcgagttttggttttacggagagatttttatgcccctgactcttctcgtgtaagtttgcgagcagcgcttgactgctgttgtggctcgagtagttttaagtctatatattgggttctccatgctaagcttgaactgcatcaaaaggtttatgcaattatgctaaacttctagcatatgctaattaattctttcc

SEQ ID NO: 7777 - DNA, 748 bp, Oryza sativa
  ref <308>: DATABASE ACCESSION NUMBER: AK105125
  ref <309>: DATABASE ENTRY DATE: 2002-08-28
gatgggagcaattggaggactggaatgaaagtcaggctggctaagcgaaccgtaggatcaggaaagcataaccagtcttcaaaagaaaatcaggccatccagggccagccttcaaaagtagagcagcagatggtatcagaaaagaatggtggtactgattcagtggagagtgctttcgacaatgagaatgtgaactctaatatttcccatgaggacatgcaccaacaccaaaaagtaaatgctaaaggaggacgaaaaggtcgatataaatctcaaggaagaggtcagattcagcaaaatacaagtgggcaaggccatgtctcatcccctgccacttctggttctgatcatgtgaacaagcctattcctggaccgagaatgccggatgggacaaggggctttacaatggggcgtggtaaatctcctacattccagaaaggggataatgctgaagaatagtgcttttgtcccaaaaagcctggtaacaatctaaccgcgtgaaaaacataattctgctgttatgctataagctgtcttgcttcgtgtaagaacgtagggacatgtcactgatatagaaaaggctcttattttttatgtagtgtcttttctgaattaactggtgctttagtaggtctggtaaaaatttaacctcatgaaaaacatagtactgctgttatgctataagctgtcttgcttcgtgtaagaacgtagggacatgtcactgatatagaaaaggctcttatttttt

SEQ ID NO: 7778 - DNA, 753 bp, Oryza sativa
  ref <308>: DATABASE ACCESSION NUMBER: AK105126
  ref <309>: DATABASE ENTRY DATE: 2002-08-28
gatgcacatgctgacatctgttgcttctagacatgctccaagaatcagtttcttttttcgcctttccataaacacatccacatcgctcactctgatcctttgtcatcaggcaacgctttgcagcagcagcaaatggaccgaggggtggagctgatggggtgcgtctgccggatcaagaactgcgccgtcgagctcctggagatggaggaggatctggtgattggcatggacgacgacgacagggacctgttctggagtgagctccagctgaagaccaccttcctttacattgatctgagccgggtgatctcctccagcgagagcgatgagcgcagggaggcgctcaccctgctcaccaacaagctcttctacttcttggaggagctgaccgacgcggtgacgagcggaagcgtctccttcacgaagctgtgctacggcgacgccgctcaggctctccgtgaggtggtcgccttcctcgcgccgccgcagtagctataccctggtgggctcatgatcccagcacttcactgcactgcactgcaaatctgatatgctctgaattctgaaggcagtagggagagtcagaggcactagcaaggcaaggaacttctagaagtgtctctagaaactcttggagaaggatgagtctatggctcctgtgtaagaagcatgtgagaagaactgaagctagatcacccgtgtacatgcatgatgagatcatgagagcattgcctctcgagtttgaagcaaagc

SEQ ID NO: 7779 - DNA, 499 bp, Oryza sativa
  ref <308>: DATABASE ACCESSION NUMBER: AK105127
  ref <309>: DATABASE ENTRY DATE: 2002-08-28
agacgaaacgcgcgacgataagcgaaagatggcggcgaaccagagcatcaaggagctgatggcggccgagaccaaggcctccaagatcatcagcgaggcgcgccaggagcgcggcgagcgactgaagcaggccaagatcgaggccgaggccgagatcaacgcgtaccgcaagcagcaggagcaccagttccagatgagcgccaacacagatcttatgggcgacgacccgtcgattctggacgaggacacggcccgcgagatccagaagatgcgtggcgagttcgagatgaacaaggccggggtgattcagatgatggttgagcatgtcggtcgcgtgcagctcaaggtgccggacgcgcgcaaggcataaactctgcggggcttcccacatcagcggtttgtgccaaaagcgctacgctcctggttgcctgtggggatcgctcataacaaaggccgcgtcgaagcgcgacagaatacatgtgatcattttctaaaccgt

SEQ ID NO: 7780 - DNA, 866 bp, Oryza sativa
  ref <308>: DATABASE ACCESSION NUMBER: AK105128
  ref <309>: DATABASE ENTRY DATE: 2002-08-28
agatacttgtatatgaatatatgcctaatagaagccttgataccattctttttgatgcgcagaaaatcaaagagctcaattggggacagaggttcaagatcataaatggaatagctagagggttgcaatatcttcatgaagattctcaactgaagatagttcatcgtgacctcaaagcaagcaatgttctgttggattctgcttataatcctaagatttctgattttgggttagctaagatattcgaaagggatcaatcaaaagttatcacccatcgtatagctggtacttaagtatgcaatgcgtggacaatattcaatcaagtcagacgtgtttagctttggtgtcctggttttagagatcatcacagggagaagaaactttggctcctatggttctgatcaacaagattatgatctcataaatgctacatgggagcactggactagcgataaagccctcgagttgatcgatccatcattgggaaatcactatccagttgacaaggtgctcaagtgcatccaaattgggctgctctgtgttcagccgaaacctgctgataggccattgatgtctgctgttaatgtcatgcttactggtacaatccgtctcccttccttgtccagacctgccttttggtttcaggagattggtgctagctcagatgtaaattcagagcagaacctgcttgacccacacaactcaacgaaaatgtatcaaagtgaagcaccgatcacagagcttgagcctagataaatcttgtaagatgagttgaaagaatatccgcttcttctttcatacagttaccgatatttgtacaacggactcttattaatctggctatctaggtgttgtgttttcggctc

SEQ ID NO: 7781 - DNA, 750 bp, Oryza sativa
  ref <308>: DATABASE ACCESSION NUMBER: AK105129
  ref <309>: DATABASE ENTRY DATE: 2002-08-28
tgatgttgaaacaaatgggaaaaaatataccctacagggccataactcagaagtgcaatcagtgtgctgggacagcagtgggcaataccttgcttctgtcagtcaggacctagttaaggtctggtcaatctcatcaggagactgtactcatgaggttagctctaatggaaacaagtttcattcttgtgtgttccacccgggctacaccgatctccttgttattggaggctaccagtctctggagctatggaacatggtaaagaaccagagcatgacagtgcaggctcatgaaggtctaatcgcggcgttggcgcaatcaccaattacagggatggtggcttccgcgagccacgacaactctgtcaagctgtggaagtaacaatggctgcacttcggtaacatagtttcttatagttagttgaaagtttcttcagccgaggcatagaatgggtcacagccgaaagatgctgttgttgttgtactgtatcgggaggcaataaaaggatgtcgaatttgaaccgttcagtgctcattgcagcgagattgtgggagttgcatttattatttatttatttatattaataggtgttggtgtcgcccaaaatgatcaaagaagaggaaaaggaacgaaggccatagtaggggctctgttttattttatttatttatgttatatgaaatgtaaatggtaacgtggtattcacaatatgtatggcgattgatgataacaccagagcctcgttgttctat

SEQ ID NO: 7782 - DNA, 696 bp, Oryza sativa
  ref <308>: DATABASE ACCESSION NUMBER: AK105130
  ref <309>: DATABASE ENTRY DATE: 2002-08-28
aatctgtgtagctcgtcgtcactgcccatagtactctggcttagctagctagcttcttcttcttcctctagcttggattggattggattggtggctggccggcgatgaggacggcggcggcgaaggcgcggtgctcggtgcctttcatcctggcggcgctggccgccctctcctgcgtcttcctcgtccacgcggcggcggcggcggcggcggcggcggtgaccacaaccaccaccagcgtcgtcggctaccggagggcgctgcttcccagggaggcggcggcggtggtgatgccgacgacgtcgacggcggaggacgcggcggtggtggggatggccggagtagagggagagctgccggtcgtcgccgacgaggcggcggcggcggcggcgaggcggatggacatgcagacgacgcaggactacccgagctccggcgccaacagccgccacgatccgaggaacccgcattgagattcgtgcagggaagctatctatctaccgttgattcatggggtggagatgcatacgcctacttgtacaatactacacatgcagcaaacgcgtgtgttgagtttatcacacaattaattaattttgcacacagtattagtagtaccgcatgtataactagtagtattacatgtaacactcgtatacatatcaaattaaacattatcttaatgtgatcctgctc

SEQ ID NO: 7783 - DNA, 894 bp, Oryza sativa
  ref <308>: DATABASE ACCESSION NUMBER: AK105131
  ref <309>: DATABASE ENTRY DATE: 2002-08-28
ttgctcctctccgaccatcccgaggtggctgccgcaatccgggacgaggtcttccgcgtcgccggaggcagggaccccacggccgcctccttcgatttcgacaagctcaaggacatgcactacgtgcacgcggcgctgtacgagagcatgcggctgttcccgccggtgcagttcgactccaagttcgccgccggcgacgacacgctcccggacggcacgttcgtggcaaagggcacacgtgtgacctaccacgcgtacgccatgggccggatggagtccctctggggccccgactgcgccgtgttcagaccggagcggtggctcagcggcggccggttcgtgccggagagcccgtacaggtacccggtcttccagggcggggtgcgcgtctgcgtaggcaaggatctcgccatcatggagatgaaggccgtcatcgtcgccgtcgtccttagcttcgacgtggaggcggtcgaccggagctcgcgccggcccaagttcgcgcctggcctcaccgccacgttcgccgggggcgtgccggtcagagtgcgccggcgagcgcactgcgcgccaagttagctcaatcaaatacgtcgcgtcgccacgcgcgatcgatgcccttattcattttaattttttttcctcttctttttttgaaacgggaaacattagtctatgtcagcattgcacatggaaagctgcactgatctactgtgtcacttgagtcaacagtcaccactcaatttggcaagtgcgctgggttcttatcctccactcaagatttctctgtagaccataattaaagatttttccgattacacagaagatgtacaagaacacaaatagtagtcactacagtctaaacatacatacactacatgagtacgtctctttcat

SEQ ID NO: 7784 - DNA, 768 bp, Oryza sativa
  ref <308>: DATABASE ACCESSION NUMBER: AK105132
  ref <309>: DATABASE ENTRY DATE: 2002-08-28
ttgttcggtgctgtcgactggaattcttcagtctttgatggactcagctcttaccagaagattatcaatgcattgttcatggcagtgaacgcaaggcactcgggggagaactccatcgactgctcactcatcgcccctgctgttctagtactgttcatcatcttaatgtacttaccaccatcgacaacatttgcactgtccaatggagatgaaaaaactgcaaataagaaagcgaaaagaaaattaggtttagtggtgcagaacttggcattttcacagcttgcctgcatctcagtctttgtgatagttgcattcatcactgagaggagtcgtctcagaaatgatccactcaacttctctgctctgaacatgatatttgaaatcatcagtgcatatgggaatgtagggctatccactggttacagctgttcgaggttgcagaaactgcacccggggagcatctgccaggacaagccgtacagcttgtccggatggtggagtgatgaaggaaagttgctgctagtctttgtgatgctctatggaaggctcaaggccttcacaaaaggtacaggtgaatattggaggctatggtaaaagctgaagcctgaacaaaagcacttgcaaaggcaagtgcatcaagtgcagtatatgtaactatttagagttctgcctgaaagttcaggtttctaattgggccatagtgtataaaaatacacccaatattattcctcttaatacagtggtgcgcaatcctttagcgtattcccg

SEQ ID NO: 7785 - DNA, 642 bp, Oryza sativa
  ref <308>: DATABASE ACCESSION NUMBER: AK105133
  ref <309>: DATABASE ENTRY DATE: 2002-08-28
acagtcccacaccgccggagaagaagactagcgacgcgaggcgaggctctcggaggagtactatcaccacccaccgccggcggggaggaagcagatcatggaggatttctacgtcaccatcccgtatggcgccgcggtcctcgtcgggggcgtcgccggctacctcaagcgcgggagcaaggcatcgctggccgcgggcggcgggttcggcggcgcgctcctcctcgccggcgcgctgagcgccagggccttcgcgcgcggccaccccagcggctccctcttcgccgccgtcctccagactgtttgtgctgtagcattaactgtcgttatgggaataagatacatcaaaacaagaaaggtaatgccagctggaataattgctgccgtcagtgcacttgtactgatattctacatctacaagatatcaaatggtggcaataaggtttatgtcccagtgagcgcggagtgatactggaggccagggtattatggtgcattctctggataattctgaatcgatcgatctgttcttctaatttgttgcatacctgtattctgccatcccagtgatgagaacatcgttctgcataatgtgaattatgaatgacccatgaaaaatctcggcagttcagacactggttc

SEQ ID NO: 7786 - DNA, 818 bp, Oryza sativa
  ref <308>: DATABASE ACCESSION NUMBER: AK105134
  ref <309>: DATABASE ENTRY DATE: 2002-08-28
aaagctgtgattttgaggccaccgtgcatcgcgccgccgccgacgacgacctcgacccactcacctcgactgcgacgcgtggcggcgggaggagaggagaggagagggatatggagggcggcggcggggagagggcggcgggggtggtgcggcggctgatggcggcgaaggcggagtcgcggaagagcttctcggagatcggggaggaggcggggctgaccaacgtgtacgtggcgcagctgctgcggcggcaggcgcagctgaagccggagacggcgccggcgctgcgggcggccgtgccggggctcaccgacgacctcgtcgcgctcatgatggagccgccgttccgctcctaccacccggacatcgtccacgagcccgccatctacagattgaatgaagctgttatgcattttggagagagcatcaaggaaattatcaatgaggagtttggtgatggaatcatgtcagctatagacttctactgttcggttgacaaggtacaaggtgctgatggaaaagatcgcgtggtggtcacatttgatgggaaatatcttccttacagtgagcagagatctgatcatatgatgtctaggctgacccgcaagacatcttgagatggctggtgttgtgggaaaaatgatgtatcatctgcttctgcttgtggattgaatagaatcgagcatgttttttactcccaatagtcgatgaaataaacatactttgtaatgatgtatacatgaataaattgtttaagcagagatacagttcgatgtcacctttactacttctatcattgaataaagttaataaacaac

SEQ ID NO: 7787 - DNA, 1101 bp, Oryza sativa
  ref <308>: DATABASE ACCESSION NUMBER: AK105135
  ref <309>: DATABASE ENTRY DATE: 2002-08-28
tttgaaacgtacaagcggaaaaataagaagcagctgcagaagatgctttatgactgcaatgagcaattgcagcagttcagtcatgtcaacaaaaaagctcttgaccagtatgttaacttcaccgaacaacgtgaacaactacagagaagacgggctgaacttgatgctggtgatcagaaaatcagagaactaatatcagttttagaccaaaggaaggacgaatcaatcgaacgtacatttaaaggtgttgcaaggcacttccgtgaagtgttctctgaactagtgcaaggtggccatggacatttggttatgatgaggaaaaaggatggtgatgcagatgatgatgataatgatgaggatgggcctcgtgaaccagatcctgaagggagaattgagaagtacattggtgtaaaagtcaaggtttcctttactggcaagggagaaacacagtctatgaaacagttgtctggtggacagaagacagtggtggcattgacactgatttttgccattcagcgttgtgatccagccccattctatctgtttgatgagatcgatgctgctctggatccacagtacagaacagctgtcggcaatatgatccgccgtctagctgacatggctgacactcagtttatagcaacgacattccgaccagaaattgcaaaagttgctgataagatctatggtgtgacgcacaagaacagggttagctacatcaatgtggtgtcaaaggagcaagctctggacttcattgagcatgaccagacacacaacgctagctgagactaaatgcgcttttgccagtggtgtgctgcaggcagatgctaacgtagaggtagtggaagcaggctgaaatctggctttgcctggatgttctatttccatggttggataattgtactagttgtgaatatgtagttagcctttggacttgtaagtttcagctgatgggtagattgtgttatcattatgttctgtttaggatagcacatgtattcagtggtacatgcatcggcgacgtggttgtaacatcgctatttattcttgtatacattataacctaccgcttactaccaatgggaatttattgtctagcct

SEQ ID NO: 7788 - DNA, 707 bp, Oryza sativa
  ref <308>: DATABASE ACCESSION NUMBER: AK105136
  ref <309>: DATABASE ENTRY DATE: 2002-08-28
gaatcacagttaaatcttaatcctaccactaatcctatgcaaaaagaaaaaaaaaacatgaggaatccaagccaaatgctgcgactgctgctgctgcgggtggcaatcctcgccgccgttctcgcgacaccgtcgctgggccgagtgatagggggcagcaagtgcaagtgcctcatgtgcgtctgcgacgtggacccgcacccgctcccgccgtcgcgccaccacccgccgccgccggaggagccggagccggagccgacgccggtgaaccaccactaccctccgccgacgacgcccgcgtactccctcccgccgccggcgcagccgtacgggcagtacccgtacccgtacccgtcgcaggggcaggccggggcggcgtactggccgccgtcgacgccggcggagatgtacccgcaggtcagggggtacatccggtccgccgccgctcaccgtcggcgtcccggccacggcgggctctcgtcgcgcttggtcgtcgtctccgtcttgctcgtgtccggcctaatgccactgctcgtgtagtcgtgtgatcgtgtctcctgtgttttcgtttagtacggccgggccgaccgcgccgaagtttcgcggcctgcgactttgcgaccgcagcatatgttgcggctgtcacgtttactgatttggcatgtaaataagattacaactgtatcgcgtcaacacgtttcaagttc

SEQ ID NO: 7789 - DNA, 926 bp, Oryza sativa
  ref <308>: DATABASE ACCESSION NUMBER: AK105137
  ref <309>: DATABASE ENTRY DATE: 2002-08-28
agattatctctaagagcgatatactccatattactatttcatcgagagtttcgttacatatccaaaaacggtctcaaagaacccaaccatggcagccacgccccctcctcctccactccacattgtggtgtttccatggctggccttcggccacatgatccccttcctcgagctctccaagcggctggcgaggcgaggccacgccatcaccttcgtctccacgccgaggaacgctggtaggctgggcgcgatcccaccggcgatgtccgcccacctccgcgtcgtgtcgctcgacctcccggcagtcgacggccttgccggagggcgccgagtcgacggccgacgtcccgccggagaaggtcgggctcctcaagaaggcgttcgacggcctcgccgtgcccttcgctagcctcatcgccgaggcctgtggcggcgccgccggtgatggggaagaagccgccgctgggttctcgaggaagccagactggatcatactcgacttcgcgcagaactggatatggccgacagccgaggagtatgagattgcatgtgccatcttctccatcttcccggcggcattgggggccttcgttggcacgaaacaagagaacctagctcacccgcgtaccaccacggaagactacatggcccagccagcgtggatccccttcccctccaccgttacataccggcggcacgaagcggagtggatagcagccggtttccggcccaacgcctccggtgtgtccgatgctgatcgtttctgggactcagagcgcccctcctgccgcctcatcatctaccgtagttgtcccgaggcagagccgcgactgttcccgctcctcaccaagctctatactaagccggccatcccctccggcctccttgtgcctcccgctcttgacgacaatgatattggtgtgtac

SEQ ID NO: 7790 - DNA, 1182 bp, Oryza sativa
  ref <308>: DATABASE ACCESSION NUMBER: AK105138
  ref <309>: DATABASE ENTRY DATE: 2002-08-28
ttccccatccgtctaattgcgccccttatgcattagagcccccggagtcccctctgtttcgcagataagtcctttggttcccatctttttattacattcaggtcctcctagtttcttttcctttcgagtctactccttgcattcttgcgaggaagcccctcgggttggtcgaattttagtttccactccctctcctcggggagtcgttgctgttcttgttcttggtcgaggttgaggttggtggcgtagatccgatctgaggaatgtttacctatcctttcctctaacgttcgccgtactccgatgaagttgaacgtgctccgccgccgccgttcccactccttctccgtcgccttcctctactggttctacgtcttctcatgaactcatcgccttcctcccaagaacaccatctccagcctctaattgattatatcttgatttctttttcatcctcctactagtttctttcttgtgttctttggaatttttttgatttcttgaagagatccggttcttggattaagttttggacaagaaccgtactgtgaccatgtcgtcgccttcgcgccggagctccagcccggagagcaacaccagcggcggcggcggtggcgccgacgagcggaagaggaagaggatgctgtcgaacagggagtcggcgaggcgatccagggcgaggaagcagcagaggctggaggagctgatcgccgaggcggcgcgcctccaggccgagaacgcgcgcgtcgaggcgcagatcggggcctacgcgggggagctgagcaaggtcgacggcgagaacgcggtgctccgcgcccgccacggcgagctcgccgggcgcctccaggcgctcggcagcgtcctggagatcctccaggtggccggcgcgcccgtcgacatcccggagatccccgacgacccgctgctccgcccatggcagccgccgttcgcggcccagcccatcgtcgccaccgccatggccgacgccttccagttctgagccaccatggagagctcgcacgccatggccattggcatcaatggcatggttgcagctgcattacaactagtagtactagcctctgtggttgtgtctgatgatgcttattatgtttaattatggtttgcttcatgttgttttcattaatctagaccattaataagcaatgtgtgttgtaatct

SEQ ID NO: 7791 - DNA, 835 bp, Oryza sativa
  ref <308>: DATABASE ACCESSION NUMBER: AK105139
  ref <309>: DATABASE ENTRY DATE: 2002-08-28
accagcatggcggcggccgcgcgagggcgggagtaggcggcgctgccggcggtggagggcgccgggcggctgagacggaggcggagcaagcggccagcagcgggaggcagagctcgcccgcgtaggttgccgtgcaggttgaggcggctgaggagcgtcgtcgtggtgtgctgctgccttgtcgtcataaaacaagcttctcttccctcaccttttgcgtggcctcgcctgcccttgttcacctcacctcagctcgtctctctgactttgatctcgtcgtcccgagttcaccggacacgcccacgtccaccacggcggcgatggagggcgccgtgctctgcgccgccaaccacgcgtcgctcacccccatcaccttcctcgaccgcgccgccctcgtctaccccgaccaccccgccatcgtcgcctcctcctccggactcacgcgcacctggcgggagacgcgagaccgctgcctccgcctcgccgcctccctcgccgccctcgacgtccaccgccaccacgtggtcgcggtgttcgcgtagaatattccagtgatgtgcgagctccacttcggcatcccaatggccggcgccatcatctgcacgctcaactcccgcctcgacgcttcccggcgccctccgccgtcggctcccgccctcgcgtggccgccacattggtggggtccactgacgtagagagggagacattgggatagagtagagagatagagaggggtgaagaactgacaggtggggtccactgatttttttttaaaaaaatactgactggactgccacgtgaatccaaaaccaccccgaattgaattagagggatt

SEQ ID NO: 7792 - DNA, 840 bp, Oryza sativa
  ref <308>: DATABASE ACCESSION NUMBER: AK105140
  ref <309>: DATABASE ENTRY DATE: 2002-08-28
tcgatcggttgttgctggccatggcgtcgtcgcggaggcggacgctgctcaaggtcatcgtcctcggcgacagcggggtggggaagacgtccctgatgaaccaatacgtgaacaagaagtttagccagcagtacaaggcgacgatcggcgccgatttcgtcaccaaggaggttctcattgaagacaggcttgtcaccttgcagatctgggacacggcaggacaggagaggtttcagagtctcggtgtggcgttctacagaggtgcagattgctgtatgctagtctacgatgtcaatgctaaaagatctttcaatgcactcaacacctggcatgatgagttcctcacccaagctagcccatcagatcccaaacattttcccttcatattactcggcaacaagattgacatagatgccggaaacagacgtgccatccctgagaagaaagcaaaagagtggtgcgtctccaaaggcaacattccgtatttcgaaacctctgcgaaagacgactacaatgttgacagtgcttttctgtgcattgccaagcttgctctggagcatgagcatgatcaggacatctacttcaagactgttgcacaaccagcccctgatactgaacataccagcggatgtgcttgctagcactttggatgcttttgttcattggctgagaatgaaattatacaattataagttgttatggactcacagtgtacaataagctcgcataagaaactgttactcgcttgtgtatccatttttttaacctaggctgtgtttagatccaaagtttggatccaaacttcagtccttttccatcacatcaacctgtcatacatcc

SEQ ID NO: 7793 - DNA, 845 bp, Oryza sativa
  ref <308>: DATABASE ACCESSION NUMBER: AK105141
  ref <309>: DATABASE ENTRY DATE: 2002-08-28
aaaaaagaaactaaaaatcgaaaaaaaggaaaaaaaaaacaggtgagaagaaacgggagtcggagacgaccaagattcgccgccgatggcaacgcgcgcgccggcgaccgggtccgcgaccgtgacggtggaccccaccccgtcctcctccgcgccggcctcgtcggcgcccccgccggcggcggagacggtggtgctgcggctgaagcggcgggcgaagaagaaggtgacgtggaaggaggggacggtggacaacgagtccctcggccgcaagagctccaagaagtgctgcatcttccacaaggacgtccccttcgacgaggattgcagcgacgacgaccccgacggcggccgccggagcccgcccggggacgccggcgaggggacaagcggcggcggcggtggatgctgctcctcgtcctcggacggccatggccattaaatatttcggattggatagtcaacttatcgtggagctccgtagcaatgcgcgaagttgtaatttcaagggaagaattgcttcttctgtactgccaactgccaaaacaataggtgaaatgatacttttgtttgtttttgtgttgcgactgtggatgctgtgctagcttttcttttgtggcatttgcaagagagaaaccttgtaacgtatagctgactttattgctggtcgtgtgtaattctcttgagatgtatttagtattgctcctgttgttattgtcaccattccatcgcatcaaatatcctcttgttctttatttttatattgtgggttggtagttgtattgtattcacattgatagcagtgtattatgtgatgatgattgaatatcttaccccaaatcagc

SEQ ID NO: 7794 - DNA, 542 bp, Oryza sativa
  ref <308>: DATABASE ACCESSION NUMBER: AK105142
  ref <309>: DATABASE ENTRY DATE: 2002-08-28
acaagagtggtaagaaggaagattatgagccagagacaggttgcctcaggtggatgaacgagttctcgcaataccacaacaaacttcttatagatgaattggaaaagttacgcaagcttcatcctgatgtggccatcatctatgctgattactatggagctgccatggaagttttcctttcccctgaacaatttggaatcaaagatcctttgacagcttgttgtggtggaggaggaccgtatggtgtatctggaactgcaagatgtggatatggtgaatacaaggtttgcgatgacccacaaaagtttgggtcatgggatggcttccatccatcagaagctgcatacaaggccattgcaattggactgctacgaggttcatatacacaaccttcatttgctaccaccactaattcgtgcccgcaaattactgagctcagttcttctgttgaatacaaggtcctctacgatttgtaattctgtaactatattttttttattatatagacaatacgtgtgattaaaagatgtaacgattgtggt

SEQ ID NO: 7795 - DNA, 858 bp, Oryza sativa
  ref <308>: DATABASE ACCESSION NUMBER: AK105143
  ref <309>: DATABASE ENTRY DATE: 2002-08-28
gaatcagttctttgagtattcagagattatcgagcaaattgaccgtgatgtgaagcgcactcaccctgacatgcattttttctgtggagactcatcttttgcaaagtccaatcaggaatctctgaaaaatatactgattatctttgcaaagctgaatgccggaatacgttatgtacaagggatgaatgaaattttggcacctctcttctttgtgtttcggaatgatccagatgataaaaatgctaactttgcagaagctgattctttcttctgcttcatggagttacttagtgggtttagagacaacttctgccagaaactagacaacagtgctgttggcattcaaggtactctctcaaaactgtcgcaacttgttgcgaagtatgatggagagcttcagcgttatttggaaataacaacagaaattaatcctcagttctacgcattccggtggattacgctactgttaacccaggagttcaactttgctgacactattcacatatgggacacactattaagtgatcctgatggtcctcaggagaccttgctcagaatctgctgtgcaatgctgattcttgtccgaaaacgcctattggctggtgatttcacttccaatctcaagctcctgcagaactaccccccaacaaacatcagccacctcctttacgtcgcaaacaagctgcactgaactcaactgaacctcgtctggaagacctgaaacacactacccctgctacaatgtattcggtaaaaactgtgactgcattgcagaaccacgtaccattacgaatgctaatcacagccagtccattaataaaataatttggatccctacctgcttgggattccagttgc

SEQ ID NO: 7796 - DNA, 571 bp, Oryza sativa
  ref <308>: DATABASE ACCESSION NUMBER: AK105144
  ref <309>: DATABASE ENTRY DATE: 2002-08-28
gtgcgagtctggcgacgctctccatatcctccccaacccctggcgccgctcccctctcctccgtcgctccccttcctcccctccacgcaggccgcctctctccccatcggcggcggccgcgccactcccccaccggcgcacctctccgcgcccctccccaaccggcgacgcctctcaacgccccccggccttccccaccgagcagcggcagcggcgacggcgcccttccttccgtgagcggcggtgacggcggcagcggcgccctgccctcgcggcgagcggcggcggcggcgcggcgatggtggcgccgcttcttctccccaccgccggctccttctctcctcgtcaggcggtggccgccgcaccgctctctcgccagatccggcgggccgacggcgaggtggtgaggagcagcgcgctcgcccctccctctcctctcggcatctcgtgttaatattttggatgtttttttttttgatgattccgatttagatttggagtgggattttgtgtttgatttggattgtgatgatttgagatttcgagataaatgtgggattctatttgtgtg

SEQ ID NO: 7797 - DNA, 730 bp, Oryza sativa
  ref <308>: DATABASE ACCESSION NUMBER: AK105145
  ref <309>: DATABASE ENTRY DATE: 2002-08-28
aattcccctctcctcttcgctctcatctccgcttccagccagccactgcaaccctaaccctccgcaaagccctaccccccttccgccaccatgggcaaggccgacgccgacgccgagttcaaggccgccggcaagcgcaagaaggccggaggcgccggcaagcccaagcgcggcctcaccccgttcttcgccttcctggctgagttcaggccgcagtacatggagaagcacccaaacaccaagggcgtcgcagcggtgaccaaggctgccggggagaagtggcgcgctatgtcggacgaggttagcagatgctggcagttgttgtactagcacgctttattatgcttctgtgcggggattcccgcaactgatatttgcacgtccaataagctgattacacttgtcgcatatcatgtgaaaaagcatattatatgcagttttctgagcttttagcagttattattagttatgacctgacgctttataaccacaaattatgccattcttcttcagtacacgtgctgtacagtggctttattgtctgttgcaacatgtatcgatccttagcatgcctgtgcagcaaagctatctagagtgctagctagactcatccatggtccatggatcacatcaagctcttacaggtaatgggtggagattctatacagctgtgaggttctttgagccatgtttttgggagaatgcactataggaaataaaatcacttgac

SEQ ID NO: 7798 - DNA, 868 bp, Oryza sativa
  ref <308>: DATABASE ACCESSION NUMBER: AK105146
  ref <309>: DATABASE ENTRY DATE: 2002-08-28
agccaccaaggctcagaaaccgcctacaaaacggcgcccggcgtcccacggatcaagcgaccccctaaaaaaccaaccgaaaaagaaaaaaaaaagaagcagagaaaaaagctctcgcggcatggattcgcacgtaggcaagttattcgattcggtgggctcgatcttccgcggcagcgacaccctcccctggtgcgaccgcgacatcatcgctggttgtgagaacgaggttgcggaggctgcgaatgaagaacagaagaatgagagccttatgaggctttcgtgggcgcttgttcactccagacagcctgaggatgtgaaccgcggcattggaatgcttcaagcttctttggacaggtctaccagtccactgcagacaagggagaagctctacttactggctgttggacactacagaactggtgattatacaaggagtcggcagcttttggaaagatgcttagagattcaacctgactggaggcaagctctcactttacaaaggcttgttgaggacaaaaccagaagagacggtatgattggcatggctattgtcactggtgccttcggacttgtgggacttgttgctggtggaatcatcgctgccgcttcttcttcatcctcatcatctaggaagaaatgaggaacccatatcaagtgaataagatgtcaagatgggcaagaaatcgatgtaaatatgcgcattttgctgtcatacttgttgcaaccgtatactcacgtctccatttttcagtccttttaccatgagttcaaacaggagacatcacatgcctgcatgttaaacatcatggaagatgaggaggctcctgttatgagttgcaatcaggatttacgtaaccttgtggtt

SEQ ID NO: 7799 - DNA, 570 bp, Oryza sativa
  ref <308>: DATABASE ACCESSION NUMBER: AK105147
  ref <309>: DATABASE ENTRY DATE: 2002-08-28
ctatcattggtgatacgagttatatggatccagtgtattgtcagacaggtcttctaaccgacaagagcgatgtttatagttttggagttgtgctgttggagctcattacaaggaagaaggcctcacactctgacaacaatggcttacgtcagaattttattgatgcttacacaagtgggaagacagtgacggagcttgttgatgaggaaattgcaacgacaaatgatgttgacatacttgttaatctagcaggcatggttgtgcagtgtctaaatcgtgaggtggatcaaagaccagagatgacagatatagcagagcgtcttcacaacatggctaagagagtgcatagtaatgttttcatgaatttacaaaacttttagatatggttttcacgtgttttaacttatttgatggttttcactggatattcccccatatagaagtggaatatgtaaaggattaggactcaggtattacatacttgtgtatcaagaaaatgacctgtaatcctgattcgataagtttgtaaagtagttctaggagattcaaaccatattacgttaaatctct

SEQ ID NO: 7800 - DNA, 1050 bp, Oryza sativa
  ref <308>: DATABASE ACCESSION NUMBER: AK105148
  ref <309>: DATABASE ENTRY DATE: 2002-08-28
agctcgaatcggaggaccagctccgccgccgacgattcttgacttgccttcttctccggcggcgacgattcttggcttctttggttgattggtcgggcggagcagcggtcgaacagcttgcgggcatcaacaggcgaggcatggcgagggggctgtttgcgtgctttgggaggggaggggaggaggcggaggaggaagcagggaagaggccggcgctgcggcggcggaggacggtgaacctcaggtcgctgtcgctggaggacctgtcgcggacgctggcgaagacgaacctgcacgccttcaccctggacgagctacacactcgaaatagttcaaattaaactagcaatttcgattacatatatcttcacttcgtgaggagagaaattaaaagaatacatggcgtcgtcctcctcgtcgtcgtcgtccaaggctttgcttgttttcgctctcctgctcgctgctgctttcgtcgcctctgccgaacaaactcatgacgacggtgacaatccgccggagtcgccggaccacgaagacccaccgccctcccctgaatactacgacccaccgccatcgccggactactatgacccgccgcactcaccggactactacgacccgccgccatcaccggactactacgacccgccaccgtcgccgtactacggcggaggcggtggatatggcaaaccaccgccgccgccgccatgctgcccatgcaagggtgtctaggactgatgcgactggtccggcgagtgctgctcgccgtaggccgatggagcgagctccgtacaactcatatgaagcagatcacacatggtggttcataaataaacacttctccttaattaaatattattcaaaattactagaaaaatgtatacagttcaaataaaatagttgatgtcatgatctgatacctatggtgtcatgctgacatcatcatgatatgagtattacgtccggtatcacggtatcatattcgatatacctatctagtatcatagataccacatctgatacctaaggaaatagcattataagtattac

SEQ ID NO: 7801 - DNA, 1162 bp, Oryza sativa
  ref <308>: DATABASE ACCESSION NUMBER: AK105149
  ref <309>: DATABASE ENTRY DATE: 2002-08-28
aaaacgaaatggcgatgataacgctgccagtagctgcccacgctccgtcgccatggcttccgccctccatcctccgcctccgctccacctccaccaccaccaccatccccgccgccgccgcaagatcctccgctccccaccctctcccggacgagctccacctcgtcgccgacatccgctcgccgcacaaccacatccgcgtcgccgacgtctcccgcaccgcctccggagccggccaccccctcgccggcgcgcgcctcctcctcctcgacgcgccgggcaacatccactccctctccttccctcgctccccctgccccctcacctccacctacctcgacgtcttcgccacgctcccgccactcctccccgcctccgcctcgtccctcgccgtcctcggcttcggcgcgggctccgccgcgcgcgccgtcctccacttcttcccggacatctccgtccacggctgggagatcgaccccgccgtggtctccgcctcccgcgacttcttcggcctcgcggagctcgaggcggagcacgccgcccgcctctccatccatgtcggggacgcgctcgaggcctcggccgacgccgtggccgtgcccggcggcttcggcggcgtgctggtggacctgttcgccggcgggagcgtgctcccggagctccaggagatggacacgtggaggcggataggccggcggatggtggcgcccggagggagggtcatggtgaactgcggcgggccgtgcgtggaggcggaggaggaggggaggggcggcgaggccgtcaaggacgcaaccctgcgcgcgctcacggcggcgttcgggcacgggatggtgtcggtgatggatatggacgagagctgggtggccatgactggaccggcggtgtcgtcggcgccggaggaggcggcggcgtggaaggctaagctgccgccggagctacggcgatatgttgatatgtggaggccgtgcttgctgtgaattctgaattgaattctctgaataccgtgtgatttcggtaagtgaatgcacatatatcttcttgttccagttacattttttgaaagttagtcacatagcacatcaaaaacagatgaaattgtccggaaaacaactgaaaagctaatgttagcaaagcgacccagtgaaatcggtggttctgt

SEQ ID NO: 7802 - DNA, 1391 bp, Oryza sativa
  ref <308>: DATABASE ACCESSION NUMBER: AK105150
  ref <309>: DATABASE ENTRY DATE: 2002-08-28
atctcctccacctcctccacctcgccgccatttgatcgaacacctgatagccatgatggatctcggcctcagcctcggcctcggcctcgcctcgcagggcagcctcacctcctccaccaccaccacctcctcccccggcgccggatcatcctccccgtgggccgccgcgctcaactccatcgtcggcgacgtgaggcgggatcaggccgcggcgcatgctgccgcggcggtgggggttggggttgggggcgaggagatgtaccaggggagggcgtccacgtcgccggacagcgcggcggcgctgtcgagcgcgagcgggaagagggagagggagctggagcggtcgggatccggggttgacgacgacgacggcgcggacggcgccggcgggcggaagaagctcaggctgtccaaggaccaggccgccgtgctcgaggagtgcttcaagacgcactccactctcaaccccaagcagaaggtggcgctggcgaacaggctggggctgcggccgcggcaggtggaggtgtggttccagaaccggagggcgaggacgaagctgaagcagacggaggtggactgcgagtacctgaagcggtggtgcgagcgcctcgccgacgagaacaagcgcctcgagaaggagctcgccgacctcagggcgctcaaggccgcgccctcgccggcgtccgcgtccgcgatgcagccctcctcctccgccgccgccacgctcaccatgtgcccctcctgccgccgcgtcgccaccgccggcgcgccgcaccagcctaaccaccaacaatgccatcccaaatctaacaccaccatctcctcctcctccaccgccgccgccgccgtcgccgtcgccggcggcaacgtgctgcccagccactgccagttcttcccggccgccgccgccgccgccgaccggacaagccagagcacgtggaacgccgccgcgccgctcgtcaccagagagctcttctagaaacaatccatccatcgccatgacaaacttgggaaaggatcaagctttgattggtcaagacagtgtttttaccaggtggtgatttggttaattaattaattataattaatcactcaagaggaggggattaattgccttgatttggtacctaattactagtatgattagcagtagtagtagtagcagcaaatttggtttggattaattcagtttgattccatgatatgaacaaaggaacaaagcaacaaaaaaatggccgtctgctttttcttggacggcattcttatatgtaccaattcaccaaatctgctggttggtggattaacagcttgataattggtatattgattgtactactaccactaattgattgaattatgagaaaagttaatgaaatcttttctaattcttc

SEQ ID NO: 7803 - DNA, 885 bp, Oryza sativa
  ref <308>: DATABASE ACCESSION NUMBER: AK105151
  ref <309>: DATABASE ENTRY DATE: 2002-08-28
gtgtgaatcgtagcgatagcggatcagattggaggaaaactcgctagtacgcttgttacttgcaactctttctctaatcttgcttcggaaagatatccaaatcgaagaaaaagaaaaaaaaattagaaagcgtgattagccattcctcttctcatctctagccacttcgcttcagcttttcttctttcttgatcgcgagcaaaaagggagagagaaaaaaaaacggtaaaaggacgtgattagcaaggatggtggcgatcgagaaccagagccagggccagcgggcggcggaggcggcggcgcagccacggatccccagggaggcgcggcggctactgcacgagatggcggcgtcgtgggcggacgttgccgactgccgggcgctgcaggtgattccgctcaagggcgccatgaccaacgaggtgtaccaggtgcgctggctcaacggcgccccggccaccgccgacggcggcgaggtggaggcggaggcggccgcaagggagagggaggtgaggaaggtcctcgtgcggatatacggcgacggcgtggagctcttcttcgaccgcgaggacgaggtgcgcaccttcgagtgcatgtctcgccatggccaaggcccccgcctcctcggccggttcaccaacggccgcgtcgaggagttcatccacgcaagggtaggtgcacatgaatatgatatgattccgcgctgctgtagccaaactgtctagccttcctcgcgccacggattgtgttttctcctcccgttttttccctttagttttcctctgtttatcttcgactctcttgaactattaaattgggtagggatttttaggggattttggtggtaccttttgtgctttggacgaataaatctttgttgatttt

SEQ ID NO: 7804 - DNA, 567 bp, Oryza sativa
  ref <308>: DATABASE ACCESSION NUMBER: AK105152
  ref <309>: DATABASE ENTRY DATE: 2002-08-28
attggcagttgccacaaggatatcgtcgcttccgcttctctccctctctcgccccgctctacctccatcctcttcctcctcgcattccttgccaacctcgccgccccggcctccgacgatcgccggccgccgcctccacagtttccatcgaacgccaggggggggctaaattaaagaaggatacaaaatggggaggagatggcacgccctcgccgccgtcggcgtggccgcctgcgcggccgccgcagtcgccgccggcgacagggggttcacgttcgccgacgcggtggcggcgccggaggaggtgggctacatgaggaaagtcgtcaactttctgtggagcggcgaggcctcttatcaccacgtgtggccgcgtttggaagtgtaggaggagtaggtggcggtgggattttcgtgccgatgctgaccttgatcattggtttcgacgcgaaatcatcaacggcgatatcaaaattcattgtcagcactcagcagtgcaatcaatatcatccttattggtaccattgaaccgtgcctttcaaaataaaagataagtactgttgcttc

SEQ ID NO: 7805 - DNA, 1179 bp, Oryza sativa
  ref <308>: DATABASE ACCESSION NUMBER: AK105153
  ref <309>: DATABASE ENTRY DATE: 2002-08-28
aactaacgctaaaaaagtaacagtttctgtactttattgggaatgtgccgttttcagttgatgcggtgcgaccttcgcaccagcgcctgatctttcacggccgcccactgtactgcgcccgcgttgttttgccgaagggaagacttgaccgtgtcctcggggggtgtctgcggaagagtgaggccggccccaacataccaagtgacatcaagttgagttccgcgaagccctaaggccgcgagataccggctttcaagtcggcacaaccctttgctcgccaatcgagcgcagctactccttcccgtgactcgttcgaccattagcatcgtcgggcagccacaatcaagcaatcattattggctacttttaccactgccaatgtctcctaccgcaattttgtatttgcgcgttatatgctcttcacaaccttcccccgcctcaccgtcatcagcggtacagatgtgagcctcgtctccatcccgcccgacggccccgcgccgaaagcttgttctcaccgcgatcccccttacgacgacggcaagcgtggcggtggcgattctctcctccgcccgcaacgccccaccgttggtgccttcgcgcgttacactactcaggtgccacgcccaaatgattccacacagcggctactatccaacttcaacttccacctcgccagcaatttcaacgggaacaggccttgcctaatttcggtcaagcgttccctcagctcggctatacatcgtatccgtacaactggtcacgtcatcgtgaggtcccgccaccttcgtacatcaagatggtcgcgtgctgcatgcctcctactactacgccactacacaacagctttcaccacacccctgcccgacgggtactcccgcttgcggctacatcatgcttttccgtacctgtgaagtttcactgtacgagattgccgggcatttttttcgtccgtgctacacccctatcaatcacctgggttcggacgaccttcgcttctgatcgcgtcccccccttggtcattttcttggcgaccccaaggcatcaaaacgacgacgcgcgcgcgcacgcagcaggcgcccactacaccacttcttttcttccgcgtgccgccgtgtgtcaccactcacgcaaccctccccctgctctcctgtccacttctcttttttcccccgggaattc

SEQ ID NO: 7806 - DNA, 964 bp, Oryza sativa
  ref <308>: DATABASE ACCESSION NUMBER: AK105154
  ref <309>: DATABASE ENTRY DATE: 2002-08-28
aaaaacatccattttttttggccgggagagagagcatctagctagggagagaaaggaagagacgagaggagagagatggccactgcttatgctcccatggcgagccagctgatgaagagcagcttggtgtgctccaagccgagggggctgtctggtgcttcgctgacaaggaggccccgcttcacagtcaaggccatccagtctgagaagccaacgtaccaggtggtgcagcccatcaatggcgaccccttcatcggcagcctggagacgccggtgacctccagcccgctggtcgcctggtacctctccaacctcccggcgtaccgcaccgccgtcagcccgctgctccgcggcatcgaggtcggcctcgcccacggctacctcctcgtcgggcccttcgcgctcaccggcccgctccgcaacacgccggtgcacggccaggccggcgccctcggcgccgcaggcctcgtcgccatcctcagcgtctgcctcaccatgtacggcgtcgcctccttcggcgagggcgagccgtccacggcgccgacgctgacgctcaccggccgcaagaaggaggccgacaagctgcagaccgccgacggctgggccaagttcaccggcggcttcttcttcggcggcatctccggcgtcctctgggcctacttcctcctctacgtgctcgatctcccgtacttcttcaagtagatcttttgtttgtaagtgcatgaccgggtgatgcatgtgtagatcgatcgatgatggaacatgtgtgtgttcatgtggtggctgatttgagtgccttctacttgtataaatgaaatgcatctgcacaagggcacaaacaggctgcctgcatggatatatggatggtgtgctgttgtaacttgggagtgttactttcttactttgcagataatttaaaatggaaagaaaaagttttaacaatgataattaatcagtttgttgt

SEQ ID NO: 7807 - DNA, 655 bp, Oryza sativa
  ref <308>: DATABASE ACCESSION NUMBER: AK105155
  ref <309>: DATABASE ENTRY DATE: 2002-08-28
atcttttacactgctctcaccttccaacactagaggcagggcggcggcgacggcgacggtgcacgtacgggggaggagctcgccggccgtccacgcgcgggggaggagcccaccggcagtcccgcgaggttgccggccatccatgcgcagggggaggagctcgccggcgtcctctcgtgggaaaggagctcgccggccgtccgcctactatgtgaggagctcaccggcgtccgcgcgtgagggaagactcgccggccgtccgcctgccgggtgaggagctcaccggtcatccacgcgcgggggaggagcctgctggccgtcccgcgagctcgccggcgtccgtgcgcggtggaggagctcgcctgccgtccgcctgcgggggacgagctcacctgccgtccgcgcgccggggaggagctctccggcgttcgcggatgggggaggagctcgcctgccgtccgcgcgccaggggaggagctcgccggcgtccgtgcgtgagggtggagctcgccggtcgtccacctaccgggggaggagctagccgtgctttaatttgggcatatgtatatatcgatcgatcgatgcatatgcatgcttgcatatgctttcactgttccggatatgtttttagataagctaaggctgtgttctttcc

SEQ ID NO: 7808 - DNA, 921 bp, Oryza sativa
  ref <308>: DATABASE ACCESSION NUMBER: AK105156
  ref <309>: DATABASE ENTRY DATE: 2002-08-28
aagtgaagagaagcagcaaagagagagcttttccatccccaaatcccctcctcctcctcaaaccctagctaagctccgctcgcagcagcagctgcagatgttctgggcggagcagtaccgcgagatcgaggccaccaccgacttcaagaaccacaacctccccctggcccgcatcaagaagatcatgaaggccgacgaggacgtccgcatgatcgccgccgaggcccccgtcgtgttcgcccgcgcctgcgagatgttcatcctcgagctcacccaccgcggctgggcgcacgccgaggagaacaagcgccgtacgctgcagaagtccgacattgccgccgccatcgcgcgcaccgaggtgttcgacttcctcgtcgacatcgtgccccgcgacgacgccaaggacgccgacgccgccgcggccgcggcggcggccggcatcccccgccccgccgccggtgtgccggccaccgatccgctcgcctactactatgtgccccagcagtaatgtatctgattaacccctttcaagccttttctaagcgaaggatgtgttgttgtttgttgttgctgttgctgttcttgttgttgttgttgccgcgtaataagatatgttgataatttatggcttcccctgagcttaaagaatttgagcttttggttctagaatctgggtaaaattgttgtaatggggaagactgtatgactgtatttgtagtgcatgtcttaacttgtcggatagtgtaatccgataattattatgcggttagctggttacctctcatgattactgtgctcatgtgctgtgcaatttatgttctttgttttggatgtacaatgctgtaaccagaatttggttgtgtaaggaaactattaaaggttgtgcgagggcagtgtggctatcgctgcattttagcttac

SEQ ID NO: 7809 - DNA, 731 bp, Oryza sativa
  ref <308>: DATABASE ACCESSION NUMBER: AK105157
  ref <309>: DATABASE ENTRY DATE: 2002-08-28
aaaaatgccttttcttttttccttttctctatctcaaaccaaacaatcacttgggctccaacggcggcgacgagcggtggacacgggcctcacgcaacggcggctcatcgccgccgccgcctcctcctcctccgccgccaccgccgccgccgccacaccgcttggtgcacatgcacttggagaagacgcccttggagcagtagccgccggtgtactcctcgtggacgcagatcatggcgcagtttctgttgcccctgcacttcccgcggtacatcttgctccttgctttgcagatgatagcttctgtgcctggtaaaaatcgatcaacgaggtaaaatacaaatgcaatgcaagaggattattattcaactgattaaccatgtcaaatcgctgcaaattcttaattaccggagagtgaggcgaagaggatggccatgagtaaggcaatggcaagcatggtggtcatcttcctcccggccgtcgacatggctggggatcaagtaatctgaatggaagaacttatttttttttttgggttgagggaactgaatggaagaacttgatgagaattgagaagggattgcatgaacagggggatgatatatgcatcctgaaacttgcatgtagttaatgtgattacttggcattaatacagaagatgtatgtgcaaatttaatatgtaaaatggatgtgcatgtttaatacaaaagatggatgtgcatctttaatac

SEQ ID NO: 7810 - DNA, 541 bp, Oryza sativa
  ref <308>: DATABASE ACCESSION NUMBER: AK105158
  ref <309>: DATABASE ENTRY DATE: 2002-08-28
gacccagaaagagagacagaaagcatccattctctcacacacacctcgataagtcgatataaatagagtaagatgattagtgtagagagagatcattattagcattcgatctgcttcttcgccatcgaagtaattaatcaaatcggaggagatcattagcaaattatcagcttgggcttcatggggaaggtgtgccttctcgtcatcgacgagaacctcttcaatggcatcctcctcgtcgccatcgtcgtcatcatgttcatgctgctcgccggcggcggcgcgccgccgccgcgccgccgcggcttctgcgtgtactgactgaccggccggcgagtgaaaccatgaacaacactgcaggtgcaggtcgagcttgatttctaagcttttaatttgtgttttttttttccccttttttttttctttttcttttgtccgtgcgatgaagctagctcgtgatttcttcttcttcatgttttcgggagtaattaattaacgtgttcttgtgtagaaatatatgtgaaggattttctgtttgatc

SEQ ID NO: 7811 - DNA, 719 bp, Oryza sativa
  ref <308>: DATABASE ACCESSION NUMBER: AK105159
  ref <309>: DATABASE ENTRY DATE: 2002-08-28
gttaagttcttctaccacaaaaagtcagttatattccaaatgtccaaggacaagctgtgtaggaaggttgacatccccttcgacgacattacatccttttgtttcgttttcggacagcagtctgatatcctgacaatagaggtcaaatcttcattgatacccttaagtgctgctaagccacttccagggaagtttcttgattggaaagtagattactcaaaagatgatgagtactattttcctgaatcaaaatctttatgggttgaggctgagaaggggagcttggaaaagacctatgcaaaactcaagtacactaatcctcatttgacatgcttgtttacggatgcaggggaacaaggagaaacatctgcaagacatgccacctgatggtgaatgcatggaagaaggaggatctgactggctgcatgcaccatactggggttgggaggcaacaggatcgccatgcttccgaataaatcaactgcaccagtgtggaagccgcatcctatgtattgttaagagacctggagcttcgataggacacaaaactcattgcaccaggagtggatcggttcacatcaatcgagttctttgttgacgatggtggcagctacacgatgtgccctccatgggacaccgtctgtggcctccccagccatcgccgcggtcacgctgtgcttgcagataccttcaggatagttgaatttcacctcgtcgtc

SEQ ID NO: 7812 - DNA, 747 bp, Oryza sativa
  ref <308>: DATABASE ACCESSION NUMBER: AK105160
  ref <309>: DATABASE ENTRY DATE: 2002-08-28
aaaaactaacgctaaaaaagtaacagtttctgtactttattgccacccccagcccgcttccactaccacattctgccgatgcacaatcgtcggggcagtggcggcagctccgaggcgaccgtctcgctgacggcgctcgggcgggtttgcaatattgccttgtcgaacggaccccaaaacaccgatgccctcagcgcgcctttgagaagaatcgccgaggacctgcttcgcatggctgaagagaatcgaattgacgtgcgggccgccttggcgagagcggcacggcgccagcttctgcagagcgacagaaacaccactttagacgagggaggagacggtcgatcctcctccccactgcccttcgtagaaaccacgacgacgtcccccgtgatgacggcccaggcgatgcatcaccgtatgacgtccgacgcgagcagtgccatccttcccaccgttcgctgcgcacagccaacagcggctgaaggcggtagcagcggcggtggcggctacttggggttgcagctgctgcgcgacgcagtcgccactaagccgtttagcagtccggcgtagcaaaggtgaaggacggatcaaaaaatgacctccccaacatcaacgcgtacgtcccctccaatccttcccatgtgccgtgtgttcgcagtctcccccaagtcccacctctccagtttgagaaggcacttcacttcatttcctctatacactgcacgccaagaaggtatgtgtgtgaag

SEQ ID NO: 7813 - DNA, 757 bp, Oryza sativa
  ref <308>: DATABASE ACCESSION NUMBER: AK105161
  ref <309>: DATABASE ENTRY DATE: 2002-08-28
tagcttttatgtgttgatgcattgccactttaaatacttttttgagttctgtcgttctaaattatatttgcatcaggcattgcactgacttgcacgcagatgtgataaatgaggcacctgctggcttgcaaagattgtagtgttgtacatttcatatgtatatatctacatgatattgtgctttattgcagaaaatctgtctaataggaattgtgtatactaatctaactaggatctgacttttgacatttgcacaattattgggaatactaaagatgcctctgtgtttcgaggttgctgcctcaagcctgcaacaagcccgaatcacattctcctagaatgctccaccagcatgactttgtccaaaattaatgtcccaacattaattgcactagcaagcttgaaccaagaagctgccttataaaattctacctgtttcagccggcctcataatattgtgcaaatttgaagttgttcctgaagtggccaaaacacccccgtaaactaggtttgatatttaatggcaggtgagcttcaagtctgctgacatgaacatgagatgtaaatatactccttaacatcgactaaaaggggggacattcctatgcacacatgcttcaggtgcactttgtgcacaacaactaaccaatgtcaccagaaaatcttaaataaaattgttcatttacttctaatcttactccacctatatataagttttggaattcaaatccattaaatatcagcggttaccaaaagg

SEQ ID NO: 7814 - DNA, 617 bp, Oryza sativa
  ref <308>: DATABASE ACCESSION NUMBER: AK105162
  ref <309>: DATABASE ENTRY DATE: 2002-08-28
cccttctcttccgcatgctggtcgccgccctccgcgtcccggcgccgatcccctcgtcgctcccctcgccggcgcgccctctcctccgccgccgcagcagccaccgcctgccccctcccccgccccccgccgcgtcaatggccgacgccggcggcgccaccacgaacaagcccgctccggccccggccccggagccgcccgagaagccgctccccggcgactgctgcggcagcggctgcgtccgctgcgtctgggacgtctactacgacgagctcgacgcctacaataaggctctcgccgcccactcctcgtcggcatcctccggcagcaagcccgctaccagcgacggcgccaaatcatgaggcgaatcaggattcaggagttctgaggacgacttgcagtatgcgtcccttcctctcttttcattttttttccccttccccaaatcggggtcttggtgtggtactcctaccagctagtagtattaaaattactcgtttgattatagtgaaacatttgtgttatctcattgtgtatgctgcaatttgtactagagtggaatggttgttgttccaacgaaaaattccctgattacatacagagaattgttcatggat

SEQ ID NO: 7815 - DNA, 1435 bp, Oryza sativa
  ref <308>: DATABASE ACCESSION NUMBER: AK105163
  ref <309>: DATABASE ENTRY DATE: 2002-08-28
aatatgcgcggacgcagaagttcagaagaagaagaagaagcagagtggcacggttgagaaagaacaatagagcagagagcatggagaagaagaaggtggatgcggtggtggccgccgcccggccgttcctccgcggcgacctctctcaggtggaccccgagctgccctccctggtgtccgtgctctgcgatgccggcgccggcgagtgctaccacaagcacggcaccttcctcgcccacctcatcgacgtctaccgcatcctccgcctctggggcgcccccgacgccgtggcgcgctgcggcctctaccactccgcctactccaactcctacgtcaacctcgccatcttccagcccgacgtcgcccgggaccacgtccggggcatcatcggcgccgccgccgagcgcctcgtccacctcttctgcgtcgtgccgcgccaccagctaatgcacgacgacctccacctccgctacaccgacgcagagctgacggcgcacctggccgcgtcgcaggcgtccctggacgccgccaggaagagcggcggcggcggcggcgaccccggcgaggcgtggcgcgcgaagctggcgtcggtggtgcccccggagggcgtggtggcgaggcacatccggacgggggaggcggtggcgctgtcgcggagggtgttgggcgtcttcatcgtgatgaccatcgcggacttcagcgaccagtacacggactaccaggacaagctgttcgacaacgaggacgggcggctggagtaccgcggcgacaactggcgcgcggtgtggccgggcagcggcaagcccgggctgtggatgagcgccatgtccaggctggcggcggtgtaccgcctcatcgccacggacgaggagatccgcgagctgacagctggagagaggagcgtcgtgaagagggaggacgcggagctggagctggtgatcccgccggtgttcgagcggtgcagcaaggtgctggacgcggcggagcagaaggaaggccgggatctgtactgggaggcggtgtgcggggagtgggaggaggggaagacggagaggctgctgcggcggagcatcgagaagaacccgttcgtgggggagccgtggctggtgctggcacaggcgctgctcaactccgggcacgacgaggaggcggaggcggcggcggaggagggggtgaggctggtggtggagtgggggagcagctgggacaagcggatgtcgtgggaggggtgggtgtcgtggggaagagtcctccgcgacggagctcatcgccggcaatggccgcgcaccgcatggggcatcatcaacctcggcctcgtcaaataatcaattaaattaattaatggaattaatctctctctggaattggattgtactgtatggtattggtatgtactctaatgaagtatggaataaatgttaaatgggccggaaag

SEQ ID NO: 7816 - DNA, 575 bp, Oryza sativa
  ref <308>: DATABASE ACCESSION NUMBER: AK105164
  ref <309>: DATABASE ENTRY DATE: 2002-08-28
gtgcagcgaagcgacgacttgctctcgtgaaacttgggttgggagcaaccgagcaaagcaagcggccgagcgggctgtggtatggggttccacctggtggcgatcgtggcggcgagggggttcctccacctgttccacctctcggcgccgctgctgtggccgctcaacctctggctgccgctcccgcgccacctgcccgccgcctgcgccgcgctctacggcggggttgtcttccacgccgccttgctgcgccgcgcctacgcgcgccggggcggcggcggcaacgtctggagccgaagcatccgcggcggcgacggcggcggcggagaggcggacgagctcctccgccaggcgctgctcagcatctcctactgaaaagctgacgaactgctattgcttctctcttcttcttcttggtttttttttttttgggttcattctttttttgtttcttgatgctctgctcttggtgttccacgtggcgacaccattgcgaggttcaccgtatcaggttcagggctggttgtaagttgtaaccgcgtgattttgtgtaaatacaagtgaaatacggccag

SEQ ID NO: 7817 - DNA, 911 bp, Oryza sativa
  ref <308>: DATABASE ACCESSION NUMBER: AK105165
  ref <309>: DATABASE ENTRY DATE: 2002-08-28
ctcgcaccgccccgttcatctctcgcctccggctcctccgaaccgccgccgccctctccccgttctcgtcctccgcgccgccgcggcacagcccccgcatcctccgcgctatccctgtcggtgcgcctcacccgccgcgcgtctccgcagccgtctcgccgctggtccgtccggtcgccgccgggttcgcgctgttcagcatggccaccgccgcctcctccgccgcatccgtccacgacttcaccgtcaaggatgcaagtggcaaagatgtggacctgagcaccttcaaggggaaagtcctccttatcgtcaatgttgcatctcagtgtggcttgaccaattccaactacacggagctgagccagttgtatgagaagtacaaggaccagggttttgagatccttgctttcccatgcaaccagtttggtggacaggaacctggcactaatgaggagattgtccaatttgcttgcacccgcttcaaggccgagtatccaatttttgataaggttgatgttaatggtgacaacactgcacccatctacaagtttctgaagtccagcaaaggtggtcttttcggtgacaatatcaaatggaacttctccaagttcttggtcgacaaagaggggcgtgttgtggagcgctatgcgccaactacttctccactcagcatggagaaggacatcaagaagctgcttggaagttcttaaaaccttaccgccggcgccaccagatgcactgctgcgttgcattgagcacttggaacttccaataatgttgtaataaaactgtgcttggaattgctgtattttcatttgcgtagccctgctgtgtaatgtataaagtattaacgtgtaatgaaattggcttactgcatcactttgcccctttattgaaatattatctcctgt

SEQ ID NO: 7818 - DNA, 810 bp, Oryza sativa
  ref <308>: DATABASE ACCESSION NUMBER: AK105166
  ref <309>: DATABASE ENTRY DATE: 2002-08-28
aattttgcaaacgaatctaacctgcctttgaaagggaatttcggcatcgaagtttctctatctgcagcagatatcctcgcgcgcacccacacacacacacaaaaaaaaaacaaaaagtgagattcgagatatgtttttctcgttgtgatgatggattggctgcgtgtttgtgctgcagaaggtgagcgacccggagctgaagcggctgctccaggacgaggagaggctgacggaggcggaggtggaggggatggcgtcgcggttcctggcgcaggtgaaggacgggacgtggcgcgggcaggggtggcccaaggtgtggacggactactcggtgtccaagctggccctgaacgcgtacgcgcgggtgctggcgcggcggctgcaggcgcgcggcgaccgggtgagcgtcaactgcttctgccccgggttcacgcggacggacatgacccgcggctgggggaagcgcaccgcggaggaggctgccgagatcggggcgcgcctcgccctgctcccgcccggcgagctccccacgggcaccttcttcaagtggtgcacgccgcagctctactccaagctctgacggccgccgcgccgcgcgagccgcgaggcatccgtgtagtgcggtgcggtttgtaattgtgcggacaagcgcctcgcgccctcgccgtcctgtgccgcgcggtctcagcaacgagctcaattactgtgtatacttagtaggtgtgtgaccgtccagctgaatatatgttcagaatcagatccaacattagcagagcgaaatcggtagcgcggccgctttattctatcctt

SEQ ID NO: 7819 - DNA, 794 bp, Oryza sativa
  ref <308>: DATABASE ACCESSION NUMBER: AK105167
  ref <309>: DATABASE ENTRY DATE: 2002-08-28
aagtgctccaccaagtccgcgtctccgagatcgtcgagccgagcacacaaggcggcggcggcggcggccggcggagaggcgggtgaagagccagcgagcgggagggcgagagggttttcggagcgggaggggaagatgccgctctacgactgcatgctgctggtgaagccgctggtgaccagggaggccatggcggagctcgtggggcgggtggcgcggcgggcgtaccagcggaacggcgtcgtcaccgacgtcaagtccttcggcaccatctgcctcggctacggcatcaagaagctcgacggccgccacttcaagggccaacttatgcaaatgaccatgatggttccaccctccttcacccaagaactccactacctgaacaaggaggacaggctgctccgctggctggtggtgaagcacagagacgcggtgtatggtgtggagttcatcaacgaggacgacgggaggagggagatgacggacttccgctaccgcaccaaagacgaggccagcgatgtcgatgagtatgatgacgacgatgatgactatgaatatgagatcgacgaggagtaagctttcatcgcatctctgctcccataccggcaggcagatattgttgtccaccaaatagggaatatcttgaaatgtgattttttttatttcttcccagttgttctagatcatggatagcaagtagtagcctgtttgtttgtctgacgtttgtgatgcgaataagcaccaaaatgaatcatatataatttcaaagctgtcactgcttttgctcatttgtg

SEQ ID NO: 7820 - DNA, 801 bp, Oryza sativa
  ref <308>: DATABASE ACCESSION NUMBER: AK105168
  ref <309>: DATABASE ENTRY DATE: 2002-08-28
attacatttccaccacgcggccgccgcgcgcgtacgccctcacatcacctttccaccttcttctcctcctcctcctcctcctctctctctctctctctctctacctctttcttgtctccaactagaagtagctatagctacctagctccacgacaagtgagctcccggagagcaggaggaggcttttggtagcctccctcgccgccgcttcgccgcatttcggttgacgttgtggcgacaatatgacgagtgggttggtgaccgccggcggtggcggcggcggcaaggtgatgagcctgcggctgcagtactacgtggtgctgggcggggtgacggcggtggtgctcctcgcctgcctcaggtacacgcctactgccgccgccgtggccgccgtcggctacggcttctggggcaacggcgacggcgctagccttgccgcagctggggcggcggcgaccaccgtcggtggcactggtactagcgctgctgcgacgacgggtggtggcggcgccggcggggggcggtctccctctcgcgtggtgatcttcaacttcggcgactccaactcggacaccggcgggatggcggcggcgatggggttgaacatcgcgctgccggaggggcgcacctacttccgccgccccaccggccgcatctccgacggccgcctcgtcatcgacttcatctgtcagtctctctctctcttttgccacaatgccactcccactcaccatcactctactacttcaccctcttcaatttcaccgcagtcaaactcctacagtacattgatttacagcc

SEQ ID NO: 7821 - DNA, 785 bp, Oryza sativa
  ref <308>: DATABASE ACCESSION NUMBER: AK105169
  ref <309>: DATABASE ENTRY DATE: 2002-08-28
atccatccagtgtgagctccgtttcttgctccatccatctatccatccaaggagtgtggaacgccacacgtattttttttttatctatgctaatctgatcattagcagaggagagttttagcagtaggattggattaaattggagtagtttcatagtttgtgtgtagtgatcttaattagctttgattagacagacagtacagtagagtagaggatgttggctgtgttcagcggcgcggtggtggaggtgccggcggagctggtggccgccggcagccggacgccgtcgcccaagacgcgggcgtcggagctggtcggccgcttcctcgccgccgccgagccggccgtgtccctgcagctcggcgaccttggccacctcgcctactcccacgccaaccaatccctcctccgcccaaggtatactagctgctgcttctactctgcttcagctgaaattgctgaaaaaacatctgccgttttctttaccctgaactccccaagtcctggatttcacgagatctagctaagaacagagccaagaattgattgctctctgtggctagatcagttaactgttcatcctgagaggctgagacagagtcatttactctgaatttgttcttcagttagtgtctcggtgaagtctcatggtgatgagatttaatagttagtctctgcaagaagacaatctaagttggtggttgagataagcttttgcaagttgcaacaggctcactgttcttggcaacactagtcactgcgtggtgggcgacagcttttcatcc

SEQ ID NO: 7822 - DNA, 961 bp, Oryza sativa
  ref <308>: DATABASE ACCESSION NUMBER: AK105170
  ref <309>: DATABASE ENTRY DATE: 2002-08-28
gaaaatttggttcaaacccttccaaaagaccttcggagggacattaagcgccatctctgtttgggtttagtgaaaagggtacctttgtttgagaatatggacgaaagattgctggatgcaatatgtgagaggttaaggcctacactatacactgaaaatgaatacattttgagagaaggcgatcctgtggatgagatgcatttcatcctccatggctgcttggagagtgagaccaccgatgggggccgaagtggattctttaacaaggtccagttaaaggagggcgctttctgcggtgatgagctgctcacatgggcattggatcctaaatctgctgctaacttcccagcttcaactaggacagtgaaagctcttactgaggttgaggcatttgcgttgtgtgctgaggagctgaaatttgtggccagtcagttcaggaggctccacagtaggcaagttcagcacacgttccggttctattcccagcactggaggacatgggcggcctgtttcattcaagcggcatggcgccgctattacaagaggaagatggccgagcagcatcgcaaggaagaagaggctgcaaaccggcaaagcagcagcagccaccaccctagcctcgcagcaaccatctacgcatctcgctttgcagctaatgcactccgaggagttcacaggctcagaagcagggccagcccgacaattgtgagattgccaaagcctccagaaccagattttgccgtcgatgaagctgactaacaagaagaaacacactgaaattgcatgtattaagttgtggattggaggcatcatgtagattatgtacaaaattcaaaaacagccagcagagtttttgcttgtaaaagccctgtaagtttgtaaccacgcaagaaccatcacggagtacatgtactttagtcttgcactgctaaatcccatctatagcatacagaaattaagc

SEQ ID NO: 7823 - DNA, 649 bp, Oryza sativa
  ref <308>: DATABASE ACCESSION NUMBER: AK105171
  ref <309>: DATABASE ENTRY DATE: 2002-08-28
agtaagcttagcacgaagcttccatggccacagattcttgagctgccgatcgctgtgcgtagcgcacgcttgacgctgacgctgacgccgacaatggcgaaggcccagctcgtcgcccggttctccgtcgaggtcgcgccgccgctgctgtcgtcgatcatcaggccccgccgccgccgcgggttcccggcgatgctggacacgatagcggaggaggagcccgacgcgccgccgctgccggccatagtcatggcgcgcgagctgtcggcgagctacgcgctgctccgtggcgtcgccgcggccgccgccgccgtggcgccagcgccgcctcctcctcctcgcaatgtgatggtcggcagcagctgcagctcgttggtcctggtgcgccgcgccgaggccaaggagaagcggtgcgtcgtcgtcgtcgtcgggagctccgccgcctccgccgccatcgtccacggcgagaagcggctccacctcgccgccgctccggcgtccgaagcagcagcgtgctccgagatcggcgcgtaaatatattcgatccgcatatatatacagtgatgctctcgttgtggttttaaacgaagaacgaaacgtgtcatactactacgtcctttcccatatataattttgagctaaccaacgt

SEQ ID NO: 7824 - DNA, 1276 bp, Oryza sativa
  ref <308>: DATABASE ACCESSION NUMBER: AK105172
  ref <309>: DATABASE ENTRY DATE: 2002-08-28
aaaagcaccccaggaagtccggagcaaaatggccgactttattgcgcgcgagaaggccgcgtacccggacctcgcgaacaagtaccagtacctcaaggatctccagtcccgcaagctgtaccatgaactcacgggcgagctcgaggtctttgtgaaggacccggcgacccacaagtcgccgcccaacctccccaagctctacaccgagttcatcaagtcgttccaggacaagctcaaccagatccgcttggtgtccatttgcacagagattagcacgcagtttaccgatccggccgaggcgcaggcattcctggagggcatcgcggcgcagctcaacgccaaggccgactttgaagcggcgctgctctgcaagatgcagatcgcgcggtgcaagctgcgccgcggcgcagacttccacgccgacgtcaaggccgagctcgacgagcagctgcccgtggtcgaagcgctcgtgggcgccgagccggtcgtgcactcggcgtactaccgcgtggcgtgtgattactacggcgcgaaagggccggccagcaaattctacaagaacgcgctcatgctgctcgcgtacacgcagtacgacgagatgccgccgcaggagcggttcgatctcgccgtcaacattagcatcgccgccatgacgggcgacggcgtcttcaactttggcgaagtgattgcgacaccgattctgcgtgcgctggaaggcacggacaagcagtggctctcggacttgcttcacgctttcagcaagggcgacattgacaagttcaacgctgtcatcgcgtccaacgccgccgagtttgacgcgcagccggcgctcgcgaccaagcgcgagtcgatcaaggagaagattgcgctgctcgcattgatggtgctagtgtttcagcgtccgtcccacgagcgcaacatttcgtttgccgagattgccgacgtcacgcgtctgcctgtggaccaagtcgagtggctcgtgatgcgcgctctctcgctcggtctcatcaagggctcaatcgaccaagtcgacgcgatcgttcgtgtctcgtgggtgcagccgcgcgtcctggacaactcgcagctggctgagctcgtctcccgtcttgacgactggagtaagaaggtcaactcgacgctgctgtacgtggaggaacagacgcccgagctgttccagtagactacccgcgaggagttcccgacacatccatgcctgggactcttgtcgcttgctggccgcagagaataccacgactcgttttgttttcgccactac

SEQ ID NO: 7825 - DNA, 776 bp, Oryza sativa
  ref <308>: DATABASE ACCESSION NUMBER: AK105173
  ref <309>: DATABASE ENTRY DATE: 2002-08-28
accaagcaaacgagaactaagcagaggagaaccaatccttggatcagtcacattacaaaccaaggatcacacgcggcttccctcctgcaatggccgctacttccggcagctgcttagccttcgtcatggcgctcgctctcattggcaccaacgtgagctacgccgctcgcctcctggcagacgccacggaatcagctactcccaccgcgtctcctgccgccgtccccggcagcatccccgccgtgccgaagctgcccgtgcccacagcgatgccaccaatgccagccgtgcccgcggccaccgtaccgcaggtcacgatgccacccatgcctgccgtgcccgcggtcaccttgccaccgatgccagccgtgccggcggtcaccgtgtccacggtcacggtgccacccatgccggcggtgccgaaggtcacgttgccgcccgtgcccgccgtcgttgtgccgaaggtgacgatgcccccaattccagccgggatccccaaggtggcgttgcctccgatgcctgccattccggccgccaacgtgccggtgccattcctcgcgccacctccttcggcgtagcgtaggcatgtcctgttcgtgcacgcttttgcattgctcttccaatgggtctctcatctcgtgatccgtcaggtttggttcagtcgtaatttgtgtatgtattgatgcctctgttgagattgtcagttccagttcggtttttgtatgttggatgttgtacagtgatcattgagtaatacagtgtatatatttcttgtc

SEQ ID NO: 7826 - DNA, 458 bp, Oryza sativa
  ref <308>: DATABASE ACCESSION NUMBER: AK105174
  ref <309>: DATABASE ENTRY DATE: 2002-08-28
atcaacaacacagctgcttaagagcttctgagccttatcccagggtcaggacagaacagagcagagaagcatcagaagaatggcttctctgaaggccgtgaaacctgccggacttgccaaggagccggctgccaagctcagtgagacggcgacgaagcccgcggccgccaagggcggcgtcaagaaggctgagcagaagccccgggagcccaagaagaaggtgaagagcagcaagccggcggcagccaaaaactgatagtggcaacaggagagatggagatagtacgagggtctccatcttacgctatgctatgggattatgaatcccgtctgtcccttcctctcgtcaccccgtgatgtcttgatcatgtagcagcaaccttagtcaagctggtcttgacggtgtgtgcagcccatgtgatgaatattacaaataagatggtacagttgtgacatcc

SEQ ID NO: 7827 - DNA, 919 bp, Oryza sativa
  ref <308>: DATABASE ACCESSION NUMBER: AK105175
  ref <309>: DATABASE ENTRY DATE: 2002-08-28
accaccactccacgcaaacccaatcacatcgccgccatcgtcgagcttgttctaaccttctaagctattagcaatggcgtcttcgtcgtcatcgtcgccgtcgaggccgttgctcaggcgggtgctctcgttcagggagccgctgctgctgatcccttacatcgtcggattcctcgccgccgcctcgtcgggattcttctacagctactcctccttcctccactcgttcgcccggtcgctcgtcccggcggccgcggccggcgccgtggtcaagtgcgcgtacttgtcggcggcggcggattccgacgagccatgctcctcctgcggcggcgaggatgaagacgtcgttgccgccgtcgaggaggaggaggctcacctgagcaaggtggaggtggaggagatcatggagcggatagggctgggcgtgggcggccatggcgaggggctgaaggcgaggatggggcgcgacgaggtgtcgaggctgttcgacgccgacgagcccagcttcgccgaggtgcgccgcgccttcgccgtgttcgacggcaacgccgacgggttcatcgacgccgacgacctgcgggccgcgctcgccaggctggggttccgggaggacgccgccgcgtgccgcgccatgatcgcggcgagctgcggcagcgtcgacgccaggatgaacttgttccagttcgtcaagttcctcgagaccggcctctgctaatcaaggctgattaattaattttttttcaatttttttttccgttttgggttcgttgcacggtgcacggctcagctcgtggcagaagatgagagagctagtggtgtgtgttgcaaattttcctctttttttttctttttccttctgcgaggcatgagttggtgctttgtgcaacaattaacggactaatctgtcaattaattgatc

SEQ ID NO: 7828 - DNA, 1757 bp, Oryza sativa
  ref <308>: DATABASE ACCESSION NUMBER: AK105176
  ref <309>: DATABASE ENTRY DATE: 2002-08-28
aataagcaaaccaatgatctactaagcatctaaccactacaagatggccgcggcgcctatgagcttcgcttttacgctgctcgcggcttgcatttccttcttgcaccacgcgccggccgccgccgcagccgctccggcgaaccagaccgccggctttctcgactgcctcgccgcgagcctccctgccggcgtcgtctacacgcacgcgtcccggtcgtaccagtccgtcctcgagtcctccatcaagaacctcctcttcgacacgccggccaccccgacgccggtcgcggtcgtcgaggccaccgacgcctcgcacgtccaggccgccgtgcgctgcggcgtcggccatggcgtctccgtccgctcccgcagcggcgggcatgactacgagggcctgtcctaccgctccctcgacgcggcccgcgccttcgccgtcgtcgacatggcgggcggcgcgctccgcgcggtccgcgtcgacgtcctcggccgggcggcgtgggtcggctccggcgcgacgctcggcgaggtgtactacgccatcgccaacaagacctcccgcctcgggttccccggcagcgtcggcccgacggtcggcgtcggcgggttcctcagcggcggcggcttcggcctgatgctgcggaagcacggcctcgcctccgaccacgtcctcgacgccaccatggtggaggccaaggggaggctcctcgacagggccgccatgggcgaggacctcttctgggccatccggggcggcggcggcggcaacttcgggatcgtcctgtcctggaagctccggctcgtccccgttccggccaccgtcacggtgttcaccgtccaccgctcaaggaaccagtccgccaccgacctcctcgccaagtggcagcgcgtggcgccgtccctccccagcgacgccttcctccgcgtcgtcgtgcagaaccagaacgcgcagttcgagtccctgtacctcggcacgcgcgccggcctcgtcgccgccatggccgacgccttcccggagctcaacgtgacggcgagcgactgcatcgagatgacgtgggtccagtccgtgctctacttcgcgttctacggcacggggaagccgccggagatgctcctggacaggggcaccggcaggccggacaggtacttcaaggccaagtccgactacgtccaagaacccatgcccagccaggtctgggagaccacctggagctggctcctcaaggacggcgccggactgctcatcctcgacccctacggcggcgagatggctcgcgtcgcgccggcggcgacgccgttcccgcaccggcaggcgctctacaacatccagtactacgggttctggtcggagagcggggctccggcggcggcgaagcacatgggctggatcagaggggtgtacggggagatggagccgtacgtgtccaagaaccccaggggcgcctacgtcaactacagggacctcgacctcggcgtgaacgacgatggcgacggcggcggcggcgtggcgagggcgaggtatgagaaggcgacggtttgggggagagcgtacttcaaggccaactttgagcggctcgcggcggtgaaggccaaggtggatcctgacaactacttcaagaacgagcagagcattccaccacttccgagttagaatgctgtggcctccagctccagccattcttctgctatagtaataatagaactagtcaaattctcatgtgttactacattataataaagtgagtatttgatagtttttt

SEQ ID NO: 7829 - DNA, 526 bp, Oryza sativa
  ref <308>: DATABASE ACCESSION NUMBER: AK105177
  ref <309>: DATABASE ENTRY DATE: 2002-08-28
tccgcctcctccttttttccctcctccctctctccccaccaccacttcttctctacccggcggcgccaatccgagccgcactgctcctcctctcctccctcaacccccgccaccactcctgcttctcctcctccgcgtcacaccggatccggccgcttggaggtcggggccgccagatccagccaccacgcgcggcagcagcgcccctcctcctttgcgtcacgccggatccggccaccacgtgcagcagcagctcctcctccggccttcttccggcagcagcaccacggcaacagctcctcctctggtcttcctccagcagcagtgcaaagccaaggtctgcatggtggggttctaaatggggttgggaagggcgtggagacgaacaccgccaaggtggaggaggcagtcggcgacgacctccaagggctcctcctaaaggaataaaacgctagctatgaacttgtagcttgaacaaacaaaatgtatatgaatcaaaaggtcacaaacaaggtatctaagcaat

SEQ ID NO: 7830 - DNA, 1115 bp, Oryza sativa
  ref <308>: DATABASE ACCESSION NUMBER: AK105178
  ref <309>: DATABASE ENTRY DATE: 2002-08-28
aaaagaagccaaaaacttgatcaaatttctgagcaactccgccactcttctcctccgatggccaccgccgcgcggctcctccccaagatccagtcccccgcctccccggccgtcgcggaggcgcggaggcgccgcccctccagtctccgattaggagttactagtggacccgcaagaactctgaagcaaaagcttgttgctaagagtgctgtttctgtggtggaaggtgaaaacgcatttgatggagtaaagcaagatactagaccaatcatagttatagataactacgatagcttcacgtataatttatgccagtacatgggtgaggtgggagctaactttgaggtgtaccgcaatgatgatatcaccgtggaagaaattaagaagatttctcctagaggaatactcatctcccctggccctggcacacctcaagattcaggaatatcattgcaaacagttcaagatcttggaccttctacacctttgtttggggtttgcatgggtttgcagtgtattggggaggcatttggagggaaggttgttcgttctccttatggagttgtgcatgggaaaggatcccttgttcactatgaggagaaacttgatggaacactgttttctggtctcccaaacccattccaagcgggaagataccacagccttgtaattgagaaggatagcttcccacatgatgccctggaaattactgcttggacagacgatgggctgatcatggctgctcgccacaggaagtacaaacatatacagggtgtgcagttccatccagagagcatcataacaacagaagggaggctcatggtcaagaatttcatcaagattattgaaggctacgaggccttgaattgcttaccgtgatccatttgagtcgaggttctggtacatgtattgattgatacggctatcacaggatgtaaatcatattaaatagtcctaaaaaacatcttcaatgaaaattacactgcaaagctgtacgatcaactctgtatacgtcttggttttctgtcggacatgcaaacttctacgtcctatattatcagttgttcagtttgtatctcaggctcacatttttattcaagttgaaatttatttgt

SEQ ID NO: 7831 - DNA, 543 bp, Oryza sativa
  ref <308>: DATABASE ACCESSION NUMBER: AK105179
  ref <309>: DATABASE ENTRY DATE: 2002-08-28
caacttaaaatttagtttatatctcgtatcttcctcgctcgcgccaaccaagaagcttgcaacaacagggagagaggttggagcaagaacgttttgcatttggagggagggattttgattgatggcggtgacggcgacgacggtggcggcggcgacgacgatgatggcggcggtggcggccgtgttcccggcagtggacgcggcgagggtgcgggggggactgcggcggcttctcgggtgtggcggcgcgtcgccgcccccaccgccgcaccagcacgagcacgcggacagggacatcgagatgggcctcgccgccggcggcgagaccagctcgccggcgaagtcgccgcatccaagctcttgacgctgcgtcacgtagcttccatttcttttttcttctttttttttccaacttttttttgtgccgtcttttgtgtgccgtcatcacaggttttgctactgtcccggttgctcctgttcgccacgtctgtaattttcagaatttatagaggtaaaaaaaaagaaaactgtacagattcttat

SEQ ID NO: 7832 - DNA, 532 bp, Oryza sativa
  ref <308>: DATABASE ACCESSION NUMBER: AK105180
  ref <309>: DATABASE ENTRY DATE: 2002-08-28
aataaaagaccaaaaaaaaaaaaaaactcacgagaggcgcatcggcggcggcgccgccacagggccaccggccgccgtcgccggcgatctgcagggtcaagcactcaagcccccgcagcctgcttcccgccggagacctcgtggggttggatctggcatgctgcgtgtatgcagggcaggccagcatgatccaccattgaaggatcgtgcgctgattatgggattaaacaagtgcgaggtcacatggccactttgaaatcaaacatttaggttcagaaatggacagcattaagcagttgaaagttgattccatctacttataacttattctagtcgaatctctctcttttttctctatcttcctgagaagagaaatcgtgtttcacttgcaacaataattcacatcttctgtttttttcatgttttttttttttgttacccatagttttatggacatcagcacatcacaaaatcacatcatcagataccactgaaatcagaaatcagaagcatgtataaatgattggagatg

SEQ ID NO: 7833 - DNA, 375 bp, Oryza sativa
  ref <308>: DATABASE ACCESSION NUMBER: AK105181
  ref <309>: DATABASE ENTRY DATE: 2002-08-28
caaggctgggattgtctcgcatgaagtcaaacgcgggttccttctaagggagaggctgctaaggcctgccactgtgaaggtctcaaccggctctggcacccaggagacgagctccccatctacagagaagcctgtggaggatagcaaagaagatgccgctgtctgaatctgctggaaactggaatcctggaaatccaaccgacaaaatcaggaaatcagtagcaagttatagctagagcaccattctttgggagctcattttttttactgtccataccatgcgaaggttttgtgttccaaatgggtgtctttatgtgtacattttcatagcgatttcaagctactatttttaaatgaatttcttttcccctgtgc

SEQ ID NO: 7834 - DNA, 657 bp, Oryza sativa
  ref <308>: DATABASE ACCESSION NUMBER: AK105182
  ref <309>: DATABASE ENTRY DATE: 2002-08-28
catctccactcctctcgcgaccaccaaccagcggcttcccgacggtggcggcgcacgtgggcgaggctgagggctagggcgcgaggcaatgcagatggcggtggcggcgagcaccgaggccctggcggttgcggccgcggcgacggcgagggcgcctcagcaccaccacatcccatcgcagccgaggtgggtggtcatcctgtactcgccgctgcacggtatggtggccgccgcgccgccacctcccccaccgcagttcgtcaagcacttcgcgccgccggcaccggtcaccccgccgccgcatccacaaccgcagcagcagcaggcgacgggcggccgggggtggatccggcggcgggaacagggacgagaaccgaacgagggctacgacgatttgggcgccgacgatgaggagcagcagcaggcagcggcggccgggggtggccccagcggcgaggtccggtctcttctccccagcttgctcccccgatccaacggcgagatccggcgaggtagcagcatttaatatgggcaaatcagtctttagtaaaatggccaaactttaccatgcatctaaataccaactagcaaaacttcaatgccaaatcttttgccaccaaaacatttgccaaaaaatttgccatagcaaattgatct

SEQ ID NO: 7835 - DNA, 849 bp, Oryza sativa
  ref <308>: DATABASE ACCESSION NUMBER: AK105183
  ref <309>: DATABASE ENTRY DATE: 2002-08-28
ctctcgcgcatccccgccgccggctaaaaaccccaagccctcttcctcccctcccaagcgctctctctctccccacgccatggctggatccactagcggcggcggcggggcgctctcggcccaggcggcggctgccctcggcgaggggatcgggctggtgttcgggcgctggacggcgctgcagatggcggtggagaaccagtggggcggccgcgactcccgcgccaaggccgaccagctcgccgaatccatcctctcgtggttcgccaactccaagggtaaacattattatgaagatttggtggatatgatgtatgacacagtgtccaaatccttcaatgcggactttgaggatggtagtgttgaagaggtcgctgaacaattgttgattatgcatgaagaatgcctgcaaagcaactattcttcagttgagaagcttaggaactcacgtgctcaagggaatgctgtttcccagagtagaaagatggtggttgatggagacgatgatagctcagatgacgaggacgacgatgacgatggtgagccttcgatgatggataatgaagcaggcagcgcggagaagatggcggtggacgagccaaaaccttccaagcctgttcctgacgctgatggttggactacagtgccacctaggcgtggtcggggcaagaattgaaagtacagaagcaaaaaccttggcaaagactttgcacttgcaaagacagtttgccaggaggttctcagtgtcaagttttgttctagttttttttcgagggatgattatgttgtagtatcctttacttgaactgagctgtaatcgtgtgactgatctataattctacattcagg

SEQ ID NO: 7836 - DNA, 377 bp, Oryza sativa
  ref <308>: DATABASE ACCESSION NUMBER: AK105184
  ref <309>: DATABASE ENTRY DATE: 2002-08-28
aaccctagcccagaaattccccatatctccgccgccgcggcggacgatgaggcgacgacggcgcggccgcttggaactgcgggaggcatccgcatccagctccccgcatgagatcaacaagcggcgactgggcacgagagctggtgtgcagcggcgcggctacgcggcagggacacgcgcgtggcaggcggcgagccagcaggcagcaggagcgatgtgggaggcggaaggcaagcagcagcagcaagattctatgcatatctatcctctccctgattcaattgattattgccttgctgaatattgatacaatgttgtgacgtacagtatagtgcgattagtatgtgtccatgagacatatctctttttttttcctc

SEQ ID NO: 7837 - DNA, 619 bp, Oryza sativa
  ref <308>: DATABASE ACCESSION NUMBER: AK105185
  ref <309>: DATABASE ENTRY DATE: 2002-08-28
aaaaagcctcgttcgtcacgtcggttggcaccctccccgcgccgcgacacgacgcccgactccgactcgccgccggcttctccccttcgccatctctctcgcgatctcgccgcgccctcgccggaggagcgaggaggagatggaggcgaccaagacgcgcggcaccggcaatgcggctgcggcggcggagaagaggagggggcacggatcgacggcgctgttcgtggcggtggactacgccttcctgctcgccttcgccgggttcctctcctacctcgtcgtctcccacctcctcccctccgtcgcctcctcctagatctgctctgttttccctgtttttgttatgtttctttttttttttcgtttgctcgatcggatccgacgcgggtgacgtcacttcagatcgcctcgtcgtcggatgccatgacatctccgatgtgtaattccgtgtaatgggatgagaaaccagagctgcagtttcttggaaatttggcatggatttcagttcttgcttgcttgctcatttgttcttcaattgttcatgtcctggtcccgattggttggcctctggatctgatactgttcttgtcaatgcaaatttctgaatgccattgttgcc

SEQ ID NO: 7838 - DNA, 682 bp, Oryza sativa
  ref <308>: DATABASE ACCESSION NUMBER: AK105186
  ref <309>: DATABASE ENTRY DATE: 2002-08-28
actgagcaattcgcgtccaagtccccaagtcttcctttctcctctcgtctccagcatgccgaaccctcaggtgtttttcgatatgaccgtcggcggcgtgcccacgggccgcatcacgttcgagctctttgccgacaaggtcccgaagactgcggagaacttccgcgcgctttgcacgggcgagaagggcattggccgctcgggcaagccgctccacttcaagggctcgtcgttccaccgtgtgatccccaacttcatgtgccagggcggtgacttcacgcgcggcaacggcacgggcggcgagtcgatttacggcgagaagttcgccgacgagaacttcctgctcaagcacaagggcgagggcattctctcgatggccaacgccggccctaacacgaacggctcgcagttcttcatctgcacggtcgagaccgcgtggctcgacggcaagcacgttgtgtttggccgcgtcgtcgacggcatggacgttgtcaagaagatcgaggccgttggctcgcagtcgggtacgaccaagaagccggtcgtgatcgccgactgtggtgagctctaagcgactcctcccacgccgtccatcgcacctccgtcctctcgtcggtatgataccccctccaatgaacctgttccaaaagaaaaaaaaaagcccaataaaaaccaacgttgg

SEQ ID NO: 7839 - DNA, 492 bp, Oryza sativa
  ref <308>: DATABASE ACCESSION NUMBER: AK105187
  ref <309>: DATABASE ENTRY DATE: 2002-08-28
actgtgctgctgttcgtggaggaggaggaggagatggcggactgggcgccggtggtggtgggggtggtgctgttcgtgctgctctcgccggggctgctggtggagctccccggcacgcaccgccacgtcgacttcggcagcttccgcaccaacggcaaggccatcttcgtccacaccctcatcttcttcgccgccttcgccatcctcaccctcgccctccacctccacatctacaccggctagtcacctagtactcttctccaatttccatccatctctctcattccctcctcccttcaatttcacttcctctctctcctactcctatgcatactaattacttagtaatttctagctagctgctctgtaacaagggaaatatttactgcaactgtactatgctagcccgctactgagtgcaggaaactgtaagtcgattgaagctcttctgttgaatctagctagcaaagaatgtcaatttcttgttgctgc

SEQ ID NO: 7840 - DNA, 685 bp, Oryza sativa
  ref <308>: DATABASE ACCESSION NUMBER: AK105188
  ref <309>: DATABASE ENTRY DATE: 2002-08-28
acaacaaccgccacaaaatacaatgcaaaacctggcattcataattcatacaaaaattattaaaacaagatcgatcgatcgatcgatcaagagttgcatcccaaaataaataatccaccgcaaaagctacaggcgccagcctccaggtagcttcgctatagcccatcaaacaagcaagaaagggggagagaagggaaggagaggtcgtcgtcgccgtcgacgacgattcaccggccatgtgctgctgctgcggcggcggcggcgacggcgacggcgacggctgcaagtgccggccgctggggtggctgctgggtctgcctttcgcgctgctcgccgtcctcgtctccatcgtcggcgccatcatctggatcatcgggctgccgatctcgtgcatctgcccgtgctgcctgtgcgtgacgctggtgctggaggcggcggtggagctcatcaaggcgccgctccatgtcatgacctggttcacctccaagataccatgctagctatagcttcttgatttgctctaccatttgatcagatataaacagaatgatcagtaactgatcagtaagtataccgattatttattatttatttatgcatatgtactctggcttggagatatgattaatttgtcattccaatcgagattcattcggtgaaaagatatactctgtggtgctggttc

SEQ ID NO: 7841 - DNA, 1012 bp, Oryza sativa
  ref <308>: DATABASE ACCESSION NUMBER: AK105189
  ref <309>: DATABASE ENTRY DATE: 2002-08-28
tcgcctccgcccaatgccattccgccgcttccccgctgagagatcgatccccaccgcgccgccgccgccgcagccgcagccgcagccgtcgccatgtcctcctcatcctcttcgctgctctcctcgctcgccacgctcggcctcgggtactcgatcgccatcgcgctgggattcctcgtcctgctcgcgtcgctcctcctcgcgtcatacttctgcttccgccgcgggggcggcggcgggcacttctccggcgtgctcaccccgagctccagctccagccacctctccatcaccgtcccgcgcgtgctcttcgtcgcggaggggtccgagtcccccgacgcctactcctcgggcgtcgcggccgcgtcgtcccccgtggggctcgaccccgcggccatcgcgtcgtacccgaaggtccccttctacagcggcgccggcgcggacgccgacgccatgtgctcgatctgcctcagcgagtacgcggacggggagatgctgcgcgtgatgcccgactgcaggcacaggttccacgtctgctgcctcgacgcctggctgcgccggaacgcgtcgtgccccgtgtgcaggtcctcgcccatccccacgccggtggccacgccgctggcgacgccgctgtcggagctcgtcccgctctcgcagtacgccgccgatcggaggcgcagcaggtgacggacacattggtgcaattcggtgctcttaaaaactggagtactactatattgctcttcttttttttatccttttacgtttattaaggatgtaaagtttatgtattgcttgattggtcaggcgggctttaggggaggtttgactgtagggggttgtgcttaggttatttagagaaggtaattgtttgtttgatattactatattacttcgagcaaattttgtcatctagaagtacatgtcttgagtaaggaatagttgtacatacattgtgtttgtttctgtggcagagttcctcatgatattctaatgtataatttccgttgct

SEQ ID NO: 7842 - DNA, 368 bp, Oryza sativa
  ref <308>: DATABASE ACCESSION NUMBER: AK105190
  ref <309>: DATABASE ENTRY DATE: 2002-08-28
gtcatgctctgcaagtcctcgccggcgtgccccaactgcaagttcgtgcagccgtcggtgccggcgccggccatgccgcggacgccgccgcgtcgccggctggaggccaccgtcaagccgctggagacgctcagccttctgcactaaagcaaattaagaaagatgacagtagaaaatgcgggggagagagtgacagacagcaagtgaaagcagctacaaatgtgttaattactactcagcagtagtgatgatagatgagctagattatgggtggggtgtgctgtgtgtgtggatcaatttactgtatgagtgctgcacatgctacattgcttcaatgcaaatgaggcgatcaagtagtaaatgggatt

SEQ ID NO: 7843 - DNA, 768 bp, Oryza sativa
  ref <308>: DATABASE ACCESSION NUMBER: AK105191
  ref <309>: DATABASE ENTRY DATE: 2002-08-28
tacgtgcagtaccgccgcgccgtgcggctcgcgcagatgcggtggctccactttgactcggccgcgcccgcgggcaaaggcgccgacgttacggcagcgcccacgacggcgtcgttcgactggtcggcgtccgacacggccatcctcctggagcagcagcagcaccagatccacttgctgtcgcccatcatcgaagagcgcggcagcgagtccttggattcgctcggctcggcgcgccgcgatcaacggcagccgccgcacgccttcaaaacatacggcagcatcgagtttccgtgagaaacggagcaagaagattctgtccgacgacgccctcgaaatgctattatgtaaacacacgccagcacacccagatgtggtactctccctccccctctccatgatacacataccaagcaagcatgccatataaaagggaacactcccggcgcctcagcgtcgtccgcaaggccgtcgtttcctgagccgttgatagacaaacagatcgtgtatataatatcttgccactgtgacgggacaaaccaagtgacgcaacgacgccaggcagggtgaacactcgggaatgtctcgttgcagacagggaagcgtcccagttggtgttgtcatatttattcgagggctcccccatcttgagagctgcacgattggtgaaatgaagtggaaaggattgtggtactgaagtactacagtaagtagtatggatacatttatcttgagaaagggctatggacaaaatctctatctactggg

SEQ ID NO: 7844 - DNA, 510 bp, Oryza sativa
  ref <308>: DATABASE ACCESSION NUMBER: AK105192
  ref <309>: DATABASE ENTRY DATE: 2002-08-28
aaaaaaaaaaaaacatctcccttgatcccctcttgcgtggatcctcccctcttgcgcggatcctccaccagtgactggatcttgtcctctctctggccgctagcggcggccgcggccttccccaccgtgagcagccacggcggctccctccactacttccgatgggtggatccggcggtggcggtggcggcggccgagggcggatccggcggcagtcggtggtggtggcgtcggtgacggccgcggcctctcttctgctttcggtggcggtggtggcgttgggtggatccggcggcagcggtggcagcggcgagtggatccggcggcgatggcggcagccgagggcgattcggcagcagtcggtggtggtggcgtcagtgatggccgtaggtggatccggcggcggtggcggcggccgagggtggatccggtcgccttttttttcgcccgaatttgtttctttttcgtgaattggacattgggatcaagttcatgagctttactcggatt

SEQ ID NO: 7845 - DNA, 1364 bp, Oryza sativa
  ref <308>: DATABASE ACCESSION NUMBER: AK105193
  ref <309>: DATABASE ENTRY DATE: 2002-08-28
caaacacacacacgcttccatcccatggcgacctcgccggcggcggcgccgccgcggcgcgtggtgatttgcggcggcggggtcgtcggagcgtgcacggcctacttcctctccacccacgcggcctccccgactgtcccgaccctcgtcgagaagtcgtccccggcctgcgccgcctcgggcaaggccggcggcttcctcgcgctcgactggtgcgacaaaaccccggccctctccgcgctcgctcgcgcctccttcgcgctccaccgccgcctcgccgccacgctcgacggcggctccgcctacggcttccgccccgtccacaccctctccatctgcctccccaccgacccggaccccgccgccgccgccgccgccgcggcgtccccgctgctccccgcctgggtcgaccccgccgcgtccgccgcgccgccgagggagctcgggacgacggacaccaccgcgcaggtccacccgggcttcttcaccaaggccgtcctcgccgcgtccggcgccgaggtggtcatcggcgaggcggagcgcgtcgtcgtccgggacggccgcgtcgccggggttgtggtcaggggccgcggcgaggtggacgccgacgccgtggtgctcgcgctcgtcccctggtcggggaggttcgagatggtcagggaggtgttcgacgtgtccggcctcaaggcgcacagcatcgtgctccggccgcgtgagcccgaaaacatcacgccgcacgccctgttcctcagctaccagccagagcccggcgccaagatgctcgacccggaggtctacccgcggcccaccggggaggtgtacatttgtggaatgaccaaggatgaggaggtgcccgatgacccggagacgatcaccggtgagccggactcaattgcgatgctgcacaagatcgccgggagggtttccggccagctgaagagggaggaaggcgcggaggtggtggcggagcaggcttgctacctgccgtgcaccgatgacggtttgccggtgatcggggagatgcctggagtgaagggttgctatgtcgccaccgggcacagctgctgggggatcctcaatgctccagccaccggtgccgctctcgcagagctcatcctcgacggcgatgccaagatcgtcgatctcgcgccgttcagcccagcaaggtttctcaagaagaagagtaagcgtggagtttagtgtagattgtgatgagtttgcttccttgatgccatgtctggatgaataaatttgttctctgtctgctggtatccttcattcctttgtgaggactgagagaacaaatatgtacaacaatgtactgtactgatgaataataagtaaaccatgaacacttgcatgag

SEQ ID NO: 7846 - DNA, 907 bp, Oryza sativa
  ref <308>: DATABASE ACCESSION NUMBER: AK105194
  ref <309>: DATABASE ENTRY DATE: 2002-08-28
gtatcagtcggtattcagtacgcactacgcagcagcccgtgagtcgtcgtgaccaaacgtatagtatactagctaccaaaagcagtacggtgcctggtttcattgtaagcagccgcgccgagtcagtagcgtagcgtgagcgcggtgaagatggccggggaggcattgaaggaggcgggggcgacgcccgccgcagcgaacgcgggggaggagaaggccgtcatcccggcggcttcgacatcgccggtgatctccaagaccgatgatgacacggagccgccggccgatgactccaaggctctcgtcgtcttcgtcgagaaggttgctgataaacctcatgctgagaaggcaacagcaacagcaacaccaacaaggacctcaaatgacagagatattgcccttgcaaaggtggagacagacaagcgagaatcgttgatcaaagcatgggaggagaacgaaaaggcaaaagcggagaacagggcctctaagaagttattggatattatttcatgggagaacacaaagaaggcagtaataaaaactcaactgaaaaagaaggaagaagagttggaaaggaagaaggcagagtacgctgagaaggcgaagaacaaggaagcaatcgtccataaggaagctgaagaaaagagagcaatggtgatggcccggcgcggtgaagaagtgatcaaggccgaggagatagcagctaagtaccgtgcaaccggagtgacaccgaagaaacatatcgggtgttttggggcataagaaacatcgatccgagccatatacttgtttttctttctctttcgaaagttatttgtgttgggttgtaacttgtaagtgtgtacttttttttctttggaaaaattggaaccatgccattataattttgtaaaatttgagatatgct

SEQ ID NO: 7847 - DNA, 1138 bp, Oryza sativa
  ref <308>: DATABASE ACCESSION NUMBER: AK105195
  ref <309>: DATABASE ENTRY DATE: 2002-08-28
ttatagatctacttgttactgtctggtttactacatatgagtttttccctaaaaaaatctcgttgttactgtctatagatcactatattactgtctggtttactgcatgctagctttgtcaggagaaatctgtggttactgtgtcgttactgtctatatacctccctgttactgtctggtttactgcatgtgagctttgtcttaagagaaagattttgttactgcatttcaactgttccgttactgcatttcctgtattattttaccgtctgatttactgcatgtgagcttgttcgagagagcatttgccctagcaatcaccatgttactgctagctcttgttactgcatttcaattgttttgttactgcctttcctgtactattttactgtccgatttacaacatgtgagctagttcaagagagcatttgccttaggaatcaccattttgttactacattttaactgttttgttactacatttcctgtactattttactgtctgatttattacatgtgaacttgttcaagagagctttttccctaggaatctccatgttactgctgactggttactgcaagtatttttttactgctcattggtgtatgtatcgcgtatgaaataactgtcggctgtctaagatattgcatatgagttactacaaataattagcggtttcaataacaaaggggagcggttacaataacaaaggggaggaagaaagacaaagaacaaccggtgtcgaaacaagctgagagcaagcagccgaaagaccatagcaaaaggtgcagcgtctgtcacaaaattcaaggacacaatgctagaacatgtcctagtagaagcaaaagacaaaaaaacaatcaaccgccaagcaatagatgattatgacgaagaaaaagaggaagaagaataagtgtacaagtgatagatacattgcttctgacttgtaggacatttgtaatatgttactgccatagtatataactgtgactgtctttaagcatattggttgctaaaatgttttccttcatcacgatgcccagttagggcagcacatcactgctatataacatgcttctagtactgctatattgtaatgttttatcatgattccagttgaaatgacatgttaccagt

SEQ ID NO: 7848 - DNA, 1316 bp, Oryza sativa
  ref <308>: DATABASE ACCESSION NUMBER: AK105196
  ref <309>: DATABASE ENTRY DATE: 2002-08-28
gaacacagcaagtgagatcgatggatgcggctgcggtgatgcagaagcagctcaggcggctccgcacgctcggccgcggcgcgtcgggcgccgtggtgtggctcgcgtcggacgacgcgtcgggggagctgctggcggtcaagtcggcggccggcgagggcggggcggagcagctgcggcgcgaggggcgcgtcatgtcggggctctgctccccgcacatcgtcccctgcctcgggtcacgcgccgcggcgggcggggagtaccagctgttcctcgagttcgcgcctggcgggtcgctcgccgacgaggccgcgaggagcgggggccgcctcgcggagcgcgccatcagcgcgtacgcggcggacgtggcgagggcgctggcctacctccacgggaactcgctggtgcacggggacgtcaaggccaggaacatcatggtcggcgccgacgggcgggccaagctcgcggacttcgggtgcgcgaggaggactgactccgagcggccgattggtggcacgccggcgttcatggcgccggaggtggcgcgaggcgaggagcagggaccggccgccgacgtgtgggctctcggttgcacgatcatcgagatggccacaggccgcgtcccgtggagcgacatggacgacgtcttctccgccgtccaccggatcgggtacacggacgctgtgccagagattcccgaatggctctccccggaggcgaagaatttcctatccagatgcttcacaaggaacccaagcgaccgccccactgccgcgcagctactggagcacccatttctcgcatccgcctccagcgacatcgacgaaacggcgccgaagcacggctgggtgtcccccaagagcacgctgaacgccgaatgctgggaatctgatgaagacgacgaagtagaagaaggcatgtcacagagcgcaaccaagaggatcagcgcattggcgatcacctgctcggcgttgccggactgggactccgaggatggctggatcgacttgcaaagcgacccatctgaagtttcggaaacaccggcgcccatggtggtgactactgcagatttcggtctttggtgggaggaagcattggacgcggagattgatctccatttcgttgacgtggacggcgatggctatgttacgcgaactgtacgcgcgcgtggtttcattgagtacgacagacaactgagtgtgagagttcgcggtgatatgccgttgtgcccggttgattgccaccggagcgacactgtaaaattcggttgtcattgtaacgggaacagagtaataaatttcgagtctgcacaaatt

SEQ ID NO: 7849 - DNA, 791 bp, Oryza sativa
  ref <308>: DATABASE ACCESSION NUMBER: AK105197
  ref <309>: DATABASE ENTRY DATE: 2002-08-28
aggagacgcagaagcgcgcgagagaagagaagagaagctaagctagccatcaaggtctcgaagaggaagcaagagcgcgaggaggagaggaggaggaggcggcggcggcggcgatggggatgagcatcgcgcaggcggtggcggcgctgatggggacgtgcgcgaggcggctgtcgcgggcggcgcggcggctgcacctgcggccgcgggaggggatcgcggcgtcgttctcgtcgcgcgccatcgtgccgttcctgggcggcggaggcggcgggaagaaggctatctcgtcgtcgaggaggaggaggaaggccggggcggagctgagcttccgcgcggaggacggggtgtggaggaaggagatactgatgggggagcggtgccagccgctggacttctccggcgtgatctactacgacgtcgaggggcggcgcctggagcagccgccgccgccgcgctcgccgctgcgcagcccgctgccgtcgtccatcaagctcgcggccaacgccggcggcggcggcggctactagccggagatcgacacgtacacccgctctctcgcaggcttgcagcaaatctctgaacttttggagccaaagcttagccagccgccttcctctgctttcctgcgacatagtaataggtctctgcttctgatgatctgttcttcttcttcttttttttttattttacttcctttggtgtgcgtagtgattagtgatcactgatcagtatcagtaccatgtaaaagagtttatggaagcttagcttgatgctcttcagaagttggc

SEQ ID NO: 7850 - DNA, 879 bp, Oryza sativa
  ref <308>: DATABASE ACCESSION NUMBER: AK105198
  ref <309>: DATABASE ENTRY DATE: 2002-08-28
agagtggagctcgccctcgccctcaagggcctcagccaggacctcgtcggcatgagcgatctcctcctcgcctctaacccggtgcacaagaaggtccccgtgctcatccacaacggcaaacccatctgcgagtcgcggatcatattagagtacatcatcgatgaggtcttccccgtcgacggtgccgccctcctccccgccgacccctatgactgggctgtcgctcgcttttgggctgcctacatcgatgacaagtacattttgtcgcgccatgggcgccgatgttcaaggggaagacagaggaggagaaggcggaggggataaagcagatactcgcggcggtggaaacactggagggagccttgaagggttgctcaaaggagaaacccttcttcggtggcggcaccgttgggctcgtggatatcatgctgggtgcccatatccctggggtgagggcgaccgaggttctcaccggtgccaagatcttcaacgctgcaattaccccccttttggcctcatggacggagcgcttcggtgagcttgacgctcccaagaaggtgttgccggatgtcgacgggatggttgagtacgtcaagaggaggcaggcacagtgggctgccgctggtgctgcggcggcggcggcttcaaagagctgattggccggcattgcgacgtactttttccgtctcaaaaaaaaaaaaaaaaaacaaattctagagtttgattctttttaggacagaggagtctaaaactcccgtttttgcttaatttggaggaaataatgtgcttgttgctgaaaagtagtggagaccagacagattaattagttgcttatttgacttggttgtgagtgtagaataaatgtttctgttagtcgct

SEQ ID NO: 7851 - DNA, 609 bp, Oryza sativa
  ref <308>: DATABASE ACCESSION NUMBER: AK105199
  ref <309>: DATABASE ENTRY DATE: 2002-08-28
aacctgcgcctcctcgtccctcttgcccccctgacccgccgcgtccgccatggcccagcccgccttcctctccgccctccgctcccgcctccgctccccgcagccgcaggcgccggcgctcccccacctccagcccccccgccgcggcttccacgtcgagctcggcgcacgcgagaaagcgcttttggaggaggatactgctctgaagaggtttaaatcatataagaacagtgtgaaacaggtctcaaaggttgggaatattcttaccggcgttgtcctttttgcctgcgcctatgagatcgttgcactggcaaatagttaaatatgaaggaatggacactcgtgtgatcactgaaatccaccagaaagtgattcatcagcataaattggcattttgtcagcactagttctgcacctccggtgttgatggtaatatgtaaaataaaacaaactaggttaaccttctttcgtaagatctttgtgctctcttggcctagtgttacatgtaaacgaattgatgtatgcgatgaatgatcatcgcctttgttttcttttccttgacttgcacgctcaaagcacaataaaatagttcatctcggtttgcttgct

SEQ ID NO: 7852 - DNA, 724 bp, Oryza sativa
  ref <308>: DATABASE ACCESSION NUMBER: AK105200
  ref <309>: DATABASE ENTRY DATE: 2002-08-28
cgtttgccccaagtcccaagcagagccgtcgcccgtagagttgccgccgcgttgttttagccgccgtcgggtgcgcacggaggagaggaatcccgtccaccccttcgcagccgccgaacaccatcggagcgccgtcgccgtcggggacccgagccaagccgccgtcgaacctcatcgctggccgtcgttcgtcgtcgtccgtcgttgttctttgcaccgcttgtcgtttccgtcgttgcgaaggttcgtgcgtgcgttagaagtggtcaagaagattaattgaagaccgattattgcaagttgaagagaaaggatccggaaagagcagacgtttggcttataccccagttgagctgcctgtgggagtggagctgaagtcatcgctagaccgttattccgctgctgttttcttttctttttgtggatgatgaggctaatgtttggcactcatgcttaatggagagctggatgaggagatctatatggacattaagacagcttttcttaatagagagctgaatgaggagatctatatggatcaacatcaaatggacattaagacagcttttcttaatggagagctggatgaggagatctatatggatcaacctgatgggtttgtagttaaaggttaagaaggcaaggtgtgcaaattgttgaagtctttgtatagtctaaaacaagctcctaagcaagagcatgagaaatttgatagaacattgac

SEQ ID NO: 7853 - DNA, 809 bp, Oryza sativa
  ref <308>: DATABASE ACCESSION NUMBER: AK105201
  ref <309>: DATABASE ENTRY DATE: 2002-08-28
agaaggaggcgaacggcggcggcggcggccgctggcggagtacgcggcggagctggaggcggtgagcttgagcgtgcgggcggcgccgccgctgcggctgaaggcgctggtgcgggcgtgccaccacgcgctggccttgttcgacctcctcggcgtggaggccgggttctggaagacggaatacgcggagcggctggtggcgctggagcgcgcggcggaggccatggacagcgcggaggagctcgtcgaccgcgacgtcgccgccggccgcgtcagggccaccggcacccactccaacaacctcgtccgcgtcaagcgcggcatcgagctcaagcgggcgctcttccagctcatgctcgcgcagctgcagcagcagcgaccaggaggaggaggagtctccttcgacggggtggtgtccatggcgtacgccgccgtgttcgcccggtaccacgacaagaacgtgcagagcaccgtcgccgactccatctgcgccatccccgtcaagtccatttccgacttcttcgccaccatcaatgagaccgatgaatctgcggctgcagagatgcaaaagtacatcgatgcagccaacgggatcatcagctacatcgacgagctattcgcctccagaggcgtcagcgcggatttctgaagtctgtcattcacacatcatgcaacagggatgcttaattatctgcagactatgcgaacggtggtcaataataatgtagtattaatatttacttatactctgcctatggtcttctggacctacagtatatatgcagtacaacatggtgtttttcctcttc

SEQ ID NO: 7854 - DNA, 504 bp, Oryza sativa
  ref <308>: DATABASE ACCESSION NUMBER: AK105202
  ref <309>: DATABASE ENTRY DATE: 2002-08-28
gaaaaagaaagaaagcaaattaaagtaccaaattaatttgcatgcataaaagcaggcggatttggacgtttcacgggtcgtttatgggttgacggttgaagttcatagattttctaaatataaaaaaaataagcaaattgatagatcgatttttaattacccgagttcactttttcttatctttttttgcaaggagtaattaatctgaattactttgttgcgcacgaaaaccatttcttcaaccttaaaaaaaagaaaaaacttttttcccaactacaagtccatgatatcgtactatacctaccccttataaagacccagggcccacacgccatatagcaacaagacacagcagcagtggccactctcacttcgatcatgactcgactggagagctaattagttaattaccctgattaattcttccacacttaactacacatatatacaagagttacttaattaattaatttcatttttcccgcccaaaatagatactgtgag

SEQ ID NO: 7855 - DNA, 700 bp, Oryza sativa
  ref <308>: DATABASE ACCESSION NUMBER: AK105203
  ref <309>: DATABASE ENTRY DATE: 2002-08-28
tccttcagacggcgatggcggaggaggcagcggcgtgcgcctgctcgtggccaacgacgacacggcgctcctgtccctcgcgcttgccgagatggcggctgcctgcgccgacctctcgcgctccgtcgcgcggctgtctgcgaggtgcgccgacccgctgctccgccagttcgatgcccccttcgccgccctcgtccgtggcggcctcgccgacctgcaccggctgcagtactccggggcaaggaaatggaccggaagatgcggaatatgcagcggctcgtggcgcttccacggcgctcctgtcccaggagctcgacgtgctcgccgagctctagcaggcgggctggggggggggggggctgtgcagatcaggcaccggacggaagggcacggccggagaaggagaggctgccaagaagagggataggagaggaggcggagcgacctgacccgtcgcgcatcagcggttgcgacgtacggacggcgagagagacagacgaaacgagggcgcgcgtcaaggcgtcttcaaaagaaaaaaaaaaacaagataccgctgcctatgacaatgacagggtgggcccgccagccactagctccctcccaattcaaatgcagatgtgcgcttccgtgtccaacgttaaaatttatgaaaaaattaaaataagttaggccttgtttaattctatgggactaaatccat

SEQ ID NO: 7856 - DNA, 730 bp, Oryza sativa
  ref <308>: DATABASE ACCESSION NUMBER: AK105204
  ref <309>: DATABASE ENTRY DATE: 2002-08-28
atccagccatttcatactcactagagatagccaccagctagctagctccaccaggtaccaatcacctatagtcactagctagctcgatccagctcctcacctctccagcagccgacggcaatggcgaaggcggtggcgctggctgtcctcgtggtggccgtcgcggcggcgctgctggccgtggcgccggcgccggcccgcgccgtgtgcaacatgagcaacgacgagttcatgaagtgccagccggcggcggcggcgacgtcgaacccgacgacgaacccgtcggcgggctgctgctcggcgctgtcgcacgccgaccttaactgcctctgctcctacaagaactcgccgtggctcagcatctacaacatcgaccccaaccgcgccatgcagctgccagccaagtgtggcctcaccatgccggctaactgctaataagtttgctactgttttactgccaagatttgcaggcactgcaacaaaggacataacgtacgtaatatgtgtgcctcctactcctagcttgcgtttgatatagaaaattaatagcataaaatggctagaactgctacagggatagcctagctgtatgacaactgtatgttcttgtcttatgcttgtgtggaatgtgtatgtttgtctgtgagagtgttgtcatgtgtgtgtggttggccggttaatagtgcttgttgcattgatcgcatgcctaatatacttggggtttttctat

SEQ ID NO: 7857 - DNA, 592 bp, Oryza sativa
  ref <308>: DATABASE ACCESSION NUMBER: AK105205
  ref <309>: DATABASE ENTRY DATE: 2002-08-28
gtgcacagctctcatctcgcagccaaaaccactttactatctcgcagccaacctgtagcaaaagctaatcaaactagctatcaatcatgagctccggcggcggcgtctgcggcggcggcgatcgtggacctggcgcacaacggcaacctgcgggcgaactgggtggccatatgcatgcagttccacggcttctgccagcgaaccagcggatccgtcgttgcctccttcctcaccgtcgtcatcctcatgttcctcgtcatcttggccgcctgctctatccgcaagcgctagcttaatcatcttgctagctaattaaaaaagattgtgcttaattatacatgcatataatatttacgtttgatttctatctgcatgcgcgagcgagtgcgtttttattttcgaattgtaatcctcttctgtactacatgcatttctttacttgtgagcattggcattggcgagtgatcgagcagtagtgcattgtaaaagttcacctgtgcatctatcgtttcactttctttctttcttgtaaaagatcaacgttgtgtgatcatcgtgctctgtaatctgaattgaacagcttgtttaaaac

SEQ ID NO: 7858 - DNA, 793 bp, Oryza sativa
  ref <308>: DATABASE ACCESSION NUMBER: AK105206
  ref <309>: DATABASE ENTRY DATE: 2002-08-28
aaaatctatttcagcccaatcccccgatcctcttcctctctctcaaagcgaccgcggcggcgacagagcctggcgacggcgccctcctccccccctcccgcgcgcgcgcagcggcttcccgcgccgctccggtcgaccaccggctccaccccgtcctcctctcctcgttgcggtggcccccttcctcggcagcggtgatgacctcctcctccatccccctcttgcggtggtcgagcagcggcggcgacgacgccctctccaagcggctgtggcggtgccctcccccaccgtgagcagcggcggtggaggtgccctcctgcggcttcccacgggcggatccggcggcgacgtcggcttcccgcgtcggtccagtcgaccaccggctccaccccgtcctcctctcctcattgaggcagcccccttccccggcagcggctacgacctcctcctagttgggcgcaggagtaggcggcggttggagcaggtgttgcggtggcggacacgacagcgacgagctggtggcggtggcgggcacgctagggctcctctctttgtgatgaatttttaagagatttgtttttcatttttttctctttttagttgattttccccttgtgattgaatctgtgatgaattggcttcccaacgaggtgaatctgtgatgaatcggctgcaaatccgtgggtggtttagtgggtttctttttttttttttgcgatttcttccatccctaacacaatcgaattaggatgtacaggtttacggtcgaatacacggacaaaaaattaaggtg

SEQ ID NO: 7859 - DNA, 821 bp, Oryza sativa
  ref <308>: DATABASE ACCESSION NUMBER: AK105207
  ref <309>: DATABASE ENTRY DATE: 2002-08-28
acattgggattccgccgaagccagcgctgtcggaaaggaaccccccacttttagattctgcgcggcgccccctagcctctctattcccatctgaagccaaccccctccacaaccaccatgttcatgtttgactggttctacggcatcctcggctacctcggcctgtaccacaagaacgccaagatccttttcctgggtctggacaatgccggcaagaccacgctgctgcacatgcttaaggacgaccgtgtcgctgtccacgagccgacgcttcacccgaactcagaggagctgattatcggtaagctgcgtctccgcacgttcgacttgggcggccacgagaccgcgcgtcgtctctggagagattactttgcgaccgtggacggcgtcgtgtttgtcgttgacgctctggaccgtgagcgtttccccgagtcgaagcgtgagctcgacacgctgctcggctacgacgaactcgcgaacgtgccgttcctcgtgctcggcaacaagattgacgtgccgcgtgcggcctcggaggacgagctccgtcaggcgctcggtctgtacgagacgtacggcaaggaggcccgcggtgaccgcgacccgaacatccgcccaatcgagctctacatgtgttcggtcgtgcgccgaatggggtacgccgacggcttccgctggatggcgcagttcctctaaacgcgactcgaaagatttccctcctgcccatggcataaagaaaaagacgtgccgttctcgtctcctcgaccccgtggatcgggcgagtgtcggttgaggtttctacagtatatactttgatccgcttt

SEQ ID NO: 7860 - DNA, 702 bp, Oryza sativa
  ref <308>: DATABASE ACCESSION NUMBER: AK105208
  ref <309>: DATABASE ENTRY DATE: 2002-08-28
atcgatcgcagcacggctcagagttgcagacgacgccgagaagacgaagaagaaaaggaaagcggcgggcacgggatggagagcaaggtgaggtgcgtgtggtttctcctggtggttgcggtggtggtggccgccggggtggagaccgtgcgcggcgcgggggagtgcggccgcgtccccgtggaccaggtggcgcttaagctggcgccgtgcgcggcggccacgcagaacccgcgcgccgcggtgccgcccaactgctgcgcgcaggtgcgcagcatcgggcggaaccccaagtgcctgtgcgccgtcatgctgtcgaacaccgcgcggagcgccggcgtcaagcccgccgtggccatgaccatccccaagcgctgcgccatcgccaaccgccccatcggttacaaatgtggcccatacaccctgccatgaggagcaaagggatggaactggaagggcactcgaacactttgactatccgatatatatatatataaactgatgttacctttgtcacgtgaaacttttcataaatctttctaaataacgcagttgtaatgactctgttgaaataaagtacctttatgactatcgaatagtggtgctatctataagagaacagtttgataagttctgtgaaattcaaggatgtgacttctcctggatctttctgaataatgcagttgatgattctgttggaat

SEQ ID NO: 7861 - DNA, 745 bp, Oryza sativa
  ref <308>: DATABASE ACCESSION NUMBER: AK105209
  ref <309>: DATABASE ENTRY DATE: 2002-08-28
aagcaaccaattcctcctcctcctcctcctccctcctcctcttcctcctcctccgcgtcgagcgccatggcgagacccgccatcgtggcggcgcccgcgctgctgctgctggcgctgctcatcgcgctggccaccgggggagccgacgcggcgccgggcgaggtgccgctgagctgggagctcggggttgtcggcgccgacgacgcgttcggcttcccgggtgaggaggcggcggacagcgccaccgcggtggtgcggcgggtgctgcagcaggggagctacatcagctacggcgcgctgcggcgcgacacgacgccgtgctccgtgcgcggcgcgtcctactacaactgccagcccggcgcggaggccaacccctactcccgcggctgctccgccatcacccagtgcaggggatgatccatccatccagctgccaccaccaaaactgttgaaattgggatttgtgattcaaagttcgtctcgtctactctatacatattttgtttatttttgtcttcttttattgttcgtctctttttgaaatgtgaacgaattggtagggattggtgcccgctaatctaaagtcaagagagatgtacactgtacatgtgtccggtactcctactctgtatcaattataaataaatcgtgtattctcctaatttgatggatggattcatcaattcatcattcatggatgattagctgtcctgtcctttgtgaattattacttcttgttccaaat

SEQ ID NO: 7862 - DNA, 912 bp, Oryza sativa
  ref <308>: DATABASE ACCESSION NUMBER: AK105210
  ref <309>: DATABASE ENTRY DATE: 2002-08-28
aaaacaatgtagcggtctttattatttctatttgtgcgttgggaagttgttctgttatcctatccactagaagtatacatcatgtcattaacatccattttccattagtttgtgcctgatagaattaaaatttacattccaaatgcatattttaggatcagaaaaattattttgcttgatatacaatagtaatgaatggtaacgttcttatttcaatagagaaaacgaggctcctccacagactccattggcatgtatgcagttcaatgttgtgagtgtcacaaatggcgcaaggttccgacgaaggatgaatttgagacaattcgtgagaatttcactgaggagccatggcactgcagtagaagacctgactgctcgtgtgaagaccctgctgacatcgaatatgatagcagccgtatatgggtccttgacaagcctaacataccaaagcctccagcaggaactgagagactagtgattatgagaggtgatttgtctaaaatggatacctactatgtcatgccaaatgggaagcgtgtaagatgcactgcagaggtggataagttccttgaggccaacccgcagtacaaagatcgcttttcagttgaaagcttcagctttacaacaccaaagattgtcgaggaaactgtttctcacaactccgtgtggaagtctggaaaggctaagaagcaggacaagataaatgctttgagcaataacaattaatttctttcaaaagactttatattatgcttaggtgatgctcatctcaggttgtggtgctaccctcatctactttgtgggctggtcaaatctgtttatatttgcacttagtctgttcggtctctgtgatctgtgtgttatgatgcgctgaaccttttctttcttcttcattatgtattaactcttggc

SEQ ID NO: 7863 - DNA, 613 bp, Oryza sativa
  ref <308>: DATABASE ACCESSION NUMBER: AK105211
  ref <309>: DATABASE ENTRY DATE: 2002-08-28
atgtaatcagtttcagtgtgagaaaaaaaacaaaaagaagtgctacgcacttgcaaactctctgtgttctgagtccttttgtgtgtgtgcttgtgttcttgtgagattgagtgagtgaatagctttgatttccaacagacggtggcgaggcagctggcgcgcgacggcgtgcgggtgaacaccatctcgccgcacgccatcccgacggctatggcgctgggcatcatcgccgagacgttcccggcggccaccgcggaggaggtgaggaggatggtgacgagggagatgcaggagctggaaggggcgtcgctggaggtggaagacgtggcgagggcggccgtcttcttggcgtccgacgaggccaagttcatcaccggccacaacctcgtcgtcgacggcggcttcactgtaggcaaggtgctcgtccgggatcctcctggctcagcttgaattggtgacgggattgtcacgcaaagcttagctcgtccagtgcttatctcagtcttatccgtacatcgacaagtctgtccaaatttggaggttgctgtctcggcatttcaaatccttcgttctttctcagcaaactcaatggattattccgtttgcgtgtgct

SEQ ID NO: 7864 - DNA, 713 bp, Oryza sativa
  ref <308>: DATABASE ACCESSION NUMBER: AK105212
  ref <309>: DATABASE ENTRY DATE: 2002-08-28
ctctcgagtctcgacgaagcgaggaagggatagaatccccccaaatcccccaacgcgagctccaaaccctagcgccgcaaaggcgggcgacggtttccctctcctcgatccgccgcgcggggctccggtgttgaagcccgcaccctccccgcggcggcggttgcggcgcgggcgagagggagggggagagaggggcgcctctcctctctcggcgggagggtttctcgatctggaaggctcacacctggcggctcctcggtgccccgcgcccggatctgcagcgatctgggagggggcggctccggcgatggcgatcctggcgtggtagcgcccgcccccacaattcggaggccttcccccggttggtgtggtggagggagggagagggcgggtttctcttcgtgcgggctctttacctccggtggtggcttctttggcggctgcgttttaggagagcggccgcccggcagggcggcggagacacgaaagtgctgcttgcttgtacacttgttcatgtgtctatctgttttctcgatttgttccggtttaaagcatcagttttccgctcaatttaagggcgaaggcaaaattttttgttatttactgctgttctctatcgaataatctgctctattacagaagaagagggggggggggaaaagccaacaaaaaaaatagaaagaaaaacaaaaaaaataaaaagataaattcag

SEQ ID NO: 7865 - DNA, 739 bp, Oryza sativa
  ref <308>: DATABASE ACCESSION NUMBER: AK105213
  ref <309>: DATABASE ENTRY DATE: 2002-08-28
tctcgctgcccgtggacctccgccaccgccgttgccaccctagacctttgctgccgtcgcccgtgggaggaccggatttggcctcacccccgcgggcctttgccgccgtcgccacatccgtcctcggcggcgcgcatccgtcgcctcctctggccgccgtcgctcagcccctggtcgcggggaggccagatccaccaccgggggaggcagatccacctccggcgtcgccggatccgccgcaccaaccccccggccgccgcctccggcgccgtgaaccgccgctaccgagcagccccggtgtcccagcgcgctggcttcctcgttggggagagagagggccccgccgccgcagtccttgcggccggctggctttgccgacgagccgcttaggcggcggcaaggcaaaggggaggaggagggagggtaagccggccggccgcaaggactgaggcggaggagaatgaggcgccgtccgtgtcgcccctgggatgggagcgatgcggacgggaaatagtttttaggggaactttcagtatggtgttctcgtaaaatgttcgtagtatagttagttagtcccatgtcatgtggttggtcatgttcctttaaagattgactacatgtaaagagtacaaggccttggttacatatatgaactttggggaataagactacaatggatcaaagatctttggataatataaaaccaattatttaaattttgatatctctactaatttcg

SEQ ID NO: 7866 - DNA, 686 bp, Oryza sativa
  ref <308>: DATABASE ACCESSION NUMBER: AK105214
  ref <309>: DATABASE ENTRY DATE: 2002-08-28
accaggacgttgaggacaaggaggaaaaatgggatcatgtaaggggcggcagcttggaggacgccgccaccttggcgctcttgccgccttgcagctggtccaatgcgccattcgcaccagtcgctgcgccgttcactgtgcttctaatacctgcgatttgctatgagaatgtgtgacatgtgaggcactgtagatggtgagaagcagtgaacctcctgtgttacctgctctttgtggctcgagacgatatagtccaagtcgatgatgcgcgaggcgatgaccttcagaagactgtgcatgtactggccaatgtccatgtcctgctcgcgcagcaccgggagcttgtcgccaagactcaggcgacaccgattgtacaagttggtgaccgtcatgacaatctgccccgactcgcgactgcgatcattcgagatgcggtcgctgcgttgacggtcgacgtcgagcttgaacgcctctgtgcgcagactctcaagatgttgctggtggctaccgattgagaggtcccaacccgtgaacaacccgtccccagtgtcatcatcgcaagctcaaacgcacccgtggatactgctgttctgcacgagcacgaggttttgcgtctcggccttgagttgtcggagtttttgccgcagttgatctgtctacaaaagatcccattaccgtctgaggat

SEQ ID NO: 7867 - DNA, 771 bp, Oryza sativa
  ref <308>: DATABASE ACCESSION NUMBER: AK105215
  ref <309>: DATABASE ENTRY DATE: 2002-08-28
aaaaaagcccaaatcggccgtcctcctttcaccaccatcgccagccacgggcgaggttggctgccggcgccgcacgctccaaacaccaccggacgtcgcgccaccgccggatccagacgcgccgccgccggatctgttcaccccaccgccgcccgtctccaaccccgccgccatcggccgctgccgccactaccgccgccatctccatccccgccaccgtcgcccatcgccgccccgccagatccggccgaagcggcgcgaatctggcggtttaccgccgccgcctctccggagagacccccggtctcctaagagtggcgcgagagaggagccccgccgccgccgtccttgtggccgcgcggctttgccggcggccactcgggcagcggcgaggcggaggagggaggtgggggagagagaaggggtggccgagtcgtcgcctcccgtgccgcccctgggggaggacgacgcgagggaaggttgtcccctcaagtatcacacacttaaaaacttcgtatatgagtgcaatttagtccaagaagttaataaataaacatataggtgcaacaacttataagatgggtaagattttgtacaaacttaagaagtgatataacaacttacttagtttgggcatattttttctatacatgttcggtttttgaatagttgttttgtggatatacatgtgcatatttgtataagcttactcaaattttatcattctagtaaataaaacaattagattttactatgtagaaatttttgtat

SEQ ID NO: 7868 - DNA, 1145 bp, Oryza sativa
  ref <308>: DATABASE ACCESSION NUMBER: AK105216
  ref <309>: DATABASE ENTRY DATE: 2002-08-28
acttgcagcgttcgccaacaacgtgcactgaccaagccaccatcgccaccaccaccaaggcactcgccgcgctcgccacgctcgccatggaggcctcgccgtcacgcagcgacagcttctcacacggttggctcaggcggaaggcgcggccggcggcggcggcggcgtccttcgagcgcctcgtcggcggcgagggcgatgccgtggatgtcgacggcgatctcgggcattcgttcaacggctctgtcgtgtcgttcatcgacatggaccccgcggagctcttctcgatgcggtggacgtcgttgacagcggcggcggaggaggaggaggaccacgacgacgacgacttcgacttcggcatgccgtgcgtcgccggcgcgcagtgctcctccccgctgctggtcggcgccgggcgcgccctctccgacggccaccaccaccacctcctcctcccgtgcgagccgggcgtcgttgtggcccgtgaccgcacggcgtcgtacgccgacgcgccgtcgccgagcccgtcgtcgccgctgttccactcggcgctgagcacgccggcgtccgtgatcaccaccgccagctcgcgccgcgccggcgccggcagcggcaaggcgagggcgccgctgctggcgacgaggagaatccttctcaggtacctgcggttcctcgtgccgctgtgccggaaggtgaggtcgctcccgctgcgcgtgctctcgccgcggtcggccaagggtagcctcgccgccgcttcgtcgtcggcgtccccggcgcggcggtccacgtcgagcagctacgccagcgcggcggagtactggtgccacggcaatgccgacaccgccgtgcgcgacgccatcctctactgcaagaaatccatcggacaggatatgtaactgctaatcacgatctctcgcaagaacagttcatgtgaatgttggatgattaatcagagagaaagatgaatactttgtcacctcgattcctgatcttttgggggattttgacatgtggtgtatatgcatacagtaatattacggtgtataagttgatgaattgtgctccaaggggtttaaccttgtgaagctgtttaattagctaatcaatatgttgttttagcataaattaattaactactgtgttagaag

SEQ ID NO: 7869 - DNA, 727 bp, Oryza sativa
  ref <308>: DATABASE ACCESSION NUMBER: AK105217
  ref <309>: DATABASE ENTRY DATE: 2002-08-28
gggatatcttgacccggagtttgtacgcacaagaactctgaagccagcgagcgacgtctataattttggcgttgtgatgctggaagtattgtcaggcaggagggcaatttgccgctggaaggaggatcatggcgatggcgatggcgatagccccatggattctttggttaaccacgcgctgccactcatcgatgcggggcaggtgctccatctgctggataggcggccggcggaggagccaacgccaaggcagctcgaggcggcggacctggtggcacgcacggcagcgcactgcctgcaagagaatggggacgaccggccggccatgtcggacgtcgtgaccagactccaggcggcgctggagctcgtccgttgcgatgatgagtagcatggtctgggcatcttcacggatgcatgatttatagatcataatactgctgtagtgctgttacaccttcccgagatgtagaggccgggttaatacaatctgttatctaaaaaaatttggcatcctagctccctggtgaaggatatgatatgatatagacaaattaatgtatgggattaatacatgatgagattgtaaacaagtttcactgcggtctttgtgtagtgaggctatccaaaattttctttccactggaattgctagttagaatcatacttctagtccgattttatagttctttttcagacatgtccaaaacaggcattgttttttgctctg

SEQ ID NO: 7870 - DNA, 546 bp, Oryza sativa
  ref <308>: DATABASE ACCESSION NUMBER: AK105218
  ref <309>: DATABASE ENTRY DATE: 2002-08-28
ctctcgccctctctcgcctcctccttctcctagcagcaacgcgctggcggcgggggtggcggcggcctcttctccaacggaggcggccccttctccaacggaggcggtccccttctctttgaagcggcggtggccccttcttccggcagcggcagcggccacaaggaggcagcggcggcggcccccttctccttgcagcggcagcagccccttcttccggcagcggcagcggctgtaaggaggcatcaacggtggcccccttatccttgcagcgacggcggcccccttcttccggcagcggcagcggccccttctcccagcaatggcagtggcccccttcgccggcagcggcggcggtcccctcatccagatccggtggaggaagcgagaggaggcggtgctatgcacggataatttttgctgtgtaatttttcctcttgtggttgaatatgtgatgaagtatgattgatatgatcaagaggggaggagaagtgaagctagcgcccaggaggagggggtgtgcggcgcttgcttttttccgcgtcc

SEQ ID NO: 7871 - DNA, 546 bp, Oryza sativa
  ref <308>: DATABASE ACCESSION NUMBER: AK105219
  ref <309>: DATABASE ENTRY DATE: 2002-08-28
atcaagctttcaatctctcatttcatccaactatacaagttcaagagtttacaagagacccagacgatcaagatgtcgtgcggtggaagttgcaactgcggttcctgcggatgcggcggtggctgcggaaagatgtaccctgacctggctgagaagatcaccaccaccaccactactgcaaccactgtcctaggtgttgcacctgagaaggggcactctgagggggttggcaaggcagctgaatctggcgaggctgcccatggctgcagctgtggctccagctgcaggtgcaacccctgcaactgctaaggccaaggcgatctatgactgaattgccaatgcaccagcctgtctacatgatgaataaataaagagtccatccagtgtgatggctcatgcctgtgtgagtgtgactgaatccatcagtgtgtgtgtgtgtttgtgtcaaccatgtgtgaatcaggtgtcaaaaatcgtggctggaaatccatgtggtttctagctttatgtaaatgttgtttgtgaaatataaatattgttttgtgt

SEQ ID NO: 7872 - DNA, 548 bp, Oryza sativa
  ref <308>: DATABASE ACCESSION NUMBER: AK105220
  ref <309>: DATABASE ENTRY DATE: 2002-08-28
caatcgttgatatctgccatgaagggcagcagcaggctagtgctgagcagaagcggcagcagctgatgcttaacaacataatacttcctgtcatggaggttgcgttgtcttgtgctctggagtctcctgatgaacgaagcaccatgcgcgatgctctctgtagattgaaacgaatcaaggaggctttcttgaagaatcatagcttttaatatgataaccgaagaggttacaagctgcccatttctaaagtacctttttgtatttgtatgtttagatattttccctgaaaaatgaggtcggatcagacaccagattaattaaacttatttattttttgtcatgtagctattattaatgaaacatatgtgtatttctaatgtgtcgcacttggacatctgaagtacatggcagtgacaatggatcaagcaggagtatgcatgtgttgaagtgaaggaatgcttcttgatctaaagttctcaccagttatatatgcaaagatataagtgttatgcatgtgcccttactggcagggcaaattattatttttg

SEQ ID NO: 7873 - DNA, 490 bp, Oryza sativa
  ref <308>: DATABASE ACCESSION NUMBER: AK105221
  ref <309>: DATABASE ENTRY DATE: 2002-08-28
aaatcgcccttcttaaatcacaccacaaaaattcacaaatccacaaatactagtattagtactaatcacgagagcaagagcaaagcatggcccccgcaggcgccgccgctgccgccctcgctcctaccgattgaatggtggccgcgggcggcgtggaagggcgagggcgacgaatccaactccgactcggactcggactccgactgcgactcggactcggacgacgacgacgacgagggaggcgagggcggcatcgtggggtggttctggtcgctggcgcatcgcttctgatgatttctggatgatcctggccgtccatggccgcggatgcttcttgtgatcacgttatcttgtttaattaagcattattaggggggtagatatagtactgtaattcctcctccatgcagatcatcccaatagcatcattgtgtgtgtctgcagtctgtaaagctatattgatgaataaatgatgctcctacgttatcac

SEQ ID NO: 7874 - DNA, 740 bp, Oryza sativa
  ref <308>: DATABASE ACCESSION NUMBER: AK105222
  ref <309>: DATABASE ENTRY DATE: 2002-08-28
aaaaaaaaggaaaaaaatccgcacacagcaaaagcctctccactacctctccctccacctgtcgcctaaaccctagctcgcatctcgaggcatctcgcttcacctcgtcgtcgcggtcgccggagccggagccggaggcggcggaggagatgggcaccggaggcggcgagggggacaagtcggccgtgctgccgctggaggcgctgctggcgctggggctcgaccagcgcacggcggagaacgctctggtcaacagcaaggtcaccgccaacctcgccgccgtcatagccgaggctggtataagtggatgtgataagacggttgggaacctcctgtacacggttgccactaaatacccaaccaatgcgcttgtccatcgtcctgtactcattgactatattgtgtcaacgaagataaagaatcctgcacaactagatgctgctctgtcattccttactaatactggccctgactctttagatactgggaagtttgaagaagcctgtggtgtaggtgtggttgtttcaattgaagagattaaatcaacagtcaatgaggtattaaagcataatatggaggctatattggagcagcgatatcatattaatgttggtaacctatgcggacaggttaggaagaggcacccctggggtgatgctaaggcgaccaaggatgaaattgacaagaagcttgcagagatattaggtccaaagacagatgctgacaatgtaaaaccagtg

SEQ ID NO: 7875 - DNA, 766 bp, Oryza sativa
  ref <308>: DATABASE ACCESSION NUMBER: AK105223
  ref <309>: DATABASE ENTRY DATE: 2002-08-28
gtgcgcagtgtgtgatatggggtattctcagtgtaatggagatcacacggtattctacaaacatagggggacatacatcaccatcttggctgtgtatgttgatgatatagtgatcaccggtgatgatgtagaagaaatcaggtgcctgaaggaatggacacctaaatgtagaaggatattgtgatgctgattgggcgagtagtatggatgatagaaggtctacatcaggttattgtgtgtttgttggtggtaatcttgtttcttggcgaagcaagaagcaggcaatggtggctcggtctaccgccgaagcagaatatagagctatggctttgagtttgagtgagatgctgtggatgaggagcttgttgactgaattgcgagtgttaagaagtgatactgtgatgcttcattgtgacaataaatcagccatcaacattggaaacaaccttgttcaacatgatcgcactaagcatgtggagattgataggttctttattaaggagaagattgatagtggggtacttatgctagagtatatcaagtcatgtgaacaactagctgattgtctaactaaggggttaggtcctagtgaaattcaatcaatatgtaacaagatgggtatgattgatatcttttacccatcttgagggggagtgttggtgtaaataagtgatgttcctaggacccatttgtaaatgttaagagaatataaaggaggagacgtgggaacaggggagtaaccctgaaaaaccccccaaaattagac

SEQ ID NO: 7876 - DNA, 553 bp, Oryza sativa
  ref <308>: DATABASE ACCESSION NUMBER: AK105224
  ref <309>: DATABASE ENTRY DATE: 2002-08-28
gtcaaaaaaaaaaaaaaataaatcgcctctttgttttcctcccgtcgctatcctcccttgctctcgccgctgcgcctggcagtgaggaggacgggaccagtggatgcagcggccccggccttgcgcctcgcttcgccgtcatcgtctctgcggcgtgctcctaccatcgccatcctcctcttgctcccgccgcggcgcccaccaagcactcaggcaggatgggataccgtctgccacctgctgcctggcgccgccctcctttccgttttcctctgcatcctcttcctccgtgtgcggcaacagcggcgggcgtccacggcgacgccgtcgacgaggcggggaaacgctaggcacggccttctcttgccttcttgccttggtgaacttggtctatgggtatagcgtgcctgacttgtggccctcctgcttgctttttcttttctacccaccatacaataggtttatgttttgatggatggttttaatgtcagtttttttttgtcttctttggtgtgtctctgttatgtgggtctatgcatcctctctattgttt

SEQ ID NO: 7877 - DNA, 584 bp, Oryza sativa
  ref <308>: DATABASE ACCESSION NUMBER: AK105225
  ref <309>: DATABASE ENTRY DATE: 2002-08-28
accgatttcccaaaaaaaaaaaacaaaaaggaaatcagcctgaacgccggcggcgctcccgccgcgctcgagctctgctcctccgatggtgaccagatggagcgagaagggccccggcctcaagatcctgtggatctggaccctgggaaccgctggaattatgattaccaatgtcgtccggacgcgcgtcaatgatatgcagaagatcctccaggaggaagacgaagcagcagcagccgccgcccccatggcctccggcgagcgtgtcctgaaagacgatgagtagaacagaacgtctctacttatcaaaattccctgaaccccgctgttgtgccaagctgagttaggtattgtttatctggttcgtcttagtggattttactggtaaaacagctacttgcttgagcggaagtatggaattacttgattcaaaatactgggtcgtctaccatctcatttagaactttttagatcttcatacagtgaattttctgttggctagaaagaaggtgatcgaacatcttcaggcatagctataactgagaatcctgagggtgcagcaatgagaacatgcagtgttcctc

SEQ ID NO: 7878 - DNA, 845 bp, Oryza sativa
  ref <308>: DATABASE ACCESSION NUMBER: AK105226
  ref <309>: DATABASE ENTRY DATE: 2002-08-28
atttcggtagctggtttgctattaacactttaattttgcatgcagcaattaaggtgttaattaatatatataattaagctttaagctcattagtttaccgacgatggaagtggccaccaatacggcgacacgatcgccggtgaagctaatgctggtgctgacactgtcgccggcgagcaaggtgatcgccaagggcggcggcggcgtgaagcgggtgcacctcgacggcggcgcgttccagtgccggacatgcgggcggcggttctccacgttccaggctctcggcggccaccggaccagccacaagcggccgcgggtgcgcgccgacggccttgacctcctcctcggcgcgcgccccggcaagctcggcgccggcggcgcctcgacgccggtagtgcaccggtgcgacatgtgcggcaaggtgttcgccaccggccaggcgctcggcggccacatgcgccgccaccggccgctggtgagtcgtaatggcacaatgtccacgacgtggacggcggcggcggcggcggcggcgacaatgtccggctcctcgtcggaagagcgtgacgacgacgacgacgacgacgtgcacaattataatttcatccactttttgtgagtggctaatggacaaatcaatatatgaattgaataaaaccagtgattaatgtcaataataattaagtttgttctggagtggtatacaaacacgcaacatgcttatagctagatatatatacacgtatacgccacaagatacaataccaattaagttcgtctttgattttgtaatgttcaattatattttttcaatgattaaatacacgtgattttaattgtattcgttc

SEQ ID NO: 7879 - DNA, 809 bp, Oryza sativa
  ref <308>: DATABASE ACCESSION NUMBER: AK105227
  ref <309>: DATABASE ENTRY DATE: 2002-08-28
ggcggtgcttcttcttcttttccagagactaccaagcccaaaccagcaaccacccgccgccgccgccatgtcgggagggatcgcacgcggccgcctcgcggaggagcgcaaggcctggcggaagaaccaccctcacgggttcgtggcgaagccggagacgatggccgacgggtcggcgaacctcatgatctggcactgcaccatccccggcaagcaggggaccgattgggaaggtgggtactaccctcttacccttcacttcagtgaggactatcctagcaaaccacccaagtgcaagttcccacagggctttttccacccaaatgtctatccttcaggaacagtgtgcctctcaattcttaatgaggatagtggctggagacctgctatcactgtaaagcagatccttgttggaatacaggacttgcttgatcagccaaatcctgctgatcctgcacagactgacggttatcacatttttatacaggacaaaccagaatataagaggcgtgttcgtgttcaggccaagcagtaccctgctttgctttgaggacattggcctaataaagttactacccgattcatcatgcacatccgcatagtagtttgcaaaatctcagattattgcaccagaaaatatcggattttatgggatataacctaaaatggaatgtttgaagaactgtccaatatcattgtggactttttgtgctgtcattaccatttgtgctgtgtgaagaacagaaatagctttgtcaactgttgaaaccgcttgagtgatggatgctaatttggataacaaatgaact

SEQ ID NO: 7880 - DNA, 583 bp, Oryza sativa
  ref <308>: DATABASE ACCESSION NUMBER: AK105228
  ref <309>: DATABASE ENTRY DATE: 2002-08-28
atgcggatgggggaattggggttggagacgcggactcggagggctcgtgggtggcggcggactccggcgactggtggcttgaggatcagcgccgtcagcgcctgcatccaggtaggcaactcaatacgccggtggccgtggttgttccgcccccgcggcggcggggccttcgatccgtactgacgtctactcgccggcggcggattgaggcggaatgtttgggtggccgcaggcggagattgtctccgcaaaggaggaagggagcccatggtggttctacagcgaggaggtcccttgatccttgtggttgtggaggcccaaactggcattctcccttgctgaaatctcactgttcactgtttcttcagactggaagtctggaactggttcagattccattctctttggatcacttctatattagaatcaacagagatgattatgcttgtgcatagattgctaattatcactagtttagctgtagaataagtatacagatagcatatagtagttctatgtgattatgtgaaggatgaagcaaaaggttcagtagtaagcaccttctccccaagttacagaaacc

SEQ ID NO: 7881 - DNA, 679 bp, Oryza sativa
  ref <308>: DATABASE ACCESSION NUMBER: AK105229
  ref <309>: DATABASE ENTRY DATE: 2002-08-28
tgggcaaaagtgggataggacggcccggaggagaatattcccccagatgcagccgcccaaggctcgggcgagccgggcgagcgaccaaaggagggtcgcgtcacccctctccaaaagcgagaacgacggcgacgcagcggctggtgcgtgcggcgagggcggcgaccaacgcgagacgcgagagccatgacggcgggaggtgagctcgacggcggcgggaagaggggtcgacggtgtgcccggaggcggcggcggcaggaggcgagctcggcagcggcacgggatgtgagctcggcggcggtgggaggagagcgaggcagccaaggcggaagaggggccgacgacgagcgggaagaggggtgacggcgagccggcggcggcggcaggatgcgagggcggcggcggcgagctcggcataggcccgggatgcgagcttggcggcggcggaaggcgagcttggcggccgacgcggaagagggggcgacggcggcaagaagcgagggcagcggcggcgtgcttggaggctctctttttttccccttttttctttgttatttttctttttttttctgtgtggatttgtaatcgggttttgggtctcgccccactcacgttaggagagaaggtatccactaacccaccgtggcagaaaatcaaatattgatttttcttattttgc

SEQ ID NO: 7882 - DNA, 672 bp, Oryza sativa
  ref <308>: DATABASE ACCESSION NUMBER: AK105230
  ref <309>: DATABASE ENTRY DATE: 2002-08-28
ctccagaaatcttccattccaatttgctaccagctgacgctttgacacagcaattaggcgaaattcttgatctctctctctcatccatggcggccaagctgacccaagaacaggtggacgagtgccgagaaatcttcgacctgttcgacagcgacgaggacggtcgcatcgccgccggcgagctcgtgacggcgctgcggtcgctgggccagaacgtcgacgaggccgaggcgcggcggttcctggcggacgccaccgccagcggcggcggcggcggaggcggcggagacatcgacttcgcggcgttcctgtcggtggcggcgcgcaagatgaggcgcggggcgacggagaaggagctcgcggcgtgcttggacgtgttcgacgacgcgcggagcggggtgatcccggcggagcagctccggcaggcgatggtgtcccacggcgaccggctgacggaggaggaggccgacgagatggtgcgcaaggcggatcccgccggcgagggccgcgtcgagtacaaggagttcgtcaaggtgttgatgaacaacaagtagcagtaatactactagctgttttgttttgttttgtttttctatgcttaatttgtttgcgaaagatatccatgtggttaatcaaccttggtaatggatgtgaagaagtatatgcgatatg

SEQ ID NO: 7883 - DNA, 821 bp, Oryza sativa
  ref <308>: DATABASE ACCESSION NUMBER: AK105231
  ref <309>: DATABASE ENTRY DATE: 2002-08-28
cagtaagcttagcacgaagcttccatggccacagattcttgagctgccgatcgctgtgcgtagcgcacgcttgacgctgacgctgacgccgacaatggcgaaggcccagctcgtcgcccggttctccgtcgaggtcgcgccgccgctgctgtcgtcgatcatcaggccccgccgccgccgcgggttcccggcgatgctggacacgatagcggaggaggagcccgacgcgccgccgctgccggccatagtcatggcgcgcgagctgtcggcgagctacgcgctgctccgtggcgtcgccgcggccgccgccgccgtggcgccagcgccgcctcctcctcctcgcaatgtgatggtcggcagcagctgcagctcgttggtcctggtgcgccgcgccgaggccaaggagaagcggtgcgtcgtcgtcgtcgtcgggagctccgccgcctccgccgccatcgtccacggcgagaagcggctccacctcgccgccgctccggcgtccgaagcagcagcgtgctccgagatcggcgcgtaaatatattcgatccgcatatatatacagtgatgctctcgttgtggttttaaacgaagaacgaaacgtgtcatactactacgtcctttcccatatataattttgagctaaccaacgtaaaaaaaaaaagaaagaaagaaagaaaaggaagtagtagctaatgcctccctgctcatggcagctatgtacttgctagctaataaaatggtaatcgttttatattatgtatctatatgttagatatatcgatgacttttactatgatctctactttgtatatataattgtt

SEQ ID NO: 7884 - DNA, 425 bp, Oryza sativa
  ref <308>: DATABASE ACCESSION NUMBER: AK105232
  ref <309>: DATABASE ENTRY DATE: 2002-08-28
aaaaaaaaaaaaaaaaaaaaaaaaagagatagaggcagctgaagcttatgacctagctgccatcgagcttcgtggtgcccatgctgtgaccaactttgatattagtaactactgtgaagatggtttgaaaaaattagaagcctcatcagaggttccaaagctactagagggtccatcgaaggctgcgaagctcgctggacgatagataaaagaatacaacttgtaaattgttttttgttttatttattttctttttaacaccaagttggccctttttagttttcccgcgcttgtatgtgtttttcgagatattcttatctgccgtgttgtcatgctggtgtttaccagctccagagataggaccatgtgatgttgggggtgttcggttgatattactctttggcataatgatagctaggcttgtt

SEQ ID NO: 7885 - DNA, 497 bp, Oryza sativa
  ref <308>: DATABASE ACCESSION NUMBER: AK105233
  ref <309>: DATABASE ENTRY DATE: 2002-08-28
acaaccccgcctgaactgaatctagtgtagtgaagacaggagtggctaaactgcatcccggaaatgcttgggaggaagaaaggatcgtcgtccaggttgagtgatcccatcaacacgactgtcactactgataacggccaggaaatggctgcttcgcatttcatctcgcagcaggcttcacagctcgatgaggctgcgaggaagagactgcaaagaatgaacgagaggctgaagttgctggagatgcagatggaaacactggaggctggcgtcgcgaaggcgagcaatgactcctacgagtagagatgtttagcaatctttgttatagacaccaggtttggtgacatgcaagcaaaattagatgatagcttgagtagttttacctgaacttgcagcaaatcaccgtcacctcgttgtagaattccggatctgtttcaggtttcagcgcttcagttttgttctttcactacgagccaataagctttagtgcagatgtc

SEQ ID NO: 7886 - DNA, 841 bp, Oryza sativa
  ref <308>: DATABASE ACCESSION NUMBER: AK105234
  ref <309>: DATABASE ENTRY DATE: 2002-08-28
acgccagtactaaaaaccccaacgcagagagaggcagagagagcaagcacccgagcgagatggcgaccgagattgaagcatactacgacgatggcagtggcacctacctgttgtcgttcgacgaggacttcttcgacgcaacgctcaccaagtccggcggcaaggtggagtcttggctgggcgagacgtaccgcatccaccgcagctgcggccacccgctcgtcgtcggcctcgacgtggagtggcgccccgccgcccccgtgccgggccccgtcgccgtgctgcaactctgcgtcgaccgccgctgcctcgtcttccagatcctccacgccgactacgtgcccgacgcgctgtcccgcttcctcgccgatcccaggttcaccttcgtcggcgtcggggtccgcgacgacgccgccaggctgcgggtcgggtacgggctggaggtgccgcgcgccgtggacctgcgcgccctcgccgccgacacgctcgggaggcccgacctccgccgcgcgtggctgcgggcgctggtgcgggaggtgatgggcgtgcagatggacaagccgcaccacgtgcgagtcagcgcctgggacaagcgcaacctctccgaggaccagttcaagtacgcctgcgccgacgcgttcgcgtccagggaggtcggccggaggctctacacctgcaactgcgacggcgcatgatgatgtcgtgtcctttgtggttggacggggcttttatctttttgccatataaatttggctatcgcctttgtgttgatcgtactgtttactgcttggattagtggttggaaccttgaacttaaatgaatgtcgaccgtcatgcgatt

SEQ ID NO: 7887 - DNA, 2452 bp, Oryza sativa
  ref <308>: DATABASE ACCESSION NUMBER: AK105235
  ref <309>: DATABASE ENTRY DATE: 2002-08-28
ggaaaacttcatgttcacagcattaacccacaaattgccctcccctcccccctcctcttcaccgagccaaatccgcacacatatatatatcccacctaaaacccaccaaccaaatcctccacgaacaaaaacaaaggcgcacaacgaacccgcagccagccaaccgcagcagtggtactatgttgtttgccatgggcaaaggcaaggtgatcaccagcaagcaggccatgaccatgttctcttctccgtggtaggagtatactggtagacgactacgagactactagagtactagtgctgctactgtgggaagcttttgggtgggggcagcggtggctgtggctggcgccaagaaagcagaagagggcagtggcatcggcgagcgacgacgcgacgcgaggcgaggcagaggagggcggcagggggaggcaggaatcattcggctgcaaagctgccgtcgccacctcgtcgccactgtccccgctttccggggccgcgccctatcctgccacctctccctctctcgcccgcgcagtccacgcacgcagcgctgtcgttcgttgcaccaccaccaccacctccaccaccaccgcgcgcaccggcaccgcatcgcatcgcgcccgcaacgcaccactccaccaccaccaacaacaacagcaagattacaagaggctgctcgtccgcgggcgcgggcgcgggagcgcgtcgtcctcggtagacaagaaagaagaaggcggctttacttggattggtgctcgcttttttttttctctctccttttttctttttcttctccctgagatgcttcagctgctccttatatccaccctcccggccttcacgctgatgctcgtcgcgcccgccgccacgcacaagcactgcaagctcgtgcgggagctcggcctcgtcgcgctcctgctcgtgcgcgagctgctgcaccactccgcctccgccgcgtgcgcgtggggcggcgaaggcggcggaagcagcaacaaggagagggagcgggagcggggggtgaggataatgccgtccaaggcgaagccggagcccgcattggcggcgagggaggagggggaggaggggacggaggcggagctgaacgccgccgcgctcccgctgctcgacctgccggagcttgcgctggagcgcgtcctcgaggagctggagccgccgtcgctcgcggcgatggcgtgcgtgtgcgtcgcgctcagggaccgctgctctgcggacaccctgtgggggcgccacgtcaaccggaagtgggggcgcgtgctcggcgccgccgcgcgcaaggagtgggaggcggagctggccgcacggcggagctccggcgcgctgccgcggccggccaggcggaggagcttggcggactcgctggcctgcgcgtggcccttctcttggatcacctgtcgctggctcaagggcaacgccgtcgccgccgagcccgccgccgccacgccgtcgccactcccctcgccggcgaccgacacggtggccgcctggtaccgcgcggtggagtgcggcgagttctcgttccccgcacaggtgtacaaccgcgaggacgggcatgtcgggttcgtgctgtcgtgctacgacgcccacctccgctatgacaggcgtactgacacattcactgcaaggtacccgccacacgggcggaagccggcgaaggaggagagcggcgtgcagtggagcagggtccgctcgccgccggtgagcacgccggcgcacgacctccacgcctccggctgcctcggtgatcttcgccccggtgaccacttcgagattcagtggaggaagaacaaggatttcccttacggctggtggtatggtgtcgtgggtcaccaggagacatgcaacgccaacgagcatctgtgtcgctgccatgaggacgatatggttgtcctggagttcaagcactacgcggccggctcgcggtggaggcagacgacggtgagcaggaaggatcacagggagaaaggcgacgagacggacgggttctacggcggcatcaggaagctccagacgagcgacgagatctcgacttggcgaaagttctggccggtcgatgtcctcaactgatcaggacaatgtgaatgaaatacgcatctgatctgcctgcccgctatatgtgcatcctggtggtgttgccgttgtatagcccgtacgtcgagcggcagcgctgcgtgaccctgtctgaaaggctccgctcaccagctgctctgttcttactgaattttttttggtagcgagatgaggtgaaaaattgatggaggattcgaggatttgttcagcgcaagatccgtcggaacggaaggaacaactataggctattgatgatgatgtacagatttactcagcttgtcccgtgctgttgctggactgaatccttcagtccatatgtcgtgtaagatcatgtttccttctgaatgttatcctgttcaatctt

SEQ ID NO: 7888 - DNA, 1615 bp, Oryza sativa
  ref <308>: DATABASE ACCESSION NUMBER: AK105236
  ref <309>: DATABASE ENTRY DATE: 2002-08-28
acagtatcaaagaccaaagctatcgagagatcgatcactgcacgccagctgctcggagaaaaggcgagaagaaaatagtgagctcgcagctagctaagttagcttgcttagccatgggcgaggaagccgcggcggccacggtgacggcggcggcggcggcggcggcgagcggcggcgcgccgcacctgctcctcatctgcttccccgggcagggccacgtcaacccgatgctccggctcgccaagcgcatcgcggcgaagggcctcgtcgtgacgttctcgtcgacgtccgccatcggcgccaagctcgtggagtcgtccggcgtgtcggtcggcggcgacggcgtgccgctcggcggcggccggatcaggttcgagttcttggaggatggcttcgacgggagcgacctcgacgagctgatgcggcacctcgggacggccgggccggcggcgttcgccgagctgctcgcgcggcaggaggcggcggggcggccggtggcgtgcgtcgtcgggaacccgttcatcccgtgggcggtcgacgtcgccgccgccgccggcatcctgtcggccgtgctgtgggtgcagtcgtgcgccgtgttctcgctctactaccaccgcgtccacggcctcgtcgagttcccccccgaggacgacctcgacgcgcggctcacgctgccggggctcccggcgatgtcggtcgccgacgtgccgtccttcctcctcccgtcgaacccctacatgagcctcacggaggcgatacagcagcagatccgcaccatcgacaaggcgacgtgggtgttcgtcaactccttcaccgagctggagcgcgacgtggtggacgcgctccgcggcgtcgcgacgtcgccgccgccgccgccgctcatccccgtcggcccgctgatcgagctggagggcgacgccgcggtgcgcggcgacatgatcagggcagcggacgactgcgtcgggtggctggacgaacaccctccgcgctccgtcgtgtacgcgtcgctcggcagcgtcgtggtgctgtccgccggcgaggtggcggagatggcgcacgggctcgcctccaccggccggccgttcctctgggtggtgcggccggacagccgcgcgctgctgccggaggggttcctcgacgccgtcgccggccgcggcatggtggtgccatggagcccccaggagcaagtgctcgtccaccccgccgtggcgtgcttcctcacgcactgcggctggaactcgacgctggagacggtcgccgccggcgtgccggtggtggcgttcccgcagtggggggaccagtgcaccgacgccatgttcctcgtcgacgagctcgggatgggcgtccgccacgtggaggcgttcgtggaggaggtgaaggcgcgagcggctaaggcgtgacgtcacgcatggaatcataaatcgcagcgtttagttattaagtaagcggcagggacagatttaattaattgctacttcgtacaagtattttgccaccggtttgattttacccaagcgtcgtggtaaataaaaatagtggcgctgtcattttcgtcaaaattttgtttgatttgtgtagctgttttggcaaaataaaatttaacgtatacggacac

SEQ ID NO: 7889 - DNA, 2052 bp, Oryza sativa
  ref <308>: DATABASE ACCESSION NUMBER: AK105237
  ref <309>: DATABASE ENTRY DATE: 2002-08-28
ctcaccggttttgatttgatctgtgtgatttgagtgagtgagtgagattctttggaggagggattttggtttggtttggtttggtggtttgtgcgggattttgtggggaggagagtaatggcgaccgcagggaaggtgatcaagtgcaaagcggcggtggcatgggaggccgcgaagccgctggtgatcgaggaggtggaggtggcgccgccgcaggccatggaggtgcgcgtcaagatcctcttcacctcgctctgccacaccgacgtctacttctgggaggccaagggacagactcccgtgttccctcggatcttcggccatgaagagtgtggccgcgtcgcgacgccgccgggcgccacgccgtgacggcgtagagcggcctcttgtgccagcagaagaagaagccatggccgccggcgtcgtgcctcacctcgtacggccccgcccacccgcagctctgcagcagcttcctcgcctccatggcgccgctgtagctcagccccacccgctccatgccggccgcctccatccgcgccgcccactgccgcgcccgctcgtgccgctccacccgctccgccccctcgcacgccaccacgccgcggatctcctccccgagcagcacccgctccacgcgcgcgcgctccgccgccgccgccgcgctccgctgcaggcagtcgaacagcgacgcgtagtagttgagcgcctcgtcgaaccgctcctggaacgcgccgccgttgtggttcgcctcctgctccgtcatcaccatgatcttcggggacagcgacctcaccgccgacaggaagctccccagctttggcgtcgacgtcgtcgggtgcgccgccgttgctgctgcgggggagtggggtgacagcgacgacaccacggacgcgtcggggctcagctgcagccgcgtgttcagctcccgctccagcagctcgccgaagcttctcgggctggagcgcgcgatgatctggaccggggtgaggcagccggcggcggcgtgcctcctcccgtcgtcgacggcgaggaggcggtgaagctgcagcacgacgctgacggcgagcgcctcgccggacctgacgccgaggtcgtggcggagcgcgtcgaagtccatctcgtcgagcttcgcctccacggcgttgaactggaacgcgatgtcgaacgcctccgcctccttggacagcaccgcggccatgttcgcgaggaactccttgctgtcgtggacggcggtgatgcggaggtgcggcgggccttcccggcggcctcggaacgcgtggaacagcgcgatccactgcaccgggttcgccgccgggccggagaagtcgacgacgtggacgaacctctccccctccattgcctcaaggatggcatggttggtggtcaggtacgcgagcttcaggaacgggagcacgtcgaacatgtggcggcgcgcgacggggacgaggtgggcgtcggcggagttggccgacgacagcagcgcgcgcgagaggcccaggatgaggttgagcagcttgcgcgcgagcgcgtcggcgaagacggcggcgaggcgctggagcgcgtgcggcgcgtccagggacgcgagctgcgtgatgtgctcgaggcagaggttggcgcggtcgaaggagccggcggacacctcggcggcgcactggtaaagcaggccgatcagccgaacgctctgctggtcatggctcagctcctgcacccacgacccgttcgacggcgacggcgacggcgagtacaccgacgacgccggcgatgacgtcgccgacgacagcatgtcgtcctggaacatgcccctgtccgtgcagcacagcctcaactgctaccagttttcagagccgtgaagcttatcaagcaatggcatcattggcatgtcgccattgttgggtttgagacaaatgttgcaaggtcaggtgttcctgtgcgacgaagttgtcatgggacgacgaagggacaaagaagaagtggatgcttcttcggatagaactaagagatgtcgtctgtatcttggtggaataactaaggagcttggaattattcccttgg

SEQ ID NO: 7890 - DNA, 1333 bp, Oryza sativa
  ref <308>: DATABASE ACCESSION NUMBER: AK105238
  ref <309>: DATABASE ENTRY DATE: 2002-08-28
aaaaagaaaaaaaaaccagcaaatttcccttcccatgcgacgcgacctcctcctcggcgactagccggcgaactcgcgcacgccacctcggcccacccaggcccaggcccacctcgccgtggatcgccggagtagggggttgccggccggagaggcggctaccaccagatggtcggcggcgggggcgagtagcgcgacggcggcggcgaggacgacgagcggcggacggatctgcggcgcggcggggcggcgggggcgggggccacatggatccccagttacttgaaagagctcttgaggcatctggagatgatatagattctgctataaagagtttgaacgagctgtgcctggaatcggctgcggtaggtgattccaatagcgtcctgccagccgctcttaagttatcggctgaaggtgttgttaataatggacatttggatgtgctcactgaaaacccacatgctacagaaaactttcagacaaatcatcatggttctgagtgggttgagctatttgttagagagatgatgagtgcatcagacatagatgatgcgcgggctcgtgcctcaagagccctggaggcattggagaaatccataatggagcgagcaggaactgaagcagtgcataatttgcacaaggaaaatgtgatgctgaaggagcaactggcaatatatctgagagagaacgctgttctgaagagggcggttgctatccaacatgaacgtcaaaaagagtttgacgagaggactcaggaggttcatagcctgaaacaactggttttgcagtatcaggaacagataaaaactcttgagataaataattatgcacttagagtgcatctgaagcaagctcagcagaacaattctatgcctgggcgtttccctcctgatgtcttttaacagatcttgagggcaatattccctctcatagtcttatactcaatcataccaagatatcatatgatgcaaggggttgacctattgctcatggtgtggttagacacttagactattcacccttacgtccaaatcataaacaagcaacgatcctcaaaatggagaaaggcaagcaacggtgaagcatcaattgaggtgtagattaatgtgtgcaccaggaagcttgagtgcttgacccttctctcagaccattgattgtatgtaaagtatggtgagatgtattgtagcatgtaattcaaagtatgaaaggacctgttcactgtattgtagtagcatgtaatacaatttatacaaagcatgagaggatctgttcattgtatcgtacgtatccactgatatatttattccgataaaagaatgcttatcagatg

SEQ ID NO: 7891 - DNA, 1369 bp, Oryza sativa
  ref <308>: DATABASE ACCESSION NUMBER: AK105239
  ref <309>: DATABASE ENTRY DATE: 2002-08-28
tgctctgtcactcacccacttgtctcacactctcactgagctcctctgcttctcgcatccatggccgccgccgccacgggccctgtccccttcaaggacgccgacgacgacggcacgctcgccgccgccgaggcgcgctcgcctctcccgaaggaggagttcggcgacctcgtcgcggcgctgccgcggaaggagcagtacctcgacgggcggctctacgaggggttctggctgccggagcactacgcgccggggatcatcgcgttccgccgccgcttcacgccgcgcgccgacgacgtggtccttgccagctaccccaagtgcggcaccacgtggctcaaggcgctggccttcgccgccatgacccgcgccgcctacccggcggacgaacacccgctgctccgcctcaacccgcacgacgtcatcccgttcgtcgaggacgtcttcaccgacggccacgaggccaagctcgacatgctcccctcgccgcgcctcatcaacacgcacacgccgtaccagcttctcccggagtcggtcgtcgccggcgacggcggcggcggatgcaaggtcgtctacatctgcagggaccccaaggacatggtcgtgtcgctgtaccacttcatgcggcgcctccagcccgacctgtcgctcgccggcgtggtggagtccgtcgccgacggcacggtgccgttcgggccgatgtgggaccacatcctcggctactggcgggcgagcgtctcccgcccggaccgggtgctcttactcaggtacgaggacctgctccgcgacggcgccgccggcgagcacgtcagggcgatggcgaggttcatggggcggccgttctcggccgccgaggaggccgccggcgccgtagcgagcgtcgtggagttgtgcagcttcgagaggatgaaggcgctggaggtgaaccggcggggcacggcggggtcgtacaagagcatgccgcgcgacgccttcttcaggaagggcgtcgccggcgactgggcgaaccacatgtcgccggagacggcagcgaggctggacggcatcttccgcgaaaaattccgtggcacagggctcaccattgttccatgacacggatcgagcagttggccagcgacgtcgtcgtcagtcactgacatgtgggccatagcaaagtggaacccacatgtcaatgacccaactgcatgtcagaggatctgcttccgtgtgcttcttttcattgtgattttgctgctgtttcggacatttttgtttggcatcgcttgtttttatttgtgattacccacttttctcggttccaatcatggaacggagatgtgacgaaaggcgcatcgaataaagaaatgagagtgattcgggcttgatcatc

SEQ ID NO: 7892 - DNA, 1073 bp, Oryza sativa
  ref <308>: DATABASE ACCESSION NUMBER: AK105240
  ref <309>: DATABASE ENTRY DATE: 2002-08-28
tggattaacgagattcccactgtccctgtctactatccagcgaaaccacagccaagggaacgggcttggcggaatcagcggggaaagaagacccaacgaaacggcaggacaggaggatgaattcgaaaacaaggggatagaatttcccccgaacgcggaaggcggaacacatccaactttcccatgtaaagccctctccccctcggcgaaaccctagctcctctcctctcctcttcctcgtcctcgcagcacaaatgtccgaccgccgccacgaccgggagaagccccgcgaccgcgaccgggaacgcggccgagacggcgagcgcgaccgcgagctcgaccgcccccgcgaccgcgaccaccgtgaccgcgaccgggacaaggagagggatcgagatcgcgaccgcgaccgcgaacgccgccgtggggagcgtgaccggaagcgctcccgctctccctccgccgaccgctcccaccgccgccactcccactcccactcccaccgcggccgctcgtccccgtccccggacgccggccgccacaagcgccgccgcgacgggtcccccgccgccgccgccaccgaccacaaggacgacaagaagccggaggcccccgtggtgcccaagagcgccgccggggacggggtcgcgccgggcgacggggatgtggacgtggaggagctggagatgatgaagatgatggggatccccgtcggcttcgactccaccaaggggaagcacgtccccgacgccgacgtcagcggggtgcgcgtcgtcaccaagcggcagccgcggcagtacatgaaccgccgtggcgggttcaaccggccccttccaccggagcgcaaccgctgaggagaggaaggatgatgaagatattctgatattgggttgcattggactactggaacatgttgctgtcttgctggacatagtaggcaatgaactgctactgagcatgtataaccttgatggctagttacttcgcaaaactttgtagactatgggatctctcttttttcatcaattgctctgtcgacattccagggatacagaatttggtggctcattttg

SEQ ID NO: 7893 - DNA, 1800 bp, Oryza sativa
  ref <308>: DATABASE ACCESSION NUMBER: AK105241
  ref <309>: DATABASE ENTRY DATE: 2002-08-28
aaaaaaaaaaaaaaaaaaaaaaaaaaatatccatccactcaacccaacccaagctggctggcaaaaccctagaactcgttccccccctttcgccttaaaccttcttctcttttagtaccctcgggaagccaaaagcacctcgtcggcggcggcggcgggtggtggccatggcggagctgaagcggctgtcggagagccgcgacctgacgcggatcgagcgcatcggggcgcactcccacatccgggggctggggctggactcctcgctggaggcccgcggctcgtcggaggggatggtcgggcagctccccgcgcggcgcgccgcggggctcatcctgcagctcatccgccaggggaagatcgccggccgcgccgtgctcctcgccggccagcccgggaccgggaagaccgccctcgccatgggcatcgccaagtccctcggcgccgagacgcccttcgcctccgtcgccgcgtccgagctcttctccctcgacctctccaagaccgaggcgctcacccaggccttccgccgctccatcggcgtccgcatcaaggaggaggcggagatcatcgagggcgaggtcgttgagatctcgatcgaccgccccgtctccgccgcagccgccgccggcagctccgcgccttccggtgtcgccgcggctggcaagaccgggcgcctcacgctcaagaccacggacatggagaccgtgtacgagctcggcggcaagatgattgaggccctggggaaggagaaggtgcagagcggggatgtggttgcgctcgacaaggcctccgggaaggtgaccaagcttggccgctcaatcgggaggtcgcgggattacgatgctgttggtcctcacaccaagttcgtcaagtgccccgagggcgagctccagaagcgcaaggaggtcgtgcattgtgtcaccttacatgaaattgatgtcatcaatagccggacacaaggttttcttgcacttttcactggtgacactggtgaaattcgtgcagaggttcgagagcagattgatacaaaagttgctgagtggagggaggaagggaaggctgagattgtccctggtgttctgtttattgatgaagtccacatgctagatatcgaatgcttctccttcctaaaccgtgcattggaaaatgacatggctccaattctagtcattgcaactaaccgagggatcacatccatacgtgggacaaactaccgatcaccacatgggataccacctgatttccttgatcgtctgttaatcatcacgacacagccttacaccgaggatgatatccggaagatcctagacatcaggtgcgatgaagaagatgtggaaatgtctgcagatgctaaggttttgctcacaaagataggagtggagacgtccctgaggtatgctatccacctgatcacttcggctgcattagcttgccagaaacgcaagggtaaggttgtggagatggaggatataagcagggtctaccagctgttcctggacgtcaagagatcgacgcagtacttgatggagtatcagagccagtacatgttcaatgaagtgccgggtgaagcaggagatgatgccatgcagtcttagtgggatattggttacagactttacggttgggttggttttacggttcattatggatacccattggtcttctagatgaataggggtaagcgtaagatgacttaccctgacaaacattgctctgtgggtgcagtaaattgtgttagtgctgtagctagatttaagaattgaatgtatcttgtcttcatcccggtttggagcagtc

SEQ ID NO: 7894 - DNA, 1471 bp, Oryza sativa
  ref <308>: DATABASE ACCESSION NUMBER: AK105242
  ref <309>: DATABASE ENTRY DATE: 2002-08-28
aaaaagaaaaaaaagaaacctagttcgtcaccgtcaccgacgccgggaaggaggaggaagcggggagatggcggcggcggcggcggcgcggctgccgcggacggaggccagggtgctgtcggggcacgagggggcggtgctggcggtgcgattcaatcgggacgggaactactgcctgagctgcggcaaggaccggatcatccgcctctggaacccccacaccggcgccctcgtcaagccctacaagtcccacggccgcgaggtccgcgacgtgaactcctcctcggacaatgccaagctggtgtcgtgcggcggggacaggcaggtcttctactgggatgtcgcatctgcccgtgtcatccgcaagttccgcggccacaacagcgagatcaattcagtgaagtttaatgagtttaacacagttgtagtctcagctggctatgatcgcacagtgcgtgcatttgattgcagatcacagagcagtgaccctattcagacaattgatacttttcaagatagtgtaatgtcagttaatttaaccaacacagaaataattgctggcagtgttgatggtactatccgcacatttgacattcgcatgggtagggagactgtcgacaacttggggcatcctgtcaactgtatatctttgtcaaatgaccgcaattgcctattagctaattgtttggattctactgtgaggcttctagacaagtccactggggaactgttacaagagtacaaagggcatatatgcaagtccttcaagatggattgctgcctaaccaacgatgatgcatttgttgttggtggatccgaggatggttacattttcttctgggagttagtggatgcacctgttgtttcaagctttcgagctcatagttctgtggtcactagcgtcagttatcacccaacaagggcttgcatgctaacttcatctgttgatggcaccattcgtgtttggacctaaaagtgggaattgctgttgtgctggactcatatcctgacaacattgcttatgtggcattattctccaattcatctatttttgaagcagagaggattgaaaaggatagatgttcgcaagttcaaccctaactggaaccaaggagctgggtgttaagataagattgtgctacttggcagtagttctggacacggtcaaggcagcaatttgctagtgaggatgaactatatccaccaagctaagtcttctgcgcagcaagctccgacatgtgaaatacagtctgccgatgtaccatggccattacagctagttcaatcgtgagaactggaccagtcgaactgagtatccgtttggaactttacgatctggaacgagtgtacccatttgttactacggtcacctacgggtaatttttaacctgagattgatgatgatataatacggctcttttggtcataaataacttagttcttttcctctaaaaaaaatttaacttagttc

SEQ ID NO: 7895 - DNA, 2433 bp, Oryza sativa
  ref <308>: DATABASE ACCESSION NUMBER: AK105243
  ref <309>: DATABASE ENTRY DATE: 2002-08-28
aagctacagatcgctcgctgtctcgctcaagcgcgacctaccacagcatcggatcgaagcgagcggcggcggaatgggagggccgctcggcgccatcataggcaggcacccggcggcggcgggcggcggcggggaggatgagctgggaggtggcggcggcggcggagatggaggcggcatcattcggcacaaccggcggtgccgggatttggccttcctggtgctcttcgcggccttctgggtcgccatgatcgtcaactctagcttcggattcaaccagggcaatccactcaggcttacctatgaactagactacaaagggaacatttgtggcagtaggcatggtgacccggatttgcatgagcttgatgttagatattggatgaacccaaaccaggtgtaccaaagtggggtcaaggacaacaagattaaccttgctgatgccaaagccatctgcctgatggagtgccccattccagcagcagacggattaaactttgtttgtgattatccagaaggggacattcgcctctctatcgatgattggatcaacagggactatgattattttgagtttctcgcaccagatatgagaaatagttctcttcagctgcagggtccatgctaccctgtcatatttccaagtgtgaatgtctactggagctgccaatttattgcgcgagcatccaatgtctctttgaagcattggcagcagatgggtggtatcaacatcgacgaaaatattctcatagataaaacaatacacaaggccatcaattctaaatcttcagtcttgaagagatacgttgctgacattgggaagtcatggcctgtgttaattgtttgcggtggactgctccctcttttcttgtcagttatctggttgcttctgattcgttattttgttgctgccatgccatggataactgtagtgctcttcaatgctctagtaatctccgttactatgtttttttatattaaagctggctggttaggcaatgatcccttgacagttgtaattggtgaaagtgatccatatgtgcatataactggacgggaaataagccaccttcatgctgctacggtggtgatgacagttgtaatgatcattgcatttctgtcctccatagctattatccggcgtatactgatagcaacacctgtcctgaaggttgctgcgaaggtcattggtgaagttcaggcactaattattttcccagttgtgccatactttatcttcgctatcttttatatgttctggttttctgccacactccatctcttcagctctggtcaagttctccgaaatgactgcaatacagattgttgctcatatgatctgaagttgggcaaagtaaactgtgacaactgctgtgggtacagcatccattacacccctcatattggtattgccattcttttccacttatttggctgttactgggcaacccaattctttattgcgtgctcttcaaccgtgattgctggatcagttgcttcatactattgggcacgtggtgaaatatcccatgacataccatttgttacagttgtttcttcattgaagcggttgttgcgttacagccttggttcagttgctataggttcacttgttgtatctgctgttgagtgggtgcggtttatactagaatgcctcagacgcaagttgaagctatttgattccgctcgtgaaagctgctttggtaaaatgacatcatcctcttctcaatgctgcctgggctgcatagactggaccctcaagtctgtgaatcgaaatgcctatataatgatagccattactgggaaagggttcttcaaagcttctgttctcgcaactggtttgatcatgaataacatactgcgcattggaaaagttaacgtcattggagacgtcatcctctttctggggaagctctgtgtgagcttgttctgtgcgctctttgccttccttatgttagacactcacaagtacaagtctgcacataacaagatatcatctcctcttgttcctgtagtggtatcatgggcacttggttttatagtcgccaagcttttcttccaagtcgtcgagatgtcgatcgacaccataatcctctccttctgtcaagattcagaagagcaccaagggaacgcgcagtacgctccccctctcctagtggagacactggatgaacagagtgaactccatagactaactcaagggccttgacttttcttcttcttgcaagtagaattaagtcagaatggagaaattaagtagaagccttgtcattatgttctttgttgctggctagtgggtaatttcaccattttggtagtgcactctgatgctgaaagtctggtctatagcgtgactagtacccctggcctgatctaacgtatgtactcctactatactttgctaatacaatgatagtgaagaaggttatatct

SEQ ID NO: 7896 - DNA, 1483 bp, Oryza sativa
  ref <308>: DATABASE ACCESSION NUMBER: AK105244
  ref <309>: DATABASE ENTRY DATE: 2002-08-28
attttgcacggtatatatcccagtctgtgtgtgagtgtgtgtggtctgtggagtgtatggttgatttggttggtaattggctaagctagctatagcatggcgttctcgtcggagggcggcgtgccggcggagagggtggcggcggcggtgaacgacctggtggaggtgcgcgacggattggtgaggctgaggggcttcttgccgccgccgccgcaggccgagcaatcgtcgtcgcggccgccgtgcgcggcggagctgatggacgcgacgatgagcaagctgatgagcgcgatggccacgttgggcggcagcggcgacatcgccggggaggtggacgctcctctaacaagagagtcgccgcaacactagaagacggtcacgtgtggcggaaatatgggcagaaagatatccaaaactcaccttatccaaggagctactacaggtgcacgcacaagctagaccaaggctgcggtgccaggaggcaaacccagcgctgcgaggccgacccgtcgaattacgacatcacctactacggcgagcacacctgcagggacccttccacgattatcccgacggccatcgccaacgccgccggcgcggcgagcgacgggccaaacaacaacatcatcagcttcgccacaggcggcgtcgttgttgctaattcgtctcggctggcgagggaagggacgacggcgacgacgacgagcgcggccacgcagctgtcctcctcgtggggcacgagcggcggtggcggcggcggcgacgacgtgttcagctcgtcgggggagcggttcatgcagtgggacgagctcgcggcggccgtcgggcacgtgagctcggtgggggtgacgtcgtcgacggtgggctccgcgccggcggcggagaacgacggcggaaacggtgacacggctgcgggaggaggaggagacggcggcggcgcgggcagcttcccgtcgtctccgagcgccggcagcctcggttttgtggtcggcccgctcgggagcatcgaggacgtcgatgacttcttcccgttcgatccctgagatgagatcggcgccgtcgattgaaccagcagtttgcagcggacggatttacacaacgttcgtagtatactaccagtacatagtagcaaacgcatcaaggctttagtattaagttgcataatggcatctctgtggaaatcaaataagcaaatatagaaccatctagtacattaagtaggttgcttatctacagactagactacagtgactcacacagcttctagctgtgcaagttggttaaggtgatgttttagattgaaatccaagccacgcatgttgatgagccggaattgggctcactaaaatgtggcttaagtttttgtttttttgtttggattgcttgttggcggcccaatggtaaacggtcactcttttcttctcagtttgcaagcctagcccactataccgacaaggaaaaacccatgtaatctgctaggctc

SEQ ID NO: 7897 - DNA, 847 bp, Oryza sativa
  ref <308>: DATABASE ACCESSION NUMBER: AK105245
  ref <309>: DATABASE ENTRY DATE: 2002-08-28
agcaactccactctactccgtcgccgccttctcgcgacgcctcctcctctactccggcgacggcgaggcggcaatgcatccgcctcctccgacgccgcgttcctcgttggttttacaggttcaggttggtgaatggggaattcgcacagctgtagtgttgttgcttgagcacttctcagaaaaagcatcccaacaaagcttcgagccgattacaagacagtgggcaccaaggttgcctattgctttatgatcagcaatgcagagaatgtgctcaagctaagatgaactttctgaaccttgcaggtttcatctcactttatgcgttgtgtaatatgtaattgttgcatgacactcttgctctttgccttactaaattcacctggccgtgtacatcctaagcagaagagaatgctggacgaaccattgatcagtccataattacccatgaatgctataggcagagcaaagtaactcgtgttggtgctgtgtcaatggtctgtctggtaagttgcctatcacacaaattgattctcatttatcaacaatgcaaattctacatgtcctcttagttgtgaaatacaaattctagcatttgttcgcatcatgtctatttcctagtacgatccttgcatatatcaatgtctgtgtacagtttttgtgctaatgttgctgaaataaacatgattttgttcatgtagaattttattgctagttctatgtgcaatccttttgcgtgttcacgaaaattgctctacattagtgtcccttgaatatagtgttgtactatatgtcataccactcggttctcacccagtaaactggtatatagatatttgctgagagatac

SEQ ID NO: 7898 - DNA, 1307 bp, Oryza sativa
  ref <308>: DATABASE ACCESSION NUMBER: AK105246
  ref <309>: DATABASE ENTRY DATE: 2002-08-28
acgaagagcggcagaagctttttttttttccttaggcagaagacagaggcagaggtcgtcagtcagtgtagattaggtatacttcgtactgaccaccagcttcgtgcgcatgcatgaatggcgaagtggtggtgtaactgacgatcgatttcgggaggtaaccggcgagtaagctaggagaggatgcacagccgcaggacccccccaccatccatgcacagtggccttcacaagctcgcagagctcagctccggctgcctgcactgcactggctgcaacatacggtgtaggtcgcccagatagtagcaaatattctctctactcgagtctcgtcatctcttatcttcagagttcgcactcttcaagaatacaccgggcaactcgccgaagaagaagcttcagcggcagaagaagaatcacccatcgagagttttcccctcccaaggaagatcagggatctcttcttgagataaaaacagtcatgtctgagaccatagatttaaccggagatagatgcattcttaagacagtgatcaggagagcaaaggatgatgctactgcaccttcagatagtcttcccattgttgatgttcactatgaaggaacacttgctgagaacggggaagtgtttgacactactcatgaagacaactccgtcttctcatttgaaattggagagggaactgtcatcaaggcatgggatatcgccgtgaaaacaatgaaggttggagaggttgcaaagatcacatgcaagccagaatatgcttatggagctgcaggttcacctccagagataccgccagatgcaactctcacttttgaggttgagttaatcgcatgcaggccgaggaaaggttctagtgtggaaagtgtatctgaagagaaagctaggcttgaggagttgaagaagcagagggagatcgctgctgcagccaaagaggaagagaagaggaaaagggaggaagcaaaagcagctgcagctgcgcgtgtacaagcaaaacttgaagcaaaaaagggcaagggaaagaaggccaaatagataatatcacactaagacaagttatgaggtaggagtatataaaaagtataaagttatgtatgaacctggtaactgtatgctgttgaaattccacacaaacacaaactttgtttggttgtagttaaaatgggccatgaatatgcatataaacaaaaagaagtcgtgtcactttgatcacagtgtgcaccagcccatttgtgcaagagtttaatgtttttagggcatgttcagagatgcaattggtaaaatatatgaagtgtttgacctt

SEQ ID NO: 7899 - DNA, 1101 bp, Oryza sativa
  ref <308>: DATABASE ACCESSION NUMBER: AK105247
  ref <309>: DATABASE ENTRY DATE: 2002-08-28
aaaaaaaaactctctccctcatttctctcttctccagcgagtttgtctacatgtggctggctagcggcactgctttccctccaccttgcaacctcacgcactgatcctactcggatcctctcctcctcactgatgcctctcctgtcctcgagcggttggttgatcgatcgatcagcacggttcttcgccagccatgacggcggcggcgatggcgccctcacctccgaagccggtgtccccgaggcagatcagcctgggggacctcagggcggatctggttcgagtgggatgtgctcatgtcgctgagccacccgctgctcccttcactccgcggtgtcctcgccaccgatgtcgttgtcgggttggtcatcgaccgctacggcggaagagacctcaactcgctctgacgccgccagaccaagaagatggcttcaggccaagctggtggcggctaagaaccgccacgccacaacggtggccgagataccgccgctcaagtctaccgtcgagctgacgaatgacgccatcgtcgcgaggatggaggcggggaagaagcgggcggtggtggaggtgctccaccggcgcattgaccgcgagcgtgacgacccgcggcggctgcggtcagaggtcgcactggagcagatggtgctcgtccggcaccaggtcgctcacgcgctgcagttggccgagcgcgccgtggcggcggagacccacgggttggctttggcgtgatcagcggtcgccactaccgagcaggccgcgcgtgctctagtcagcgacgtcgatgttgatgtcgacgcggcccaccacaatgtcgtggcggtcccaacgcggaggccggaggagttgcgcgggggcgtggagggcgaggagagaacggccgagtttcacgtcgaggagattgtggccgccataaggttggccgaggcgcacgccaggaagcaggaagctgctgagcaatggcacggccgtgaccttgaagtcgtgatgttctgcaacaaaatttgcatattaatttttgtggctaaatcctgctcaatttgaatatgcgagcaaataaaagaagatcagaaaaaaaaaaaaaaaaaaaaaaaaaaaaag

SEQ ID NO: 7900 - DNA, 2448 bp, Oryza sativa
  ref <308>: DATABASE ACCESSION NUMBER: AK105248
  ref <309>: DATABASE ENTRY DATE: 2002-08-28
aaaaagctccaccgggggcaaaaaaaaaaaaaaaaaagcggacgccgcctgcgcctcgtgttcctccacgtcgctccgccgctccgcccgccttgcttgcgagccacagcgacggctggccacgcgcggcgtgtgcgtgcgtagagcgcggggggggacggaggcacacgctggccaccagctgcagctgcagcgcagctcgctctccttggccaatgaacgctcgttgctgccagtagctcgttgattctcaggttaaggagctggctgacagaagcatagtaccatggtagagaacggtgtgcagctcacattgacctccactgtcaagaccaatggcaagataagaatcaatggagaagtgctaaacggatcacacctcaaagagaagcacgaagctggcagcaatggcgccctgcacccatcaaacgggcaagcaaagcagccgccgtcgccgccgcagaagcagaagcagaagctgctctgcacgacgtgcggcaaggggcacacgtgccaggcggtgatcgcccggacgcggcagatgcgcgccatgatcgacgcgaggaggccgcaccaggcgcactcggcgttccgccacctcgtcgacgacggccaccgcccgtcgctggtgacgtacaccacgctgctcgcggcgctgacgagccagcgggcgttcgacaccatcccgtggctgctcgccgaggtggaggacgccggcctccgcccggactccatcttcttcaacgcgctcatcaacgccctcgtcgaggcccggcggatgggcgaggcgacgaacaccttcctcaggatgggccactccggctgccgccccacggcgagcacgttcaacacgctgatcaagggctacggcatagccggccgccccgaggagtcgcagcgggtgttcgacatgatggcctccggcggcgccggcggcgaggcggcggtcaggccgaacctgacgacgtacaacatcctcgtcaaggcgtggtgcgacgccgggaggctggaggaggcgtggcgggtggtggcgaggatgcgcgcgtcgggcgccgacccggacgtcgtcacgtacaacaccctcgccagcgcatacgccaagaacgacgagacgtggcgcgccgaggagctcgtcgtggagatggcgcagcaggcagggctccgcaccagcgagcgcacctggggcatcatcgtcggcggctactgccgcgagggccgcctcggcgaggcgctccgctgcgtccgccagatgaaggactccggcgtgctccccaacgtcatcgtcttcaacaccctgctcaagggcttcctcgacgccaacgacatggccgccgtcgacgacgttcttgggctgatggagcagttcgggatcaagccggacatcgtgacctacagccaccagctgaacgcgctgagctccatggggcacatggccaagtgcatgaaggtgttcgacaaaatgatcgaggccgggatcgagccggacccgcaggtgtacagcatcctcgccaagggctacgtgcgcgcgcagcagccggagaaggcggaggagctcctgcgccagatgggccgcctcggcgtccgccccaacgtcgtcaccttcaccaccgtcatcagcgggtggtgcagcgtcgccgacatgggcaacgccgtgagggtctacgccgccatgcgcgacgccggcgtgcgcccgaacctcaggacgttcgagaccctcatctggggctacagcgagctgaagcagccatggaaggccgaggaggtgctccagatgatgcaggacgccggcgtccgccccaagcagaccacctactgcctcgtcgccgacgcgtggaaggccgtcggcctcgtcgagaacgccaaccgcgcgctcggctcctcctcctcctccggcgacctcctcgacgccgacgacgacgaggagccctacttcccggacaaccatggcgacgacaagctgcagagcttcgagagaaccaatggccatgccaagagtgacgcgtcacgatccatgcaggtgacaagagcttccatgagcttgaagacggcgaggtcgtcgtcgccgtcgctgtcgctgctccggcgatcgtgccggcttccggtgagatccacgtggctttgcaggaagcagcttcagatgcagtgtggagtgtatggccagagcatcagctcactgaagatggtgttcctcagttagaggaggccatcttgtgttgttgctcagtaaaaaagaaaaatgtacactggcaagaacctgtcaattacaattcttactatttctcaacacacattggatgatttctgctgtgccaagaactcgcttcagatgtctcaaaaattttggaaggaagactgggaaatatgtttatgtaagatagcaaatgtatgttgatcatggacagcttgttttccaaaacactgatgatatatggtatgtctagttcaatg

SEQ ID NO: 7901 - DNA, 2063 bp, Oryza sativa
  ref <308>: DATABASE ACCESSION NUMBER: AK105249
  ref <309>: DATABASE ENTRY DATE: 2002-08-28
gttcactctccactctccttctctatgttccgcctcccgccgctccaccgcgccgccgccgtcttcctccgcctccgcctcgcctctccccgcgcaaccttctcctccaaacccgccaatccccgcaccagcagcgttgcctccgccgccgcccccgccgccgccgcggtctcagatgcgatcgttcgcctcgtcgcggccggcggcaggagcctcgaggccgaccttgaccgcctcgaccccgccctctcccaccccatcgtgtcggccaccctccgcgcgctcaccgaccgcggcctccccgcggcccgcttcttcgactggctcgcgctccgcaggggcttctccccgagcgcccacgcccacaacctgctcgtcgagaatgccggcagcctcgcggactatcgggccatgtcccgcgccatggagagcatgtctacgcggcgggttcccctgaccgaacgggcgttcgccttcttgaacacgtcccagggcagcgccagggatacggcgatagcgattctagcgacgctggatgaagtcgggggcccttgccgtgcgtccggcgtgttctcgctcgtcaaggcgctagcttcgatcggtgagttcgacgcggcgatgtctgtgatccaggagacggcgaggggggcacgttactacaacgccctcatcgccgtgaagtgcaaaactggggacttccatggcgcccgcgaggtgttcgacgaaatgaggaggtcgggcttcggcccgaattctaactcctggaactacctcctcgggtgcctgctgaagaacggcagggttgcagaagcttgtgagcttgttgaggccatggagaggtctgaacacaacgacatcccgaactcgctgacctacgagattctagcataccatgcgtgcaaagcggggaggatggattcagccatgcggattcttgatcagatgttcttggagaaattgacaccgaggattacgattcacacagccttcatcaaggggtacttatacgctggaagaatagatgatgcttgcagatatgtcagtgctatgagcaccagggacaggcgctcagtgaacaggaactacagcctgctagccaagctactgtgtaaggcagggatgatcgttgatgcaggaagaattctgtatgaattgatggagaaggaggcactcttgcctgaccattctgcttacattagagtgatcaaagatttgcacaagattggcaagggagatctggctgctgaattgaacttgattttgcagaagctcagtgtacatgcagaatcagcgggatgaaatttcaagtagtcttggagcaagtgatgagtcttgtcttgcgtcatttctgtcctctctctatgatgtggatgtcagaaggacttgatgtaaatcagagtcacctggctgataaagaggagagcagacatgaatcatgcacaaatggtgcaagctgttgtcatgtagagagaggaccatgtgatttcctgcagaaaaaaaaagacagtcactaggcaaagccaaacaatcgtaccactggattgccacattgcttccttggattttaactccagtttcggtagttttttcctactgaaggtagacagaatttggtacttctatgtgcaaattctttgatagggacattacttatctacaggattgcagtacaaatgaagatgagtggaacaagtacttgaatatgcaaattctttgataggaaaattacttgtgttccatactgccattacattcagcctgtagatggttaaggacaggtgaacatttgtgtgacactgttttccttttccatcactgattagaatagtgaatctgtgttgaagtgtaatgtggtaggaaatcacattcacaggcgaaatttctgctcgaaaaataattcacaaggaggcactcttgcctgaccattctgcttacactagagttatcaaagatttgcacaagattggcaagggcgatctggatgctgaattgaagttgatttttcagaagctcactgtacatgcagaatcagcacaatgaatcttgtcttgatgtcctctccc

SEQ ID NO: 7902 - DNA, 1222 bp, Oryza sativa
  ref <308>: DATABASE ACCESSION NUMBER: AK105250
  ref <309>: DATABASE ENTRY DATE: 2002-08-28
gaaccctcccctcccccctcccgcccgccgcgtacggcgccggcggccacggcgagggccctcgtcgtcggaggccccctaccactggcctggcggggctcacccgccgccccctcctcctctcccgaaggccgaagaggcgcgcctccatcatcagcagcttttcatagcaaagactagcttgaatagattattatctgccaatggcaagggaaccaagtcctgaaattgatgatgaactattcaatgaagtttatgggaaggcatacagtggtccagttgcaacaactactaacaatgtgacgcctagagtgaatgatgagaagaggcccctcgaacgtgaaaagtcagatgaggaagatggccccccagatcccaatgctgtccctactgacttcactagcagagaagccaaagtctgggaggctaaagctaaagctacagaaaggaactggaagaagagaaaggaggaagaaatgatttgtaaaatatgtggagaatcaggtcattttactcagggttgtccatccacgctgggagcaaataggagaaatgcagatttttttgaaagagttccagcaagagataaacaagtcagggatctattcactgagaggacaataagtcagattgagaaggatgtggggtgtaaaataaaaatggatgagaagttcctgtttgtcagtggtaaagataggttaatactagcgaaaggtgtcgatgctgttcataaaatcattcaggagggtaaaggtaaaaatacttcaagcagtccaaaacgggatcgtttgagatcccctgtgcgaactaccagtgatattcgcccaaggcacactgattctagatggtcacatagtccaagaagtgctccgcgctctcaaagtaaaggatattataacgaaaggcctctagatggccgttcacatgatgatatgcctaagttttcgaaagaatctccacaaggtagggcgctcaagcacactcgtcttatcattgttgtatcggcaaatattaggagccaggcattttagacgatttgagataaagaaaatgcctctgatccctttttgttggttaccaccatctatggtaatttgtttggttccttttgcagctagaggtaagttcaagatttatgtgctcaaatgactcaatgtatgtctggttatgatcagacaaatttacttgaatacaacaagttccatatcgaaaggttttccag

SEQ ID NO: 7903 - DNA, 1965 bp, Oryza sativa
  ref <308>: DATABASE ACCESSION NUMBER: AK105251
  ref <309>: DATABASE ENTRY DATE: 2002-08-28
accaaggagtctgacatgcgtgcgagtcgacgggttctgaaacctgggatgcgcaaggaagctgacgagcgggaggccctcacgggccgcaccgctggccgaccctgatcttctgtgaagggttcgagttggagcacgcctgtcgggacccgaaagatggtgaactatgcctgagcggggcgaagccagaggaaactctggtggaggctcgaagcgatactgacgtgcaaatcgttcgtctgacttgggtataggggcgaaagactaatcgaaccatctagtagctggttccctccgaagtttccctcaggatagctggagcccattacgagttctatcgggtaaagccaatgattagaggcatcgggggcgcaacgccctcgacctattctcaaactttaaataggtaggacggcgcggctgctccggtgagccgcgccacggaatcgggagctccaagtgggccatttttggtaagcagaactggcgatgcgggatgaaccggaagcctggttacggtgccgaactgcgcgctaacctagaacccacaaagggtgttggtcgattaagacagcaggacggtggtcatggaagtcgaaatccgctaaggagtgtgtaacaactcacctgccgaatcaactagtcccgaaaatggatggcgctgaagcgcgcgacccacaccaggccatctgggcgagcgccatgccccgatgagtaggagggcgcggcggccgccgcaaaacccggggcgcgagcccgggcggagcggccgtcggtgcagatcttggtggtagtagcaaatattcaaatgagaactttgaaggccggaaaagaaaaaaaaaaggaatccgagcagccacgtcgccggcgacgccgcccgccctgaccgacgacgaaccggccgccgcccggcgagggagatgaagacggtgagcctcggcgccgccaggccttcgtctgtcaagttccgcatgccgacgagggataacctggtgccgatacgcgtcgacgtcgaggtggacggccagcgctacagggacgccttcacctggaacccatgcgaccccgactcggagatcataagcttcgcgaagaggacggccaaggacctcaagctgccggccaacttcgtcccccagatgctccactccatccaggggcaactgaccgagttccgttcctacgagggagaggagatgcagatcagggagaagattgtgcccctcaagattgacctccggataaacaatactgtaatcagagatcagttcttgtgggatataggcaacctggatagtgatcctgaggaatttgcaaggacgctatgtgacgatttgaacattacagatcctgaagttgggcctgcaatagctgtctccatccgcgagcagctttatgagattgctagtcaaagtgtttctgctatgagggaagcagctagagtttcaaagaaggggaggcgagcaccagaatttgcttcaaatagtaaagccatgaacaattcactagatctattcaagtattttggcagcaaagggagtgtcgttcggaaaaggaaggaatggtacttgtatgagcctgttgtagatgtcataactaatgaggaagttggagtaactgatgcaacagaggagattaactccaggaatgcatgagctgaagctgtaaactgtaccgcatttgatgatcctgacgtgttgaaaagaaggatgagagcctccaacccatgttacaccaatgctgtttgcaaagctttctggttgtgactgcagacctcaggaaagaagccatttcaatgtttgtgtttggaagggagggcgagcattaggagcattaggtacctggctaggttagctctgttctgtagatgtgtaatgtgttgtactcataaaaaaactgcatggaagccatggaatgtgacctacctgtatggagcttgcccttcagtttgctattgtgtcgacc

SEQ ID NO: 7904 - DNA, 2283 bp, Oryza sativa
  ref <308>: DATABASE ACCESSION NUMBER: AK105252
  ref <309>: DATABASE ENTRY DATE: 2002-08-28
gcttcagtgagccaccgcgtcgtcgcgacgccacgccgcgcaccggctcagggactagggcacgcgccgcgggggagttggccggcaatcccaacccaccccaaaacggaggtgaaatttagccggagcggtcgagccgccgcggcctcgtcggcgtggagagacgaggacaccgcgcgcggcgcgttgggttaggatttggatccgcgggttcctctgcgcataaatttcgcgcggcgcggcgggttaggatttggatccgcgcctcgcctgccacgagacaatcggttgcatctgctactgcatcctgtttcttgcaaccagggtgcagcccgtcggtgcaattgcaggcgaatcgcaggccgtcgccatatgtgcattgccctccgcttgctacgcatttggggcaatcacctgatgcccccgcccaatccaggagaaaaccactcatgctggcaacgtaaccatctctactcccattgggatgctcaaggatcggcaccatctctactctacgtttgatatgacaaatcacatcatatagaaagtatttagtatggatttatcatgaaatcatgtttgttagagaaatctaatttttattttatttttactgtgcagatagaagtggggtttgtgtggatatgaaggaataaatggccatcttaagagaatttggaacgatagagggcatggaaaacctgctacctgaagatgtgctcagcaacatcatccaccgtcttgcaccacgctaccttgccatatcccgctgcgtctgcaagacctggtgtaccatcatcgaggcccacaacctgctgcatgtggacctcctcccacggccgttgtgtggaatcttcattaactttaatgagttaagcatgtcagagttcttctcccgcccctcaaaaggcccaacggtatctggcaactttgactatttgccttgcagctcctgcattatagaccactgcaatgggcttctcttgtttcacaagtatgtggttaacccagccacacgacagtcggcgccactgcccccatgcccatatatggtcgtagagcacattttccacagggagtaccttgtcttcgaccccacgttgtcaccgcattttgaggtattcatgatccctgagatccgacgatccaatgtgtggtataacatgttgaattcagatgacaagttagaccctgcaatagaggaattagaatggccaccgtcgccttgcatcctgcatgtgttctcatcaaggacaaaggtgtgggaggagaggtcatttgttcgagaaggggaggctgcagggaatgtttctgacatgcggttggatcacccatatgttccagacacttctgtttatgttccagacacttctgtttattgccggggagtactttatgtatattgccaaaacaagtatgttatgagaatatcattatccaatgggaaatatcaagtaatcaagccaccttcagattgtgaggggatggcatacacaaatctttatttgggaaaatcaatgaaaggggtgtactgtgctgtgcgtcacttggcatcccgttttttgatctatattcttgatgaatcgagtgacagaatggagtgggtatgcaaggattcgtgtagtattcagccatgtcaaataattgacgggcctggaccctggactttacaagatattaacaatcaggagcggggatttgagtatgaagacggtaacaatgaggcagtggtagaggacaggtttgaatgggactcagacaatgataatgttattgagaccaacagcaggggatctggtggttatattaattttcttgttgacactacaaggaggggcagatataactctggtggttatattgattttcttggatttcacccttacaaggaggttatcttcttgagtgattcgttgagaagaggattggcctaccacttaaatagctcaaagattcaagacttgggcagcctccgtccaacaaattatggaacagaggtgggcattcagccatttatacaaaagttttttccatactcaccttggatgggacggtttccagaagacaattaatttcatctggaagattacgatgtattgcatatatgcaaatgacactgcgtacccatgtaaatgtcccttttataagggcaaccatgtaaaatcccctgtaaacctaaacctagaaggtgtaagcctgtgctaaggctataaatagacccacagggccatgtagtggggggatcccaaaaattttatcaatcaatacatttattgcttttcc

SEQ ID NO: 7905 - DNA, 2661 bp, Oryza sativa
  ref <308>: DATABASE ACCESSION NUMBER: AK105253
  ref <309>: DATABASE ENTRY DATE: 2002-08-28
ctggtttgctatctcagtgtgggcatgctaagagtactggtgaaagagatcctacagaaaaagtttcaccgttcgaattggcatcgcatgaagtcccagaaattcagcaacatgttcagtccatcatagattctcattctggatcttttggagtgtggcatcctacttcacattctcaaggattgtctctgaaatccttgcatgttcagcagagaactacccactatgatttagctgcacaaaagaatcatatggcggaggccttctcaggcagcataactcaagaatatgcatcaaatgctgttgagtcttcaaaacaacaggagactaatccatttttgctgcagcctgatacttatggtgctcatagagctaatgatatagatgaccttccaaaagttgacttcgctaatctccatagagttgagttgaaatttgatgtgcatccaatcaacagggaaactacaataacttctgatgtgctgatttgccctaggttatctgataagaagtcaaacagtccattccagcaatcatcgcaaccatcatttcaagttgaaggcatcaagaatcatgaaaaggttgaggtgaaagaaaatgtcacagacatgatttcaagggagataacgaatcaagtatctcatcgcaaggcagaaatagagaacttcaagagcaaagatgacattgatgctgaagacatgccagagtgtcacttccaggggttggataatgagaaactgcatcaaagcggttcaagtaaacatacatcaccatctttgaagaactccacagggtctaaagcaccatcacaagtgtttcctccaattactcagaaatcttatactccacttgaagtagaagacatctcttctggtcatgatccaaatatgccatctggatgtctgaacataccaagagatcaagtctcgtttcctcggcatcctccacctgcacaaggggatcaacggttagcagctcggcatcctcctgtactagcagatcaaggttatgttcctcggcttcctcctcctgtactagaagatcaaggccttgcttctcggtgtcctcctcctgcattagctggtcaaggcttcgttcctcggcatcctccacctgtactaccaaatcaaggcttctttcctcggcgttgtcctccatttgcaggtcaagacttatatccttggcgtcctccgttccatgcaaatcaaggcccatttcctcgtcatgctcctccacatccttgtcctccatttactccaggacacgtgaggccacctagcaattttgctccccctggcccttggcgtccagttctgcatccagggcaagaacaccatcaccatcactacggacatcctggaagatcaaatggtccatcaggctctggcaacaaaccaggctaccataaccccagctatggaaatggaccaggaggttgcaggccacaacaccaagctcaaggataacattctgcatgattggttgcacagattatacccattcccaattgcattctgaacaactagagaaaaaaaaaaacatagaacaactcctccatttggtggacaacaaagagctcctcaaactttctctagatgatgttgcctttatggcgaatttaccaataagttgtacagtacatagccatcttgtgttgctgaattgtgaagttttgttgttagaaaattcatggatttccagagtgattcaattgtggccactagactagagtagagtgagagagtggctcacctgcggttgtgcacgggagccacatgagaagtgatcttgtcggccccaccgcaattcgcggagaatcttctttcttcccgaccgttcgacgcggctgcgccaaccgaaagcgtctcgccgcgccgccacgtctcgccggagcgcgcgcgcgcacacccacccgaacgccgccgccatgtcctgctgcccctgcaccaccaccacctcgtctcctctctccctgccacgccccgcttgcagaggcaggtggtccggcggcggcggcagcagcgccaacgccgccgcttggagggcgcgtggaggaggagcgaagcggagtttggtagtcgcggcgagcggcagcaaggatgagacggcggaggggaaaaagcaggaggaggagtcggagttcaacccgttcgggttcgtgacggacaacccgtcgagccgcggcgccatccagctgccggagtcgcccgcccaggacggcaatgtcggccagatgctctacgtaatgcccacttcgccacacctccttgattccgaactcgtatcattgttgaccatttctagtatgctgtaaagtaatctcgacgcgtgcagaggatcgaggacaaggggagggagttcggctcaagagtgaaatcaggaaagctgcggtggtttgtgagggaaacaggtactgtttcttcatttctgtgttggttagatgaaagatgatcttattgcagtgatcactgaacgttagtaaaacgttgtatgcacgttgatccagtgaaatggggtgtgtactgacgacgaagcagtattgcattgtgaatacaaatttagtatttaagaataaaaacgaatgatactttcactaagatagtggattttgtcagacctttgtgtatttcagtaatattgatttctcctacagtagtacat

SEQ ID NO: 7906 - DNA, 2245 bp, Oryza sativa
  ref <308>: DATABASE ACCESSION NUMBER: AK105254
  ref <309>: DATABASE ENTRY DATE: 2002-08-28
accagaaacacacgcgcagacgctgccccggccccggccccgcccccgcccccaacactctctctcggatcccctttcctctcttccttcgccgcgggcgcgccacggcggcgacgggtcgggtctcgctgtcgccgccgctgctgccgaaatggggtacctctcctgccgcgcggactcgtcggtggcgacgtgccggtccatcaccgccatatcgccgctgccgctgtcgcggcggtcgggggtcggcggcaggcggcgcgcgctgccggcggcggcgagggagggggatggtggggaggcgtcgtccgccgccgccaccatcgagcggttcgcgtacgacgaactggaggcggcgacctcccacttcgcggacgcggcgctgctcgggaggggcagccacggggcggtgtacaaggcggtgctcgcctccggccgcgccgtcgccgtcaagcgcccctccccgcgccgccccgaggtggacaacgagatccgcatcctctcctccgtccgcggcccgcgcctcgtcaacctcctcggcttctccgactccggcgccggcgccggcgccgaccagcagcagcagcagcaccgcccgcgcctgctcgtcgtcgagtacatgcccaacggcacgctctatgagctgctccattccaacccgcgcccgcccgggtggccgcgccgcgtccgcctcgcgctccagacggcgcgcgcgctccgcgcgctccacgacgccgatccccccgtcatccatcgcgacgtcaagtccgccaacgtcctgctcgacgccaacctcgacgcgcgcctcggcgacttcggcctagccctccgcgtgcccaagcggctacccggcgacgccgccgccaatgccgccgccacgccggcgccggcgggcacgctcgggtacctcgacccggcctacgtcacgccggagagcctcagcaccaagaccgacgtcttcagcttcgggatcctgctgctcgagatcatgagcggccgcaaggccatcgacgtccagcactcgccgccgtcggtggtggagtgggcggtgcccctgctgcggaaggggaaggtggcctcgctgttcgacccacgggtggcgccgccgcgtgacccggtcacccggagagacctagccgctctggcggcgagctgcgtgcggtcgtgcagggagcggcggccgtcgatggccgacatagttgatcggcttgtggttctcagcaaggccgtgtcgggcaaaatgtggaacggactcgccgtggttgggaacccctgcgctgtcgtggatgtccagaagaccatcgcgaagcgagctgctgctgctgctgcaggcgatagagccgcgtcgcagcgggagctgacttcggcattggcatttgatgatgatgagaagaaagaggaggaggatgcgccgaatgcaggtgcgttagaggaggatgaggtgccattggtgggtgcgaagaaagcaccccggccattgaagaatgggaagatgttctctgagccaggggcaagggagaggagaaatctcttggagctcatggctcggattgatggtgtcgccggccaaagatttggcataactcgggcaagaacagtgcgtgccgctagtgaatctatcgaaaaagatgcggcggtgttgctcctgaggagaaatcaaactgtgaaagtacttggatcggaggccctttctaaagctgatatcttttcaagtttggatgcaaaaatcaagcatgaattggggaaagagcagcaagaggaggcaggaaaaatcaagcatgaattggtgaaagagcagcaagagaaggcaggaaatatcaagcaggaattggtgaaagagcagcaagagaaggcaggaaatatcaagcaggaatcaggggaagagcaagagaaggcagggaaaaccaagcatgatgcagggaaagggcatgttgagaaggcagtgggaatcaatcttgaagcagggaaggagcaggagaaagtagagaaaaaccaagagaaagaaatgaaaatccaagaaaaacttggggaaatctttgataaagcaatgaaatctgaagaaaagacagggcaaaatcctggcatagaaaagaaaatccaagacacggcagagaagaaacaagagcatgatgctagggtagtccaagacaaagtggagaagatccaagacgaagccaagaaaatccaatgagtgtaaagagttaaaataatgcaactgttcttaatcaattattgcttggcagtt

SEQ ID NO: 7907 - DNA, 2441 bp, Oryza sativa
  ref <308>: DATABASE ACCESSION NUMBER: AK105255
  ref <309>: DATABASE ENTRY DATE: 2002-08-28
aacaatatcggctatacggtttcgcggatcacctgtggtcctgtgcagccgtaccgtacgcctctgctttcctctcaccccaccgcgccaccggcgagcggcccgcgagggaggaggcgctgccgccgcctctgctgatgctgatgatgctaggggcggcctcccagtggatcctggccgccgccgcggcggcggccgtggcggcgctgctgtggctggccgtgtcgacgctggagtgggcctggtggacgccgcggcggctggagcgcgccctccgggcgcagggcatccggggcaaccggtaccgcctcttcaccggcgacgtgccggagaacgtccggctcaaccgggaggcccggaagaagccgctgccgctcggctgccacgacatcatcccgcgcgtgctgccgatgttcagcaaagccgttgaggagcacgggaaaccatcattcacttggtttggcccaacgccaagagtgatgatttcagaccctgaatcaataagggaagttatgtctaataagtttggccactatggcaaaccaaagcctacccgtctcggaaagttgctagcctccggagttgtaagctatgaaggcgagaaatgggcaaagcaccggagaattctgaatcctgcctttcaccacgagaaaataaagcggatgctgccagttttttctaactgctgcacggaaatgattacaagatgggagaattcaatgtctattgaaggaatgtcagaggtagatgtttggcctgagttccaaaatcttacaggagatgtcatatcaaagacagcattcggtagcagctatgaggaaggaaggagaatttttcagctgcaagcagagtcagccgaacgcataatacaagcctttcggacaatttttataccaggatattggttcttaccaactaaaaacaacagaaggttgagagaaattgaaagagaggtcagcaaacttctacgaggaataattggaaagagagagcgggctattaaaaatggtgaaaccagtaatggtgacttgttgggcttattggtggagtcaaatatgagggagtcaaatgggaaagcagaactaggaatgactacggacgaaattattgaggaatgcaagctattttattttgcaggaatggagacaacatcagtattgctcacttggacattaattgtgctaagtatgcacccagagtggcaagagcgagcaagagaagaagtgctacaccactttggaagaaccacaccagactatgatagcttaagtcgtctgaagattgtaacaatgattctgtacgaggttcttaggttgtatccgccagtggtgttcttgaccagacgaacatacaaggaaatggagctcggcggcatcaaatatcccgctgaagtgacccttatgttgcccattttatttattcaccatgatcccgatatttggggaaaagatgcaggtgaattcaatccagggaggtttgctgatggcatctccaacgcaacgaagtatcagacctctttctttccatttggatggggtccccgaatctgcatcggccagaactttgcactattggaagccaagatggctatctgtacaatccttcagcggttctcctttgagctttcaccatcgtacatccacgcaccattcactgtgataactctccacccacagcatggtgcacaaattaagctgaagaaaatctaaccatgctgctcacttgctcggattggtcaaggagaaacaagtcagtttgataagttatatatctttctcttttgtaaacagaggtagtctacaggtttcgtattcgaactagaaagattttacttattgatatactagcttttatgcagataaaaacatggtgagtgaaataatattccgagtttttaatacaatacaagagtgatttttaggctcttgaggatgtatcatattttatagtgtaaaatttaatctctctaatacaatgacatatgaaaaatttgcattaaaaattttaataccttttgatacctctcgaaaacagtaaaatatatcacaacacaatcattacatagtgacaccagccattgtgaaaacagagcaggtcttctaggcaccggcaggtacgtcccacaggatttccaccaaatctgcggttcgcaagaacaaaaccccttctttgtgattgcttcaagtcttcaaccaactccgctgggcttcgacagacgactcaaaggtgcgagtgtttcggtctttcaaggtcatccaactaccgagactacgagctgatcattgttcgttacccattgtaatgacacagcttatcagctgtagggcaggctcctctcttatggccaataacatgaagagtttgcatctcgctggtgcattattgtacaccgttcccactcggggccatgaagaaaatggaataagtagatgaagcagagt

SEQ ID NO: 7908 - DNA, 1861 bp, Oryza sativa
  ref <308>: DATABASE ACCESSION NUMBER: AK105256
  ref <309>: DATABASE ENTRY DATE: 2002-08-28
aaaccttagatcgcctcttcttcttcttctaatcttgctgttggacccgacgaagcaaaccctagcctcctcctggagtaggcagcaatcatggcagaccaccccaggcctcctccctgtgtgttgctggaacgcgtggtgcgtttcgtggaagcagcagggttaaccagcggtggcgccagcagagacccagatgttgcggccataatcgaggtcggcggatggagctggagcacagtgcaaatgatgggttccgtggaggagatggagcggctgatggcgccgtccgtgaaacccgtcgccttcctcggcgacccacctcaagtaagcagcctgcacatgctgctgccgccgccggcgagcctggatctgcttgggatcggcgagatctccagcacccacaagggcatcgtcgttatctacgccgataaatgctacctcctctatgatgcctccaacaaccacctcaccgctatccccccaattcccgattcggtgacctctgcccccatcttccttcccctcggtcgcggcgctgtcctcgtctctgccgccggcgccgatgatgatgattacatcttcgccgacatcgtcacctccccctccactagagggatcaaccccgcgctccccaaagccaccatcttcgcgagggtgaagaacggcggcgagtggatccagtcatcgattcctcccctccctctccctccacatctctgtggcccgacctacttcttccacatcgacacggccttctccttcgccggcaccatcttctgggttgatctcctcaagggcatcttgatttgcgacgacatcttgtcatcaccgcaaggccccaggctagcgttcgtcccgttgccccactgcatcgacgcccacgacaaaccccgccattgcttcagcccaaatgaacaccgttccatcggccgcgtctctggtgccatcaagttcctcgccttgatcggctactgcgaagcttcttgtcccgagaacgaggtgaagctcaagacatggtcactgtccccagatttcaagcactggaaagaggaaaccaccttgactgtcggagacatctgggcgagcgagagcttcaaccagatggggttgccacatgttctgcccttctcccctgtcctcagcgtcaacgaagatggcatcatgtatgccgttctgaatgatgtcaagaaggaaccaataccgcgactcaatgagttcggggacagtcttgggatgcagctggttcctaaagcaaattatatgatccgcttcgacatgctgcaaaacaaggtcctgtcctccaccaagatttctaaaaaggccacttcgcggtggcttacaaataccttccttgctaccgacttcagtgcatacctacaagaccgccagaatgctgaagcagcaggcaaggttggagcaagcgccaagggcaagcgtaagcggatgagcagcaggcaagctggtaggagcaagtgccaagggcaagcgtaagcggatcgaggagtgctgaatggtactccctcagttaaaaaaaaaaaacaatcctgagtatgaacctggacacgtgtgtgggctcatacccaggatttgttcttttctttttaggacggagagagtagtatatttctgttgcttatcatgtgcgcctagcatgtcgcttttttggcttacatcctgtgagatgtaatgttagcatgtgtttggtttcgggactaagtgggatgggatgaaaccatccctgattttggagttgggatgattccactcacatgtttggtttgtaggatgggacaattctaattttttgtttggttgaaaggatgagggagaaatgggatggacgccgtttgccatcaccgtc

SEQ ID NO: 7909 - DNA, 2025 bp, Oryza sativa
  ref <308>: DATABASE ACCESSION NUMBER: AK105257
  ref <309>: DATABASE ENTRY DATE: 2002-08-28
ctctcgctccggtggtttgttgttaccttcgctttgcgcggcgtgtaaactgtgaaaaaaaagggaggaggaggagagggcgtcgtctccgccgctcgccggagaatggccgccgccggctccggagaaccaccggagtacgggtgctagtaggctgtggttggttggactggtggtggtgtggtgtggtgcggttggttacttgggggggtggcggtttggcggagatggtgtggttgtagtggttaggattcatgcgatcgatgccgttccagctcaagaacggtcaccaccaccacggcgccatggaggggaagccgccggtgacgccgatgcagcagcagcagcagcatgcgccgccgccgagggtgtcgaggtttcggaggttgctggtgagggtgtctgcgtcggagaggctcgccggggatgggaaggagaggggggagaaggaggcggagaaggtctccgcctccgccgccggcggtgaggtggaggccgggtcggtggggctcgaccgcatggtgctcagcttcatggaggattccgcggccgtcgagcggccgcagcgcgggcgctgcaactgcttcaacggcagcaactacgaggagagtgacgacgaggagggcttcttcctcccctccgaccactcctccgcctccgcccccgccgccgccggcgacgccttggagtctctcaagggtttggtgcagagcgcgagcgtcgcggagcggaatcttctcgcggacgcgtcgaggatagcggagaggtgctgcaagggatccaagggcaaggcggagtgccgccgcgcggtggccgacggcctccgcgcactcggctacgacgccgccgtctgccgctcgcgatgggagaagacctcctcgtaccccgcaggtgaacatgagtacatcgacgcggtggtcggcgaggaggtgaggctcattgtggaggtggacttccggtcggagttcgaggtggcgcggtcgaccaaggcgtaccgggcggcgctgcaggcgctgccgccgctgttcgtggggacgccggaccgcctcgggcagatcgtggccgtcgtggcggaggcggcgcggcagagcctgaagaagaagggcctgcacttccctccatggcgcaagccggagtacatgcgcgccaagtggctgtccccgcacgtccgctccggcgacaaggccgccgccgccgctaaaactgtgacgtccactacgtcggcgacggcgacgccggtctcggcggcgagcttctccggcgcgttcgagctcctgttcgataggaaacagagcggggagatccccgccgcggagaagatcacggtggtggtgtctccgtcgccgtggcgcccgacggaggaggcgagcaagaagaagccgccgccgtcgccatcgccgccgcagctgtggcagcagcatcagcagcctcccaaagcgaaggtcgtcacggggctcgccgccgtcctctgagcgtggcgtggtgaataataactaccactctcctagaactactaccaccactaccatcactagttcatcgattcttttctttgttttcctctcctctttttcgtttctttttccaccgcgcgcttcgatccgtttggggatctagtttttggtgttttggggttttccggggtttttttcggaaaagagaaaaaacactttgcgttccaatttttttccctctcatcttccctttcccccctcttctttttttgacccttgtaatttttggttttagcattaggggctttttgtgaagctgctgttcttcaccccttctgccgagtagaactagtaatctgttacagattgtaaacagagtgatcaagtgatgctacttgcttgcttgctgcaaagcctcgtgatcttctgctgcttctccacttgtagttggataaatcctaaaaaaaaagtttccctcttgttttaccagtttttagtattaccgcccatccttgttaagttgtagcacttgtaatctccatggaagagatgaacaatgagtaattagctc

SEQ ID NO: 7910 - DNA, 1722 bp, Oryza sativa
  ref <308>: DATABASE ACCESSION NUMBER: AK105258
  ref <309>: DATABASE ENTRY DATE: 2002-08-28
cccctcctccccacacgccacccgcacgcgcgccatggacgccatgaggcagagcacgccgcgggccatgctgctcctgtgcgccgtgctgatgctggccgtggcgccgccgggcgcggcgacggcggcggcggtggccgggtgcgagtgcggtaatgcggcggcggcggcggtggcgggggaggacgcgcgcggggcgttgcggctcaagctcgtcgccatcgcgtccatcctggcggcgggcgcggcgggggtgctggtgcccgtgctggggaggtcgttcgccgcgctccggcccgacggcgacgtgttcttcgccgtcaaggcgttcgcggcgggcgtcatcctcgccaccggcatggtgcacatcctccccgccgcgttcgacgcgctcgcttcgccgtgcggcggaggcaggggcggcggaggcgggttcccgttcgccgggctcgtcgccatggccgcggccatggccaccatgatgatcgactccgtcgccgccgggtactaccgccggtcccacttcaagaagccgcgccccgtcgacgaccccgccgacgccgcgcgcgccgccggggtcgaggagggcggcgccgagcacgccggccacgtccacgtgcacacgcacgccacgcacggccacgcccatggccacgtgcactcgcacggccacggccacggccacagccacggcagcgcgccggcggccgccacctcgccggaggatgcctccgtcgccgaaacaatccggcacagggttgtctcccaggttctggagctgggaatcctggtgcactcggtgatcatcggggtttcgctaggcgcatcactgaggccgtcgtcaatcaggccactcgtcggagccctcagcttccaccagttctttgaaggcattggccttggtggctgcattgttcaggcaaattttaaggcgaaagcaacagtgatcatggcgactttcttctccctcactgctccggtgggcattgcactggggatcgcaatctcatccagctatagcaagcacagctcgaccgcacttgtcgtcgagggagtcttcaactctgctgcagcagggatactgatctacatgtccctggtcgatctcctcgctgcagatttcaacaatccgaagcttcaaacaaacacaaagcttcagctggcagtatacctcgccctcttcctcggcgctgggatgatgtctctgcttgccatatgggcatgagatcttcagagcaaccaagagctgcaaatttttgaatattgtctctgaaaaagacaccctgagcttagtttgtagctgacagggtttgatgttgtcatagcattactgcaaccagcttttgtagaatctccatcaaccagaattggagaaaaagatggcctgaatacgaccgaaagtttagagtttactgacatgagtacacaagtcaaaagttcaggacaaatctgattcttgggcaaatggtgtgcttccaccagtatagcaccaaatgaagtgaacaagaatcaaatgggttagtcgaggtagtggtccttgaacagattttctcttcaagtccaaaagctttgtataaaaatgatgacctccttttggagtcaatgtcaatgtacagattctcagctagggtaaatcctttttgtatgacaagagctctgtgaagtttgttcacttgttcagtgaagaatcaaataatccccagcgttgtctcctttttctct

SEQ ID NO: 7911 - DNA, 2595 bp, Oryza sativa
  ref <308>: DATABASE ACCESSION NUMBER: AK105259
  ref <309>: DATABASE ENTRY DATE: 2002-08-28
cgggccgtacaccgtatgcctccctcgaccacaggcttcccgcgccgccgctcgccgccggtggacgccgacctgctgccgcgccttcgcctcgccgctggccagagttcgccatggcgcgtcctcctccagtccctggccctcgtcgtcacctccggcctctccgcctcggcctcccactcccaccgcggccgcgcgctctcatcccgcctcctcaactccctcctcccccacgccccgcgccgcctcctccccgcgctcctccgcctcctccccggagaccacctcacgcttctcctcctcgtctcctcgaagcaccactcgcactccctgcccgccgcctccgcgctccacgccctcgccgtctcctccggccacctcccgtccgacctccgcatcgccaactccctcctctcgctctacctctccctcggctccccggcgtccgctcgccgcctcctcgccgacatcccccgcccggacgctgtcacctggaacacgctcctccgtgcctgcctccggcttggcctcctccctgccgcccgccgcctgttcgacgaaatgccggagcgggatgtcgtctcgtacaactccatggtggctgggtatgtggctgagggcgacttggccggtgcgaggaatctgttcgatggaatggcgcggagagacgtggtcacgtggaactcgatgatctcggggtattctcggcacggggacatggagaacgccaggaagatgtttgatgcgatgccggagagggatgtcgtgtcatggaactcaatgctggatggatatgcccaggctggggacgtagagatggcgaggttggtgttcgatggcatgccaaagaggagcattgtgtcttggaatgtcattcttgcgttgtatgcaaagctgagggattggcgtgagtgcttggggctttttgatgtgatgatagcagaaggaaacacggtaccaaatgaaaaaacgtttgtgagtgttctgacagcttgtgcaaaccttggcgatcttgagaaagggaggtgggtgcatgatttggttcaggagaggtgggataggcttgtgccagatgttctattgcttacgacattgttgacaatgtatgccaagtgtggggtgatggagactgcaagggagatcttcaattcaatgggtgaaaagagtgtcccctcgtggaattcaatgatcatcgggtatgggttgcatgggcaaagcgaaaaggctcttgagttgttcttggagatggagagagatggacctaggccaaatgaaacgactttcatctgtgtcttgagctcatgtgctcatggtggtttggtgcttgaaggttggtggtgttttgacaggatggtcaggttctacagtattgagccaaagtctgagcattttggctgtatgatggaccttcttggtcgcgccggactgcttgaacaatcagagaatctcattgagaatttgcaaggtaaggtgtcagaagcattgtggggcatactaatgtcagcctctcaaactcagaacaacatcaaacttggagagtttgtcggaaagaaattgatcgagatgaggccaacagaagtcggtccatacatccttctatcaaacatttatgcggcagaaggaagatgggatgatgttgagaaagtaaggaaggtgatggaggagaagggggtggagaaggatgcagggttgagcctggtaggatcaagggaaggtggtcatttcattaatgaaagtggagcttcagctccaaggaatgatgtgatgctgtgcatgctgggtgagatgagtgtgcatatgaagcaaccatctgaagggtccaactgcaggaaaagaagcccctctgctccttgaaacttgaacatacagggcacattattttgctgtgtgactgtcaaaggagaacacaaagatgggatgtttatgcctcattatcatggtatcacctactatttcttggatgatttcagcgtcaactcaacctaggaattcacagatattcttgctagctaactgcatgagaagtttgcttggaccatggctatatcacctctgattgtctgtagccgggaggtgaaacaagcatcaaaagtcaaagaaggtgctccaggtaatggaggatcaaagaatgcacaagtattattgttacaataatggatcatttggcaatcgcaatattacatcagagccgtggtgttacatcacaaagtacaatgctgtcgtcaaggtagaaaagagaactggctggtgtccaatgacgctgtctgttgcgatctgcaagaggtatttggtctttgactcaattggtcacgacgcacgacagaggaagcgctaatttaatttgcttctgtgagacagtgagagtggaattctgacgtcgacctggaatttggatctgattagaaacaacaggacaagtgcgaaagcatattccaagggacatgcagctcttgtgtttattcgaataccatttgcttgggcaacatttgggcacataatacacacaccatatttttctcccttgaaaatgtgagacgcaaattacttgtatgcctatgaaacttttttattcgatatctctgatgtctcacctac

SEQ ID NO: 7912 - DNA, 1537 bp, Oryza sativa
  ref <308>: DATABASE ACCESSION NUMBER: AK105260
  ref <309>: DATABASE ENTRY DATE: 2002-08-28
acatcgtcggcggcgttcgccgcaatccctcctgcgccgccgcggcgacctcctccctcccctcgccgtcgtctccaacgcgggcgcccgaatcgagattggggttttgatgacggggaattgatctcgatcgttgtcggagccgggggagatgccgtgctgcagcgcggtgctgagcgcggcggcggcggcggccgcggcaagccgcacgccgccgtggctgcaccgcctccacgccaaagggggcctgtctttcccctccaacctccacatcgacgacctcctctacggccagcaccacgccctaccccatcctccgccgccgccgccgccgccgcagcctgcgaaggagccaccgccgcctaccaagccgaagcatccgaagcccaagcagcagcagcatccaccgccgccgccgccgcagaagccaccgcaaggtagcaccaatctctccctaccaaaccctagcggaagcggaagcggcaacggcaacccaccaccatcgccacagctgcagctctccaccgtcatcgccgacgtcttcgtcaccccctcctccgctcctccgctcatcgcgccgatcaaggccttccgcaagcagaaccacccgcgccctaggcccgacaaggcctcccgccccagcaaggagaacaaggacaaggcctccaaggtcaaggtcaagaagcgccgccgctccgaccgcgccgccgatggcgacggcgagaggtgtagcaggaccgaggtcaccgtcatcgacaccagcaccgatgggtggaaggcggcgaagctgctcctccggagaggcgccgtctggaaggtgagggacaaggcctccggggtctctgaacctgaggatcccaccaagatgaagaggagggccggcttggtctccaagattcagagggacagggagaagcagaagcagaaggagaaagaagcaacctcatcgggaaacattcatgctagtagtggagatgggatgaaagagcctgatggtcctattcaagcactgaaaagatctagaggtcctgagccagaaccagaaattatagcgcttcttcattgaaaaactacagatagaggctagaagaatggattacagtagacttccccaacttaagagggaattgaagccaataatcgcatcttgacaacattgtcgcgttgcttcaaaatgaaaaaaaaaaatccagttcgtcttaccctgtacatctgttggtgtttctgattgatgcctgttagatattccaattgttgatatctggtctttttttttttagcgtatcatgttttaaaatgacaccttgctaggtcttctaaaaatgtttttgctgttggtgggggattgattcatttagtttgtttgactcctcatgcactaaactaagatgggtagtgtaaatgtgatatttatgttggtagcctagttgctgcataatttagtttccactgttggcatttgggtaactgtttcgtgtaaggatggagattcatccaaatggtaaaggttgaaatgctattgctgtgagatctgtgc

SEQ ID NO: 7913 - DNA, 1785 bp, Oryza sativa
  ref <308>: DATABASE ACCESSION NUMBER: AK105261
  ref <309>: DATABASE ENTRY DATE: 2002-08-28
acgcttgcaacaatatcgtcctccctgtccgtgtactgtgaatctgccatctgtgacttcgtgagacatggctccagcgatggcgagctcagcagcgacggtggtgctgatcccgttctgcgtctccggccacctcacgcccatgctggaagtcggcaagcggatgctgcgcagccgctgctgcggcgacgacgacgacggccgccccgccatgtcgctcaccgtgctcctcgcgcagctgccggagtcccaccgcgcgcccgagatcgacgagatcatccgccgtgaagcggccggcgcgtcggagcactccggcttcgacgtccggttccactgcctccccgccgaggagctcccggacttccgcggcggcgaggacttcatctcccggttcatgcagcagcacgcgtcgcacgccagggaggccatcgccggcctcgagtcccgcgtcgccgccgtggtcttggactggttctgcaccacgctcctcgacgtcacccgcgacctcggcctccccgggtacgtgttcttcacgtccgccgcctccatgctctcgctcctgctgcggttgccggcgctggacaaggaggtggccgtggatttcgaggagatgggaggcgccgtcgacttaccggggttgccgcctgtgccggcggctctgttgccgacgcctgtgatgaagaagggttgcaactacgagtggctcgtgtaccacgggagccgcttcatggaggctgcggggatcatcgtcaacacggtggccgagctcgagccggccgtcctcgaggccatcgccgacggccggtgcgtgccgggacgccgcgtcccggccatctacacggtcggccccgtgctgtcgttcaagacgccgcccgagaagccgcacgagtgcgtgcggtggctcgacgcgcagccgcgagcgtcggtcgtgttcctctgcttcgggagcatgggcagcttcgcgccgccgcaggtgctcgagatagccgccggcctcgagcgcagcgggcaccgcttcctgtgggtgctgcgcggccgtccacccgccggctcgccgtacccgacggacgccgacgccgacgagctcctcccggaggggttcctggagaggaccaaggggaggggcatggtgtggccgacgtgggcgccgcagaaggacatcctcgcccacgccgccgtgggaggcttcgtgacgcacggcgggtggaactcgacgctggagagcctgtggcacggcgtgccgatggcgccgtggccgctgtacgcggagcagcacctgaacgcgttcgagctcgtgcgcgacatgggcgtcgccgtggagatggaggtggacaggaagcggggcaacttggtggaggcggcggagctggagcgcgcggtgcggtgcctgatggacgagggatcggaggaggggaggatggcgagggagaaggcggcggcggcgaaggcggcgtgccggaacgccgtggacggaggcgggtcgtcgatagcggcgttgcggaagctcacgcaagaaatggcccacatgtcatccatatagctaacataaatacggagtatcaggcagcgagtatgcacaagatacggtaagtatcgaactatcgacagcatcaggcagcgagtcatcaaccgatcatcatgaacaagtggaagtctggatgagataagtcggcagtcagatggacgaggggatggacaagatcatccttattgccagatcctagagaatgtgatgggtgtatgccaaatccatgattttttttctttaatatattgattccgtgc

SEQ ID NO: 7914 - DNA, 2263 bp, Oryza sativa
  ref <308>: DATABASE ACCESSION NUMBER: AK105262
  ref <309>: DATABASE ENTRY DATE: 2002-08-28
gggacccaacgccacaccaccggccgccgccgccgcgccgccattcgcgatgctccgcgccgccgtctcccgcctgcgcgcgcacctccacccccaccctcacgcccaccaccaccacggcctaccctccgtgacgcccgctccgccccgcgaccctgagcgcccgccgcggctgctggtggtgcagccgcgcctccgcccgggctcgctcctcgactccaagctcgccgaggccctcaacctcgccaactccctcgaggagccgcgcgacggcttctacaaggaaggtctcgccgccaagggcgccccgccccacctcgtcgcccagaacccctcatcccgcggccgctcccatgtcgataaattttttggacctggaactgtggataatgttaagtgctacctgaggacatcggaatcagaggaaggagtagatgcagtttttgttaatgcaattctcactggaatccaacaaaggaacttggaggttgcctggggtaagccggttttagatcgtgttgggcttataattgagatatttaatgctcacgctgaaacaaaagaagcaaaattacagtcagagttagcagctctcatgtacatgaagactagacttgtccgtgtccgtggtccaggtggacgattaacttttggttcgagtggtgaagctgaagttgtaagtgctcgagggagaggaagtgggggacgtggcttcataagtggtgctggtgaaacagaacttcaactacagcggaggagaatccaggaatgccgtgtcagattgttagctcaaattgaagatgtacgtcgaactagagcgatacaacgctcaaatcgaaaacggcatggcaactcatttggtcaagagcttgtaactgttgctgttgttggctacactaatgcaggaaaatccactctagtgagtgcactttctgaaactgatctatacagtgatgacaggctatttgctacagtggatccccgcttacgcagtgtgatcctcccatcagggagaaaagcacttcttagcgatactgttggcttcatctcagacttgcctgtgcagctagtggaagcatttcatgctactttggaagaagttgttgaagcagacatgttagtgcatgtattagattctagtgctcctaatatcgaggaacatcgttctactgttctgcaagtattgcaacagattggtgtttcacaggataaaatcaacagtatgatcgaagtttggaataagattgatattgtggacaacaatgataatgatgtaactgatgatattgaagatgagattttcctgaccgaaggtgaggaggataaggaggaagaattattttctgaaaacgatgtgcctgcagaagaatcatcatttgagtccttggatgatggaacagactccgaatatttatcagaggaaaatttggaaggcaacaatggtgaaatatcatcctcacttgagcctagtgagatgagagcaatgaactcagtatcatcatcatcaaaagattgttttggagagctttgtggtccagaaactattagtacagatagctgcagttcaacacaaccaatgtccacttgtcatgtgaaaacttctgcagtgacagggacaggattgcaagagttactggagctaatagataagaaactaaccgagcggcaaactattgtggagagaagctatgggccttttgatagaaaatggagaccatcttcttctgtggttggtgaaaaggccgcagaacagtagagccaaggagtggttcgaggcacatcggctgcttgtatcttctcgctccatgtgcctgacatttcaggcccgaaaattgccacctgagtcgtcccatcaaggcaatgcccgatgacttggttggcaaattcgagaaaaaagtttttgcagaaagttggcgcagtttggaatgctggaatttttgtttatgcctacaggaattgaagtgatcctcgtgaaaatcgttctactagtacgtcccgaagaggactttctccttacattagtacattacaggtgtttatactcagtcagtttgctggagagtttagttggatgatgcggaagtaataaagctgtcgtgtatgtatgatattcaaagcaatcatcggtagcttgaaaattctcaggatagaagtttaacccaatgcattactcgacagcctttaattcggcatgactaattcttgtgcttgtatttggcctattcgcatcgtgaaggagattgtgcttttaaagagattcagt

SEQ ID NO: 7915 - DNA, 2630 bp, Oryza sativa
  ref <308>: DATABASE ACCESSION NUMBER: AK105263
  ref <309>: DATABASE ENTRY DATE: 2002-08-28
ttccaaagggcgtgggagggccttcttcccaataaccgaatattaatattttgcctgaaacatgatattgatcctaaacttagaaccccgacaagagatcatattaaatttcctgataatcctgctgtcacgagaaagcccttcgatgtaaatggaatgaacaagaaggtggttaagatacggcttcttgaggattgtccacctgccccattgtccagtgacaaaaaatcatttggtacagtgaaccgtttttcctcaagtgatgtgataaccaaaaagaggaaagtgcttgtgtctggaggtacaaaacattgtgctcttagtgctgtggctagggaaaaaacatcagttccgtcatttatccccttgagctcattccctgttattgataaaagcactgagaggaggattcatgagttcgcacagaaagtgtcatctgatataaccattgaggatatacaaaaaaagctagtggttccatctacacacacaccggtttcgaagaatactgataagattacattgggaatggtgcaaagatctgttgaggctataaatgctgctctgcatatgttagaaaatggtgcatccatagaagatgtcaaatctgtatgtgcacctagtgatcttttccaacttgcaaggtggaagaataaactgaatatatatcttgcaccatttcttcatggcatgcgctacacatcttatgggcgccacttcaccaaactggacaaactcgagcagattgtagataggctacaatggtatattgaaagtggtgatacggttgttgacttttgctgtggctcaaatgattttagcttattattgaaggaaaagcttgaagcttctgaaaaaagttgcttctataaaaattttgatcttattcaaccaaagaatgacttcaattttgagagacgagactggatgaccgttcaaccagatgaattgcccacaggatgtcgattgatcatgggattgaatcctccgtttgggtttaaagcttctcttgctaatcaattcattaataaagccctcactttcaagcccaagctgatcatactcattgttcctaaggaaactgaaaggctggacaggaaatacccaccatatgagctaatatgggaggattctcatcagcttgcaggaaagtcgttctatttgcctgggtcgcttgatgctgataacaagattatggaacaatggaatatgtcaccacctcctctttctctatggagccgtagtgattgggctcggaaacacaaggaaatagctaaaacaatggggcacatcagtaaaaatgtgtggtgcttagatgatactcaaaggtctgttgtaaacacagggcatgcacaaatggctaatgagggggatgatgaccttgacaacaaagaaagacaagaagaggcaccactaaatgcctctgttatagatcagttgttgtctgacacataccatgatcctactagctcgccaggggactactggacagataccaatggaagatcacggcagccttgcaactacgagggaagaaatgatccaacccatgaatatcatgcaggcatgggttgtggatctgacatgagcatttcatcatctgacaagagcgattgtgaaaaacaaaccgaaactatgtcaaactcagagcatgggcatactggttcagaagcccacgatcatgttggaagtgcacctgtggaacaaccaactggttttgcggattgtgatgaggtgacatcagctggcattgagtaccatagcctggaaaattcaccactcacagagagacctgcagatgcagctggagttcaatacaagatgctggaagacacaccacctcctctggatgaactcgtacctggcttttctgggcagccgatcgtttcacttcctggaggaggcaggctttcagctgggttgcaatatcaaaggctggaagacacactgtccagagggacacctgaagctggtgctggttgcagacagctggaagattcactacctgcaccccctgctgcttctgaggtcgatgcagtggttgcaaaatatctgccacagacaacgagtgatctccctgcattaccgttcgttcctgctccaagaattcccttccctggactccagttcgccccaagaaatgacttgtggcaaggatggtacccacctccagaatttctgtccagaggcatggaccatccgcctttcatgcacggctcctctggttggctcgacgactagaggagtgagacattaacccaagccctagtaaagattactgacagccgctgttagcaaagaccacttgtgcagttgtgcttcaacctggcgaggaaggtgaaaaggtgaaaacaccagacttggttcttctcttgtcacgagccaccgtgtagagtctgtagagtacagctacttgtgctgtgcctcggcctatcttttcaaggtgcgagcttgttttgtcctacggcctgcttttagaatacgctgaggctacatgctactaccaattttctggacaggaaacttccaaaactctccttgccaatccacgcctgttgatgtactaggacgtattttgcctctttccttgttggttggttggttggttgcactcaaaaaaaaaaaaaaac

SEQ ID NO: 7916 - DNA, 2395 bp, Oryza sativa
  ref <308>: DATABASE ACCESSION NUMBER: AK105264
  ref <309>: DATABASE ENTRY DATE: 2002-08-28
gtttcacacacacgcacacaccccctcagggagggatcaggccggcgcacgcgcgcgcgcaaaaaaaaaaaaaaaaggatcgagagagaaaatccgtgttgtttgttcttcgtcatgggcgcggacgccaccacgttgcacatcgcggttcacgccctagcgagctccttgcaggcgcaggttgccgccgtcttcttcgtctcggccgcgtgcacggtggccctcgcgctgctgctggctttgcagcggctgcggccgccgtggtggtgcgcgtgcccggtgtgcgaggcgtacgtgaccgcgtcgtgggcgcgcgagttcgacaacctctgcgactggtacgcgcacctgctgcgccgcgcgccggggcgaaccgtgcacgtgcacgtgctcgggaacgtgctcaccgccaacccggccaccgtcgaccacatgctgcgctgccgcttcgacaactaccccaagggtgcccccttctcggccatcctcgccgacttcctcggccgcggcatattcaacgtcgacggcgacggctggctcttccagcgcaagctcgccgcggctgagctcgcctcgccggcgatacgagccttcgcggcgaacgtcgtggcctcggaactgcggtgccgcctcatccctctgcttcgctctgcctccagctacgggagcgagaggctgctggatctccaggacgtcttccgccgcttcgcgttcgactgcatatgcaagatctccttcggcctcgaccccggctgcctcgagctttcgctgccgatatcggcgttcgcggacgcgttcgacacggcgtcgatgctctcggcccggcgagcgacggtgcccatgcatgtcgtctggaagttgaagcggctacgcaacatcggggaggagcgggagctccgcgacgcgatccgtctcgttgacgcgcttgccgccgaggtcatccggcaacgccgcaagctcggctccgccgcctcctgtgacgacctcctgtcgcgattcatgggctccatcaacgacgacaagtacctccgcgacatcgtcgtgagcttcatgctcgccggccgcgacactgtcgcctcaggtctaaccgcgttcttcttgctcctctccgaccatcccgaggtggctgccgcaatccgggacgaggtcttccgcgtcgccggaggcagggaccccacggccgcctccttcgatttcgacaagctcaaggacatgcactacgtgcacgcggcgctgtacgagagcatgcggctgttcccgccggtgcagttcgactccaagttcgccgccggcgacgacacgctcccggacggcacgttcgtggcaaagggcacacgtgtgacctaccacgcgtacgccatgggccggatggagtccctctggggccccgactgcgccgtgttcagaccggagcggtggctcagcggcggccggttcgtgccggagagcccgtacaggtacccggtcttccagggcggggtgcgcgtctgcgtaggcaaggatctcgccatcatggagatgaaggccgtcatcgtcgccgtcgtccttagcttcgacgtggaggcggtcgaccggagctcgcgccggcccaagttcgcgcctggcctcaccgccacgttcgccgggggcgtgccggtcagagtgcgccggcgagcgcactgcgcgccaagttagctcaatcaaatacgtcgcgtcgccacgcgcgatcgatgcccttattcattttaattttttttcctcttctttttttgaaacgggaaacattagtctatgtcagcattgcacatggaaagctgcactgatctactgtgtcacttgagtcaacagtcaccactcaatttggcaagtgcgctgggttcttatcctccactcaagatttctctgtagaccataattaaagatttttccgattacacagaagatgtacaagaacacaaatagtagtcactacagtctaaacatacatacactacatgagtacgtctctttcatacatatgctccatatataaaagggtaattttaccatttttataaagtatctagaggtaatatattttctagtgtaaaaatttggtgtaccataaattttacactaaaatttagatgtctcaaaatactttcttaagaattataaaattcctctatataaaatcatgtatatatatctgcgaatgtttaaaaattcctattaagccatgtactgggctgtgagtaaatgtacctaggagaaattaaaacctgacaatcaaagtcctatacacaactcgtactattcttttcgaccaccgaataaaggaggagcgtaactaaagtctctctgcatgtgtgagtatataatcatttcggcccggcgtatatattgttatttcaaacttgaaagcacgattcgtact

SEQ ID NO: 7917 - DNA, 3749 bp, Oryza sativa
  ref <308>: DATABASE ACCESSION NUMBER: AK105265
  ref <309>: DATABASE ENTRY DATE: 2002-08-28
atcgctcggtccttcgaacccccaccgcctccgtcgacacattccgcgctcgaatcgaatctacgaaaccctagcccgccaccgccgccccaatggcgaagccggtgaagtacgacgaggaggaggaggaggtctcgtcctccggcgaggaggaggaggagcagtcggacggcgccgggtccggatctggcgaggaggaggatgaggaggaggaggaggcgcccgcggcggcggccggcgaggcggctggtggggaagaggaggaggtggatgaggaggagatcgaagccgtcaccaccggtgccggcgccgacgaggaagaggaggaaagcggtgcggccgccgccgcccccggggagggcgatgaggagtcgcagtccactgaggacgacgaggccgtcgtgggggaggacgacgacgcagatgaggctgaaggaggtgcagtagtagggaaacgtgagaaagccaggctcaaggaaatgcagaaattgaagaagcagaaaatacaagaaatattggatacacagaatgctgcagttgatgctgacatgaacaataaagggaaaggacgattgaagtacctactgcagcaaactgaaatatttgcacattttgccaaagggaaccaatcaaaagagaagaaaccgcgtggaaggggacgccatgcctcaaagatgacagaagaggaggaagatgaagaataccttaaagaagaggaagatgcccttgctggttcagggggaacacgcttgctttcacagccttcatgtataaaggggaagatgcgagactaccaactagctgggcttaattggctcatacggttgtacgagaatggtatcaatggtatattggctgatgaaatgggtcttgggaaaactcttcaaactatttcgctgctgggctatctgcatgaattcaggggaataactggtccgcacatggttgttgcaccaaagtctactcttggcaactggataaaggaaattcaacggttttgccctattctacgtgctgtgaaattcttagggaatccagaagagaggaaccatataagggagaacctattgcagccaggaaaatttgatgtgtgtgtcactagttttgaaatggcaatcaaagaaaaaactacactgaagcgtttcagctggcgttacattattattgatgaagcacatcgcataaaaaatgagaattctcttctgtccaagacaatgaggatttataatactaattatcgtctccttatcacaggcacaccactccagaataatctccatgagctttggtctctcctcaacttcttgttgcctgaaatatttagctctgctgaaacatttgatgaatggtttcaaatttctggtgaaaatgatcagcaggaggttgttcaacagcttcataaggttcttcgcccatttcttcttcgaaggcttaaatctgatgttgaaaagggattaccccccaaaaaggaaactatccttaaggttggaatgtctcagatgcaaaagcagtactatcgtgccctgcttcagaaagatttggaggttattaatgctggtggtgaacgcaaaagattgcttaacatagccatgcagttgcgcaagtgctgcaaccatccatatttattccaaggagcagaacctggtccaccttacacaactggtgaacatctagttgagaatgctggaaaaatggttctgttagataaattgctgcccaaactgaaggatcgtgattctagggtgctcattttctcacagatgaccaggcttttggatatattggaagattatcttatgtacagaggctatcagtattgccggatagatggaaatactggtggagaagatcgtgatgcatccattgaagctttcaacaaaccaggcagtgaaaagtttgtttttttgctttcaaccagggctggtggccttggcatcaaccttgctactgctgatgttgtggttctttatgatagtgattggaatccacaagctgatctgcaagctcaagaccgtgcacataggataggtcagaagaaagaagttcaagttttccgattttgcactgagtataccatcgaggagaaagtgattgagagggcatacaagaagcttgcattggatgctttggtcattcaacaaggccgactggcagagcagaagactgtcaataaggatgatctgttgcaaatggtaagatttggtgcggaaatggtattcagttccaaggacagcacaattacagatgaggatattgaccgtatcatagctaaaggagaggaaacaacagctgagcttgatgcaaaaatgaaaaagttcacagaggatgctattaaatttaaaatggatgacactgcggaattgtatgattttgatgatgataaggaggaaaacaagcttgattttaagaaactggtcagtgataactggatagagccacctagaagagaaaggaagagaaactactctgagtctgaatactttaagcaagcacttcgccaaggtgcacctgcaaaacctagggaaccacgaattccaagaatgccgcacctacatgatttccagttcttcaacaaccaaaggctcaatgaattgtatgaaaaggaagtccggtaccttatgcaagcaaaccagaagaaagatactattgatggtgaagatgaagatcagctggagcctttgactgcggaggagcaggaagagaaagagcagttgttagaagagggttttgcaacatggacgaggagagacttcaacacatttattcgtgcatgtgagaagtatggtcgaaatgatattaggagtattgccgctgaaatggaggggaagacagaggaggaagttcaacgatatgctaaagttttcaaggagagatacaaggaactgagtgattatgatagaattatcaagaatattgaaaggggagaggccaggatatcacggaaggatgaaattatgagagccatcgggaagaagttagaccgctataagaatccatggttagagttgaaaatccagtatggacagaacaaagggaagttctataatgaggaatgcgaccgttttatgctttgcatggtgcataagcttggttatggaaactgggatgaactgaaagctgccttccgcatgtcgcctttgttccgatttgattggtttgtcaagtccagaaccacccaggagttggctaggagatgtgatacccttatccgtctagttgagaaagagaatcaggaatatgatgagcaagaaaggcaggcaaggaaggacaaaaggatggctaagaacatgacaccgacaaagcgatctgcgttaagggtttcagaaggtgaaactactccatcgaattctttcaagaggcgacgccagtcccttatggatgactatgtgggctcgggaaggcgtaagcgaggttgatcgggcgttgcctgctgctccctttcaagcttgtcggaagtctgggagagctttgaaatgtgcgcgctatgtgatgtttaaagcctctaggcgcacttaactcatcgctgaggcctaactcagtatgatagtgtagtggtatataatactatatgttttctctgcggggatttcatgaccgctctggctagcctatgcattaggaatcagatgtactatggattatccaactttggtagaggtgaactcatcgaagctacccttttaaatccctatgcttatgttacattggccaaaagtccgctcctaatccgagtattctatcttccgagt

SEQ ID NO: 7918 - DNA, 2042 bp, Oryza sativa
  ref <308>: DATABASE ACCESSION NUMBER: AK105266
  ref <309>: DATABASE ENTRY DATE: 2002-08-28
aaaaacctctcctcctcgtcacacaccccgtctcgccgccggcgatgcgcagacgccaatgacgacgacgacgacgacgacgaaccacagcgccaagagcatcctcctcctcgcgctcctcctcgtgccgcacctcgccgcggcgtcgtcgggagatgcgctgatcagccagcgccgccgcctgctcgactaccacggcggcggcggcggccatggcggcggcgacgtgtacgtggacccgtcgtacacgttcccgaacgcgcggctccgcgacgcgtacgtggcgatgcaggcgtggaagcgcgccgtcctgtcggacccgcacaacgtgacggggacgtggatcgggcccgacgtgtgcgcctacgagggcgtgttctgcgcggcggcgcgggacgacccgcacctcgtcgtcgtcgcctccgtcgatctcaaccacgccgacatggcgggccacctccccgacgagctcggcctgctcgccgacctcgccgtgctccacgccaactccaaccgcttctgcggcgccgtgccgagcaccctcgagaggctccacctcctccacgagctcgacctcagcaacaaccgcctcgtcggcgcgttcccggacgtcgtgctccggctgcccagcctccggtacctcgacctccgcttcaacgacttcgagggccccgtcccggccgagctgttcgaccgcccgctcgacgccatcttcctcaactccaaccgcctccgcttccggatccccgacaacgtcggcaactcgccggcgtccgtgctcgtgctcgccaacaacgacttcggcggctgcctcccggcgtccgtcgccaacatgtccggcacgctcgacgagatcatcctcatgaacaccgggctcaagtcctgcatcccgccggagctcggcatgctcaccggcctcgccgtgctcgacgtcagccacaacagcctcatgggcgccatccccggcgagctcgccaggctcgagaacatcgagcagctcgacctcgggcacaaccgcctcaccggcgacgtgccggagggcatctgccacctgccgcacctccagaacttcacctactcctacaacttcatcaccggcgagccgccggtgtgcatgcacgtcaaggcgttcgacgatcgccggaactgcatccccggccgccccgaccagaggccggcggagcagtgccaattccaaaacacccaccacgtcaactgcgacgcattcaggtgcaagaagttcgtcctaccctctcctccaccaccttcacctcctcctccatctccaccaccaccatctccatcgcctcctccaccttctcccccgccgccgtctcctccaccaccatcgccatcgccgcctccaccatctccaccgcctccatctcctcctccgccatcgccagtgtactacagctcgccgccgccgccgtactacgaggtttcaccggaggacaggtacctctcgccgccgccacctccggcgtaccacgaggcgccgccaccgccgtactacgaggtgtcgccggaggacaggtacctgtcgccgccgccacctccagcctaccaagaaacgccgccgccgccgccgcagtacgaggtgtcaccggaggacaggtacctgtcgccgccacctccatcaccggtgaagtggaagctgccggtgtacgagtactcatcgccgccgccgccggcagcaacatggaagccataaaattaaaatcgattctttcgggatttttttttttcacacactatgatcatacatattgttaaatttgttgtatgttgagtaaaaaaagggatgctaaatcttttctgttactacccctccttcctgattttcttttgcttgtactgtatgtatttttcttcttttatttttttctccttctttgaatgaacagcaggaaatctgcttttcctcccattgatttgcttgatttacagataatccattgtgaacaaatggccatattctgatatacatagacagaaatgaagaagaaaagaatgagagattttatattctcatttgcatt

SEQ ID NO: 7919 - DNA, 2031 bp, Oryza sativa
  ref <308>: DATABASE ACCESSION NUMBER: AK105267
  ref <309>: DATABASE ENTRY DATE: 2002-08-28
aagaaaaaaagcacaatattctccctctcggcctctcctcgccgtagtgccccctcggacctcggttgattttttggttcgcgcacgtcaccaccgagagtccaccaccgcggcgcacgggaggaggcccgattcgattccactcgcccgttcgttcgctcgtcctatttttttcttccccccaccacggcaattttttctctcccacggccgccacgccactgccagtcaacagctgcacctgggctcctcctctcctcgtcgccgtcaccgtcgcgcgccgtcgtgttggtggtggtggtggtgtgcgggcgggcgggcgccgctcgcgtccccgtgacgctgcttcccagcgccgctgcctccgccttccacgccgcgtgggcgcgaaggcggggcttgggagttggaggaggaaggatagggggcacggcacgggtggcagtagtgcaaggcaagcaggtccccgtgtataattcgggcggcggcggcggcgggttggatcggggaatcggcgacgcgggccagaggaggaggaggatggggcagcaggcggcggaggcgcagccgctactgctgcagggggaccaggtggacgccgagtggggctgcaggccgcaccgcattgtacttttcgtcgagccgtcgcccttcgcttacatctctgggtacaagaatcgcttccagaacttcatcaagcatctgcgagagatgggcgatgagatgttggtggtgaccacgcacaagggagctcccgaggagttccatggagctaaagtcattggttcgtggagttttccatgtccgttataccaaaatgttccactctcgctggcgttgagccctaggatattttcggcggtggctaaatttaagccggacataatccatgctacttcacctggagttatggtttttggtgctcgctttatcgcaaagatgctttcagtcccaatggtgatgtcatatcatacccaccttccagcgtatataccaagatacaatttaaattggttacttggacccacatggagtcttataagatgtcttcataggtctgcagatcttactctagttccgtcagtagctattgccgaggactttgaaactgcgaaagtagtatcagcaaatagagttcggctttggaacaaaggtgttgattctgaaagtttccatcctaaatttcggaagcatgaaatgcgcattaaattgagtggtggtgaaccagaaaaaccactcataatacatgtgggtcgtttcgggcgtgaaaagaatttggattttctgaaaagggttatggaaaggctcccaggagtaagaattgcttttgttggtgacggaccatacagggctgagctggaaagaatgtttactggcatgcctgcagtattcactggaatgctccaaggcgaggagctctcacaagcatatgccagtggcgacttgtttgcaatgccttcagaatctgagacacttggtcaagtagtgctggagtccatggcttctggagtcccagttgtcgctgctcgtgctggaggtatacctgatataatacccaaggacaaggagggtaaaaccagtttcttgtttacacccggggatctcgacgagtgtgtgaggaagatcgaacagctcctttcgtcgaaggttctaagagaatccattggaagggctgctagggaggagatggagaagtgtgactggagagcagcctcgaagacaatacgcaatgagcactactgtaccgcaacgttgtactggaggaagaaaatgggcagaactaactaggtttcgcttatcgattcaggaatcgttcaccgccgtctccacctagttactgttaataaccaaagagtttgtacattgtatccaacagcagctcgcgagtttgtgcggctagctgcattcatgtgttcacaaatcacaatcatgggatggccactgaccaaaagcttgtatgcgagtcatgtacattagacagctctttgagattggcgattactatcgaagtgctaactgctaatttagaat

SEQ ID NO: 7920 - DNA, 1341 bp, Oryza sativa
  ref <308>: DATABASE ACCESSION NUMBER: AK105268
  ref <309>: DATABASE ENTRY DATE: 2002-08-28
gctgctaacctcgccccactttccccgcctcgggtcgcgccgccgcgtccccgccgcgccgcgacgcgacgcaacgcatgccccccaacccgactccgccgcggcgcgcgacgacgacgacgacgagggcgaccagcggcgtccgccggggggaggaggagcaggggggcatggcggtgtcggcgtcggcgggggaggaggaggaggcgttcgaggaggtggacccgacggggcggttcgggcggtacgccgacgtgctcggcctcggctccgtgaagaaggtgtaccgcgggttcgaccaggaggaagggatcgaggtggcgtggaaccgcgtgcggctgcgcgcgctcgccgaccgcgacccggccatggtggagcgcctccacgccgaggtgcgcctcctccgctccctccaccacgagcacatcatcggcttccacaaggtctggctcgaccgcgacgccggcgtgctcaacttcatcaccgaggtctgcacctccggcagcctccgcgagtaccgcgaccgccaccgccacgtctccgtcaaggcgctcaagaagtgggcgcgccagatcctcctcggactcgaccacctccacacccacgacccctgcatcatccaccgcgacctcaactgcagcaacgtcttcatcaacggcaacaccggccaggtcaagatcggggacctcgggctggcggcgatcgtggacaagacccacgtggcgcacacgatcctgggcacgccggagttcatggcgccggagctgtacacggagacgtacacggagtcggtggacatctactcgtacgggatgtgcgtgctggagatggtgacgcgggagatgccctacgccgagtgcgacagcgtcgtgcagatctaccacagcgtcacccggggcgtcccccccgccgcgctcaagcgcatcagggaccccgagctccgcgccttcatcgagcgctgcatcggccagccccggaaccggccctccgccgccgagctcctccgcgaccccttcttcgccggcatcgacgacgacgatagcaccggcacgctcggctagcctgttaaccagctgggtagtactagaaattattgtatgtgaattcgattggaaacaaataaacgttctaaacgaattaagctccagcgagtagcaaatgtttataggttcatgtctcaccggcgctcgagctgtagcctgtagctttggatgtggttaattagtggctagtactgtagtatttattgtactgtttgttctttggtttgtactgatttgattcatgagcttcaaagaaatggaagatgaggagctgtatttggctttggctttgcgtgtc

SEQ ID NO: 7921 - DNA, 1685 bp, Oryza sativa
  ref <308>: DATABASE ACCESSION NUMBER: AK105269
  ref <309>: DATABASE ENTRY DATE: 2002-08-28
ctctttcgcttcgctgaccccccaaaaccctagctcgagcgctcccttcttccccccacctctgcggcggcggcgggcggcgagatggcgaagtcgctgcggtcgaagcgggagaagcggctgcgcacgctgcggcgggagatcgcgcagcccttctacgacaagaaggaggcggccaaactcgccgcgcaggccgccgcgctcgaggcgcccgcgctgccggtccgcgcgcctccgccgccgtccaaggattccggcggctcccgcgccgcctccagctcggcatcggccatggacgttgagatggcggatgaaggaaataacaagtccaagtccttcttgaagccaattggtagcattagcaagaagaaggtacaacttcacttgaagatcaagaaagataaaagaaaagctaggaagaaggggaggtttagtaaaaagtaggtgtcaaagcttactctgttatgagaaccatcaattttggttagtttgaacaatgcatgtaatggtaatctcttgtgttgttgtgcacctaagtgttaaccatccattctgggtggataccgtattgaaatcagcgaaagcagtgagccagtgacacccaaaaaaaaaaaaaaaaaaaaaaaaaaaaaaaaaaaaaaaaaaaaaaatcaatccacccacctccgaagtgtatctgcagcatgcaggtaccgatcgaacacaatggtggcgaacaaacacttcttgtccctttccgtgctcatcgtcctcctcggcctctcctccaacttggcagccgggcaagtcctgtttcagggtttcaactgggagtcgtggaaggagaatggcgggtggtacaacctgcttatgggcaagctaggtggacgacatcgccgccgccggcatcacccacgtctggctccctccgccgtcccactctgtcggcgagcaaggctacatgctggggcggctgtacgatctggacgcgtccaatcatcgaggcgttccatggcaagggcgtccaggtgatcgccgacatcgtcatcaaccaccgcacggcggagcacaaggacagccggggcatctactgccgactcccacctcaacaagcgcgtccagcgggagctcatcggctggctcgactggctcaagatggacatcggcttcgacgcgtggcgcctcgacttcgccaagggctactccgccgacatggcaaagatctacatcgatgccaccgagccgagcttcgccgtggccgagatatggacgtcgatggcgaacggcggggacggcaagccgaactacgaccagaacgcgcaccggcaggagctggtcaactgggtcaatcgtgtcggcggcgccaacagcaatgccacggcgttcgacttcaccaccaagggcatcctcaacgtcgccgtggagagcgatcgagctgtggcgcctccgcggcgaggacggcaaggcgcccggcatgatcgggtggtggccggccaaggcgacgaccttcgtcgacaaccacgacaccggctcgacgcagcacctgtggccgtttccctccgacaaggatatgcctacatcctcacccaccccggcaacccatgcatcgtgagtagccaactcgattagaaattctgaatcatcctgctgcaaactgatcgatgaactgaagataaattctgcaaaactctttcagttctacgacc

SEQ ID NO: 7922 - DNA, 1528 bp, Oryza sativa
  ref <308>: DATABASE ACCESSION NUMBER: AK105270
  ref <309>: DATABASE ENTRY DATE: 2002-08-28
gtcggatgccgccgccgcgaccgcgaccgccatggcgtaccgccggaagccgcagcctccgcagacgccgccgtccttggaccaccaccaccaccaccacaccccctccgtgggcccctcgtccccgccgcaggactccctcgccgcgcaggccatgcgcgcctccgccgcgcaccgcgacgcctcctccctctcctcggcctactcctcctcctccgcctccgcggccgccgccgccgccgcggctcgccggggccaccacgagccctccgtctccacgccttcccccggttcttcgggttatgaatacacatccatgaagaacttgaatgaggctaagtacggattttggggggcccttgctcggaaagccaagtcttttctggacgaggatggttcaccagggcagtatgattccccggcgaggcagcagccgtcaagagatgcgccgccggttggtgtccagtatacacgctcacaacaaccaccgtctgaaacatggaaatccgagacacctccatctcataagaggtccgaggccatagcttcctccctcaactatattggtggcacaataaaaagtgcacttgaagaaggccggacgattgtagaaaataaaacagccgacattattcatgaaacacgcaaattgaacataagaagaaaaggagctggctcaactacacaaggagaagctccacaaagatttactcaaaggaatcttccacaaaatccacttgactacgaaactcaattgaaggcatctcgcgacgttgcaaatgccatggcagcaaaagcaaagctgctattacgtgagctgaagactgtgaaggccgatttagcttttgcaaaggaacgttgcgctcagcttgaagatgaaaataagattttgcgggaaagtcacgataagggtgataaccctgaagatgatgatctgatccgcctccaactagagacactattagctgagaaggcacggctcgcacatgagaattcggtgtacgctcgagagaatagattcctacgagaaattgttgagtaccaccaacttactatgcaggatgttatatatgtggatgaaggcattgaagaggtcactgaggtctaccctacacaagtattaccacctgcaccttctcgggctggttcaggccttggtcgctctgtaaccccagctactcccaagactgccagctcatcaccttcatcaacatccattgttgtaccagaaacttgtccggtcgttccagcctccccaaagtcgctttctcggacttcatctaagcaatagatcaagcccggcaccaccaaccatgctgaagattaaaaggtggttagtggtgcgatacaatccggatgccattgcaaatgtaaaaccaaagctgcgccgttgctgtgccctgtatgttagtctctgatgagttgtgtcctggaaatgtgcggacaaatgatgttcatgcctgagatgtttgtatgatccggtgtaacttacacagtatttataattttactgcatcatcgatttggt

SEQ ID NO: 7923 - DNA, 1860 bp, Oryza sativa
  ref <308>: DATABASE ACCESSION NUMBER: AK105271
  ref <309>: DATABASE ENTRY DATE: 2002-08-28
ttcgtcctccgtcccctgctcgtcctcttcggcaagccgacaaatctgccgccggcgccgccgcatcctccttcaggccctctcccgcgcgccaagttggcaaggccggtcgtggtgctgccccccgctgatcgaatgtcttctccaagtcgaagaagctctgtgcccctccctcttccagaccccagcagcagcagatcagaaacgagtgccgtgaggagcgaaggagatgccgctgaggagaaatctgaagaacagagaccgggaagaagaagaagaaagaggaagcagcgaggaccgacacgcccgactatcgcgcttcttacggaagaagcgaagcagaggctgctgagggcagaggggcagacttcgcccggaacaactgtctcaccttttgctcctgcaccccgtcgtcctcaatacccgccattcccagaggatggcaatgttgaggatgtgcgcaagtggaacgacgagtgccacgaggtcagtaagatcatcaagaaaattgagaaagaacgtgataaagatatccctatcaagactgagcccaaggacccatacaccaccgaggccatacagagctcaagagacaaggtggtggttttgcaggcggcacgcgccattgtcagcatttcgcacatcatggatgatgggcagaggcgaccacaatgtactggcattattattaaacaatggtctgatgacactgggcatcatcatgctaccatagtgacctattctaggatcgtatgcgaagcgggtagaaaacgtgatcccttacccaagctatctgtttgcttaccgaacaagaagactgtcttggatgcggagcttatctacttcaatgatcattatgacattgccctattacatatcaatctagaagttaccatggagctcccatcttttggacgtggcccagagtatggtcaagaagtttttgtgttggctagggatggagaggcatccttgagggctaggcgaggagatatccaatggttagaagaatcagatattttagggcgtgaccactacatgtttctgagctgtgacatccctgagggtgggaatgaaggaatggtgattgacaatgatggtgtagttagagggatggcaatctattgtagcccctatcctgctgttacttcaatttctactattgtaaaatgcattgacatgtttatgcagttcaatcaggttgctcgccccctttttggtattggtgtcagaacaatagcgctgttggatgtgcagcttcaggaggatatcagtgactttggcatcaagggtggtttccttgtagatagggtgtataatcctgtcgccgaggatcttgggataaagcgtggtaatgtaattacttctataaatgggaagggtgctctaacgttacctgagctggaagattatcttctattacttggctggggttatttggaggacaaactaaattgcattaaagatatcaagcttagagtttgtgatctcaagagtggtgtggaaatagatgtcacactgcctgttagattctatgataaatctgagaggaaattacgtttccgtcatgatgaagactgataggataggatgggctcagatgacacctcgtagtgccatggcttctgagcagtctggatgttttgcttgtgttctgtcatgctgctgatactagttgcaaggtggggagattgttgtagatttgtcctttggtctatccatcaagcgatataatttggttacacagtagctttaatgtaaaatggggttctgaattcttttttttttctaaatatttttagcagaccagtatttttatccttggttcctgagtgcgaatgacggcagagttagtcgttt

SEQ ID NO: 7924 - DNA, 1718 bp, Oryza sativa
  ref <308>: DATABASE ACCESSION NUMBER: AK105272
  ref <309>: DATABASE ENTRY DATE: 2002-08-28
gaatcccccaccatccaatttcgttttcgttttcgtttcttccgccgcaagcctcgccgcccgccctcgcaccggcggccgccgccgccgcggcgcgcgatggagtcgacgtgctggtcgtgcggcgagggcgcggtggtggcggacccggacaccggtgtgctcgtctgcacctcctgcggccgcatccacgactccggctcgtcggagttcgtccaccagtcgatctgcaccgacaacggcgtgtacgacctccgcgcctcctccttcgtctaccaccagtcgcagtcgcagtaccgggaccagaagctctcgaacggcgtcgtcaccatcgcctccatcgccgcccgcctcggcctctcccccaccgccgccgacgaggcgctcgccatggccaagtccgccacgggcggcaacctcgccacccagggctccgccttcctcccggccctcgcctccgcctgcgccttcctcgtcgcgaggtcccaccgcctcccgctctccctggccgaggccgccgagaccgccttctgctcggtggcctcgctcgccgacctcgtctcccgcatcgcctcccacctctcgctccccccgttgatgatgatgaatccaagtaccttcaggttgctccccaattggcttctgatgatttggattccaataattccgggcaggaggggaaggaattggagaattttaagatctcggaggagtgcctatcaagtgcttaccaaaatgtcttgaagaggcttgctcaactacaaagacttgggcaagttggtaaaggtgctaacaggaagaggcagcggataggagggctggagctggagccatgtatagattcgctggatgatggttggaccaaggacatggtgttggaggatgtagtgaatattgacgtcggctttgatgttcctccgccatcgtttgctgctggaatgaagttgcagaagaaaaggagagcacggattgaagctgctaagtgccgaattgatgcgattagaaaaggtcctgttgagagcgagaataaattgcaggctgctctgagaaatgaagatgcctgctcaccgcaaaaaccggccaggaagaagcgaggcaaaaagaggatagctggaagtgatcgtgccatgaatggagagcttccaatagagatgccggatggtccaggtggtgagaagaagagacggaaaggagctccctctgatggtattgactgggaggactgtatcattgagctcctgttattacacggcgcaaatgaggaagagatcgaacaaggacaatacagaagattgttagatctacatgtcttctgtgcagtgagtgccagtggacacaaatgaaaacatggtgattttctcatagatggagtcagaaaatgaaaaatgtgcattggcgtatcgtgctttcctgatgaagtgtgtttctgattatttcgaagtggttcagatcttcaggatgcaatctttcttttttaaggtaatgggtggctactgactacatatatgtgactcaaattactattggtgatatatctatcctattcctatgggcgaaaataacatttggtttgtaatcgtgcaaaatgtggataagtatttacatgtttatttgtaatctatgttgttcagcggttcttgttgctaaaggccgcaaggacagactaccgatttaagttaccaggtcatgtgcaattttttttaagatgtactcaactg

SEQ ID NO: 7925 - DNA, 1882 bp, Oryza sativa
  ref <308>: DATABASE ACCESSION NUMBER: AK105273
  ref <309>: DATABASE ENTRY DATE: 2002-08-28
accaccactgccactgtagcgtcatgctgtaacgctcgcttaaacccaagcacgcagcacacgctctccattccattcccctcccgattgatctccgcctcgatcccccccgacgccgccatatggagctcaccgccgccgcgtgatgagctgccccggtcgcgattgctgggctccgctggtgattcgtcggttggatcttggaggttttttatccccattattcaagctggttactcgggtgggtggtttcttgaggctgggaagacaaaaaggggagtgaggttttggattaaggaaaggggaaggggatcttctttagcatcgatcggatcctctctgttgggatttcgaagcttctgcgcttccacggatggatttcttcaagatcaagaagttggggaaggcccggaagagcggcgggggcgggggagaggttgtagaatcagaggaggaaaccaaggctgggaacaatgcagcttccgatgagcagaagggcaagatcttggaggatgatcctgcggcggcagcagccggtgcgggtatggatgcagatgcaggcaatggggccgtggaagggcaggaggaggatgatgacgatgatgatttcatcaccaatgaggtgaagcgtaggctcaaggagctgaggaagaacagcttcatggtgctcatccctgaggaggagtgtgctgaggtggaggaggatggggaagaggaggaggaggaagggagtagttccagggagtggatggagtccgacgtcggcgacgggttcccgctatgcgggttcgattcgctctatgagaagtattgtgagaggatggcggtgttcgataagatgatcacgcagcttctcaaggatccagggtccttcaacatctcaaaaaagtcgcctagatcagcatccaaattggcatcaaccctgcgcaacctctctttcaaaaggagggatgacctccaggaggactgcgaacatcttcagcaacagcagagcgaggatgatccctaccaaacacttgagacagcatatgttgggcatgtttctttaagttgggaggctcttcattgtatgtatgtgcacctgagtctgatactcgcagctcaacctgataatcccaccacctacagctgtgctgctcaagcattccagcagttccaggttctattgcagagatttgttgagaatgagccatttgagcaaggttcacgggttgagatatatgcacggtctcggagttccttgtcgaagttacttcaggtccccacttttcaagttgcagatgggaaatataatgctgaagatcaagtggaaccttcaatttttgcatctgacctcatcaaattattagaggagtctatcatgactttccgtcttttcctgaaaaaggacaagaaaaagaatagtgccctcatgagtgttcatagtcatactggaagctcgattcaacaagttcaatcctctcttgataagaaggaagtgaaagtgaaggagctattcaagaagaagaaaggatggaagagcaagacctggccagccacaatggaggaagttcagctgctttttgccttaatcgacatcaaggttgtgtcaagggtcctaaggatggcgaagctcagcaaggagcagctcctgtggtgtgaggagaagatgagcaagctggatctctccgacaacaagctgcggcgcgatggatccccaatcctgttcccctgttgacccatcgagtgcctgaggcaccgcaaaatgtggcatctgctacactttgaatactttatagcttagctgctgtatgagctgataccaccctattatatgtaaatgcctttaggtttaaatgctcatactaaaacgatacctaagaagagttgctgctagatcccc

SEQ ID NO: 7926 - DNA, 2674 bp, Oryza sativa
  ref <308>: DATABASE ACCESSION NUMBER: AK105274
  ref <309>: DATABASE ENTRY DATE: 2002-08-28
acgatcttggttcgcttcgtgcgactcctcctcctcttgcgccggtgccgacctcgcctcgcctcgcctgcgtcgcgtcgatctcgccagcggcggcgccagccggccggcgtctgctgcgtcctccgcatcctcgctcgccgagagttggggtcaagcaaagttggttgttttttactcgaatgtcgtgaggaacaccgaggaatcctccagtttcgcatgagacccatatgttgaacaaaggtgaagctgtgctgtggagacctgataaaattttctaataatgcttgtgcaaatgaagaatactgttcatctcacgctattcctgtgttctttctcaagaatgctttgctcctattcttttattgaaatcaatttgtgttattatcttcccattcgtaaggtgctgactagttcacttttttatgtcatagagtaggaaggttctctgtactgcaagtgtttggatttcctcgagccgaatgagctttcactggtggatgtggtaataaaagtccctgttttcaggatttttcatggacccgggaaaacacaatggaatgagtctgaaggacagaagagaattagtatatgaagtttcacaatggccacaaggtgcctctgagattttacaatgttggactcgcagagatcttcttgagcttatctgtgctgagttgggcaaggagaggaaatacactaatgttccaaaatctaaaatgattgcttatctgttaaaattagttttacgaaagaatggacagccaaaggatgataatgcaaatgcttcaattttggggcagaataacaaagatgacacagagaagaaagaaaatgaggaacagccacatcatttcagcagaagtgcaaagtctgactcatcaatgtgcagagaggcccaagctggtagcacagcggtatgccgaaatgttgcatgccaggctactttgaactctggagatgcgtattgcaagcgttgctcttgctgcatttgccataaatatgatgagaacaaagatcctagcttatggttggtttgcagctctgatacaccgtactctggctattcatgcggcacatcatgccacctaaagtgtgctctaaagaataaaaaagctggcattttcaagaatgggtgcaacaagaagtcagatggtagtttttactgtgtttggtgtgggaagatgaactggctaatgaggaatctgcgtaagcagctggcaattgcaagagaatctagaagagttgatgtactgtgtgagcgtttgtcactgactcataaaatggtgaaagggtctgaacgttacagggaactggcaaacataatcaactcagctgtgaaaatacttgagaaagaagttggttgtgcattagatcaagtgtctgcaatcacggggcggggcatcgtgaaccggctttgttgtggtgctgatgttcaaaaactttgttcatgtgcactagaaatggtagactccacattgagtagcaccctggacttcgaaacaaacaataatctggaagcgccaggtccccagcctcaagtattttttgtggagattactccattttctgtgcttgttgtattgaagtaccaggataatatcgctgaggagattgatggttgcaaagtttggcaccgaagtgcaaacatggccaactatccagcagagcccacttgccacgttcttagaccaaatacaaggagtcttttttcaggtctaagcccttctactgagtatttcttcaaggttttgccttttggctgttcacagggatatggcgaatgggaggtaaaatgctctacacgaagccttaaccatggcagcagccagtgctcaacacagaattccgagagtatgtccatcaaggaggatttggagcagcatcagaaaaatgagttgaatctgaagaacaagcagtggtggggcattcaatatgactcaccctcggcaaactcgaatgagaacgatgtgtgtcctgacctgcaccctaagcgagctaagctcgcaaagttggacggtgcaagtgacaacgacgaaagccagttgctgccaacatcagaagttttaccattcatgagctctaattcttcactttcagaagttccaagcaaacctgactgggttagcagcaccccagattccgcctgcaagaaccatgttgagaggcagtatgaatacagtgtgaaggtcattagatggctggagcatgaagggcacatggacaaggatttccgcgtgaagttcctcacatggtttagcctgaaggcgtcggcacaggagcgacgcattgtgaacgccttcgtagatgctctggtgagtgatcctgcgagcctggtagcacaactgattgattcgtttatggaggttgtctgcagcaaggagaagcctgctcagccgaatggtgggtgctgcaacctttggcattagaaagttccattgccactgaggaatctcactatcatatttttgccaataatcatctgcatcgaaaagctgagcaattcaagctatggcttattgctttatttgatcaatttaacactagttgctgattgctaggtttctgaactgtggtggtggtggtggtggttatgttaggtgtatgaactaagctgaagttgttgacaagtgattcctggaatgctataaatggaggtaggtttagatgcttc

SEQ ID NO: 7927 - DNA, 1764 bp, Oryza sativa
  ref <308>: DATABASE ACCESSION NUMBER: AK105275
  ref <309>: DATABASE ENTRY DATE: 2002-08-28
attcaacattgaggtgaataaacaacccaaaatcttggaaccagtcaacgatcagcccgaatttcgccgttgttgcttgcctacctctccactccatcattcgcaaattttttgcagaacacagcaaggagtagcagagaatgagcgagatgcagccgcacgccgtgtgcttgccgttcccggcgcaggggcacatcacgccgatgatgaagctggccaagatcctccactccaggggcttccacgtcaccttcgtcagcaccgagtacaaccaccgccgcctcgtccgctcccgcggcgccgccgccgcggccggaatcccggggttccgcttcgccaccatcccggacggcctgccgccgtccgacgccgacgccacgcaggacccgccgtcgctcagctactccaccatgaccacctgcctcccccacttcaggaagctgctcgccgacctcaacaaccgcttggcgcctgacgacgacgacgccgcgccgccggtcacctgcgtcgtggccgaccacctcatgggcttcagcctcgacgccgcggcggagctcggcgtgccgtgcgcgctcttctggacggccagcgcctgcggctacatgggctaccgcaacttccgcctgctcatcgacatgggcatcattcccctcaaaggggaagagcagctgacgaacgggttcatggacatggcggtggactgggcgccggggatgagcaagcacatgcggctcaaggacttccccaccttcctccgcaccacggaccgcaacgacatcctgatgacgttccagctgcggcaggtggagcgcgcggaggaggcggacgccgtggtcctcaacacgttcgacgagctggagcggccggcgctggacgccatgcgcgccatcaccccggccatctacaccgtcggcccgctcgcgttcctcacggagcagatcccgccgggcgggcccctcgacgacatcagccccagcctctggagggaagacgacgcctgcctccggtggctcgacgggaggaatccccggtcggtggtgtacgtgaactacgggagcgtgacggtgatgagcggccacgagctggaggagttcgcgtgggggctcgccggcagtggccacgacttcctctggatcgtcaggccggacgtcgtgacgaggaccgccgccgccaccgccgcggaggcggcgctgccgcgggagttcacggaggcgacgaaggggagggggctcgtggcgagctggtgcgaccaggaggcggtgctgcggcacccggcggtggggttgttcctgacgcacagcgggtggaactcgacggtggaggcgctgtccggcggcgtgccgatgctgtgctggccgttcttcgccgagcagcagaccaactgccggtacaagtgcgtggagtggggcgtggcgatggaggtgggggacagcgtgcggcgggaggcggtggaggggaggatcagggaggccatgggaggaggggagaaggggaaggagatgaggaggagggcggcggagtggaaggaggccgccgctcgagcgaggggacggtcgctcgccaaccttgagaggctcatcggcgatgtactgctctctggtaaaaaggacagggtaatttgatcatcaaattcagtagagcgtgtacttgattggtgcaagtaaaagtattatgcggatgctagtgtgcaactgcagcatcagatccatgtaccacaaatgcgttggtgatccatggcagctgtgcaaatgtgacttctcgcct

SEQ ID NO: 7928 - DNA, 1919 bp, Oryza sativa
  ref <308>: DATABASE ACCESSION NUMBER: AK105276
  ref <309>: DATABASE ENTRY DATE: 2002-08-28
ggagaggagcggcggcgccgcggggcaggtcgccggcgagctcgatctgcaaccggcaccgtcgctactagggccacccgatgttgtcgtcgctgctcgggccgtccctccacccggcgcctccgtcgggacggggtcgacgttgttgccgctgctcggtacggggggcgccagatctgagtgctggtaggagaggaggcggcggggtcgtcgccgctgcatgccgccggtgggaggagaggagggggcgggggctggggggtcgtcgccgtgtgccgcctcgtcgtcccagcgccggcgctgccctcgccgccgcgctctgccgacgggtgtcgaaacaagaattcggcaataataaaagggggtagcgcatgagacctaaaagtggatgggtgcggagacaaggatttagacaggttcaggccctctcaatgaggtaataccctactcttgtttggggatttgaatccgccgggtgtgttattgatctgatgatcaggttgtgtgtcatgccccctagagggcctcctgcccaccttatataggatggagggcaggattacaagatagaaatcttaaccaatacggtatcggtttcctaaatctattttacaatattatcaaaccaggactttagaccgttccgtaatatacaaggaaacgtaatacccaagtcaggaggtggaggagaggagggggcggggggttggggggtcgtcgccccaacaccggcgccgccctcgctgccgcgctttgccaacgggaaaggaggcggaggagaggaggggtgggggtggggggtcgtcgccggcgccgccctcgccgccacgctctgccgatgggaaggaggagaggagagggagaacaggggaaaggagaagaggagagagagggagataaaaaaataaaaaagatgctacatgcattgtggagtatgtagcctataaagttctttgtctagttggcatgggaggaacaccaaaattgcagggcgctctgtgaatggccttagttgattagccagcagcttttacagaacatcactagatcagtcagccacatgtttggcacatatgcttgtagtttctgaaatttttactgcatgtcctgaatctgaagttttggatagatgaaaactcaaataactcgattggatagcaacatttccaaaattttgttgttcaaaggagcacatcgattgattttttttctgaacttctgacgatatgtttcttgttgaaaaaggagatggattggattgtgtttctgaactgctcactacgtacatatatatggtctcgttgaacatgctatttttagcagtattatgactacaaaatagtagtagtttttttttgtggatatgaaatatggataaggatcatgcataggtaggcctgctgctagagttttgtttttgtgatgctttaagcatctccatttcctgctcttatctaaattttcatgtgtgcattattgaatttgcatgtgcaatacgtgcagagcactgcttccatctgaattttcatttgttcggtcattatttcgtcaatgcaatgttttggaaaaatggcaatagcatcttcagggtggacagcaacattgattttcattcatttcaaccccatgcatgaatcttttttttctcatttagatgtattgcacaatgttatcgattgcaggtcaggactaaggcaagccaaagaaccacaatgaaggaaatggaatctgaccgccatacttgtttgaataaaaaaaaaggtggtctcaagttatgcatgggtaatttaggttatgtttcttgcactacaattacgtatatgctactctgacttactaacaaatcatgtatacgataactcagagttttgctatgtgagccaaaggactgaagagatgaagttctcaaatttgacttc

SEQ ID NO: 7929 - DNA, 1095 bp, Oryza sativa
  ref <308>: DATABASE ACCESSION NUMBER: AK105277
  ref <309>: DATABASE ENTRY DATE: 2002-08-28
tgatgtgtttggttcaactttagatgacccactgtctcaatgctacaagaaactaggctgttctatcaatcgtgttgttgaagactcggaggactataagatgatcctgaagtatctggagaaaacctacgagcctgtcaaggttggcgatgtggtttacagtgctactgtcgagcggatatatgctgttgaatcgagtgctcttccttcttatgatgaaataaagaaacttccgaacaaagttctcctctggtgtggaacaagaagttcaaatttgctcaggcacctgcgcgatggtttcgtgcctgctgtctgccatataccagtgccgggatacatgtttggcaaagccatagtttgctcagacgcagcagccgaagccgcgctctacggcttcacggcggtggatcgtccggagggttacctggtcctggcggtggcatctctggggaaagagatccaggagataacaggcacgccaggctcagaggacgtgaaacgcatggaggagaagaagatgggcgtgaagggagtcgggaggaagacgaccgacccgtcggagcacttcacctggagggacggcgtcacggtgccgtgcggcaagctggtgccgtccacgaacaaggacggcccgctcgagtacaacgagtacgccgtgtacgaccccaagcaggtgagcatcgcgttcctcgtgggcgtgaagtacgaggagcagaacatggaggtggtgccggacgagtgatcgatcgccggccggtcacccgaccgaggccggtggcggccatctgccgttctgcagctttttagcttagagtaatggtagcgaatgcattttgggcccgtgtcccattttgggctgtgtacttgctggagcccggcagcgacggtggtggctggtgtgttcgacggtggcagcccgtgtcccgttttgggctttgccttgttctcttctcttcgtcgtttgccgtgcgggtgtgcagcgcagccacgctctgtaggctgaaagaacccgttgtcgcagtgtcaaaagtttgtacatatttgttatgtgaatcgtaatgggatgtcggggttatcagttatcacttacttttc

SEQ ID NO: 7930 - DNA, 2050 bp, Oryza sativa
  ref <308>: DATABASE ACCESSION NUMBER: AK105278
  ref <309>: DATABASE ENTRY DATE: 2002-08-28
atcgagtcgccggattggtagccgccctgctcgtgctgcattcgctagccacgccgtccgctcaggccgaggcgcatcgcgcagggggagaaggggaggagaagatgtcgagcgacggagggccggtgcttggcggcgtcgagccggtggggaacgagaacgacctccacctcgtcgacctcgcccgcttcgccgtcaccgagcacaacaagaaggccaattctctgctggagttcgagaagcttgtgagtgtgaagcagcaagttgtcgctggcactttgtactatttcacaattgaggtgaaggaaggggatgccaagaagctctatgaagctaaggtctgggagaaaccatggatggacttcaaggagctccaggagttcaagcctgtcgatgccagtgcaaatgcctaaggcccatctcgtatcctatgtgtatcaagttatcaagaagatggggaataatatggtgtggatatagctattggacatgttaattatccacatgataatatggcttggatataaggatctcacacgataatatggcttggatatatagctattaaagattttacctatggcatatttcaatgtgtattagtactaagtaagaatgtttgcaaggtgtattaactacaaatattgcaataaaagtccctgttactacaaaaaaaaaaaaaaaaaggagtaaactatacttgcatcttgggtatttttttcagagcaaatcgagatcgatccgacagaagcgagcgatcatggggcacggcaaggaggtgaagacgaggccggatcccaaggtggagatccaggagaagggcgagatcttcttcttctatcgtcccaaggtcggcaaggacgaggcgcgcggccccgacgacgtgcagcggatgtacatcgtcctccgccccgaggccaccggcgacggcggcgaccgcgccgtcgaggacaagcaggcgccggactccggcaaggagggccacaagaatcagcagccgcagaacagcgacggcgatggcggcggcgaaggcggacacggcaaggaggaggtgaacgtcgaggagcaggcgctgctccggctgatcgtgatggggaagaagagcctgccggacccggcggcgaagcgcggccgcccgtactggggttacgtcgagctcgtcaccaccgacgtcgaacacatcaaagacgcgctcaaggaagaggagtacagcacggcgacgcgcgggacgcggcggagggcggcggcgagggcgctgggggagggcgtgtaccgcatcctgaagcacgactccgggcgccgcgttcacacccacctcgtctacaagctcgagctccccttgccggcgcgtcgccgcgagcacgacgccgaagccgacgaggccggcgagccgcaggaggccatgaacgtggagccggaggcgtcctacctcatccagatcaagaaccccgagcagccgccaccctccggcggcgggggcgacggcgggttccgcgggctgcagagcaagcgcagggcggcgttcccggcgcacctgcaggggcggttcgggagcaaccaccgttacgcgccggccgacccgccggacctgctcaactacgaagggtgcgagttcctgctgatcgccgcgtccgacgacgtcgaggaggagctggggctcgagctggagaccgagaccgacgccgaggccgacctcgaaggtgatggcgccgccgccgccaagtgctcggacctggtgaagatgttcggcgaggtcgccgacgtgaagccgctgctgtccgggagttgggactagagacaatatgcacaagtgatcagctcgacagatagtgtcagtgtgcatagaatgtagaactagtttcagtgttcagtgggcttttggtgcaattagtagacgagtttaggagatgtttagagttctagttttagtgctgtactaatcttttggccggtgagtttggatggtgattttggagaacaatccgaaaatccaaaaaaaaggctgtaactatatttatgtcaagaacaagatcagtagcagcttctgagt

SEQ ID NO: 7931 - DNA, 2043 bp, Oryza sativa
  ref <308>: DATABASE ACCESSION NUMBER: AK105279
  ref <309>: DATABASE ENTRY DATE: 2002-08-28
gaagcctcctgaggtgatcgacgctatctgtccctaccggaaggaagggtatggattcgtcattcacctcaggaatgacatactctgtgccgtttggatgaacatgaacataccttgcaagtgtgccacacggcatgtcctaatcacaactttccgaattgaatgtcagctcgataaggatgattttgaacctaaagtcctcgaggtcctacactccacctgccgtagaattggtatgcttcgaagcaaagcacccgggcatgagtcctatgacagattgtgtttcatacaggaatatctggacgattcatctgagattgatccttcgatagctttgatgatgggagcaaggtccagctactccgaagctgatgaagttgacccaaagatgctgctttgttgtagggagtttttgagcataagagaacttagttcatgtgtagttcttgaagaatgtagggtaatggtcaaatcagaattctatttcatttgtcagtcgggtcaacacacatatttatataagatctctactgcaagaggaaagttgacatgccatgaaaccattctagaagcagaacactctttagagacaattaggaatggggatgtcggaatagatgatccgcctgcatggcattttgtgaactatggagtgaagctttatgtgatcccctctgttccacagtacaatcactattatgaggtggatgtctacagaaactcctctctcatcttggaaagcaaacggcctagtatttgtttctctgcagtttgtcgagttgggcaacggattgtggcattgggtgatactttggaggccgtgtatattcttgatctccaaaatgtggagtgggtcttttgcaagacatcgtcgacgtttttagacttaagaaaggaaatcaagatttctggatttgtagaccttggtaatgattcaatgatgatttcagaagttgatgcatgtgagtgttttattctagatcttaagaagaagcaatggtttgttgtagagccgcctaatggtgacatctggcagtactgtgttggtctgttgagcggaacatgtatgttcattgagggctttatatatacctgctcagatggggaaatggttgcatatgagttgatcgagaaagatggtttataccattgggatgcacctgtcataatgaggttaccatggaagaagttctctaacaggaaatttatggcgttctgtccaatttgtaaagatgtcatacatgatgacattgcattcagtattgtggaggcgcgtccgtttggttcaagtcatacagtagctactacaatagtacaagtgaagcttcaggaaacgacacgaggatccaaaagaccagttggaattgctcatgcagatatttcaacgtcatcgattgaacaaaatggatggatcttatccaactacgcatttactttataagcaactttagaagtctctcctgctgggactctcctgctcgagcatggagacgggatgctgctgacgacgacggtggacatgtctggggtgacggtacacgtgagcccatccagcttgagacgacgaggaaggggactgatgagtggtgtcacggcgccggctagagggtcgatgaagcaggcctcgtgggaggcgccgacggcgaggaggcggccgctggcgccgatcaccatggtctgcgcggggccggcggcgaggctcggcggccaggggcagtcgcgggtggtgccggagaagacgaagcgactgtgaaggagcgggtcgtggcggtggtgcggggccagaagccatggcaggaacgcgttcggcttcgtcgccgctggtgacgaagcccctgtctcccgccatgtgcggcacacgcccaggaaccgcacgaaatcgaccacgtcgtcgagctgcgctgcgatcatgccgagcaagtcgtccggcacgctgatggaccacatccccgtcgccgcggaggcgtcgtcgtcgtcgtcgtcgccgccgcggcctgcaattgcaacggttgaattctcgcacgcgcgcgggatgaatggatg

SEQ ID NO: 7932 - DNA, 1384 bp, Oryza sativa
  ref <308>: DATABASE ACCESSION NUMBER: AK105280
  ref <309>: DATABASE ENTRY DATE: 2002-08-28
gctgaggctcactctgcctcctctcgttctcgtcaactgtctccgcctctccggcccctccccccgccgccgccgctgccgctgctcgcgctcccggacggcaccttctacagccccccctacgacgagcccttccgcttccccggcttcggcttcgctggctacaaggccacctgcggcagccggctcgtcttcccgcgcgacgacggctgcttcttggtgaatcccttcaccggcgccaccgtgacgctccctgccctgtccagcgtccgcctccgtccaccaaatgcagttgctaagtacgatcaacaaggcactgcataccctgtcacatggatgcatatccgcggctcagagcatctgcacataagcaagctgatcctgtgcttgccaagccttgtcgctgcaatcgttggcgatggacacatcagtcagattctagtgtgcaagccagggggcctgtcatggtcagtacgcgcatacgacatggtcagaaactttcaggacatggcattctaccagggcaagctctatgccattgccaacgatgacgaggacctcctcgtcgtcaacatcagtcaggaccaaagcaccggtgatccacaggtttctaaaattgggcaggccatcaagggcgagcccttccattcagtttggcatgaatttggcaccatggacattcttgccaacaagaagctctatctggtagaatcgcacggttcactgctgatgatacgcagaaagatttggtgctggagcaagcaagcgagcgatactgatccagaagcttcacgtcccattgtggctggaccaaacgagttcgaggtattcaaggccgactttgagcagtctaggtgggtcaagatgacaacattgggggatgagcaggtgttgtttctagggcgaaggtgctccagggctatgtcagtgtcgcagtatgggatgtcaggcgatcagatcttcttcttggatgacgaggaggagaacctcaagcagtattattacagcacggagatcacttctttctgtgtgtgtgatatgagagacggtcaggtcgactcccctctgccaaaggcctcctggaagcgctgtgacgagatgcgtccggtggcatggctattcccccaggactgaagccaaggtgttaatgcaaatgcaagctgggtgcggcttatgttatccgagtccactgtctgttgtgtggtggcatcatcagtatttgccttgcctgaacttgtattttgggatctctatttatctgagcttggtattggtcgttatgctgcaaggtagtagtaaccaatattatctgatattgatcatggtggtcacattatggaaccattcaactcctgttttagggtggtggtctctgattttctct

SEQ ID NO: 7933 - DNA, 2200 bp, Oryza sativa
  ref <308>: DATABASE ACCESSION NUMBER: AK105281
  ref <309>: DATABASE ENTRY DATE: 2002-08-28
aaagctagtcgctgactgacgctgcccgccgtgtggccgtgcattgctgtccctgagcttgctgctgctggtggtggtgacgattctgctcggtagaggagatgcgagttgggggtgagctccacagcggcggcggaggaggagagggggtgttggtggggaggggatggaggaaggaggaggcggagggaggcggcggcggcggcggcggcggcggcgggtgctcggcgagctcgacgagccggggatcgtctctctgcgactcgcctttgcccagctttgtgcgccatcgtggtggaccggggtcagatctagagctcgatgggttgcccacttcctcctccaatgcttcctcagggtcacacgaggaggatcacgggccattgcaaggggtgaagggagaggggtggatgcaagtgcagggaccgatcaagaactcagctgcccgttctaccggagaatgccaagaccagcggtaccggttggggtctgttcttttccatggtaagaatgaacggaagcagcgcccggcttcagttgattttggctgccccagtgttgacagatcctccacgcattctccgggtttcttggtcaatggtaccggggcgatgaacaagggattgagtgtatcatcgcaaaataaaccaggtgcgccgactagcccaggaacaccaagctacaatcgtcagggtgcaacagttgttgggtatcagcagggttggagctctgaaagagttgccctgtcttcaaacggccagagaaggcattcaggcaacagcatggtgttaccacataatactgggagaacattgccctcaaaatgggaggacgcagagaggtggatcttcagtccgaatcccagcaatgcacttggaaggacctcaatcccgcagtcgcggcgacctaaggccaaaagtggacctcttggacctcctggcagatttagtgaaccatactcatcagtttcgtcatcgtcatatttgcttgacaccgggagagtaggaaacctcacggcaaactcacctttcctggctggggtcttgctgcctgagcatgtttgtgtgtccagtagccatgctggaagggatctaagtggtgcatctggtgaggataaaagcaatggcatgggaggcaggtctggtgaagcaaatggtgcacatcctgccgtgtggtctaccagagtttgccaacgaatggatagcgcagttcagtcgtctccgtcattgcctacttcccaagaatcagttcaagcttgcacagatgaacagatcgaaatcacaacagacttgaccaccagcagtaaacctgaaatttcgagaaaagatgtggcaacacagactagccctgagcttagcaggtcatcttctcctagcgggaggccttcattttcccgctcactatcagtacagcaagtcaaagagttggagagctgtttctctaagcttgagataagggatgtgcagatggatgatcgggttactctgaccaggtggtccaagaaacatgtcacacgaggctctgagaagaactcgacaaacattatagagtggaagaaaaagacagtggaatctaaatcttctgcctgggaagtaacagaaactgcaaagtgtatatcaaagattgagggagaggaagcaaagatgactgcatgggagaatctgcaaaaggcaaaagcagaggcagcaatacaaaagcttgtgatgaaacttgaaaagaaaagatcatactcactggagaggattttcaataccctcaggtcagctcataggaaaacacatgtgatacgcagcacaactaccacaaatcttgatcagcacatctccaggactgtgaaaaggccatcacaccttagcaagaatggccaaatgagttcgctgagtgggtgcttcacttgccatgccttctagtatggtattatacagtcaagcggcactgtcactttcaagatggaattggaggggggaaccaaaaggcttgctagtatagaatacagataagacctagcaggggaagccgaggctctcaatgatatccaatggtctgtcattacaagatttattctagaatttccctttttattctgctcaggaacaaaaggaagttgacgcagagggaaggagttgttactacacaccttgtgaagtatttgtaataataaaaatctctgcctatactcttcagggcggagtggtatcat

SEQ ID NO: 7934 - DNA, 1578 bp, Oryza sativa
  ref <308>: DATABASE ACCESSION NUMBER: AK105282
  ref <309>: DATABASE ENTRY DATE: 2002-08-28
ctcccgggaagaacaaacccaaaaacagagagagcaagaatagaatagccagcaggagcagagcacctcctcgatctcaatcataggccggctcgaggcgccgcccaattcgttcctccacgatttcttttatccatcttcttcttctttctttcttttcttcctcttcttgggagttgaagagaaagaatcgagttgttgctttgtttaattttgtgtgttgctgggggtgcgttaatggcggttgacccaatgacgacgacgacccccgcctctccgcccctttaaataaatcgcgcgggaaggagagttcgccgaggacacccatcccgtcgctagctcgtcgcatcgatctacggctccgatcgatcgatcgatcgatccagcaatggcggcgtcgtcgtcgaagaagaaagaggaggaggaggtcgcggtcgtggcggcgaggaaggggaggctgaggcagcgctacgacggcgagtaccgcctcgtcgccggctgcgtgccgtaccgtgtggtcgccgccggcggcggcggcggcggcggcgagctggaggtgctcatggtgtccacgcccaatcgagccgacctcgtcttccccaagggcgggtgggaggacgacgaggacgtgtacgaggcggcgtgccgggaggcgatggaggaggccggcgtcaagggcaacatcaacagagtgtcgctggggatgtgggtgatgaggagcaagagcagccagagcggcggcggcggcgaggcgagccggagcccccggggcggcgcgtgtaagggctacatgttcgagctcgaggtcaccgaggagatggaccggtggccggagcaggccacccacggccgccgctggctaccccccgccgacgccttccgcctctcccgctacggctggatgcgcgaggcgctcgccgcgctgctcgaccgccgctgcctccttctcctgccgccgccgcagccggagccgagcgagcacgccggagtgtacggcttggcgatgctcaaggccgccgccgcagccgccgccgaccgggcggtggcgctctgctgatcagatgccgctgtgtctgacgaatgacgatggcaaagttcagaaggcagaatgatctaatgatcattcttgtctctctatatatatccttttcaactaagttttcttttcttttcttgctgttccatctagtgagtttctctcttgttagtgcatgttcatcactgcatgaaaaatggatcctctcatggttttgtgatcgttgtcgtaagggaggagagcctcatcagcggcagccatttttcctgaacttggtattggttggcctctggactctgaactgaaggcagggtgaaattaattgttcaatgaccctggtttctagttctatggaggcagtgtctgtgtgtcagcttgtatgatcaatccagtggctgttgctgggggggttttcttatgtttaatccctgtaatgtgaagctcttagggccacctgagttctctcatgtaaatgttctgttctaattgtcatcaactgagttttctcaagtcaatgaataattgtgcatacgaatttcctt

SEQ ID NO: 7935 - DNA, 2348 bp, Oryza sativa
  ref <308>: DATABASE ACCESSION NUMBER: AK105283
  ref <309>: DATABASE ENTRY DATE: 2002-08-28
caaagatattctacgagttagaaaaaaatcaatttaaatgggctgagaaatctcacgctcagtcagcacagggtgcttctgcaatcgatgatgattccaaagaggaattacagttggacaatcattcttttaatatgattactgaaaatagttctgttcaaggcaatgaaaacaagcaaaagcagacgcaaacagggacatgtcctaatctggacaaactaagttatttcaatgtggtaagcaacatgcatattgggaaccaaattaatgatcatgatgaaatcgaggagcttgatcatatgtctctgcaagagcgctacagaattcttatggcagaaaatcattcttcctctgctgtagtatcttctgaacaatgtgcaattgatggtttggagaattcatgcaagcctggaactaatgggatgattcctaaaagaattcatgaagggactgccttcagggatggtatgtatagcatgttgcaggaaatttcttctgcaccggccattataggtagtatcgacaatgataacaacaggaggttgctaactgaaggtctttcaaacaaccagcaaagtcatgaggctggatgtgaatcaggtttcttgagtacatcatcttctgctgctccaccacaatgtcaagttgtgtgctctcatgatctattggtaaacggcaagactcttatttatagtcgcgacccttcttcaagttcaacaccaacttttggggataaaaacattcagttggaagggacagatgataggacccttttggttgacataaaattggaacctgcattggaaggggatttcacagagaaaattacatcttctgtacagagaacagatccaaatcatggcactgagggctctaatctagttgggtctataaactctgtttcttcagcgatctccaaaagaatatcagaagcagcaagatctaacccagagaattctcatgttgaaggcctactgccatcatcacgaataaaaagcgaagttaccgggagtgagttacctctagttgtgtgtggtctcacttctatcagtatcgcagagctcactgccaaaaaaaccaatactctaaaccatgacggggtccttgcttactgttctcgaaaaaggaaaaggaggaagactctgagggatccaagtgaaaagacgcttgaagaagattccctcagaaatgatgagggtactgcttacttttctcgtcaaaggcgaaggagaaaaacagcaacggattcaattgaaacggcacttgaagaagatgccccaggactactgcagattcttctggacaaaggaatactggttaaagagattaaactctacggtgttgaagaagaagatgatatggtcccagactgcacagaaagtgactttcaagatcttgaaaatgttattacaaaattgtttccgcaaagaacatccctgttgaaatctgcacttaggcatgagaagggggaaaaggctatatactgcttgacctgtttaatttctctcatcgagcagtcccgctatcttcagtttcgtgattgtcctgttgaatggggatggtgtagagacctgcaatcatttatttttatttttaaaagccataacaggattgttcttgagcgaccggaatatgggtatgcgacatacttctttgagattgtgaaatcactgccaatacaatggcagatccaaaggatggttactgcaatgaagcttagtggttgtggcaggacagctctgattgaaaataggccattattgattggtgaagatttgacggaaggagaggcgcgggttttggaagaatatggttgggtaccaaattctgggcttggcacaatgctcaattaccgtgaccgggtagttcatgacaggtggaacgagagatctggcacagattggaagacaaagataggaaagctcctgatgaatgggtattccgaggggcatttggtcctatctcactttccaactaaagttgggaaaatagaagatgacaccgaaatcaaacaggaggatcctctctgagttatcccctgtcttgtatatgcgcttggtaatcctgcaaagttataacctttagcagtaaaatggctaatgccaccccccttcttcatgtgggcttgtagagttgttgtagtcatcattataattcagaaggcttacaaagaatgaacacaggggtgccatgtgtagcctatctgcacctgtacgtaggaaatcatggtggggtaacactgtaataagtgttgtggatggatagacaggtgaactagcatttttttttgctagctgttgataaacattagatcatctggcaaatggtgggtattcatatatggattc

SEQ ID NO: 7936 - DNA, 2274 bp, Oryza sativa
  ref <308>: DATABASE ACCESSION NUMBER: AK105284
  ref <309>: DATABASE ENTRY DATE: 2002-08-28
atctcctctcgccgcagcctccctcggagccagacaaaggagagaagcgcgaaggcggcggcggcggcggcgcaaggcgaagatgtcggagaagaagcgcggcgccggcacccgcaaggacgaggtggtgacccgcgagtacaccatcaacctccacaagcgtctccacggatggtatcgcctcactctctcgctccctccctccctctcctccatttccctgagctttgttgcgcttgcagtagatccacgagctagatgttggtttcacgaggtgttagggatctagcgctttgctggtgcggagggttgctgcctgcgagcactttgtgggctcgtgaatggctgatacaccttgtttggatggatatccttagaccagctacagcacagcaggaatcatatgaccgaggggggtttgattcatgtggatccttctcttgtatttgatcccacattcctatttatgtagatctgcgttcgagaccgtagcttcgctttgtagctatttattgccatttgattgggtgtttaatcgggtatagtcaggtgtctgcctttatatattgttgtggctgcacacagttacatgcccggctcatggactctgctcatcgttacatttgttgcttctccttgtgctaccaagtgttccatttgggcaggatatttcgtaagagcgcactggttaaatccgtatttttttttctcacatatcttcataattggatggcattgtactgtgatttgtttgtgttgaagtattgtttgctctaatgatttgatccattatgccccggacatagtcaggtatctgtctaaatatggtggttgatacagttacatgcccggtaaatagatgttgctcatcgttacacgtgctgcctttatatgctatcatgtgttccatttgggcaaaacattggaaacaagattacattatgaaaacactgttatgtatagttattggcagtgtgtattatagcagttcatctgttaatctgttatgtttgccctgtcattggttctgctaatcaattctggtcattcatcttatgtggttcatactttttagcactgcataactaattgttgttgcacatattttctttataaagcagccaacttcacagttcatattacatttgaccttttagataaatgcagattcttgtttagaagttttgcaatcttgaaaagtcttgatttgttgaaataaacgttataatgaaataattctttctgataaacagcaccttcaagaagaaggcgccgaatgccatcaaggagatcaggaagtttgcacagaaggccatgggcacaacggatatacgcatcgacgtgaagcttaacaaggccatctggaccaatggtatccggagtgtcccaaggcgagtccgtgttagaatctctcgcaagagaaacgatgaggaggacgccaaggaggagctctactctctggtcacagttgctgagatccctgcagagggtctcaagggtttgggaaccaaggttgttgaggatgaggagtaaacttttcattgttatctgtcagttagcgcttagtgcatatttccatgattccagtcactatgctgagagcaaatttggaagtcttgctttagcgttttgttatctactgttgatgattcaagactgcattttcttaagcgcttggaattttgacatgtttgtcaaccttttgggatatatactccatgctatcgtgctgtgaacaaggatcactcttaagcttaaaaaaatgtctgttagatgctggtattgattttttgcttgaatttgctcacatccttttctgctaccatcggcttcattggttcacatcatttgttgagaggatagtttgttgtgaaggtcgtaacggttcagctattgtaatgcgtccgccatccagtgatctgatttgctgagttctattcgtgcgtatgctatttttcttgacggtaagggttcagctatgctaatgcgtccgccatccagagatctgatttgctgagtttctatgcgtacgtgtgctatttttcttgacggtgagtgaaccgtcgagacgggccaccaagttccttgtcgcgcctataatgttagggcgcctcacttttaacggagaatatatgaaggaacttcatgaaaaactcatctaagcaaaagtaggaacatgttattgtaatttcattctcaaagcttagcttcttttgaaataaattatatagctccaagggcagttctcaatggtacaagctgttgtgcccggct

SEQ ID NO: 7937 - DNA, 2137 bp, Oryza sativa
  ref <308>: DATABASE ACCESSION NUMBER: AK105285
  ref <309>: DATABASE ENTRY DATE: 2002-08-28
acgagcgcgtccccgacgaggccgtcgcctccgactccggcgctcccttcccttcccttccgacgcgcgcgacgccttctccggggagaaaatatggattacctcaagacggtggttccatcacagctgatggccgagcgcggcgccaacctcgtcgtcatcaacccaggatcttcaaatgtgcgcattgggttcgcaagtcaggatgttccattcaatataccgcactgcattgctcgacatatcactcagcagaaggatgatacaccaaggctttctgtgcgagacaagatgctcaactgccatgcaactccatcgcagaatgcagagcgggagagggcatatgatattattgcatcgctgctcaaaataccctttttggatgaagacatgccttcagcgaaccaggcgttacctcctaagatgggacgtgttgatgccctttcttcacagcaaaacaaagatgatagtaaattcacatggacagatgtaatggacagaagtattaaatcatctacaccaattgttgacaaggatgctgacgtggatcccctgcaaagatcaactcctgacgatactgagcctaattctgaagaaaacatgtataaagaaataatatttggagaggatgctttgaaaatcccaccttctgagtcatactgtctgagtcacccgatcaggagaggccatttcaatatttctcaggattattcattacatcaggttttagaagatttgcgcactatttggaactggatattgacagaaaaattgcatataaatccaagagatcggcatctgtattctgcaattcttgttctaggagagacatttgataaccgagaaatcaaggaaatgttgtcaatcgtactttgcgatttgggttttagcacagcagtgatacatcaggaagctctagctgcagcatttggaaatggcttgttgacatcttgtgtggtcaacattggcgcgcaagttacacaagtagtttgtgttgaggatggtgttgctttaccccacacagccctggcgcttccatacggtggagatgacatatctagatgccttctttgggttcaacgtcgtcattgcacatggccaaacttccaaactgatccagtgaacaagcctatagatatgctaatgctcaacaaactaaaagagtcatacagccagataagaagtggaagttttgatgctgtcagtgttgttcattcatatgagcatgaaaaatcagttggtcatcagaaaacaaagctatcggctctgaatgtacctcctatggggctactttatccaagggttcttgtcccagaagaataccctccacctcctcgatcttggttccaagattatgatgacatgttagaagatacatggcaaacaagtgacagtctttactcaagtgggaatggtgggttcggtatgtgggacaattatccgatgtttcccaccagattaaaaaagtttgataacatcggtcttgtagaagccattgttagtagtatcctttcgacaggacgtattgagcttcaaaggaagctattctgcagcattcagctggttggtggtacagcttcaacagcaggccttgcaccagttctagaacaaagggttctcaatactattccatcaaatcaaccgatagagaaagcagaggtattacagtcgaggagttatccattatttgtcccatggaaaggtggtgtgattttgggcgtacttgatattggtcgtgatgcttggatacatagagaagattgggctaaaaatggtgtccacatagggagtgggagaaaatatagggattcttattttcttcaggcacaggcaatgtgttactacaattcataacaggtaatttttatgaagactgtcatgggatgtagggtgaattgagtgcacttcatggtggaaacctttggatatagcagaaggttcatcaagaagggacccggatgtactaacccttcagttagaagtagcattgcatgtagaacatctattttcacagtaatctactaaccctgtaactcgtattgtcgcatcaggatacacctccatgagatcgtgtagacatgctttgtgaggtcaggaaattgtatgctgtgcatgagttgcatccgttattcttgac

SEQ ID NO: 7938 - DNA, 2169 bp, Oryza sativa
  ref <308>: DATABASE ACCESSION NUMBER: AK105286
  ref <309>: DATABASE ENTRY DATE: 2002-08-28
aagtatccactcctctcctctctcgcctgactggcacaggcaccagcgccgagagggggagaggccagaggaggagaagccgtacgtacgggggcgctcgctagggtttgccacgccgcgccgctgaccccgcgaggacgtccctaccgccgacgacgccgccgccatggcgcggcgtcacgggtggcagctccccgcccacaccctgcaggtggtagctataacggtgttcttcttgttgtgtatagaattctatgctttcttttcaccatttcttgggaaggacttgtatcaatttatcgcaataggtgtttatagttttctggccttatcagtactgattctatatgtaagatgtactgctattgatcctgctgaccctggaatcatgattactgtcaacggtgctctaacctataagtcagaagcaaaattagacacacaagacgaaacgggcaaatcagaatcgagaacctatgaggatgtccaaaagcacaaatcatgtttaggagctggttgtttgtgttgtgctatatttgtgaaagaggattgtcgcaaagatgacgaagcttaccaacaagaagattatgatgaagaggcactcttttgcaccctttgcaatgcagaggtgcggaaaaatagtaaacattgtcggagttgtgacaaatgtgttgatggttttgatcatcattgccggtggctgaacaattgtgttggaagaaaaaactatgtcacatttctgtgccttatggctgtgagccttgcttggcttgctgttgagtccggagttggtattgctgtttttgtccgttgcttcactgacaaagcagctattgaagatcagataggggaaaagctggggtatggtctttcacgagcactctttgcagctattggggccctgggtacagctctttcaatgcttgcttcagtgccacttggggagctattcttcttccatatgatattaatccggaagggcatcacaacttatgaatatgttgtggcaatgagggctcagagtgaacctcctggtccttctgtcaatgatgaacaacaaagcctgccatcatctcccatgagttctgcaccgactgctttcagtgggagctcatttgcacggcactacaaaggtgcgtggtgcactccaccacgcatatttattgaccaggatgaaatcatcccacacctgcaacctggacgagtgccttcaactgttgatcctgatagcatgaacccgactgaaagagccaaacattatcctaaacgtcccgtgcgcattagcgcatggaagcttgcaaaactggattcaaacgaggccatgaaagcagcagcaagagccagagcctcttcatctgtgcttaaaccggtcaatacccgtgcccaatacgaggcagaccggtgttccagtgataataccagctgcagaagcagtgtcatgagtgttgatattggaaaccacatcaacagtcggtctgtccggaattctcaatacaagtcctcttatccacccagcagagcaagtgcagatgacattgagctgtatccccagacaccaagtagctttcaaagcaactctcagactccaacaccgatttcagagcaccatcctgcaaagcatttcaatccaatttatcagacatcagcaaacaggtctccattctcagcagtagcaagtggtgtcaatgaagcgtctgtctcagatatcagcacaaggaggtttggtgcatcgaacgcagacagatcttctcgttcatctgtttactgggatcaggaagctggccgcttcgtctcttcccaggcaaaccatggatccagctctcgtttgccccgtagtgaccttctttacactggacagtctatattctttggtggacctctgatgacagatcctgcaacaagaagtttcagagatcctggcggttcgagccaacgcgctggtgcttctcggccgcatcagctccccgtgttcgttcctagtgatccccagaaagatcgtttctctaggctaccttgaaataaactcttttttggagtagtcttctgaaacaattgttgctctgttggtttattcaatgtatagttcttacatcagatcgatcgtaggctatgattttctttttgatattcaggtggaaactgagattaatttaggtattgatgattttt

SEQ ID NO: 7939 - DNA, 3000 bp, Oryza sativa
  ref <308>: DATABASE ACCESSION NUMBER: AK105287
  ref <309>: DATABASE ENTRY DATE: 2002-08-28
atcacgtgagttctgccaattcggtggcaaattcatccagatcaatccccgtctccggatcgagagaaaagaagaggaacggcgacgcgcgtgtacagcctcgcgccgcctcgcctcgcctcgcctcgccggggcccactccgccgcctctccgggagccgcagcccgcagttcgccaccaccacggtccacggtgcgcgcccgccgggagcaccagccgtcggcgccggaatcgatcccccgtgctgccgcctcctgtgcggggacccgagccaatgcctcgcttcgtcgcctgcggcttctgcgacctcttcgggagtacacatatggatttgaagcactgaaatcttttctgtttttgttgtttcgctgatagtagttcttgtcttgtggtgcgatccggtttgtcttcctccacaccacaagatattgcacttatcgttggaaaacagtgcgaagaaaaggaggaagaattggatccggtagtaatggaagaagcactggactggtctttctgcgaacccttgctgacagttgccatatctttgatggacagagctttattctactttggtggtgtcaaggagaaggagaaggggagcaagaaaagatttggtggtgtcgacaaggagaagatattggaacgactcggacatgttcgagcaatattcgatgagttccgtcatctggttctgaccaatctgaaaattccgttcagctacaatcttaaagaaatctggagtttcaggattgacattgaggggttcgagcactggatcgaggagatcaagcaaccagctgaaaactctgagtctgagatcttcagcactgatcatatccggctttttgcaattctgggtgtggctggcatggggaaaactgcacttgccaaggtagcttgccaagaacccattgtgtcaaccattttcgactttgttgtgtgggttcaagtgccttatgatttcactacagagacaatagcaaaaatcataatggaaactgttaccagtgtgtcgcctgaatactatagtttaaagtttctgcagcacgctcttacgggcaaaaggcttttgcttgttctggatgatacctgggaagacgaaagtgtgaagaagtgggaagcactggtggctactctcagtaactgtaagagagggagcagtatcctgctgacaactcgaatgcaatcagtggttgatatggcagcagaagctgtagggtctccagctgaatgtctggaactggatgaattgggcaaaagtgacaatctcttgttgttcatgagtcggttgccttctcaagtgcattctgaaggttattatcatcttcggttgatcggtgaacagatagccgaaaatactggaggatgcccacttgtaacagaaaaggtcgcttcatggttgggatcatgtgtggagaaccatcattggaatgccgtcctacagaaaggctggcagaaactgggacttaatgccatttttgcaagttctaggttgagctatgaacgtctaccttcagaactgcaaatttgctttagatactttagtatatttccaaagggatacaaatttaacaaggtggaattagcaaacatgtggattagttctggattgataccttttggcttatcgaaacaagatgatactggcttacagcataagaaggctgcctacctgtttagtgcagaggatgttggggaacaatactttgctgcattagtaaggaaatcgttcttttgccgtttgctggaaacagacccttctaatggaaatatgaaagaatattatgtcctgcataatttgatgcatgactgtgcacagtttgttgcacgaaatgaatgcgcaagagtagatgacaataattttcaagatgtcaggcggacaacagtacacttgtctattgcacattgtggctctttaagagcaatcccccctataacaaatttacgtactcttattatacaaagtgaattttgtcttgatcaagaggctgaacttatgcttggagaagttcttcgtaaatcggcacgcttgcgtctgctatacttggatgtgccatccctctctaatgcacttgatgaaatccccagtctaacacagctccgttacctcttcctgttttcatgtgataagtctcatattcgaagtatccttaaactctgtcatctgcaagtgttcaagctcaaatatttcacaggtaaacaagcagacttggatggcatacggaacatgcgtttcttgcgttgtcttcatgttcctgacagtatgttatcaaagatacttaaaactgggatgccaacaacacttcaggagttacaagaattcgaggtagctaaaaatgatggtcacatgttgagtgcattgagtactttaacaaaccttaagcgactcagcctaagaaacctccaaaatgtcaggaactgtaaagacgcaatggagatcaaattaaaggacaaaccagacatgatgtttttgtcactatcatggaacaaacactcaaatgatccagaggatatagatcatcaaatcatcgataacctagaaccaaacaaaggaattcagcagttgcatgtgtatggatacaatggagtccaacttccggtttggatcgagacttcatttctcatccatttggtgtcacttgagcttcaatactgcatggaatggaggaccctgccatcatttaaggagcttagttcactgaagtatctaaagctggaacaccttttccaattaggctcggtgattgaggagcaatctgggagcatagaatcagataatgcatttctgcccccattgctcaatacgctgatcgtccggtggtgccctaacctgaagaaactccctgctttaccttgtacccttgagaaattaataataaggcatgttgggcttgcagttctccctagattacatcaggcatatgctagcacatgtgaatcattatcagtagattcgcgtctttctcttttgcacattgaaagttgtgcacatttgactt

SEQ ID NO: 7940 - DNA, 1301 bp, Oryza sativa
  ref <308>: DATABASE ACCESSION NUMBER: AK105288
  ref <309>: DATABASE ENTRY DATE: 2002-08-28
aaaaaaaacgacgaccagatcgaccaaaccatcggcgctcgcctcttgcgactgagagcctgagcgagacacagagatccgtacatccatgggggcgtcattctcgtcgaacctcaccgacgccgcgcgcgccgtgcacatgttcaagatcaatggctactccgccaccagagccatggcgaggacggactccctcccgtccaggcgcctccccgtcggcggctaccactgggagctccgctacaccgccagcctcatcgccgactccaaccactgggtcgccctcaagctcgtcctcctcgccgcgccgacgtcaaggccgcgctccgatgccgcctcatcagcaatagtgccaccacctctgccgccgtcgacggccacgtgtcgcacgcgttcaagcgcgccggcgagagctccgcgtgggtcctgatccttcgccggagcgccctggaggcgtcgggggccatcgtcgacgacgccttcaccgtcgagtgcaccatcacggtgatcacggagatacctgacaatgtcgctgcggcggcgccggcagcgccggcgaatgttctgcccccgttctccggccgtggtctgtccttgagccatcacctcggcgagctcctgcgccgcgggacgggggcggacgtcacgctggtggtgtccggcaagtgcttcccggcgcacagggcaatactcgcgtcgaggtcgccggtgttcatggcctccttgttcggcgacatgaaggagaagagctcccggagcgtcgagatcagggacatcgagccacaggtgttcggagcaatgctcggcttcatctacaccgactcggtgccggagctcgatcaacaagacggcgtcgtcgtcgcgcagcacctgctggcggcggcggacatgtgcgggctcgacgggctgaagatcatgtgcgaggagaagctcatcgctggcgccaccgtggagacggcggcgacgacgctggcgctggcggagcagcatgggtgcccgcggctcaaggcgaggtgcgtcgaggtcgtcgccgcgaacctcgacgccgtcatggcgaccgagggttacaagcatctcatggcgagctcgccgctggtgatgaatgatctcctcagggctgtgcgtggaaggaagagctgaattaatcaccgaggtgattagtcccaatctcaaacatttggtattactaatagcaatgctatgtataggtaggagtatttgcttgcatctgatgttgcgttatctcgtatgtaatgaacagctaagctcataaacagtttcagcccactatgaatttatct

SEQ ID NO: 7941 - DNA, 2156 bp, Oryza sativa
  ref <308>: DATABASE ACCESSION NUMBER: AK105289
  ref <309>: DATABASE ENTRY DATE: 2002-08-28
aatagaagcagcaaagcttgggcatttggtgaggcactgattgaagctcagcactaggcgaagtgcagggcatggtgcttcccaaaccagaaatgccgttctttgtcctgctcctcttcctcggcctcggctgcctccgcccggcggcggcgaccgacgagcggttcgtcttcaacgggttcaccggcgccaacctcagcttcgacggcatggcaacggtgacctcgaacgggctgctcatgctgaccaacggcacgaaccagctcaagggccacgccttcttcccgtcgccgctccagttccagagggggcccaacagcacggcgatgcagtccttctccacggccttcgtcaactccgccaacaacggcaacgcgaccaaccacctcttcgccgtggagttcgacaccatcctcaactcggagttcaacgacatgagcggcaaccatgtcgggatcgacgtcaacggcctcaactccgtcgacgccgacaacgccgggtactacgacgacggcaccggcgacttcaagaacatgagcctggtgagccgcaggccgatgcaggtgtgggtggacttcgacggccagaccatgcaggtcaatgtcaccatggcgccgctggaggtggcgcggccaaagaagcccctgctgtccaaaatcgtcaacatctcctccgtcattgatgacaccgcctacgtcggcttctcctcggcgaccggcatcctcttctgccgccactacgtgctcggctggagcttcaagatgaacggcgccgcgccggcgctcaacatctcatccctgccctccctgccggtcacgttccccaagccgcggtccaagacgcttgagatcgtgctgccgatagcctcggcggtgctcgtcttcgcggtggccgccgccgtgttcgtgttcatgcggcggcggcgcatgttctcggagctcaaggaggagtgggaggtgacgttcgggcctcacaggttctcgtacaaggacctgttccacgccaccgacgggttcagcgacaagcggctcctcggcatcggcgggttcgggcgcgtgtaccgtggcgtgctcccgtcgtccaaggcggaggtcgccgtgaagaaggtggcgcacgggtcgaggcaggggatgagggagttcgtggcggaggtggtcagcatcggccggctccggcaccggaacctcgtgcagctgctcggctactgccggcgcaagggcgagctcctgctggtgtacgactacatgcccaacggcagcctggacaagcagctgtacgaccagggcaagatcaccctgagatgggcgcagaggttccgcatcatcaggggcgtcgcgtccgggctgctctacctccacgaggactgggagcaggtggtggtgcacagggacatcaaggccagcaacgtgctgctcgacgccgacatgaacggccggctcggcgacttcggcctggcgcggctgtacgaccacggcaccgacccgcacacgacgcacgtggtgggcaccatgggctacctggcgccggagctggggcacaccggcaaggcgtccaaggcgtcggacgtgttcgcgttcggggccttcatgctggaggtggcgtgcgggcggaagcccgtggcgcaggacgcgcgcgacaaccgcgtcgtgctcgtcgactgggtgctcgaccggtggcgcgccggggcgatcacggacacggtggacccgcgcctgcacggcgacttcgtcgagagcgaggcgagcctcgtgctgcggctgggcctgctgtgctcgcacccgctgcccggcgcacggccggggacgaggcagcttgtgcagtacctggaaggcgacgtgccgctgccggagctgtcgccgacgtaccagagcttcaacatgctggcgctcatgcaggaccaggggttcgacccctacgtcatgtcctacccgatgacatccaccagcgcaggcaccttctctgacctctctggaggtagatgatgacccgttcccatcagccggatgtagttaatcagtacctaactagtatcatcctgttttgtttaagatcagaactttggtgttgttatgtttatatctatgatgtaaagtggtgttacgagaatagctcagtgttcagataagagctgagaaataacagatctgaaattaaac

SEQ ID NO: 7942 - DNA, 3393 bp, Oryza sativa
  ref <308>: DATABASE ACCESSION NUMBER: AK105290
  ref <309>: DATABASE ENTRY DATE: 2002-08-28
aaaaccacaacgaactaccccctcctcgtcgagccgacgcgagagaggaaagtgggttgcggcttgctgcgcgtgtggagtcgccattccccaattcgctgcgccgcccgccggatctcgtcttgccccctgcggcggcggtttgggcccccccttccgatcggtttcccccccgcacatggtcgtggcggcggcggaggtggtggtggtgcgggagtagggaggcgggcgaaccgaggcggcggcgccgatggcggacctggtttccagctgcaaggataaactggcatactttagaataaaggaactcaaagatatattaaatcagctcggcttaccaaagcaaggaaagaagcaggatcttattgatagggtgttggcactcttaacagatgagcaaggtcaaaggcatcatggatggggaaggaaaaattctctcaccaaggaggcagtggcaaaaattgttgatgatacatacaggaaaatgcaaatccaatgtgctcctgatctagccaccaggagccacagcggatcagatttcagtttcaggcctatagaggaagcctatgactctttccagccagaggccaaagttcgctgcatttgcagtagcacaatggttaatgacagcatgatccagtgtgaagatcagcgatgccaagtgtggcaacatttgaattgtgtactcattccagataagcctggggagagcgctgaagttccacccgttttctactgtgaattatgccgactgagtcgggcagacccattttgggtcactgctggaaatccattactcccagtgaaattcgtgtcatctggtgttacaaatgatggaacaagtgtacctcaaagtgtggagaaaagcttccagctttctcgatcagatagagaaactgtccagagacaagaatatgacctccaggtttggtgcatgcttttgaatgacaaagttcagttcaggatgcagtggccccaatatgcagaattgcatgttaatggtatttctgtacgagtagtgactagacctggttctcaattactagggataaatggacgggatgatggtccactgataaccacatgcagtagagagggaattaataaaatttgcttatcaagggtcgatgctcggacattttgctttggtgttcgaattgctaaacggaggactgttgctcaggttttgaacttagttccaaaggaagctgaaggagagtcttttgagcatgctcttgctcgtgttcggcgctgtctcggaggtggagacactgcagagaatgctgatagtgacagtgatttggaagtggttgcggagtctgttacagtcaaccttcgttgccctaatagtggatccagaatgaggattgctgggagattcaagccttgcattcacatgggttgttttgatcttgaaactttcgtggaattgaatcaacggtcccgcaagtggcaatgtccaatatgtttaaagaattactctcttgagagcttgatgattgatccttacttcaataggattacttctctgttgcgcaattgcaatgaggatgtcaatgaggttgatgttaagcctgacggatcttggcgtgtgaagggtgatgctgcaagtagagaattatctcagtggcatatgcctgatggtaccctttgtaatcctaaggaagatgtcaaacctgccatgcaaaatggaaatgaacaaatgatggaaggtacttctgatggacagaaatctttgaaaattggaataaagagaaatccaaatggaatctgggaagttagtagcaaagcagatgacaagaagccttctgtggttggaaatcgcatgcaaaacaatagtgggttccgagctctaaacaacattatgcatatgagcaatagcccaactagtagttatagagacggggaagacccaagtgtgaaccaagagagcaataggcatgttgacttatcattgaacaatggtaataatgagtttgacagtttctctctcaattttggccaagcatgcaatacagatgatagaccacagcaacaacataatgccacagacgtcattgttcttagtgattctgatgaagagaatgatgctatggtttgtccaccagctgtctatgacaatactaccactgcaaatggtagtggttttcctttcaccactaatggtattggatatactgaaaggtaccaggaagatgccggcgttggtacaagtggccttggtttattgagtaacaatgttgatgattttgagatgaataactggcaaatgcattcttcttatcaacaacctgaacaaggcttccagttttttgggaatgatactgatgtccataatacttttgttggttcacacaattcctttggcttagcaccaaatgactattctcttgattgtaatgttggcgtagaggaggcttcggtaactcctgctctttcagtctgccggaatagtaatgaaatgcatggaagtttggttgataacccactggctttggttggcgatgatccatccttgcaaatttttcttccaagtcaaccttcctctgttcctcttcaggaagaacttagcgagcgtgctaatgcaccaaatggggttcagtctgatgattggatatcccttacactcgcagcgggtggaggtggtaacgaagagcctgcacctgctgatgtcaattcacagccacaaattccatcaacagagacagggatcgaaccattgaccgatgctgcttctgcatttctgagcacaaacattgaaagacgtagcggagctgatttaaatccaagaaggatagaaaatatattttctcatcctcgccagcctcggtctgttaggcctcgactctgtttatcaatagatactgattctgagtagtttggacatcataacggggtaactgagtttgcattagtttggcaaagctgccatccagaaatcatgatttatactgaggtggggttatcggtcgtctggttgatgtaaagaaaaacaccagcattgatgctttgttgcctcaatggtttacaagctttcaagtgttctatttgatccaggagggatctgcatagaggacatctgatggttggtatagaaaattttctaactgggtatcgaggcttaatgtggcgactggagcagtttgtacattttttttgttttgacttttactggatataaggaatagaggtggggtcatccctggaccctggatgcaagacaaatacatgtgaatgttttgggtgtaccatcattgtatttagggtttgggggtactaatttagttgtttattaacctggtatttgatggagaataaattattcctggaagtggcggccaataaacagagtcgttggggttttacttgggtaaaaaaaaaaaaaaaaaaacc

SEQ ID NO: 7943 - DNA, 1527 bp, Oryza sativa
  ref <308>: DATABASE ACCESSION NUMBER: AK105291
  ref <309>: DATABASE ENTRY DATE: 2002-08-28
aacaaaaccaaaccaaattaccaaaacctctactgtccctttcttccatcgccgccgccgccgccgagaagcgagcagctcgccggcgccggagacgaagaagctagcaagccatgccgaccgaccaccaccacccggatgcggcggcggcggcggcggggaagggggcccaccaccaccacggcggcgggaaggtgcacaagctgctcaagtcggcgttcaagcgcggcggtgaccaccaccaccccggcagcggcggtggcggcggcgaccaggagggggacctgctgagccggtcggcgtccgggtcgtcgtcgacgtcggcggcgagcagcagcagggcggcgtcgtcgtcttccgggaggcgcggcggcggcgggaggaggggcgacgacacctgctcctccgtcgacggcgagagcggcgagctcgacggatccaagaatgccaaggtgttggcggcgctgcgcgacgcgaagatcagctacgcttacgaatcgttcccgtgggagaagaagatgaaggagttgttgccggtgccggcggcgagctgcttcctgtcgatgctgctgctgcccaagtccgccgacgggtcgcacacccggtacaagtcgctggaggacaccctcgcccgcgccgacgcgtggctggtgtcgtcgcaggccgccggcgtccccgtcgccttcatgaacgtccagacggaggcgctgctcaccaagatctccggcgagatggcgctgtcgacggtgaacatgggctcgctgtccgacctcgccaacatggcgaacgccagcctgtacgggttcgaggactaccacggcgtggacatcggcgtcgtgcgcgccgtgcggctgtggtacacgccggtggccggcgaggcggcgctggagatcaagctgctcccgggggacacgcggctggggttcgccatcagccgcaccgaggaagggttcatttacgtgtcgtcggtggcggaggagagcacgcccggcgtggcgtcgacgcggtcggggctcctggagctccaccgcgccgcgcgcagggcgtcgcggctgctggtggtgtcgcgcgtcggcggcgagaaggtgctcccctggatggtgtccaccgccggcgacgtcaagtgcttcgacacggtgtcgctcagccagaagctgtcgctgcaccgccacgcgctccgccccatcacgctccacttcctcatgtgggacaccgccctcgccatcaaggacgtcgtggccaagccgccgctgccgccgccgccgacaatgctcatgctgccgtcgccgccgtcgccgccgccgtccgacgcggaaggggacgcgccgccgcccagtggcgacggcgacgaggcccccggcagcggcgccaagggcggcaaggactcgtccttcaggttccagaacatcgacctcctcccggacagctggttgtgaatttttttctttttttaattttaacaagaaaaaatgtgtgttttacacattgtgtaatagagaactactatttacttatatagttagtact

SEQ ID NO: 7944 - DNA, 1503 bp, Oryza sativa
  ref <308>: DATABASE ACCESSION NUMBER: AK105292
  ref <309>: DATABASE ENTRY DATE: 2002-08-28
atggagcagaaactgagctgccctccggtgaacagcacgccgacgtgcggcagctcgatctcctgccgcttgccgtcgggaggccaaacaaacgcaggcttctcgaacggtggctccggcgcaggggctccgccgaccagcacctgcacggccgtcctcatggacggcctctccctcgggctggggtggcagcacgccagcgccagcctcgccgcgcgctccacctgagcctcgtcgtacgcgccaccgagcaccgcgtcggccgcctccaggaccgtcccgtcgccgtagtgcctccacatccagtccacgatgtacatcggctggcggcggccgtcgtggtcatgctcctgctggcggttgtggtacgtcacggagctgctcgggctcctcccggtgagcacctccatgacgaacaccccgaacgcgtacacgtccgtgtcgaggctggcgcgtccggtgaagaagcactcgtacgccatgtagccgcgggtgcccgccacggcctgcgtcgagtggtgcgtcacctcgtcgaggtggatgacacgggcgaggccgaagtcgccgaggcgcgcgctgtactcctcgtcgagcatgacgttgctcgccttgacgtccctgtggaggatccggctgctgctcccgtggtgcaggtactccagcgcggacgccacgccgcagattatcttgtaccgtcgctcccaggtcagctcagccggtctagcaccgccatacaggagcttgtccaggctacccatggggaagtactcgtagacgaggagcagctcgcctccctcgtggcaccacccgatcagcttcacgaggttgcggtgcgagagcttgctgatcgtgttcacctccgcgacgaactcctgctctcctcggttggaactggatttgttgttcgctgccacccgcttgacggccacctccatgttcatgctgctcaggtagccgtggtacacggtgccgaagccacctctgccgagcttgcgcgaggagctgaagttggcagtcgcacgcctgagctccttgagcttaaatttgacagggccatgggcgtcgatcatcttctcgaggttgcggtaggcgagccttctcttccgcgtcgaccttctccacaccaagaacacaagaaacgaagacatagcaaatagtatgaaggcaacgagaggcagaagcacctttctcccatgccttcttccggtcgtgatatcgtcgtcgattgtggcaaagttccaagactttatttggttcagctcggtgaaatcacctgttgaacctgcaaatcccacatatacgtcgtcgaatagaaattgtgatagatcgacggaccaagctttggaaccatagtgcgccccagtcgtgtcgaactggattaaaattgccaccagtacttgctctgtactattgtaagtgatcctgacctgtacatcagcaccactcgagaggattaatgaaacattgcttagagggtacggatccaaagatccgatgctgttg

SEQ ID NO: 7945 - DNA, 3799 bp, Oryza sativa
  ref <308>: DATABASE ACCESSION NUMBER: AK105293
  ref <309>: DATABASE ENTRY DATE: 2002-08-28
aacgttgagcggcagcagcatccagaaattaagatgagccaattagaggtggttgagatggaggacaagaagaagcagcagcaacaacgagaagaagcagaagcagaagcatcagtagtgccttcatcgttgcgagctgcggcaaccaggagcctgtcgtccttgtcgtcgtcgttgcgctgggatcatcgtggggacggcgaagaggaagctgagctgacatgggcggccatcgagaggctacccaccttggacaggatgcgcacgtcggtgctgtcgtcggaggcggtggacgtgcggcggctgggggcggcggagcggcgggtgttggtggagagactggtggccgacatccagcgcgacaacctgaggctgctccggaagcagcggcggaggatggagagggtgggcgtccggcagccgacggtggaggtgcggtggcgcaacgtgcgcgtggaggcggactgccaagtggtttccggcaagccgctgcccacgctcctcaacaccgtgctctccaccgcgcggggggttgagccgccggcacgcaaggatccccattctcaacgacgtcaccggaatcctcaagccttccaggctgaccctcctccttgggcctcccggctgcggcaaaaccaccctcctgctcgcccttgcaggaaagctcgacaaaaatctcaaggtgaccggcgaagttgagtataatgggaccaatctgaatacctttgttccagagaagacatcagcttatatttctcagtatgatcttcatgtccctgagatgactgtcagagagacacttgacttctctgcaaggtttcagggtgttggcactagagcagagatcatgaaggaagtcattaggagggagaaggaggcagggattacccctgaccctgacatagatacatatatgaaggtatttttgtaggcaatatctgtggaaggcttagaaaggagcatgcagacagattacattatgaagattatgggacttgacatttgcgctgacataatagtcggagatataatgagaagaggtatttcaggtggtgaaaagaagagactaaccacaggggagatgatagttggaccttcaagagcacttttcatggatgaaatatcaaccgggttggacagctctaccaccttccaaattgtttcttgcctccaacaagtggctcatatctcagagtctaccatactggtctctctccttcaaccagcaccagagacttatgatctttttaatgatattatcttgatggctgaaggaaaaattgcataccatgggtctaagagttgcattatgaatttttttgaatcatgcgggttcaagtgcctggaaagaaaaagagcagctgattttctacaggaggttttgtctaagaaagaccaacaacaatactggagtcatactgaggaaacatacaactttgttactgttgatcacttctgtgagaaatttaaagcatctcaagttggtcaaaatcttgttgaagagcttgctttgataaatcagaaggacacaataatgcattgtccttaaatatctactcactaaccaagtgggatctcctcaaggcatgttttgcaagggaaatccttctcatgagaagaaatgccttcatctacataacaaaaactgttcaacttggattacttgctgttattactgggacagtgtttctacggacacatatgggggtcgatagggcccatgctgactattatatgggttccctcttctatgcgctcctccttcttttagttaatggtttccctgagttggctatggcagttaccagacttcccgtcttttacaaacaaagagactactatttctatccggcgtgggcttatgcaatacctgcttttatactaaagattccagtttctttagttgagtcaataacttggacatcaatatcttactacctcattggctatactccagaagcatccagatttttccgccagctcctcattctattcctcgtccacactggatcattatcattgtttcgatgtgtcgcctcatactgtcaaacaatggtggttggttcagttggtggtaccatgtcatttctagtcatccttctatttgggggctttatcattcctcgaccatctatgcctaattggctaaaatggggattttggatctctccattgtcatatgctgagatagggttaacagtaaatgagtttttggcaccacgatggctaaagaccacaacgtctggtgtaacacttggaaggagggtaataatggatcgaggactagacttctctagctacttttattggatttccgtcggtgcattggttgggtttattttgttgcttaatgtaggttatgccattggcttgaccattatgaaacctccaggaacttcccgagcaattatatctcgtgataagtttgccacatttgatcgaagaagcaaagacatgtccaaggacatggacaataggatgcctaagttacaagtaggaaatgctttggcacctaacaagactggttagttcaatctatacattctatgactaaatgcatctcatattaaatacatcaataatgtgatcttgtgcagggacaatggtgttacctttcacaccacttacaatatcatttcaagatgtgaactactatgtagacacccccgtggaaatgagggagcaaggttacaaggagtgaaagttacaactactgcacaacatcacaggagctttccaaccaggggttctatcagcactcatgggagttactggaacaggaaaaacaactctacttgatgttcttgctggaaggaaaactggtggtgttattgaaggagatatacgagtaggaggttatcctaaaattcaacaaacttttgcaaggatatcaggctattgtgaacaaaccaatgttcattccccacaaatcacagtggaggagtcagttgcatattcagcttggttgcggctaccaacagaagtcgattcaaaaacaagaagagaatttgttaatgaagttattcaaacaattgagttggatgatattagagatgctttagtaggactaccgggggtaagtgggctatctacagagcaaaggaaacgtctcactatttgcagtggagcttgtgtccaatccttcagtcatattcatgcttggatgcacgagcagctgctattgtcatgcacaaggtgaagaatgtcgcagacacaggtcgaacagttgtgtgcaccattcaccaaccaagtattgaaatatttgaggcctttgatgagcttttgctaatgaaaaggggtggagagttgatatatgctgggcctcttggattccattcatgtaacgtcatccactatttcgagacaattcctggggtacccaagatcaaggataactacaacccatcaacatggatgctcgaagttacttgtgcatctatggaagctcaattgggagtagaatttgcccaaatttacagggaatcaaccatgtgcaaggacaaggatgctctagtgaagagtttgagcaaaccagctctaggcacgagtgatctccatttcccaacacggtttccacagaggtttggggagcaactaaaagcttgcatctggaagcagtgtttgtcatattggagaagtccttcctacaacctagtgcgaattgtattcataacaatctcctgcattgtcttcggtgcattgttctggtagcaaggcgacatcaaccacatgtatgtattgtgaaccatcgctatgtccatccttgataaacatatatagaggaagcatgttcatatgc

SEQ ID NO: 7946 - DNA, 1721 bp, Oryza sativa
  ref <308>: DATABASE ACCESSION NUMBER: AK105294
  ref <309>: DATABASE ENTRY DATE: 2002-08-28
acaacgcgacacactcccaagcacacacacagagcgcgcgcgcgcgcgcccatgcagcagcagcagcagccgcgcatggcggacattgacctcgacgccgtgcgcgccgtccgcgtgctcggccgcggcgccatgggcaccgtgttcctcgtcgccgcggcggcggacgacgccgccggcggcggggcgtgctactacgcgctcaaggtcttcgacaagaggtccgtcgtcgcgtcggcggcgaggcagggggacgcggcgcggcgggcgaggtgggaggtgtcggtgctgtccgggctcgcgcacccgcacctcccgtcgctgctcgggcgcgccgagacgggcgacctcgtggcgtgggccgtgccgtactgccatggcggggacctcaacgagctccgccacgcgcagcccgaccgcgtcttctcccccgcggccatcaggttctacgtcgccgagctcgtctccgcgctcgccgagctccacgccgccgggattgcgtaccgcgacctcaagcccgagaacgtcctcctcctgccgacggccacgtcacgctgaccgacttcgacctctcccggctgctcccgcccgtctccccctccgcgtccacctccacctcgtcgtcgtcgtgctcggccacgtcgtcgccgccgccgcagctgcagggacatggccggagccagctgaggcgaatcttcgcgagaagtgagtcgtcggtggccgcgacgacatcgacgtcgtcgcccgggcagtacacccacaacctggcctggttcctcaagagaagcgacggcggcggcggcgccgccgaccacctcaagaaggcgaagtcggcgagggtgtcgccggtaagccgcggcaagaagcaggcgagcttctgctcggccgcgagcgcgagcggcggcgccgccgccgcgtgcgagaggtcattctcgttcgtgggcacggaggagtacgtggcgccggaggtggtgcggggcgaggggcacgagttcgccgtcgactggtgggcgctcggcgtgctcgtctacgagatggcgtacgggaggacgccgttccgggggcggagccggaaggagacgttccgcaacgtgctcctccgggagccggagttctccgccgactcgcggcggcggtggccggagctcaccgacctcatcgcgaggctgctcgacaaggagcccacgaagaggctcggcttcgccggcggcgccgacgaggtccgtgcccacccgttcttcgccggagtcgcgtgggacttgctcggcgagctctcccggccgccgtacatcccgccgccggccgacgacattgccgcgtgcgaggggttcagcgtggtagagtatttcaacaagcttcacgagccttcgccggagccggaggaggaggagttgacggagttcttgccggagttctgacgtccggtctccggtgttccactcgaactacagtatttctctctttttttcactttcacctcaaaaaaaatcattaattatgtgatcctgtggtgaaaggggtaaactaaaattgagtagaagagattgtactgtaaaaattgtgacatggtaagggtaggtttgtgaaataagggtaactatttcggtaggggactgtaaaatccgaatccttttctgctcactagaggctagggtgactgaaaatactgtacttcacaagggttaatccctgcagtctaattgactacggtacagtgttcg

SEQ ID NO: 7947 - DNA, 1682 bp, Oryza sativa
  ref <308>: DATABASE ACCESSION NUMBER: AK105295
  ref <309>: DATABASE ENTRY DATE: 2002-08-28
gtggacacctcgtcgccgctgggaagcggaggcggcggcggagttggcttggacttgggcctcgcgttcgccggaggcgaaggggagagagcagtggagtagagaggagaggaggcggcggaatgaagggcttccgcgcggcgctggcccgcgcgtcggcgaggtcgcgggcggagctgcaggtagcgcggcggcggcgccacccgtcggatcccgcccgccgcctgtcccactccgggacggcgccggcgaggccgtcgttcggcatcgccttcgacatcgacggtgtcatcctgcgtggccgcagccctatcggaggctcgccgcaggctatccgccggctctactccgaagatggtaccctgaagattccgtttctgtttttaacaaatggtggtggtgttccggagcacaaaagagcacaagagctaagtgagcttttaggagttaatatctctccagcacaggttgtgcatggttcttctccttataaagagctggtgaaccgctttgaaaatgaccttattatcgctgttggaaaaggagagcctgcagcagtgatggttgactatggatttagaaaagttctatctatagatgagtattcatcatattttggagacattgaccccttagctcctttcaagaaatggatagtgcaacaaccagacaatataaacttgatgtcagaaaaagtgcacccatcatatgatgtttttgaagagagagttaaaggagtttttgttgtaagtgaccctgtcgattggggaagagacctacaggtaaccctctccatgttccgttgtttcaaaagaaatcttcttgtgccactatttttaactttgtataaaatagtaaatgcatgagttataaacaccctcttttataaacattctgtgagcaagcatatcatgcatatggttttcctttagttgaagtgtctggcatacatgagttcagtaagtcaagatttttttttatcttaatctgaaaggtactttgtgacatcttatcaactggtggacttcctggaagtggaagaggagatcaaccacctttgtattttgcatctgatgatcttgaatatcaggcagcatttccttctgaacgtcttggaatgggtgctttcaggatagcactggaaagcatcttcaatcagctggacccccttggtcacctgttcttacaaggactggcgtatttaggggaaaggataatgatccacagtatcctgctgatttggttgttgatactgttgaggatgccattaactgtattttggaaaaggaatgtatacagtgacagagtgacacttgttctgagtatccatgctcccttcattgttatttggcatgcattttgtgccacaccattgttttgtctagcaattctggagcaattgttagccggagttccatctctgattcattccacttgtttaagttgggacatcagaaaatatgctgatgcgctatagtattttttttttcctggctgagagataggccggacattatatatgtagaatcgtcagggtttcagggcagcagagctgcagcagagctaaaagtgaatttcaccctgtaccagacgttcttgtttccctgcatcttatttcttggatttcagtactaccaatgacattattataaaaaaaaaaaaaaaaaaaaaaaaaaaaaaag

SEQ ID NO: 7948 - DNA, 2916 bp, Oryza sativa
  ref <308>: DATABASE ACCESSION NUMBER: AK105296
  ref <309>: DATABASE ENTRY DATE: 2002-08-28
tgatacactaatttatagcagtagaaaagaggaaaggtgcgcaggtactgtctggttggtctcacttacaatgtactgtggtcagcatccaaagatccttgaactacttccacaaattcaggaagcccttacccaccttcttggtgatcagaatgatcttacacaagatctggcatcccaaggcatgagtattgtatatgagcttggtgatgcatctatgaaggagcagctggttcatgctctcgtgaatacactgtctggcgcagcaaaaaagaaaagggccatcaagctgatggaagattcagaggtttttcaagaaggaactattggcaataatcctactggaggaaagcttagcacatacaaggaactttgtagccttgccaacgagatgggccaacctgacttaatatacaagtttatggatctagctaactatcaggctgctatcaattccaagaggggtgctgcttttgggttttccaagatagccaagcaagctggtgaggcacttcagcctcatctgcataccttaattcccaggcttgtccgttaccaatatgatcctgataagaacatccaggattctatggcacacatatggaaattaattgttgcagatccaaaaaaaacaatagatgaacattatgatctaatagtagaagatttattggttcaatctggatcgaggctttggcgttcacgtgaagcttcatgtcttgcacttgcagacattattcaaggtcgaagatatggtcaggtttctaagcatttgagaaaaatatggattaccaccttccgagcaatggatgatattaaggaaactgtgcgaaatgctggtgacagtttgtgccgagctgtaagcttgttgacagttaggctctgtgatgtgtcacttactacttcatctgatgcaaatgaaacaatgaacattgtactgccatacttgctttctgaaggcatactcagtaaagtttcaagtgttcaaaaggcatctataagtttggttatgaagcttgctaagggggctggccctgcacttaagccacatctgtcagaacttgtcagctgtatgctcgaatgcttatcaagtctggaggatcaaagattgaactatgttgagatgcatgcaggaaatgctggcatccaaactgaaaagcttgagagcttgcgtatagctgtggctaaagattctccgatgtgggaaacccttgatatctgtttaaaagtttttgacaaagaatcactggatcttttagttcctcgtctggctcaaatggttaaatctgctgttggtcttaatacaagggttggtgttgctagcttcatcaccttgttagtacagaaggtcatggttgaaatcaagccatatgcggcaacattgctgaggttactgtatagtgctgttctggaggaaaagagttctgcagctaaaagggcctttgcatcatcttgtgctgcagtcttaaaatatgccagcccttctcaggctcagaaacttattgaagataccacttctctgcatttaggtgaaaaaaatgctcagttgtctgctgcaattcttattaaatcttatttaagcaatgcagcagatattcttagtggatacaatgcagttgttctcccagtaatttttgcttcaagatttgatgatgacaaagacatcggtgcattgtatggagaactttgggaggatattcctagtagcgaaagagtaaccctacagttatacttaccagaaattatctctcttttgtgtgattccatgtcctcgtcatcatgggctgggaagagaaagtcagccaaggctataaaaaaactatgtgatgctctaggagaatccctgtctgtgcaccacaataatattcttgaatcacttttgaaagaactacctggtcgattttgggagggaaaagatgctattctggatgcactcgctgcactttgttcgagctgccatactgctatgagtgcagaagactctggcatgcctagtgttattctaaatgctgtttgtgctgcatgcagtaggaagtcaaaattgtaccgtgaagcagctttctcgtgtttgcagcaagtgattacagcattcaaagatccaggattcttcaatattgtttttcctatgctgtatgaggtttctaatcgatctgtcatttgtaaaacaaggaactcatcttcactcactgcatcctctagtgctgagcaagatgaaactgaaggtgtttctgtttctcttgataaggtgctcaactgtgtagcatcttcaatcactgttgctttcctgcaagatattatcaaccaaaggaagaatatcctggaaattattttaaattctctatcccccgaggagagttggcagattaagttgtcatcgttcttgtgtatcaaagagttgtgctataaattccagaattcagatggtaataacacttggcctgaggaaacaacttacttggttgaggagttatttcattcaacagcaccaaaagttgtggatgtcatacgcttagttaagattgctcaggttcacaccgctgcttccgagtgtctccttgagttgagcaaattgtatagagactttccattggttgacagaaaagggcccaagttctcaggcgaacttgctgaactttgtgagtcggaaaaaagcgagcaagcaaaggcatttttgaagcaatgcatggatattctcaaagacttcgaagatcccactggattagccatggagatggactaagtgaagctctcgaggttaaatcggcatagtaaatatcaaaaacaaggctgcgcatgtataaagggcgcgagcaccagggaaggtgggttattctcgcaaattggaatcaccatgtaataggatgagcgtttcattactggttgcatccgaaggaaattctgaagctttgcatccgc

SEQ ID NO: 7949 - DNA, 1816 bp, Oryza sativa
  ref <308>: DATABASE ACCESSION NUMBER: AK105297
  ref <309>: DATABASE ENTRY DATE: 2002-08-28
gatcaccaactccaactccaactccaactcctcctcctcctcctccttccgccgccgccgccgccagagcatggaaccctccgcctccgcgtcggctgatccgcccaggaggtctccatggaggcacccctccaacgggggcaaccccaaccccaacggagacgccgtcatcgacacaactagctggcccgcgctctccgaggccgccaggaacccccccaagcctcctccttgcatcgactctccatccgaggggcagggcaagcagtcgtctcgccacaagccggccaggcgcgggggtgccggtgccgaccactccccctccccacgggatgaccgcgccaccagctgggaccatggccgccaccaccaccaccacaacagtggtggtaggaggggctcttttggcggccgcaggagaggaggaggaggcgggggtttcgacgccttgtaccgtgcccctattggcccctatgtgcgtggtgccactgcgcccccgcccccgcccccgcctcccatggccgttgctcctccccccttccttcctccgcccttacgacctttcgcggcacctctcctctttcatcacgatatggcatcgcccgtctctcctgtttccccaatctactatgttggccctccccctcctccagaagctcttaggcctttgcctcctttcccccctaccatgcttgctccacctgcttacccttactaccaccctcaacctcaacccgaccccgagcccgagcctgatgctgatcctcaacaacatcgtgccaacctgctcaaacagattgagttctacttcagcaaggataacttatgcacagatgttttcttgaggagaaatatggatgaccagggctgggttaacattgctcttatagctggcttcaacaaggtccaggaatccactgatgacctgcaatacataaaagacacaatccagtcctcatctatactggaaatgcaggatgacaaaattaggaggcagaatgattggaacaagtgggtgattcctcgagagagcaacactgacgtgctgccaagccctaacatcaacaatctgacagcacatcttggaagcgtgggtctgcaggaatcagcagctagctcaagtagcatggtggatgaaaaccatcatgagattcttaccaatggaccaacttccggtaacaaccaagcaccagtagttgaagacggtgctggtaagctctagctatgatggtacacattggctccaatctggcccatgctatgactacaagggttttgtccgagcgcgagtgacaaatgttttgcaattttttgatggcggtatgcttgcggggcgcactgactagtgagttcgtttctgggggggtttcaggtaaggttctttttgtctaccctgttattgaggtaccgtgaaggtttcagcctttcaggtggttggtaaaaaaaaaaagaagtgctgtagctgaaacaaaagacagcaaacagaaggcatatgtagaggcatcaaagaagatgaggggggtggggggagccattggacataatgaatgaaagacgatggtgcgctaagttaaaaggcactcgagtgcttaatattgcaactgctgaatggcctttgggcttgcgtgactatgggcctgaagtgtgctgtgaaccatgtcggttttctccccctgtttggatgtaaccctccaatttttaaaggaggatctgaactttctcgctcagagagtcaggaagttgacaattcgacaaggatcttttgcaactcaactcgttgaagtagcgtttgaatgttacaagttttgctagaact

SEQ ID NO: 7950 - DNA, 1271 bp, Oryza sativa
  ref <308>: DATABASE ACCESSION NUMBER: AK105298
  ref <309>: DATABASE ENTRY DATE: 2002-08-28
aaatgcgtcctctccgccgcacggccgcctccgcctccggcttcctccgccgccgcctcctctccgagctcgccgggaacggcgcgccactcccgcgcgtcggggccgtgtacgccttcggggacaacagccacggcgcggcggggcagccggcgccggccgccgacgtctacgtccccacgcccgtgccctccctcccgacgtccgtcgccgccgtcgccgccgggcactaccactccctcgcggtttccgccgaaggggaggtctgggcgtggggccgcaacgatgaaggtcagctcggccgcgggcaccacgccccgaggaatacttggagcaagcctgaaaaagtgagaggattggaaaatgttcaagtccgagctgtatctgcttgtggggttgtttcagcagcaattgggtgtgatggctctttatgggtttgggggagatcaaagcgtggccaacttgggcttggaaaggacattgtagaggctgcagtaccttctagagtggaagcacttgctaattatgatattgtcaaggttctaactttctccctgaaattaagtagtcggatgtttgctcccttgtgagaaaaaagttgttaattgaaggaatgatgctaggtatcatttggtcgagttcattcggttgctctcacatcaaagggagaggtttgggcatggggatctggccgaaacggcaggctaggtttgggaagctcgatggatgagcctgagcctttcctcatcgataccctggaaggagcagaggtttcacaggttgctgctgggatggaccatactcttctattggttgctgagtaggctggggttttcttcaccaccgaaagtcctttgattcttgccgttgtcagtggagaggttgtcattgtccatctactggatacgatctttaaaacaaacaggcgatgttactcgatatgcttggaaccatgaaattcagatgtgtttcttccagctagtttgacatcacattccccttgaaagagttaacagaatgaagatagcaaaagctagtcagacgccagtgccagtgtgcattctcaaacctcctcttatagagcatctttgtgtgtgaaaagttcattttcttccatctgtagttgtagactcggtacttatgttctatgccaaagcttaccctattccctgggatttgaggtctttgaaaactcaaaactccttgtaataagttttgtgtggtgaacaatatcctccggcaaaatcttggtgaaattttcattctgtttg

SEQ ID NO: 7951 - DNA, 1609 bp, Oryza sativa
  ref <308>: DATABASE ACCESSION NUMBER: AK105299
  ref <309>: DATABASE ENTRY DATE: 2002-08-28
aaaagagaaatctcccgtcacttcgtctcctccgctccttgcgccgccgccaagacgagtcgcggctgaacagaacaggggaggggcggcgatctccatctggcgagcgagcagagcagggcaggggaggggatcctggtcgtatattcacctaccttggagtaattcgcatacgtcacaagttaaaagatgggtatccttgagaggatcaaggagattgaagccgagatggctcggacacagaaaaataaagcaacagaataccatcttggacaactgaaagcaaaaatagcaaagttgaggacacaattattagagccccctaagggttccactggtggaggagatggttttgaagtcacaaagtttgggcatggtcgtgttgcacttattggatttcccagtgttggaaagtcaactcttttgactatgttgactgggacccattctgaagctgcatcatatgagttcacaaccctcacttgcattcctggtattatccagtacaatgataccaaaatccaacttcttgatcttcctggtatcattgaaggtgcatcagaaggcaaggggcgtggtagacaggtcattgctgtcgcaaagtcatcagatcttgtgctcatggttctggatgcctcaaaaagtgaaggacaccgccaaatattaactagagaactggaagctgttggacttcgtctgaacaaaaggcctcctcagatatatttcaaaaagaagaagactggtggaatttctttcaacagcatgattcccttgacccatgttgatgagaagctctgctatcagatactgcatgagtacaaaattcacaacgcagaggtgttattccgcgaggatgctaccgtggatgacttcatcgatgttattgaaggaaatcggaagtacataaaatgtgtttatgtatataacaagattgatgttgttggtattgatgatgtggataagcttgctcggcaaccaaattcgcttgtgatcagctgcaatttgcagctaaacttggacaggctactagcaagaatgtgggaggaaatggggctagtgagagtgtatacaaagccacaaggacagcaacctgatttcacagatccagttgttctttctactgatagaggtggctgcacagttgaagacttctgcaaccatatccataggagtttggtcaaggatgtgaagtatgtacttgtatggggaacaagtgcgaggcattacccgcaacattgtgggcttggccatgttcttcaagacgaggatgtcgtccagatagtaaagaagaaggagaaggaggacggcggtcgaggccgcttcaagtcgcacacaaacgcgcccgctcgcatatccgacagggagaagaaagctcctctgaagacctgaatgtggacatgaaaccgcagttttgtcggctgtgccaacatcaaaatagagctacttttttgcctggagctggttgagctgtgcgctactttttttcaatgtggagccctgttttgtgccttcagaagggccatacttgagtactcgcctggttccgttcctcctgtatctctctgcagaacacacctttgcagtgcaactatgaacatcattgtgtatc

SEQ ID NO: 7952 - DNA, 1765 bp, Oryza sativa
  ref <308>: DATABASE ACCESSION NUMBER: AK105300
  ref <309>: DATABASE ENTRY DATE: 2002-08-28
caaatcgttcgtctgacttgggtataggggcgaaagactaatcgaaccatctagtagctggttccctccgaagtttccctcaggatagctggagcccattacgagttctatcgggtaaagccaatgattagaggcatcgggggcgcaacgccctcgacctattctcaaactttaaataggtaggacggcgcggctgctccggtgagccgcgccacggaatcgggagctccaagtgggccatttttggtaagcagaactggcgatgcgggatgaaccggaagcctggttacggtgccgaactgcgcgctaacctagaacccacaaagggtgttggtcgattaagacagcaggacggtggtcatggaagtcgaaatccgctaaggagtgtgtaacaactcacctgccgaatcaactagccccgaaaatggatggcgctgaagcgcgcgacccacaccaggccatctgggcgagcgccatgccccgatgagtaggagggcgcggcggccgccgcaaaacccggggcgcgagcccgggcggagcggccgtcggtgcagatcttggtggtagtagcaaatattcaaatgagaactttgaaggccgaagaggagaaaggttccatgtgaacggcacttgcacatgggtaagccgatcctaagggacggggtaaccccggcagagagcgcgaccacgcgcgtgccccgaaagggaatcgggttaagatttcccgagccgggacgtggcggttgacggcgacgttaggaagtccggagacgccggcgggggcctcgggaagagttatcttttctgcttaacggcccgccaaccctggaaacggttcagccggaggtagggtccagcggccggaagagcaccgcacgtcgcgcggtgtccggtgcgcccccggcggcccttgaaaatccggaggaccgagtaccgtccacgcccggtcgtactcataaccgcatcaggtctccaaggtgaacagcctctggccaatggaacaatgtaggcaagggaagtcggcaaaacggatccgtaacttcgggaaaaggattggctctgagggctgggctcgggggtcccggccccgaacccgtcggctgccggcggactgctcgagctgctcgcgcggcgagagcgggccgccgcgtgccggccgggggacggaccgggaacggccccctcgggggccttccccgggcgtcgaacagccgactcagaactggtacggacaaggggaatccgactgtttaattaaaacaaagcattgcgatggtcctcgcggatgctgacgcaatgtgatttctgcccagtgctctgaatgtcaaagtgaagaaattcaaccaagcgcgggtaaacggcgggagctacctggcgtcgccggagttcaggacgtcggcgtcggtgctggtcgtcaagaggtacgacccggcggcgaacccggcgagcaagaggtacgaccccaaggcgaggccacccgccgcgacggaggaggacgccctcgacgagctcaccggcgccgccgttgtcccggtggcgcattcaccgatgaaccacgacattgtatgactttaatttgctcgtcgccggccagaattattatactaccagtattattatactaccagtagtagttcatgtttgatgattcacagaaaatggtagcgatatatgtttgttgtgtgtgtggagtgttatactgatgaagtgtatataataacatcagtcgtttttcttgtacgcagtgtgcagccttcgtcgaatt

SEQ ID NO: 7953 - DNA, 2011 bp, Oryza sativa
  ref <308>: DATABASE ACCESSION NUMBER: AK105301
  ref <309>: DATABASE ENTRY DATE: 2002-08-28
actgtggctcattttcctatgttccatcgatgtgtgttgtcatcaatattttgtaccgcacgtcgtatgggcagtgagtgccgcgcctcgtctagaacaaaatcgtcgggtttcggcagtggattggggaaatggagcggtggacggggtgctcacgatggctgcggtggcgggaaaagcgacggcgcagtgcggggtggacgggagcgacgatggtgcacggctgaatgcgatgggaggcggtggagagagggagcacggtggagaggtgctttaggtggtattttggggaaacggaggagatgccgaggtagagcttggcacggcgttgccgacggcgcaagtggcgtggcgcgacggtgactagggcggcggcgaggtgcggctagagagctccggcgggcggctgcgcatggctcggcgtggggagagcgatagggggcgcggcgagcccggggatttggggaaaatgggagagggggccccggggatgctttttataggtccgggaggtggaaatcgggaccgagaaaggcgggaaccgaccggcgatgtggggcgccgacgtgggaaggttggcggcggttcggcgctgattttgcggggaggagtgggggaattgggggaggaggaggtggggatcgagtccacgtgctcgcgaggtgaggtggagcgcgggaagcgcggcatcgtggggcgaaaccggcagccatggcggttgcagccggccggatggaggtaaggggagaagctgacgagtgggcccgcggtcccacttgtcggcgagagaagggggaggaggccgatggagggatgcaaagaggacttgcgggagagggagggggaggagctgggccggcccaaaagaagggagaacttgggccgaaaggaggcccgaaaggaaagagggggattttaattgtttttctttttatttaattggttaaatgaactttgtgctattaaaattatttcttagaaaatttacagaaaaatccggagagtatatttaggcacagagaatatttcaaaatatttccggccaatgatttttaaagaaaattttaatttcctttataatttcccttgattaaattactttaaattttaatataattcctagaaaatgcattactaattgatttttaatccccaacgaaaatcggggcgttacactcaacctcctgctgcaggatcagaaggttttaacgaggtacgccggccatcacccatcgggttggctgcataggctgacacgcagcctcggccgctgccgatggagaggatctcggtcacaggacaggatcggtgatgttgtcgagggcttgcagttgcaatagcctggctgacttcaatgtcaacgccagcacgaccttatcgatgagctctacaaacttggcctataagcctgatctgcctgggaagacaacgaggtgatggaaaacaacaccgcctgccagatgcagtatgttagcagcgtgtatttgtttgacgaattgagtttgcagcgcatatgtgaaggatggttattgtaatgtgtgaaggctagggatcatggtcacttctgtacatgccacaacacgttctcttcaaaaggaagaatgtcatcacaaacaacaatgtgggcatgatctactgtcaatatcattttcatgggaacacattgggcaaggacttggtctttgcttcttaagggaaccgatgaagaaatagttaagaactattgcaaagtgttggagaagcatgtggtggaattcttctccgtgtatggctggaaccttagaagaagattggaagcctagtcttttcttcgtttgttgttcttaaaacctttgtttgtgctgtcatctcttatgtaatgggagaggtcagttgatgcattttgtacccttttattagggagagtcttatgtactcgtgttcggattttggctgtgtataccccacaaaggtgtagaggccgggtttgataatcctttatctaaaaaatgcaagctcatgtggttaattc

SEQ ID NO: 7954 - DNA, 2018 bp, Oryza sativa
  ref <308>: DATABASE ACCESSION NUMBER: AK105302
  ref <309>: DATABASE ENTRY DATE: 2002-08-28
aaacacaacaaaacccacactgtcaagcgtcaaccagccacccgcctcgcggagtcacgggctcgagctccaccaccaaagctcgagctctcgcgcccgcgtgccgtgcgccaatggcgccgcccccgccgcggcgccccgtcgtgcagaggagcctgatctccctcctccttctcccggtggtcctcctcgcgctcccgacggcggcggcggcgggggcggggtgggcgccgttcagggcgagggacctgctcccgctgctgccgcgcgggctgacgtggccggccgtgggctccgtccacagcgccgtcgacctcctcccacggttcgtcgcccacgtcgcgccggaggcctcctccgcggtcgcctggcgcgccacgtgcttcgcggacaacgaggccgtcctcaccctcacccattcctcctccgccgccgccgccggccgcaacgccaccaccgccggcgctgctgcccttggcggcgccctcctccgcctcaagactgcttcagctcagagctggacatgcatggatctgtatgtgtttgcaacgccgtacaggataggatgggattactacattacagcacaggagcacacctttgagatcaaggcatgggaggaaccaggagaaatggaatatgtgaagcagcatggcattgccatatttctcatgccatctggaatgctggggacgttgttgtctctgattgatgtcatacctctgttctcaaacactatttgggggcaggatgccaacttggcctttcttcagaagcacatgggagcttcgtttgagaagcgtacccaaccttggtctgctaacatcagaaaagaggacgtacattctggtgactttttggctctttcgaagattcgagggcgatggggtggatttcagacattggagaaatgggtgactggtgcatttgctggtcacactgctgtttgcttgaaagatgagaacggcactctctgggttgcagaatcaggctatgaaaacaaaaagggtgaagaggtcattgctatagttccatgggatgaatggtggggaatggcacttaaagatgactcaaatcctcaggtagcatttctgccattgcaccctgatgttcgggccaggttcaatgaaactgctgcatgggaatttgcacgaagcatgtatggcaaaccctatggatatcataacatgatatttagttggattgatacgatgtcagacaattatccaccaccactggatgctaacctggtaatggctgttatgtcaatgtggaccagattacaaccactttatgcttctaacatgtggaatgaggcccttaataaacgacttgggactgagaaattggaccttcatgggatcatcaccgagaccggaaaacggggcatgtctttcaaccagttgctcactatacccgagcaggacgactgggaatacagcgatggcaaatcaaccacttgcgtcgccttcattctctcaatgtacaagaaggccggggtctttgctcctttcacggaatcgatccaggtcacagaattcacgattcgagacgcgtatatgctcaagatcttcgaggacaaccagacgaggctgccaagctggtgcaacagcggggcggacaggctcccgttctgccagatcctgggcgagtacaagatggagctgccggagtacaacacgatcgagccgtacgccaacatgaacgagaactgcccctcctcgccgcccacctacaccaggccgctgggatgctagctgagctgaccaccaacatatgccagttgttcagactctagaagatatatacagatcgtgtttcagatggaattgttctgatcgatctagctaggccggagtgtccgtgtaaataaaccgatttttatcgtgctcagatggtagtgctgatgtgaatgttgattttcctgtggtaaactacaggggtgtgctacggaattcgatgaaatatgaacaggatgtcgattacttgcaaaagttgcaatcctagcttgagtgacc

SEQ ID NO: 7955 - DNA, 1627 bp, Oryza sativa
  ref <308>: DATABASE ACCESSION NUMBER: AK105303
  ref <309>: DATABASE ENTRY DATE: 2002-08-28
atgcatgcacgcgctttttgtttatggctaccatttccaacgttgtcacgaacacttattgtgcttctcccactccactgctccgccggcgagccaccgccatggcgcttcgtgtacagctcgtcctcgccgtcgccgtggttgtgccggcgttgggggtggcggcgggtggtgctaccttgggggtgaactatggccaggtcgccgataacttgccgccgccgcaggcggcggccatgctcctccgctcgctgaacgccaccaaggtgaagctctacgacgccgacgcgcgcgttctcagcgcgttcgctggctccggcgccgacttcaccgtcggcctcccggaccgcctcgtcccgcgcctcgccgccgacccgtccgccgccgcggcgtgggtgcgcgccaacatcctgccccacatcccggcgacgtccatcaccgccgtcaccgtcggcaacgaggtgctcaccggcaacgacagcgccatgctccggtcgctcctcccggcgatgcagtcgctccacgccgcgctcgccgcttgcaacctcacctcgcgggtggtcgtcaccacggcgcactccctcgccgtgctctcctcctcgttcccgccgtcctccgccgcgttccggcgcgagctcctcccgtacatggcgcccctcctcgcgttcctcgccaagaccggctcgccgttcctcatcaacgcctacccgtacttcgcctacaagggcgacccggagcacgtggacctcaactacgtgctgttcgaggccaatgccggcgtcggcgacccggcgacggggctgcgctacgacaacatgctgcacgcgcaggtggacgcggtgcgcgccgcgatctgcagggcaaactacggcaaggcggtggagatccgggtgtcggagaccgggtggccgtcgcggggcgacgacgacgaggccggggcgacgccggagaacgcggcgaggtacaacggcaacctgatgcggctggtggcgcaggggaaggggacgccggcggcgcccggcgaggcgctgcaggtgtacgtgttcgcgctgttcaacgaggacatgaagcccggcccagcgtcggagcggcattacggcctgttcaagcccgacggcacgccggcgtacgacgtcggcgtgaaggctccgacgattggcggcagctggaaggggagagccaatggcactagcggcggcggcgccggcgggctggtcgtggcggaagggcccggaggggcagacggtgcagggcagggcactggattctacaccgtgtcagcagcagcacacaaggtgaagaggtggcggtgctgggaaagcttgttcgcaaccgttgttctagtcatgtcgtccggcctgtgttggtcatgacctgaagagttgaagatgttcatgaagaattgaagatgcagtagaggaggagatcgatctgcagcatttgcagacaaaggagaaatgagcttgaacaaaaacgccattgattcaattgattcttgtgttttcgctgtcctccgattggtgttggttgatgtgtagtttgtgtactgtaaggaagagagatgtaagggacattacatgatacactggattattaattagttcagattcagatttctgaaaggatt

SEQ ID NO: 7956 - DNA, 1588 bp, Oryza sativa
  ref <308>: DATABASE ACCESSION NUMBER: AK105304
  ref <309>: DATABASE ENTRY DATE: 2002-08-28
caaattaaagatctgcggaggcaccttccctgaaaacttgcagttgtacaatgctaacatactcaatttctttaagtttcctattgaggaaggtatctctccagacaatccacagtcagagaacttgagaacagtaagagaagttaggtttgatatccacggtgccatggatcctgttagctgtatcccagacacttctagcaaatccaggtatttgaggctacctagtgaagagggcagcattccagagaagccactggcaccaaggtccagcttcgtaagagatttgagattgcttatggaactcggtattatacctgtgaagttcgtgctactgataagaagattctctaacttactgtcctgtgagaaattgggcagactacctgataacccaggattattagtgatgttaattgttaccaacttcttgtgctggaagatgatgggaggaaacaatccttcaaacttgtttttggacagttgaagaacagtgaggttggaaaagccagccaagaactctggcactgaacctgacaagtggttgtaatgaagctcaatcctagtgagcgaattcatggaagacaaggatgtgcagatgggacctgacaatgagcagtaaggtaaacttagaacctgaagcttaggtgtaaacttagctatgtcgtcacaccaccgttcgccgttgccggacatatccaccattcccatatggagctcctccaggttggtaaggtttgccagcaaggtctccatgtttggcactgagagctgccagaagttgtctgaagcgaacggcatcatcttgttctcgtcatcataataaatgatgtagaagcttgtggagaggtcaaggtacaccaagttcacaaggcttccgatgccagccggcacctcaccggcgatgttggtgtcagagaggtcaagatgggtgagctcggtgagattctcgaacccggttaccgggagctgggacatgctgaagttgttaccagagatgtcaaggtacctgagtgaggttaacctgaagagtgcagggctgatgctgccggcttgcaggttgtggccacccaagacgagcgaggtgacacggccatcttcgccgccaccgcagtcgacgccgtcccagtggcagcaatctgtgccggtgatccacgaccgaaatgcagtggagtagccgcccgccgtcttgttgaaggagttcttcagccggagcagcgcggaggcctggtccgggaggcactgaattaccggtgccgtcgcatcgtcggtgagcgcggcgatggcctggacttgcaggaggatgtgcagcatggtaagcaatggtttcgcgagatggtgaggacgaaccagcctcttggtggacgacgacatggcgaagtcgtctaaggttggatactagctgtgtttgttttcaactctatgttagtcagtacagttcaagaaatcgtctgcccctaattaggaacattatgcgtcagcagtaacacatatggttctaacgtcatcggatgcgtatgtagagaaaattgtgtctctgtttttttgctcacattaagacagggatgggaaaccacgtttgtgatcc

SEQ ID NO: 7957 - DNA, 2157 bp, Oryza sativa
  ref <308>: DATABASE ACCESSION NUMBER: AK105305
  ref <309>: DATABASE ENTRY DATE: 2002-08-28
atcacactactccacgccctaattcgccgccgccgcttactcacctcctcgcctgtcgcctctcggtgcgagttctactcaccggcgccggcgacggcgacgaccctggttggcggttgaatcgtcgtcctcggcgtgtgatggtggtggccatggcgacgaaggaggaggagggtgggccgtcgagccgcgtgcctcaccttccgtggatgcggaaccccgtcgacatcgactccttctccggctgccccgtcgcgcaccttccccgtctcgatcccaggttggtgaagccattgcagagaatggggatagaatcattttttccagttcaagtagcagcatggctggaaactattggtcctggtgcttttgagagggatatctgtattaactccccaactggatctggcaagactcttgcttatgctttgcctatcgttcaaatgctcgctactcgaaaagtaaggtgcttgcgtgctttggttgtgctacctacaagggatttagcattgcaggttaaagaggtttttgatgctattgctcctgttgtgggcttgtcagtaggctcagcagttggtcaatcatcaatagcggatgaagtttcaaatcttattgagaagtctaaacaagggcttttcccaagtcttgatgaagaatatatccaaatggaaccacagactaaagttgatatattggtggcaactcctggaagactgatggatcatatcagcatgacaaaaggtttcagcctggagcatcttcaatacctggttgttgatgagacggacaggatgttgagagaagcttatcagtcttggttgccaacagttatccagcttactcgctcgagtgatcaaaaccattcctggtcagacatgaacggagaaactctactgcatccattgactaccattagacgatcgggtgttgagcgtggttttaaaggtaaatcctttccaagattggcgaagatagttttgtctgccacactgactcaagatcctagcaagctttctcaacttgagttgcaacatcccttgctgttgaatagtggaaagaagcgctacagaattccaacaaagcttcagtcctacaagctggtctgtaaatcaaatttaaaaccactatctctgattgttcttctccaagagctgcgtggggaaaaatgtttagtttttacttcatctgtggaatccagtcacagactgagcaccttgctggaatttttcgaagacttgcccttcaaatttagtgaatattcacgtttgcaacgtgaatcgactcggaggaagacactggatgccttcaaggaagggaagatagatgttctgattggtacagatagaatggctcgaggaattcatattgatggcttaagatatgttatcaattatgacatgccaccgtatgtaaaaacatacatccaccgagcaggtcgtactgctcgggcgggagagtctggttcttgcttcacatttttaaggaaacatgaggttaaggcttttgacaaaatgctcaagaaggcagataattctagctgcagtcttcattcactaccagaggaatcggtagaaacccttcgcccagttttttcctctgctctaaagaaattggaagagtctcttgaatcagaagcaacaaagaaatctaagtcgggagataaagcgcctaatgcttctaaaagaaagagaaccatcaatacgtgaagcagtatagattagttgaagttctaatttattctttgtatgatgtatctgcatctgctacatagatttggtgattctcgcctatgataattctgcaacaggctcagcatttaatcatggatgtccaaaacaagagggatggtttgatgtgtcatgtaatccatttgccgtgcaatccccaagcagctttccccatccctgcaacctgctgcttatttttggtgcacggtacagtagttctcttctgcttttacaccagggaaggaattcttctttccttctgtagttataatacatccactgcttttcatggctaggaaggaatctaccccaaagtaaagttgggtacgttcacatcaatgtatcgtcgctgttaacctttttgttaggctttacacttgaaatatctattactattacagtctctgttagtaatgcggtttgttactcc

SEQ ID NO: 7958 - DNA, 1722 bp, Oryza sativa
  ref <308>: DATABASE ACCESSION NUMBER: AK105306
  ref <309>: DATABASE ENTRY DATE: 2002-08-28
aatcccaatcccaatcctaccttgtctttgttctttcttcctccgacgacgaggggagattgctgatcagctctctgtcttccttccttccttctttcttcctggttggaggattgatcaaatcctgcaaaggattaggttttcttgggattggtgggtggtagtcttgtcctccccccaaatcgtttttgatttgatttgatttgggttgggttggggttcatcgaatcaatcatttcaagaacagagttattctcggcggatttcttccaccgccgtcagttcttgtgtggattgtgtctcttccgttctgtttcggtttcagaatctgcagttcgtcgtcggaccggttgtttcctgagtcccatctgaggataggttcaaaataaattcagaatccaagcctggttgtctccgagttgaagctatggctgcgcggccgacgacgtcggagtccgggagcacgacgaccgacgacgacgtgcacctttcgccgaccagcatctgcagcggcggcggaggtggggcctgcgtcgtcgtcggcggcagccgcatcaagatactctgcagcttcggcggccgcatcatgccccggccgtccgacggtgccctcaagtacatcggcggcgagacccgcgtcctcgccgtgccccgctccatctccttctccgatttgaagaagaaggtggaggagatgttcaggacggaggtggcggccatcaagtaccagctcgtcgccgaggacctcgacgtgctcgtctccgtcacctgcgacgaggacctgacccacatgctcgacgagtacgaccgcttcgaggcgaagcggtcgccgtcggcgtcgccgcggttccgcgtctacgtcttctcctcgcagccgccggtggccgccgccgtcccgtccacctcccgccacgccggctacgcgccgccggcgtcccaccaccacctcctccagcaccacctccaccacttccagccggaccactacgtcgccacgcccgacgggagcccgccgtacgccggacactcgcacggcgccgtgtcggcgggcaactccccgcgcgccgacgccgtgggccccgaccaccccgccgtgttcgggctcaagatgcagcgcgtccggagcacgccgaacctcggcagcctggacgcgtcgccgcagcactaccaccagcacgccgcggacgtcggtggcggcggcggcggcatggcgggatacatgggcggcagctcgcctgtgcacgccggcgccggccacctcgtctcgcagggcggcttccacagctactaccacccgcacgggcagtacgccccggcgcccgtgccggtgccgcaccacgccggcgtggggaggtacgacacgcgtggtggtggtggctacgtgcgaggcagcaactacgtggcggcgccgccgccgccgatgatgccggtggcgatccggtccggccggccggtctcccgcggcggcggggccccgccgtacaacgagatgcacacgccgaagaatgcgacgacgatatgggattgatgaccgtacgccggagcttgctgacgttgtggtttttgcagggagagatgtaaatagatggatatggatcgtggatgcacgcggcgtcgcagtaatcttgttagtagttgtttttgctgatgagaagaggtccagtttgctgtagaactattgttgttcacgctgagaaaattatttaaaacgttctttttccc

SEQ ID NO: 7959 - DNA, 1216 bp, Oryza sativa
  ref <308>: DATABASE ACCESSION NUMBER: AK105307
  ref <309>: DATABASE ENTRY DATE: 2002-08-28
tggatgcacaaggacgagctcgtggagaagaacctcaagatgggcgacgtcctccacatcgacgccggctcgacgttctacatggtcaactccggcaagggccagaggctgaagatcatctgcagcatcgacgcctccgataacatcggcttcggcccttatcaggccttcttccttggtggtggcggcggagcggcggccgggcagtggaggccagtgggcagaggcgaggaggaggaggaggaggaggaggagttggtggtggacgaagcgtcgtcgacgtggtcgtggacgaagctcgtgggccgtctcctcggagtggtcggaggcggggcgccgtccaactccgtggccgcgcagccgaagaagaagaaggacaagacggtgcgcgcgccggagccgtacaacctctacgagcagggcaccggcttccgcaacgcctacggatccagcgtcgccgtcgacaagcacgactacgagcccctcggccactccgacatcggcgtctatctcgtcaacctcaccgccggatcgatgatggcgccgcacgtgaacccgagggcgacggagtacggcgtcgtgctcagcgggacgggctgcatcgaggtcgtgttcccgaacgggtcgaaggcgatgagcgcgacggtgcgcgccggcgacgtgttctacatcccgcgctacttcccgttctgccaggtggcgtcgcggggcgggccgttcgtgttcttcgggttcacgacgtcggcgcggcggaaccaccctcagttcctcgtcggcggctcctccgtgctccgcgccctgctcgggacggagctcgccgccgcgttcggcgtcccggagaaggcgatgaggaagctggtgctggcgcagaatgaggcggtgatcctgccgtcctggccggagaagaagaagaagaagaagtgggaggaggagcccgaggacgagaggtgggaggagaagaagaaggcggcgaagcagaggaagccatgggttatcgagcaggtgccggcgaagtagtaactaagcccgcgtaagctagctgcttaactctgattaagcatgtgagctatctatcaatccatgcttaggtatgcagctggttaactttgttttgctgtccaaacttttgtaaccatgggcgtgtctgctcaacttatgtttgcgctcttcgtgttgcttcggcgtcgcgttaataaataaagatgcttctgctttt

SEQ ID NO: 7960 - DNA, 2166 bp, Oryza sativa
  ref <308>: DATABASE ACCESSION NUMBER: AK105308
  ref <309>: DATABASE ENTRY DATE: 2002-08-28
gaaattgactcggaaagaaattttttggaagctccattgcgagattcaaacctaaccattaaaggagaagcagtgggaacgacagaacctatgactggataggattttcttgaaaagaatcccaatacttcattgggtgggatggcggaacaaaccaaaaaaattgtcttatttgataaggttatgaattaacaaataagacaggaaagagtaaatattcgcccgcgaaatttttattgaattagaatactttaccgcgattcaataagagtaaaataaaaaaaggagattaaaaaaaaaaaaaaaaaagaattacattaaatatagaatatagataaataaacatacacatctagatatattctagatcctctttcttgactatatattttagtattttaataaattcaatattaaaaaccctaacctttcctattaatgtgtatctatccgtaatattttagaatattgtggaattagagaaatttgcacactttctcatttgattcgcgaggagctggatgagaagaaactctcatgtccagttttgcagtagagatggaactaagagagaaccatcgactataaccccaaaagaaccagatttcgtaaacaacatagaggaagaatgaagggaaaatcctaccgaggcaattgtatttgttttggtagatatgctcttcaagcacttgaacccacttggattacggcgaggcagatagaagcaggacgaagagcaatgacacgatatgcacgtcgtggtggaaaaatctgggtacgtatatttcccgacaaaccggttacaataagaccgaccgaaacacgtatgggttcgggaaagggatcccccgaatattgggtagccgttgttaaaccaggtcgaatactttatgaaatgggcggagtatccgaaactgtagctagagcagctatttccatagctgccagcaaaatgcccatacgaagtcaatttcttcggttagaaatataaccccccaaaaaaagtagtattgaaaataaaaaaccaggttcttctttctggaaagacaatatttctttcatccttttgcattgaaataacaaattgaaatcaaaataatatgattcaacctcagacccttttaaatgtagcagataacagtggagctcgaaaattgatgtgtattcgagtcataggagctgctagtaatcagcgatatgctcgtattggtgatgttattgttgctgtaatcaaagacgcagtgccccaaatgcctctagaaagatccgaagtaattcgagctgtaattgtacgtacatgtaaagagttcaaatgcgaagacggtataataatacgctatgacgacaatgcagcggttatcattgatcaaaaaggaaatccaaaaggaactcgcgtttttggcgcgatcgccgaggaattgagagaattgaattttactaaaatagtttcattagctcctgaagtattataaatactagtagacaagatatagatcaaataaaaaattagtagattgtgtttcacgtatatgctttagaatccaaaacgaaaagaaaaaagagaacatgttgattatagaaaaattaggaggaacctagaattagagtcttatgggcaaggacactattgctgatttactaacctctataagaaacgcggacatgaataaaaaaggaactgttcgggtagtatctacaaatattaccgaaaacattgttaaaatacttctacgagagggttttattgaaagtgttcggaaacatcaggaaagtaacagatatttcttggttttaactttgcgacatcaaaagagaaagactagaaagggaatatatagaactagaacctttttaaagcgtatcagccgacctggcttacgaatttatgccaactatcaaggaattcctaaggttttgggcggaatgggaattgctattctttctacttctcgaggtataatgacagatcgagaagctcgactaaacagaattgggggagaagtcttatgttatatatggtaatcgccccgcctatagcggtaatcgccccacctatagttatagtacccaaattctatcttgaacttcctatttttcaaacaaaaatacaacgtttttttatttgaaaataaaaaaagaaaaataggagaaaaaaaaatatgacag

SEQ ID NO: 7961 - DNA, 2240 bp, Oryza sativa
  ref <308>: DATABASE ACCESSION NUMBER: AK105309
  ref <309>: DATABASE ENTRY DATE: 2002-08-28
gctactacctgacaagctttgctttgctcgcacgcgttcccagctccacctcatcatccatggcgtccaccgacagcgcccaggtggctgcaggatggcccgccgccgccagggaacacgaagcgtgcccgccgccgcttgtcgttggagccccgtcgcatgatgccgacgcgcagccggaggaggagataccgtactccgtctccttcagcgtgccggcgtcgccgtcggggatgcacctcggcgcgtccgtcgtccgcgtgcacgccgcgccgccttccgtgggcgaggccaggatcgacatgatccaccccgccgagccaccgccgcagatgctgtggcagcaggcgaggttccactcgcagcccaccctgacggtgatcaacggcgaggcggcggcgccggtgccccggagcgacagcacgcgggaccggcggttcgaccagttcaagaccttctccggccgcctcgagcgccagttctccagcctccgcgggatgctgccgcaggagcccgccgccgacatcgagacggcggactccaagatctccgaggaggaggccgacggcggcgaggtgcccaccgccgaccgctacttcgccgcccttgagggccccgagctcgacaccctccgagtacgtcacttcgaaaccttagctagctcaaaatttcttgccattgtaacgactagactaatgaggatgtcggcgtgcaggcgacggaggtgccggtgctgcccgaggacgagaggtggccgttcctgctgcggtttccgatcagcgcgttcgggatgtgcctgggcgtgagcagccaggcgatgctgtggaagacgctggcgtcggagccctccacggcgttcctccacatcagcctcgacgtcaaccacgtcctctggtgggtgtccgtcgcgctcatggccctcgtctccgccatctacctgctcaaggtcgtcttctacttcgaggccgtccgccgcgagttccatcaccccatccgcgtcaacttcttcttcgcgccatggatcgcctgcctcttcctcgtcaagggcctgccgcgccaggtctggaccatccaccacgtcgtctggttcctcctcatggcgcccatcctgctcctcgacctcaagatctacggccagtggatgtccggcggcgagcggcggctgtccaaggtggccaacccgtcgaaccacctcgccatcgtcggcaacttcgtcggcgcgctgctcggcgcgaggatggggctccgggagggccccatcttcttcctcgccgtggggttggtccactacatcgtgctgttcgtgacgctgtaccagcggctgccgaccaacgtgcagctgcccaaggagctccacccggtgttcttcctgttcatcgcggcgccgagcgtggcgtccatggcgtgggcgaggctgaccggcgagttcgacttcggggcgcggatcgcctacttcgtcgcgctcttcctctacatgtcgctggcggtgcgcgtcaacatgttccgggggttcaggttctcgctggcgtggtgggcgtacacgttcccgatgaccagcgccgccatcgccacggtgctgtacgcgtcggaggtgaccaacgtggcgacgagggcgatggcggtggggctctccgggatcgccaccgtgacggtcaccggcgtgctggtcaccaccatgtaccacgccttcgtgcgcagggacctcttccccaacgacgtctccatcgccatcacccggaggaagcccaagttcagcaagatcctcgcgcacctccgctcctccggcaccgacgtcaaggagctcgtcttctccgtctcctccaagaacggcgctgacgactctgcctccgtctccaaggcaagcaactgcagctccggcgatcagtccccggtgccacacgccggagctgggcgtgggcgttaactaatttagtacgctgtcgcgtgcgcgcgcgcgtgtacagacttgataattaatttctctttttttttcttttcgatccttgcacaatcgattcgctacgaatggacggcattggcggatcggcagcgaccaggggtttatcctttgagcgaattgcaataaggatattataagcttcagttttgtaggttagttccagtttataattattgactcgggagtttttttaatttattccatcggatatgtgtttttaaagaggagatataacgtgtaactgcatttggatttggatttgattgtatcttaatccatc

SEQ ID NO: 7962 - DNA, 2493 bp, Oryza sativa
  ref <308>: DATABASE ACCESSION NUMBER: AK105310
  ref <309>: DATABASE ENTRY DATE: 2002-08-28
ccattccattcctccgcccaaagcctctcaagtctcaagcccttaccaaagaatccattccgctccgatcgatcgatcgatccccacttttcccatccaccaatccaaaccctagcttgcgctcaccatgtccacacccttcgacctcaactccgccgctgacccccaaaccctagcgccgcccaagcgtggccgcggccgccccaggaagaatcccccaccgccaccgccaccggctacggatccgaatcctcatcctccatcaggagcaggagcaggggcaggagcaggagcaggtgcatgccccttcgcccccggcgacctggtctggggcaagaagctctcccacccggcctggcccggcgaggtcatctccgccgcccccaccggcgcccagctcctcgtctccttcttcggcgacaaggccctcgcctggtgcgacgccgcccagctcaggccctacgagccctacttccccgtcgccgagctctacgatggcgaggccgacgacttcgacgccgccctcgatgcctccctcctcgagttcgagcgccgcgttgagcttgccctcaccgctcccggccgcatcgcccgccccttcctcccccgcgatttcatcgccctgctgcacgatttggccgcccaccgcatgggcttctccaaccgtgtccacgccgccgtcgctaaggcgcatctcagagccttcgacaagttcaggggcctacccgaccctcccgagtacaccctccacctcggcctacccaatgtctccgccgccgcagccactcccaacaactgcaactcctaccccccatccaggaggagggggaggaagaggaaggaggtggaggaggaaatcctcgatgactccgatgaggattgggacccacgcaagaagggtgccactgactccgattccgaagtcgatttcgaccgcaagagggtctccaagggcggcaggggcagcggtgcaccacgcgggaggccacgcgggaggcctaggaaaaacaatgctgggaggcctgcacacctcaaggacgaggacgaggtgatccaagaaacagtggagtatcaatatccaccagccgctgacatgtttctacagcttacatccgttgctgctgatccattcaacttcaagggctatgactctgtgcctgtcattcttagcttcttctcaaaatacaaggactcagaagtgccggccacatacgacgacaaggagctgctgcagacattgggtggcaagaaaggtagaaaaaatacggccagaagcttgtacccagctgcaaaagaagaaggtgacttagaggtggcggatggccataggggtcggaggaagtcagcagggagtatctactcagcaagtaatgcagaagccatcccttctgtggatgacatcaatagtatattccgtatgcacgggccaatcatggagggtgcgactgaaatcaacaagaaatcaaagatcgcaagagtagtgttttctaagagtgctgatgctgaacaggcatatagcagttcgggaaagtataatgcatttggtccagcccttctcaggtatgatctcaaatacctgccaatggttcctcaagttccttagatggtgcaggctaaactggatatgtcgccatttggagggaaatgcgtaatgaagactggagctaagggatcataagatgttcgcgttactgacttagagctaggaatgcccactggccaggccggacgacttgttcgctggtcgagtgagcaattttttaggttttatctggttaaatgcattccgaggactggttgtgtacttgagttcagaggtagtttatattattaaattatttagatgatagatgatctcggcgcgatccctctccttgttatcttagcgatttatccttttttgtattgcctagaaatcattgcacagctgtggatctttatgctatgttctctgagctaatatttccgtctttagatcctgtctcacattatcctagcttgcaggatgcagtatcaacatttgttttcagtagttataatttcagcagtcagaaatttatcatgcaatgctgaaagctagctgcggagtctctcatgaccattaaattaaagctatgcttgtgtaagtgagaagttctcaaaccatgttttctccttcagctgtttagccagtgtcagcaaggctatttgaacagctgtatcagcgtcatccagcttcaaagtaagttgttctagatccgacttcaaaaggacctgttgcattggattggtaggtgtgttcgggttatctggacatgtgaatttaacgttgaagatggtaagagcaccaggaaccaggataagaacagagaacagtgatggagtcctccaagttttcaatgatttgatcaatacctaccgaaacgccttgtatatgttgccatgctgacatgcctattccaccaatggacatgatcaacctttgcgattactaacgtcatacgtaacatctgc

SEQ ID NO: 7963 - DNA, 1686 bp, Oryza sativa
  ref <308>: DATABASE ACCESSION NUMBER: AK105311
  ref <309>: DATABASE ENTRY DATE: 2002-08-28
cattgtttattctgcttggctgcgcctttcctcagaagttgataagaacaccaggaaggtgtttgtggaggaagtgatgtcactagttgagcttgatgtattgcgtgatgctctggttggtctccctggtgttagtgggttgtcaactgaacaaaggaagaggctgacaatcgcagtagaactagtggcaaatccttcaattatcttcatggatgaaccaacttcaggtcttgatgctagagctgcagcaattgttatgcgtactgtgagaaatacagttaacacaggacgaactgtggtttgcacaatccatcaacctagcattgatatctttgagtcttttgatgagcttctgttgctaaagaggggaggacgggttatatatgctggccagcttggtctccattcacaaatactagtcgaatatttcgaggcaattccaggggtcccaaaaatcacagaaggatataacccagcaacatggatgcttgaagttagctcttctctagctgaggctcgtctggacatagactttgctgaagtttatgccaattctgcactttaccggagcaatcaagaacttattaagcagctgagtgttccacctccaggcttccaggatctctcatttcctaccaaatattcccagaatttcctaaatcagtgtgtggcaaatacatggaagcaatttcaatcttattggaaggatccaccctacaatgctatgcgttatgttatgacgcttctctatggtcttgtgtttggtactgtcttttggcggaggggaaagaatatagagtccgtgaatgatctgaacaatctacttggagccacctatgctgctgttttcttccttggagcagcaaatttgctcacacttttgcctgtggtgtcagttgagaggacagtcttttaccgtgaaaaggcagcagggatgtactctccactgtcttatgcgtttgcacaaggatttgtcgagttctgctacagtgcagttcaaggtgttctttacactatcctcatctattccatgattggctatgagtggaaggcggacaagttcttctacttcctgttctttatgattgcggccttcgcctacttcacattgtttagcatgatgctggttgcgtgcactgcttcggaaatgcttgcggccgttcttgtttcatttgtgctctcctcgtggaacaattttgccggattcattataccccgtccactgattcctgtttggtggagatggttctattgggccaacccggtctcctggaccatctatggagtgattgcgtcgcagtttgcggacagcgaccgtgttgtcaccgttcctggccaatctaccaccatggtggtgaaggatttcttggagaagaacatgggctttaagcacgacttcctcggctacgttgtgctggctcatttcggctacgtcatcatcttcttcttcctctttggatacggcatcaagtgcttgaacttccagaaacggtaggaggccggtgtccagcaggatgtcaatccgaggtcacgtttttggagtgtaaagcaaatgtagcaacttaataccgatgctttttttgtgtagatatatagtctgttcgatatctgctagcttgtattgacacttaatgtacaacattatttactcaaatgttctgagtttatggtatattattctttttc

SEQ ID NO: 7964 - DNA, 1413 bp, Oryza sativa
  ref <308>: DATABASE ACCESSION NUMBER: AK105312
  ref <309>: DATABASE ENTRY DATE: 2002-08-28
atcttggtttcttcctagtttcgggagaggattttagtgagggatttgaaggattttgaggtgggagaggagatggagttgccggcggatgggagcgcgctggcgaggcaggggtcgatctactcgctgacgttcgacgagttccagagcgcgctgggaagcgccgagaaggatttcgggtcgatgaacatggatgagctgctgcgcaacatctggacggcggaggagtcgcaggccatagcgccggcggcggcggctgcttcggcggcggcggtggttggggacgcgcagcagcagcagcagccgatccagaggcaggggtcgctgacgctgccacgcacgctgagccagaagacggtggacgaggtgtggcgcgacatcatgggcttgggcggcagcgacgacgaagaccccgcggcggcggcggctgcggcggcgcccgcgcagcggcagccgacgctgggggagatgacgctggaggagttcctggtgcgggccggcgtcgtgcgggaggacatggggcagaccatcgtgctgccgccgcaggcgcaggcgttgttccccgggagcaatgtggtcgccccggccatgcagctcgccaacgggatgctgcctggtgtcgtcggcgtcgcccccggcgccgccgccgcgatgacggtggcggcgccggccacgccggtggtgctgaacgggctggggaaggtggagggcggggatctctcgtcgctctcgccggtgccttacccattcgacaccgcgctcagggtgaggaagggccctaccgtcgagaaggtggtggagaggcggcagaggcggatgatcaagaacagggagtccgctgctaggtctcgcgcgcggaagcaggcttatataatggagttggaagctgaggtggcaaaactgaaggaacagaaggctgaattgcagaaaaagcaggtggaaatgatacagaagcaaaatgatgaggtcatggagagaatcactcagcaacttggaccaaaggcaaagagattttgcctccgacgaacactgactggtccatgctgaagccagagtctccggtttcgccgtggcgctcagcttcagagttgcttctctccttgttggtgaatggtgatggctcagtctcttggacggtcgaatgctggcgtcgattactcactaggtttagctgcgagatcgttgcgtgagcaaaggcatactatctaatctgtttaactccttatttagggaaatctggcatggtgaaaacggggcatgccatctgtgtttgttgtttttgtgcagctgttgcatctgctctgtatgttgctgttgcgttgacatgtcatcccgtttacagttcagtgattctgttctgtacccaagtttaagaggattcagtttcagtgatctgcatgtaatttgagcttt

SEQ ID NO: 7965 - DNA, 3214 bp, Oryza sativa
  ref <308>: DATABASE ACCESSION NUMBER: AK105313
  ref <309>: DATABASE ENTRY DATE: 2002-08-28
actgcgtcatctccagattcccttctcctgcaagcctcctcttccgatcgccgccgcccccgccgccgatggagcgcgccaccgctgcacaccccgcctcctcctccgtctccgccgcccactggatggcgacggaggatctcggcctccgccgcaacatcatcaacaacatggtgaagaaatttatgaccattaccaattctcagcaagatcatcattaccgggagatccaaaattatgctatcagatgtgaacaggacgcgcttaacaagaccaccaataaggaagattatttgagatgcatagctcaaagaatcatgaatatggagatgaaagtaagacgatcacaatcactgcaggcagggacgacacctagcacacagaggccatcttcccagcaacaaaatgtatgtaccacaccacaaaatccaggccaagtgccagaccagcacagggcttctgcaccaaattcacagatcgaagctagccaagaacagactgtgatggtggcagctccggattgttacctcaacttcaataccacagcaattagtccagtggcaatgtgtgtccatcctagccagcaacctcagagtcaacaacaccaacaacaggccaagcaactacaccccacaaacgttgtcggatacaacccaactagcttgaatcagattcaaggacaatcagttagtggacaaaattttcagcagaatcatgtactagggcagaatgccagtggcagtggtacacaacagaggcaactagttgagacaccggagcagcaccagctgttgaggatgaagcagcaacatatgaggggaaaccagcagcagaatttcacccagagaaaccaaattcttccagcacagcaggcccatcttggcaagatgcagattggtcatcctgcagtacagaacaatcagcagaatgttggaatgtcatgtcagcatatgactccgcctcaatgtcaagttgccacagctcaacaaagcagtcttggttgtgatagccctcaaactttagaaccgatcgtaattgccggagaagtggattggagggaagaaatatttcagaagatcaagtcattcaaggatgcatacctttccgaagttttggaatatgatcaaatcgttcatgttccgaagttaacagaggagcaactccgttcattacctgttgagaatgctgagaaattgaggcgtataagacatgtcaagaaaattatcgcaataatgctagacttgttgaatacccagaaaagcaacgtgcgcaagggtatgcagaatatattccccatattccagcagtacctggggcaattgcgactttccatatcaaaaagtaaagctcggaagacagtggcaaaaatagggtgtcagtcgcagaattgcagtgagaattctcatatcgtcaatcttggtagcaatacagccccattcacttgtgatgcaagacagcaaaaacagcaagagcaagttatcagtgctaaaacttccaggatggagcaagcaatcatgacccgaactcccacacctcaacaagaaagtcatggctgccacctactaggagtaccaagctcttgtttctcaccaaaagcactgcaaccttcctcaaccaatactattgaggagtgcttcaccccatccccggtaacccagacagttcaaccaattcaagtagcttcaccccatgttacttcacccagtgcttatggaaaatcatctgttccaaagcctagtgttgcacgagttgtttcacactctgcttcgataaagtcaagattggcatcatcccctagcaggccagaaggtgcgcatgctgcctcgcccaatattacttcagttgaatccacattgccaactcctattgccaagccagggactgtacgagctgcctcaccttgcactccagtcaaatccacatcgcaatcgcagcttagcaagccagcagttacagaagttgattcatgccgtgcttgtgtgacatctaaactgaaatctcctgttggcaagccagagactgcaggagctgcttcaccatgtgcttctgtgaagtccacagtgtcactggacgttgacagtgttactgaattcttgcagcaccgtgttgtagcacctacagtagcaaatggtggttcttctaaccaggcaattcatactctggtatcagcagcgccacctaaagctgctcatcaagcagatgatcaggtgcaaaacggagctgaagaaatggaagccaaaaagcccttcagccgcctaattgaaacactcctgtcttcatcaccggaagcactcctccactcatctaattccatgagattggctatctgggaggctgaccgaataccagcaccatcaccactaccataccgaccaaggaacggtaaaatgaagcgtgactttgatcatgtgacatcacgtcctatctcatcaccattgagaagcatggatgagagttgcatgacttatgagtgtgttgcgttcgaggatgaatcgagtggggaatataatgcgaagaggcagaaaacacaagtgaatgccaacgatgctctggtggacgagataaaaactatcaacaacaaactagttgatactgtgatgaactttgctgatgaaaatgggacagatgaaatcatttatcagaacggtggcgggatgttgatcaaactctcttacatttccatgtcgctttcgccaagcctgaaatctcttttcgcagcatctgaaatgaccattgtcatgcccgtgaagctgttggtccccgcggattatccgaaaagctctccgatccttgtcgacaatgacgatgaacagaggaggttgagtgacatctcgtacgcggtcgcagtggcatttgggtgcgccgtcgacgagttgccggagccgcggtcgatcgaggcgatggccatggcgtgggatggctgcgtgcggcgggccgtcaccgaggtggcgcatcggcacggcggaggaacgttcagctcgaggcacaaccagtggagggccgggtacctgcatgggcccatgatgagcctgtagcacttgctccatctctaccatgttcgttgtagactttgttgtagtgtgtatggtcagatttaagttatatcgatgtataccggttatttactcccggaaattccattatagaagacaaaattgcatatgtatacagcgggaacaaatgaggcagaatcaccaatacatgtttgtatttc

SEQ ID NO: 7966 - DNA, 2151 bp, Oryza sativa
  ref <308>: DATABASE ACCESSION NUMBER: AK105314
  ref <309>: DATABASE ENTRY DATE: 2002-08-28
aaaaggccaaattggaggagggtagggaagcttcggtctcttcgttcgtcgtcagtggcgattcccccaccccccctccctccggccgccaaagtcaatgccaatgcaaacaaccgacaaaactgatgctgtgaaatctatgctttccggagagaatagtgaaggctcagatggatcaaagtcatcggacacagttgagtgggacccatgggaccctccgcatcctccttgtcctactttgccacccacagcaagccttatgtgccaagtggaaatggtcaaacagcatcattttcaagtactggccgtacttgctgcttccagggccacaaatataattgccccagaccgtactcctcaggaggtgcgccgtaaatttgctgaaatatgcagtgaactggcggacatccttgaaaaggacagtgttcggagattcctcaacttgtacagaagaaatatgcgtatcatgggttggggtctggtcatcacatctcaaacaatggacttcattgtttcattcaatgccctgcgttgtgctaaggttgtcttggagggcaaggcacctaagctttgtcagatccgtgccaaccccaactacatgactagctatgggtacttccccctccacaaagctgctgaaaaattctcagttgacatgattaagttgctgctttgttatggtgcatcggcgaatttacgcacatcaggccaaaaggtcatcgagggcctcctcccactccatgttgccattgagaacacttgcatgcacaagtatctggaggacaatctattaactgaccggaagctcaagcaagtggatcttgacttcatctacaagctcatccatctgctttgtctgcctgagatgaagattttcttggacacgacaagactgcttgcagataacacagataatattgttgatgagctatggaactacatcaaggaggggaggcttgtccatgctgctattttgctccttgcagctcaacgaaaattcgtacctgtgcttcctctaatagaaacatcagctgtaacctgaatggatttgatattatcagggatcgtgttatgggatccatagtttccatagaaagggaagggcgtggattaacaagtggtaaaaatagcaaggcacataagcagctggaggagaagcggaaattttttcataattcattgatgctcatttttgtaatttcgaaaaccggtgaagctcttgatgagtatatccagtctcattcagaggtctctcatcaggaggtgcttgagggtgtttcatcaattctcgatgatcatggttttgctcctactggaaaagggatcagcataggagacctggaatgccgtccctatgactgcaatgcgtcgaatagtgtgccgaagtgcaactatgaagattctggtacgaccaaggcagttggagaatctcctaatctgaatgttaaagctaaaaaagctgttggaaagcaaatacaaagtagacgagaacttgagcaaacgaggaaaatgttcttcccacattggagatcacttttaacatctcgatatactgtaaaagtattcccattctatgcacacatgatggagcgtgatcatgtttcaaatcttcatatggccggtggtactgagaatggattgaaggataaatggtgttctccagttggcgttagtttgttgggaaaaccaccacaactaacaagtactagttatcaatccagaaccagaaggctatttggtactgctgcacttacactactgaagaccttaaagcgtgcatgagttggcaggcaggtgctcagtttgttgtggagcacgaccattttccctgcgacgagacaagaacgtcgtttgcccgcaatggatgttaattttgctggcctgattctgacctctccaagtgttggatatgtatgtagcagtcgtgctgatgtgcttttgctgcgtattatgatatgtagtgcttgcttcaagtgttctgttatgaagcttgacaatggacctgacatgttggaaccttaaaaggttatcctatttaattgtagggtcgaatcgaggatacacagctccattggattttactgaactcaccacttgtatgctgagatagcacacgacaattttatttgttatctatggccgaagttgcat

SEQ ID NO: 7967 - DNA, 3133 bp, Oryza sativa
  ref <308>: DATABASE ACCESSION NUMBER: AK105315
  ref <309>: DATABASE ENTRY DATE: 2002-08-28
ccaagtcgtccaagctccagctgttacaaggcaactatgtcgaagaacaaaccaagcagctgggcatgggcggtcatgataaaatatctaataacgctgttgttgatgctatcaagggaaccaaggataagatgtatgagatgtcattggagattaaggaccagctgtttatcaaagggatagttgacaagattaaggatcatttggataataagaaggctgtgattgttctccaagatgaagaagagtatgtatcccagtgggagaagactagaaatgctttgagtttgttgggttgtgccacaggtagtgcagtgatcgtggcaacaaagaataatcagagggccaaggaattttgttttccgcctggggagcctgtaacctattcacttgttggcctctaccatgatagagtgctcaagcttacaaaccagcgggagaatcaagatgactacaatcgtcagattctccgggacatcttggacaagtgtgatccacaagaattctccatgaagatgttcatgcatgctctatatgctaatccaaacaggagcaatgaagaactgtgtaagttgcatgaagccttgcaggttccccaaaactcattggccactagtaacgctaagaagatattcaaattctcctacagagatctaccaagagagcataggacctgcttgctatacctagctatctttcccccaggtcacaaaatcagacgatcaactataatagcacgatggcttacagaagggctgataaccaaggaagattggccgacagcagttcgtcatgccgagagatgttttgatgctctcatcaaccggtggcttgtttggcctagcgatattggtgctgcaggaaaagtcaagagttgtatggtatgtgatccaattcatgggtttataaccaagatggccaagaaacaacacattttggatgcacgcctttcagatctttgggctcgccacttctccatcttcagtggtcttcgactccgcgcatctgatggcatcgacaagttcgtgcacaagcttcctaagtattcacctcaactggcactgctcaaggtactagatttggagaactgtcaatgctttaataagaatcactacctcaaggacatatgcaacaaaatattacttctcaagtatctgagcgtaaggggaacaaatgttacccatctgcctagtgaaatcaacaacctccacgagcttgaggtattggatatccagcaaaccaagatgcctgagcatacaacaagagatgtcatgctcctaaaactgaggcgtcttcttgctggtcatgttaaccagaggcatagtcatgacatgggcatgcccattggggatgagatgtcattatattccagtgtccggatccctcgcaagattgaaaagatggaaaacatagaggtactatccaatgtcaaggcttcatgggatggaaatgagctaaaaaacattagaaagctatggcggctaaggaagttcggtgtggtcatccacgacaaggattctcaccttgataaattgcttcgagcaattagtgacttgaaagagtgcctccagtctctttccatcactgtatatgaaaccaaaagtgaaggcatttcccctaacaaacagttactactacctgaaatgttcggtcgcttggtacaaccacctaagcttcttgagagtctaagcatcaatggacttacacatagggtgcgacttcttccattgttggccagaggtagtaatgaacttgccaaggtaactttgagcggcactgaactgaaacagaacgatctgatggtcatggctgtactgcccaacttgtgctgtgttaggttccaacacaaggcatacactgagagaacgctcacattcaaggtggatgaattccaacatctgaagtattttcttgttgagggagtcaacatgacagacattatctttgaaaatggagcagctcctgagcttgagcatatcatcttgtccttcaccaacatatgctctctttgtggcattggctgccttccaaaattgatggagctccagctcaagggaaacaactccatcctttcattacctcaagacagaatagctcctgatatgaactctgagagtaggttattaaccttcaagaagggtgaatttgaacaactcaagaacttcgttgttgaaggccccaacatgaccgacatcatctttgaaaaagaagcagctcctaagcttcagaagattgttttgtccttgaccaatgtaaactctcttagtggggttgaaggccttccaaaattgaaggagattgagttgaagggccacaagttccttctttcattctttgccaatgccaatcagattaccaaagtgactctttgtgataccttactgaagcaagaggacatgcatatcctcgcaaataaaccaaacatgggcagcatagtgctgttggacaagtcttacgatgaaagccagcttgcctttaacaaggatgagttcccaaagctcaaccttcttatcgttgagtgctctacaataatcaacatcagcttcgccgatggatctgctcctaagctcgagaagatcgtgtggcacttcagtaggaaggatttttgtttactctccggcatcgccaacctcccagaattcaaggagctcgagttcaacggtgattttgtccctgacaaggtgagaaaagccattaatgcgcataaaaggaagcctattcttacacacaagaagccacagcatcacgggccagcaccaaaagaggaagacgagacaaggtttccatggatctccaacttgttctcgaaaaagcaagaggatcggcgctagctgatctgatcgaggaaaaggtatccgttctcatcattccttccatttatcactcactcccagtccagctagcttgtgtgccaactcagtcgcacgttcagatacacgtgcgcaatcgttttgtgtgccctttagtccatgtgcttgtttcccttgaatttgcattactcggtgtcttagagtggtgtgccgacaaattatgtgccaaatctgaatgtgcacgcataatattaagagcatagcagtagcagctcatgtccgtcttatgctaccatgtgtcgaatcgatttaccgttgatttt

SEQ ID NO: 7968 - DNA, 1796 bp, Oryza sativa
  ref <308>: DATABASE ACCESSION NUMBER: AK105316
  ref <309>: DATABASE ENTRY DATE: 2002-08-28
accaccaccaccaccaacactgcaacacaacacaccaccatgaagacggcatcaatggcggcgtcgctgctcatcccgctctgcctctgcatcctcctcctgcgcggcgcctccgccgtgagcgaccagcaagaagccggccgtcgcgatagctgcgaccgcatcgaccgccgcatccgcgcgctggagccgacgcgccgcgtcgactccgaggccggccacaccgagctctacgacgaccgcgacggccagctcccctgcgccggcgtcgccgccgcgcgcatcaccatccagcgcaacggcctcctcctcccttcctattccaactccccccgcctcgcctacatcgtccacggccgtggcatcgtcggcgtcgtcatccccggctgccccgagacgtaccaggagacctcgtcgtcgtcgtcgcaggagcaggaggacgacgagcgccgccgccgtggccgccgtggtgatgaggagagacggcgatcgagcgagggagaggaggaggaggaagaggagaccagccgccgcagcttcgagcagtccatccgcgacgagcaccagaggatcaccaccgtccgccagggcgacgtcgtggccatccccgccggcgcgccgttctgggtccacaacgacggcgactccccgctcgtcgccatctccgttcacgacgtcagcaacaacgccaaccagctcgaccaaacctccaggcgtttccggctagccggcgggcaggcgaggagcgaggggaggcagaggtacggtgagggcgagtcgtcggagtcggagacggaacgcggcggcgaggagtcgtacaacatcctgagcggcttcgacaccgagctgctcgccgagtcgatgcgcgtcagcccggacatcgcgcgcaagctgcagggccgcagcgacaagcgcggcaacatcgtgcgcgtccgccgcggcggcctccgcatgctccgcccggcgacggagcgggtgaccgacgaggagatgatgaggggcgccaacgccgccgccgccgccgggaacgggatcgacgaggccgtctgcttgatgaagctccgcgagaacgtcgccgacccgatgaaggccgacctctacacccccaatggcggccgcatcaccgtcctcaacagccagaagctccccgtcctcaagctcatcaagatgagcgtcaaccgcggcgtcatgcgccggaacgcgatcctggcgccgcactggaacatcaacgcgcacgcggcggtgtacgcgacgagcgggagcgcgaggctgcaggtggtgagcagcgaggggcggcgggtgttcgacggcgagctccggcgcgggcagatggtggtggtgccgcagagcttcgcggtggcggggcgcgccggcgacgaggggttcgcgtgggtgtcgttccagacgagcgacggcgccatgaacgcgccggtggttggcaagtcgtcggcgctgcgcgggatgccggcggacgtgctggacaacgcgttcggcgtgtcgagggaggaggcgcgcatggtcaagttcgggagggggcaggagctcgccatcttctcccccaagtccggcgccgccgcccgccgccgccgctctcccggccacagggacgacggcgtgctcgccgccccggcctgaggcgtacgtagataccagcgtgagcgcacgtgcgcatgtacatgtagtactaataatgtgcacgttttccgttaagggtgccacgcactgcatgcaccgtatgttggcccgtacatgtacggtgtacccgatctagaataaatgaagtcgctgctgctacc

SEQ ID NO: 7969 - DNA, 725 bp, Oryza sativa
  ref <308>: DATABASE ACCESSION NUMBER: AK105317
  ref <309>: DATABASE ENTRY DATE: 2002-08-28
agctcaccaaaatccccagtcccgcgcaaccttcagctctcggtctgcgttagctcctgaagaatcgaagcaatggcggacctcttcttcggtggccccttccggcgaatcctctacgggcggcccttcccgccggattgggcgtcggcgtcggcgacggcggcgatggactgggtcgagacgccgacctcccacgtgctcaggatcaacgtcccgggactgggcaaggacgacgtcaaggtgcaggtggaggacggcaacgtgctcaccgtgaggggcgcggcgccgcacgcggcggcggagaaggagagggagagggagaaggatgtggtgtggcacgtggcggagcgcgggcggccggagttcgcgagggaggtggtgctgccggcggaggtgagggtggagcagatcagggccagcgtcgacaacggcgtgctcaccgtcgtcgtgcccaaggagcccgcgccggcccggcccaggaccaggcccatcgccgtctccagcaagctctgatcctgatcaagcccgaccctttgtgcattgtgcgcaagtgtttctgtgtttgtgaactgtagtcgattatagcaaccatcagtcgaatgttgtgaagggcgaatgtgtattggaagtccaaatcttaatgttgaaaattttgaaaaattttagaggtttgaattactagtatatctatgtaataatctaattaataaaggtgggtcttctgc

SEQ ID NO: 7970 - DNA, 1031 bp, Oryza sativa
  ref <308>: DATABASE ACCESSION NUMBER: AK105318
  ref <309>: DATABASE ENTRY DATE: 2002-08-28
accaaaacaaagctcagaatcctacctgactagtactaccactactagctagtagcgagctactctctctggtcatcaagctttgagtggttggagtggtggcagctatcttcaaggacgggaagggctgtggctcatgctaccagataagatgcgtcaaccaccctgcctgctccggcaacccggagacggtgatcatcaccgacatgaactactaccccgtttccaagtaccacttcgacctgagcggcacggcgttcggcgccatggccaagccggggcagaacgaccagctccgccacgccggcatcatcgacatccagttcaagagggtgccgtgcaacttccctgggctgaaggtgacgttccacgtggaggaggggtcgaacccggtgtacttcgcggtgctggttgagtacgaggacggcgacggcgacgtggtgcaggtggatctcatggaggccaactcccagtcgtggacgccgatgcgcgagtcgtggggctccatctggaggctcgactccaaccaccgcctcacggcgcccttctcgctccgcatcaccaacgagtccggcaagcagctcgtcgccagccaggtcatcccggccaactgggcccccatggccgtctaccgttctttcgtccagtacagcagctaagccaatgatcaagaacaagcataattcatgcctactatagcagcagcagaagcagcattagctactatacatacctctacgtacgacatttgagatcgatcgtttggccatttttatctgctcgggtattgattagctctccctcggtattgtatggatttgcatggatggttcattaatctgtcatcaggagttcgttttgagtaggtgagacgtcggttgttgggtgtcatatagacatcgctcggtgtcttgaggttgagagtgggataaggaggaggcaaagtttgcatgtgctgtcccgcccactctcactgtaccagtgtcactgtttgtgtaaccagaacaaaggtcataaattatactactagt

SEQ ID NO: 7971 - DNA, 501 bp, Oryza sativa
  ref <308>: DATABASE ACCESSION NUMBER: AK105319
  ref <309>: DATABASE ENTRY DATE: 2002-08-28
aaagaaagaaaaaaaaaaaggagaacagagctcgcagaggaacttgccgccgccggtacctagccgctcgtgccacccagctaggcatgttcgccgccgtcggtgcagcgagtccagcggccgggagggtgttgtggctactcggatctggcaggcccgagcttctaacctctgaatttggcgaaaaaaaaaaaggtgagtaggagatggatttgaggtagctgtccgtggcggcgagggtgtccgcgcagcgacgagctcaagccggcgaggaaggtggtgccgctggcgacggcgacgagctcaagccaagctcatgcttcgacatctctgtgcaggtagatctggcagtggcgagctcatgccctccggatccgccggcggagagctcttggcgaccccttgctgaagaagagagggaggagcaggacttgcagctagcctgatctggccgacggagatggagatggtcgtcgctggtggccatgaccgacgatagcc

SEQ ID NO: 7972 - DNA, 810 bp, Oryza sativa
  ref <308>: DATABASE ACCESSION NUMBER: AK105320
  ref <309>: DATABASE ENTRY DATE: 2002-08-28
ctccctctctctctctctctctcttctcgaagcgcctccaccgatctcgaattctctcgatccaggcaaggagggaggaggatggcgaggggcgagaacaacaccggcgcgcacggcagcggcaacgtgcctcctcccgccaccgccgcgtccacggcggcggggacggcggccgcgtccgggaagcagcaggcgcggggggcgggggcggaggggcagtcggtggtgcggcggctgcagtcggagctgatggcgctgatgatgggcggcgacccgggcgtgtccgcgttcccggagggggacaacatcttcagctgggtgggcaccatcgccgggtccgccgcgacggcgtacgagggcacctcctaccgcctctccctcgccttccccggcgagtacccgtacaagccgcccaaggtgaggttcgaaaccccctgcttccacccaaacgtggacgcccacggcaacatctgcctcgacatcctccaggacaagtggtcctccgcctacgacgtccgcaccatcctcctctccatccagagcctcctcggcgagcccaacaacgactcccccctcaacacccaggccgccgccctctggcctaaccaggacgagttcaggaagatggtcgagaagctctacaagcccaccgcgtagaagttggtggcgccttcgcccggcgatctgatctggccttctcaccttgaatcgatgatgattcgaatgcgattgttgtgcgagtcggattggaactgttcgatctgtaatttttttttgttggttgtttgaatgattcatttgtttcgatgt

SEQ ID NO: 7973 - DNA, 539 bp, Oryza sativa
  ref <308>: DATABASE ACCESSION NUMBER: AK105321
  ref <309>: DATABASE ENTRY DATE: 2002-08-28
ccctccgcgagaagatcgtcgccggggagcgcaagttcgaggacgtcgccaccgaggagtccgactgcaactccgccaagcgtgggggtgacctaggtccatttgaaagaggcaagatgcagaaggcttttgagaaggcagttcttgctctgaaagttggggagataagtgatgtggttgatacagacagtggggtgcatatcatactgaggactgcctgattacggcggcagtacgggccttctcaatctctcattctctatacactccgtcgctgtctgcaactctgcatatcatattgaggctgtttgggggcagaagtatgggccttgtcaatctgtatacactggggaaattggatgttggttattgcttcgttacaaacctgtgcatgtactctcgatctgcgaaaagtttatgttttactcttacattttgctggagacatttgctctggaatgatgctcaagacaacctatgaatattgattgttacaacatgtttggaattagctgaactgagcaggaagttatcgatgc

SEQ ID NO: 7974 - DNA, 819 bp, Oryza sativa
  ref <308>: DATABASE ACCESSION NUMBER: AK105322
  ref <309>: DATABASE ENTRY DATE: 2002-08-28
acctcgcatatactccaacatgatccctctctagctaacgtaattcccttctcttttctctccgatccggctctcgttgtgcattaagtgttgatcgatcggagatggcgactcgggagggaggaggacgaggaggagggcggccgccgctgcgagtcgggcggacgcaggagtaccggatggggagggagacgcagctgctcgccgctgagggctcgccgccggtcagcctcttcgtgctgtgcggcgaccgcttcgaggcggcgcggctgttccgctccggcggcctgtcggtgcgcatggcccgcgtcgagggccacccggtctccatggcctcctgcgccgtcggcaaccaccactggatgctgtcccgggacgccctcgtcgcgcgcctcgacgcccgcgtcttcgtcttcgagatgcccggattcttctacgccgtcgtcggcggcggtggcgccgagaggaagtgcgccaccctcgccgagatcttctcccggttctgctcctaccacgatctctccaccacgcagcaaggtattccaattaacatgcaaattagaacgcgtgtgattaccaattaatcctactagttaattacatattgtgcgatgcgtatcaaattatcttcatgcatgcgtgcatatatactaggttgattactgtacacaacaacatgtactagatcaaaaacattagttagagcaggtacatagcaagctataagccgaatatgatacgcgatgaaaagagaagagagaagaaagcaagctatttgtatctagctgtaacatagactatgatatgcgatgaaaagag

SEQ ID NO: 7975 - DNA, 1523 bp, Oryza sativa
  ref <308>: DATABASE ACCESSION NUMBER: AK105323
  ref <309>: DATABASE ENTRY DATE: 2002-08-28
aagtccaagtgaccaaccatcatcaatcatcgctaagcccacctcggagatctcgagttcgatcgtcgtcgtcgtagctgtagaggtagttaattatctcgttttagatgagctcactgacggcggcgcagttccggtcgctgtttgagatggcaggaggggaggatatctcgtttctgtttggtgatgatgaggcggcggcggtggcggcgccggtggagttgcaggggaagagggggtgggaggaggtggatcaaggggaggggtctggggcggtggcggcgaagaggcagcggtcgccgacgagctcgagggagaatagtagcgggagtaatgagggtgggcaggaggaggtgtctgaggcggcggcggccatggcggcggcggtggggaggggtggggggaggaggctgtgggtgaaggagagggactcggagtggtgggacatggtgagtagcccggattacccggactcggagttcaggaaggcgttccgcatgtccaaggccacgttcgaggtggtctgcgacgagctcgccgccgccgtcgccaaggaggacaccatgctccgcgccgccatcccggtgcgcaagcgcgtcgccgtctgcgtctggcgcctcgccacgggggagcccctgaggctggtgtccaagcgcttcggcctcgggatctccacctgccacaagctcgtgctcgaggtctgcgccgcgctcaaggccatggtgatgcccaaggtggtgcgctggcccgaggccggcgacgcggcggccatcgccgcgcacttcgaggccatctccgggatctccggcgtcgtcggcgcgatctacaccacccacatccccatcatcgcgcccaagtccaacgtcgcctcctactacaaccgccgccacacggagcgcaaccagaagacctcctactccatgaccgtccagtgcgtcgtcgactccaccggcgccttcaccgacgtctgcatcggctggccggggtccaactccgacgaggaggtgctcgagaagtcggcgctgtacctgcaccgcggcgttcccggcctgatccagggccagtgggtggtcggcggcgggagcttcccgctcatggactggatgctcgtgccctacacccaccagaacctgacgtgggcgcagcacatgctcaacgagaaggtcgccgccgtgcgcggcgtggcgcgcgacgcgttcgagcgcctcaagcgccggtggggctgcctccagaagcgcaccgaggtgaagctgctcgacctccccaccgtgctcggcgcctgctgcgtcctccacaacatctgcgagcgcagcggcgacgccgtcgtcgacgccgacgactgcgccttcgacctcttcgacgacgacatggtcgccgagaacgccgtccgctcctccgccgccgcgcaggcccgcgacgccatcgcccacaacctcctccacagcggcggcggcgcatccttcttctgatcaagcatcatcgccgttcttggtccgatcaacagcgataccaaacaaaccaac

SEQ ID NO: 7976 - DNA, 430 bp, Oryza sativa
  ref <308>: DATABASE ACCESSION NUMBER: AK105324
  ref <309>: DATABASE ENTRY DATE: 2002-08-28
tgagaattttgaaggccgaagaggagggaggtggcggcggcggcgagatgggcgacgagggcgagaagaagaagcgagaagaagcggcggaagaaaagagaaggaagaagcagcggaagaaaagaggggtatttggggattttttatctggggctactttgggccaagacacccattgtgagctatagtactcttatcgggttgcttcagattttgaggagcccacctagagatacctcccattgcaagctgagtttcctattggtgaggacactctaggggtgtctcacattatgaatgcccttagctaccaatgctagtcatacaagtgaagacaaattttgttcgttcacgtattgtgcatgataggggaggcgtataaaaactcttgaactcacaactaattaaagcctttggcaagtttttgttt

SEQ ID NO: 7977 - DNA, 798 bp, Oryza sativa
  ref <308>: DATABASE ACCESSION NUMBER: AK105325
  ref <309>: DATABASE ENTRY DATE: 2002-08-28
aagaaccaccaaaaccagaaacatcaagcagcaagtttatagacaatggagaagagtatcatggtgagcggtgacgaacacaaggccaagtttctgtcctacctgatcaccgtgttcatggtggccatggccgtcttcttctcgtccaggatggctggctgggccgtctgccccggcgccggcggcatcaccggaggatgcgtctccggcggcgaggacgtcgccaagacctgcctcgccttcgcgctgctcacggtggcggcgcaggctcacctcgcgagcgtgctgctgatggatgagaagaagaagaggaatccgccggcggcgagctgggtcgcgtggctgctcgccgtcagtacctgtgcgtccgtctccggcatgttcctcgcctacatcagctacggcggcttcgtggcggcgacctcgctggagtggccggtggccggcgtcgcctccgccgtcaacctcgccgtcgccgcgtgcaccgtcctgcgttacgtgcgtgtgaacggggatatggacggttagatcgatgtgtaccgtgttcgtcgtcgtgtcgaccagatcaaccagattcagtcgatgggaaggatcatggcgtttaagtagctagtcgtgttatctagtactagtagcttcatatgtagctagtcgtgttgtgtatctcggttgttgatgggcacggatgttgtgtgttccactgtgacgtcctttgtggttcttgcttggccactagaacatgtaaggaacttcataatatgccgtatgatgcatctctatctgaagaactacttgact

SEQ ID NO: 7978 - DNA, 858 bp, Oryza sativa
  ref <308>: DATABASE ACCESSION NUMBER: AK105326
  ref <309>: DATABASE ENTRY DATE: 2002-08-28
atcccacaccacccgtcccatcgcaatccaatccacgagcagccatggcgagaggaggaggaggagggcagcgagagggcaacgcgctgaagacggcggtggtcgtgaccggcggcctcgtcctcgcctggttcaccatggagtccgcgttcaagcccttcctcgaccgcctccacggcgcgctcacccgcaacaccgaccccgcgcgcgaccccgacgaggagaactccgctgccccggcggacagggccgtcgaggagcccgccgcggcggcggccccggtggaggagggcgagggcaagggggtggagctggaggagaaggtgaaaggaggagggagggagcggcgcgcggccgtggcggtggaggtggaggtgcggaaaagccgcggcgttgttgtcttgcgtcgtcgttgtggttgtcgttcgtgtttgggggggagcatagttcattggggccttgcaagatgattgaggggaggaggcactccgttgacatcccgatttcgagggctctactggccgtcatgaggtccagatctctgagggaccctgagaccaactcgctggccaagttctcggcgaagaagaccatctgggagggttgttctctcgaggaagatgacctggaggggagcaattatgttttgtgcttcccaatcttgtcctgaatgatgcaaaattttcaattctaataccattatctgcacctgtagtactcatctcagcctacctgtgtgcttgcgttagtttctagtgacaattactgctgctcagctaatatgtagtacttttttgtgggtgcacttgttccccttgaagctgcttgcgtgtgctattgataagaaaattttagtag

SEQ ID NO: 7979 - DNA, 692 bp, Oryza sativa
  ref <308>: DATABASE ACCESSION NUMBER: AK105327
  ref <309>: DATABASE ENTRY DATE: 2002-08-28
atttctaccccttcctccccttcgcctccctctccgccgccgccgccgccgccgcagccatggcgacgcggcgatgcctcctccgcctcctctcgcgccgcctcctcgcccacacccctcaacccgcgttgctggcctcgatcgcgacgcgaaccctagcctccttggccaagcccctcgtgccgcaggcatcccgcgtcctcgcctccccccgcctcttcccctcgcgctgccactacgcgtcgaaccgatcctccggcgacgaggaggagggggacgacgacgatcactacgacgaggaggggagcggggatgagtggggggaggaggaggaggaggccgtggcggcgaagccccccagcgggaagacggaggaggagaaggtggcggaggcggcggagatagggtacacggtggttggcccgctcggtgccgacgagaagcccttcaagccctacgagcccgtgttcgccgtcgtccagattggttcgcatcagtttaaggtgagcaatggcgactcgatcttcacggaaaggttgaagttttgcgatgtgaatgataagttaattttgaatcgagttctcatgcttgggtcacaatctcaaacagtcattgggaggccaactcttcctgatgctactgttcatgctgtcgttgaggagcatgccctagatgcaaaggttatcatattc

SEQ ID NO: 7980 - DNA, 1055 bp, Oryza sativa
  ref <308>: DATABASE ACCESSION NUMBER: AK105328
  ref <309>: DATABASE ENTRY DATE: 2002-08-28
acaaaagaggaaaggcttgcggtggatacctaggtacccagagacgaggaagggcgtagcaagcgacgaaatgcttcggggagttgaaaataagcatagatccggagattcccaaataggtcaaccttttgaactgcctgctgaatccatgagcaggcaagagacaacctggcgaactgaaacatcttagtagccagaggaaaagaaagcaaaagcgattcccgtagtagcggcgagcgaaatgggagcagcctaaaccgtgaaaacggggttgtgggagagcaatacaagcgttgtgctgctaggcgaagcggttgagtgccgcaccctagatggctaaagtccagtagccgaaagcatcactagcttacgctctgacccgagtagcatggggcacgtggaatcccgtgtgaatcagcaaggaccaccttgcaaggctaaatactcctgggtgaccgatagcgaagtagtaccgtgagggaaaggtgaaaagaacccccagtgggtagtgaaataaaaaaaaaaccagctcatcatcgccgcgacgccgccgccaccgccaccgacgccgcggccgccgccggaatgaggaagaaaagactagaagtaatgaacatggtagtccaaagttgaagaagtaatgttttatagttaaacctgacgatccattgcagacatcttgcgccgtcactcccgtcagctagtgcagaattgggagctcccttgtagtagtattacaggcattcaatctatttgtgccatctagtgcaaaaattgcgtctcttgccctctgtaacgctattttatcttggtacgtgggtaagcaaaagcttgccgtgataaaatacagcgaattattttattatcatgctgcgctttagcgggtttcgatctaaatataaaactacagctacttgctctatacaggaagttgggtttggctgtttgagttcctgttgtcaaccttagaaaactttagctgttaatatgtgtaaacgtgtatggattgtaaagggttcagaacatccttttattctaaaggtcccaagaacagg

SEQ ID NO: 7981 - DNA, 670 bp, Oryza sativa
  ref <308>: DATABASE ACCESSION NUMBER: AK105329
  ref <309>: DATABASE ENTRY DATE: 2002-08-28
tggtatcccgttcgcggtggcggcggcacatccatagctgccgacggcagcatcccgttcgcggctgcggcggcacatccgtagctaccgacggcggcatcccgttcgcggcggcggcggcgcatccgtagctgccgacggcggcaacccgttcgcggcggcggcggcgcatccttggttctctgggaagagctatcggtttgcctttctccccttcgcggcggcgcctcatccattcctctcgacaccgcctttttccccttgtccaaatcgtcgcgggacttcgatgcatgcgtgcgtgcgtgttcggccatggatgagtgaagcttacaatttcgggaaagtacaagaagatgtttgagatggatatgaagtacaagcacacaatttgttctggacgtttgataaatttgtcatgctcttgtccgttcctgtagtattggaggcattttataatggagtcattggactgtaatcaatcttggtgtgttttcctgtaatattacgttttcaagctgtgttttggtattggttacttctggaattgaagagatgagtttaatgacatggttgcagctagttttatatttctgtatgttttatggtacatgcaatgcttggtgatttctggaattgaagatatgatggatgtattgcaatttggagttgt

SEQ ID NO: 7982 - DNA, 427 bp, Oryza sativa
  ref <308>: DATABASE ACCESSION NUMBER: AK105330
  ref <309>: DATABASE ENTRY DATE: 2002-08-28
gtcaagatgttgcatgtattgaagatgtacttcacatgattattcgtgctctatcacataattcactcctatcatctttcttggagaaagtgaatccccttggtggctgttacatcttcattaatcttcttaagagggagttcgagccaattcgcctcttgggacttcagtttcttggagaacttctggttggagttccttctgagaaaaaaggaccaaaattttttggccttcctgtaggacggcctagatctatttctgaaaatctaaggaaaggcatgacagcagctgcagcacccaggcaagtgagatcaagcttgtcaatgagttagtgttgtcaaattgatatttttttcgtttcctactcccggatgatatgatatacattatataaaattcggttttggcttgttaaatcatttgcagc

SEQ ID NO: 7983 - DNA, 1182 bp, Oryza sativa
  ref <308>: DATABASE ACCESSION NUMBER: AK105331
  ref <309>: DATABASE ENTRY DATE: 2002-08-28
aagtccaagtgaccaaccatcatcaatcatcgctaagcccacctcggagatctcgagttcgatcgtcgtcgtcgtagctgtagaggtagttaattatctcgttttagatgagctcactgacggcggcgcagttccggtcgctgtttgagatggcaggaggggaggatatctcgtttctgtttggtgatgatgaggcggcggcggtggcggcgccggtggagttgcaggggaagagggggtgggaggaggtggatcaaggggaggggtctggggcggtggcggcgaagaggcagcggtcgccgacgagctcgagggagaatagtagcgggagtaatgagggtgggcaggaggaggtgtctgaggcggcggcggccatggcggcggcggtggggaggggtggggggaggaggctgtgggtgaaggagagggactcggagtggtgggacatggtgagtagcccggattacccggactcggagttcaggaaggcgttccgcatgtccaaggccacgttcgaggtggtctgcgacgagctcgccgccgccgtcgccaaggaggacaccatgctccgcgccgccatcccggtgcgcaagcgcgtcgccgtctgcgtctggcgcctcgccacgggggagcccctgaggctggtgtccaagcgcttcggcctcgggatctccacctgccacaagctcgtgctcgaggtctgcgccgcgctcaaggccatggtgatgcccaaggtggtgcgctggcccgaggccggcgacgcggcggccatcgccgcgcacttcgaggccatctccgggatctccggcgtcgtcggcgcgatctacaccacccacatccccatcatcgcgcccaagtccaacgtcgcctcctactacaaccgccgccgcgcaggcccgcgacgccatcgcccacaacctcctccacagcggcggcggcgcatccttcttctgatcaagcatcatcgccgttcttggtccgatcaacagcgataccaaacaaaccaacaaaaataaaaaagaaaaacaagattcagtttttaggtgtataggaggagcttctccattttttgtcggaaatggagcagtgaacagtttttcgctttatcgtcaggagggacaggaaagttcagagtcctagtagtctcaaagtaacattagtttcttggttggattttcgatt

SEQ ID NO: 7984 - DNA, 649 bp, Oryza sativa
  ref <308>: DATABASE ACCESSION NUMBER: AK105332
  ref <309>: DATABASE ENTRY DATE: 2002-08-28
aagttataaaaacttatataaaaaagaaaggcaataaagaatgaagatcgttcaatccaccgagttcgttgagatcccagataatgtggaggtgttcgttaagtcgcgcgtggtcacagttaagggcccacgaggcgtgttgaagcgtgacttcaagcacgcgcgcgtcgacatcacacgcttgagcaagaagaagctcaagatcgagaagtggttcggtaccaagaaggaggtcgccgccgtgcgcaccatctcgacgcacatcaagaacttgatcaagggcgtcatcaagggctacaagtacaagatgcgattcgtctatgctcactttcccatcaacaccgtcatcactgagaagggcgccgttgtcgaggtcagaaacttcttgggtgagcgattgatccgacgtgtcaatttgtacccgggcgtcacttgcgctcagtccaagaacaaggacgagatcatcttggagggcaacgatgtcgagttggtctcgcgctctgctgcgcttatccaacaatcgaccactgtcaagaacaaggatattcgtaaatttttggacggtatctacgtctccgagaggatcactgctgatcaagattaaaataattttgtttgtttatcaaataaattctgattaacatgcgat

SEQ ID NO: 7985 - DNA, 1678 bp, Oryza sativa
  ref <308>: DATABASE ACCESSION NUMBER: AK105333
  ref <309>: DATABASE ENTRY DATE: 2002-08-28
tcatgataactcgacggatcgcacggccctcgtgccggcgacgcatcattcaaatttctgccctatcaactttcgatggtaggataggggcctaccatggtggtgacgggtgacggagaattagggttcgattccggagagggagcctgagaaacggctaccacatccaaggaaggcagcaggcgcgctcatcatccgccccagggagaacaagacccaccccttcgagaagcccgcgcgagaagtcccccttattctcggggaatggtgggacgcggacccgatccaagtcatcagggaggctcagaggaccggcgccgcgccgaacatctccgacgcgtacaccatcaacggtcagcctggtgatctgtacaactgctccaaggaagagaccacggctgtcccggtgaagcccggcgagacggcgctgctgcggttcatcaacgcggcactcaaccaggagctgttcgtctcgatcgcgcagcacaagatgaccgtggtcggcgtcgacgcgtcctacaccaagccgttcaccacctcggtgctcatgatcgcgccgggccagaccaccgacgtcctcgtcaccatggaccaggcgcccacccggtactacctcgccgcgcgcgcctacgactccgcgcagggcgtggcctttgacaacaccaccaccacggccgtcatcgagtacgactgcggctgcgccaccgacttcggcccctccatcccgccggcgttcccggtcctcccggcgttcaacgacaccaacaccgccaccgccttcgccgcgggcatcaggagcccccacgaggtcaagatccccggccccgtcgacgagaacctcttcttcaccgtcggtgtcggcctgttcaactgcgagcccgggcagcagtgcggtggcccgaacaacactcgcttcacggccagcatgaacaacatctccttcgtcttcccgcagaccacctcgctcctccacgcgcactactacggcatccccggcgtgttcaccaccgacttcccggcgtacccgccggtgcagttcgactacacggcgcagaacgtcccccgctacctgtggcagcccgtcccggcgacgaagctgtacaagctcaagttcggctccgtggtgcagatcgtcctgcaggacaccagcatcgtctcgccggagaaccaccccatccacatccacggctacgacttctacatcctcgccgagggcttcggcaacttcgaccccaagaaggacgccaagaagttcaactacgtcgacccgccacagaggaacaccgtcgcggtgccgacaaacggctgggccgtcatccggttcgtcgccgacaaccctggggtgtggctcatgcattgccatcttgacgtgcacataacctggggcctggcaatgacgttcctggtggaggatgggtatggcaaactggagactctggaggcgcctcctgttgatcttccaatgtgctagtgatcagcattcggcagatgatgatactgcgttaagaatacaaaatcccgttcatgtcgtattccaaattgatgctttttgggggtttattttgtgatctccagtactaggggttgatttttcatcttgatttgagctttcccctgtaaagttaagagtttttatgtgatttctatgcattattttggaataaatcctttttgtagc

SEQ ID NO: 7986 - DNA, 1725 bp, Oryza sativa
  ref <308>: DATABASE ACCESSION NUMBER: AK105334
  ref <309>: DATABASE ENTRY DATE: 2002-08-28
gacccacacaacccgcaaccccacatctctcagcccccgaccccacttccgatctccacccccatctcgccggcgatgccgccgccgccgtcggccacggcggggcggaggtccccattctccgccctcctcctctacgtcaccttcgcgctcgtcatcctgctcctcctcacctcctactcacccagcatcccgcaccggggccgcagcctccaccgccgcctcaagctccaccccaggaacccctccctctccggggccggcgcgggggcacccaccggaggaaacggggctccgcagaagcagcagaaccaccaccacgcggcgcccttcgacccggagatcgcggagctggagcggcggctggaggacaaggagtgggagcgcgagcactaccgcatcctgcacggcgacggcggcggaggggaggcggacgagcacatttgggttccgggaggagttcctcagggaggacgaggacttcatcaacgacgacgagctcaccaggtggaacctcgagcagtccagagccgaccagctccaccgctccgctcgggagatggagctctacgacaagaatggcgacggggttgtctcctacggggacttccgggctcagcacaacgaatcgagtggagaggttaattcgctggggttcccatggtggaaagaggagcatttcaatgcttcggatgcagatggccatggtttccttaataaaaccgagtttaatgacttccttaatcccagcgattcagagaatccccaaattatcaatttgctctgcaaacaagaaataagacagagagacaaggatggtgatggaaagctaaactttgaagaatattttcatgggctacatgaccatatacatggttatgattacgagaacgcagatatttcccatattgggaacaatacagtagctaaggagcggttttccaaacttgacaaagacagtgatgggtttatttcagagcacgaactagaacctgttcttgataagctccatctttcagaacgttattatgctagacaacaagctgcccatgctatttcagaggctgacaaagatcatgatggaagactaactttggatgagatgattgagaacccgtatgcattttatggcagcgtcttccttagcgacgacgaagactattttcatgatgaattccgctgaggtgtctgcagattgttggtgttgcaagtatggtttgcggatcgatccaagatgctttcaccatcagactgaatgatctaggagctgctaaccacacaaaaagagaacttcagctgtttggtaccctagagttctttctatcaggtactcaggtggagcaccaagctggctaatgccagcgatattaggttacatacatgccaacttgcctgcctttatttagggtgagccgctaacctgacctgacatatgttgtgtattatctcatcagttttgtaaaatgcaatggatggagtctaggagagcaatcatagtagaatggacatgaccagaccagtgagctaattgtgcctttcttctttctttttttctgaagtgtgagctaaattatgccttccttgttgaaacataatgactggattgctgatggcgctccgaccgacagttttcctcggcgcatgagtgcgtcgtggacgtggaatgatggaattattgtagttgcgtcgatcacatggaaatgcattattcgggacagtctaccc

SEQ ID NO: 7987 - DNA, 975 bp, Oryza sativa
  ref <308>: DATABASE ACCESSION NUMBER: AK105335
  ref <309>: DATABASE ENTRY DATE: 2002-08-28
atcacgccaagacgtactccctccttccattgttacacgcgttcacaaacggccagcgagacgacgtcgtcgatcggcgaagctagggtgggtgcgctgcgcgcgtggcgccgccgcgagagacgatcaggccgggggagcaatgtaccaggcgatcccgtacagcagcacccggccgtggctcaggccggagccggcggcgagcgtggtcgacgtcgtgaaggtggagacgacgacggccgtcgcgggtcggggcggtgaggcggaggtcgtgggggaggaggaggcggcggaggtgcggagggcggtggcggagagcccggtgctggtggtggggaggcgcgggtgctgcctcatccacgtggtgaagcggctgctgcaggggctcggggtcaacccggccgtgcacgaggtcgccggcgaggccgcgctcaagggggttgtgccggccggtggggaggccgcggcgctccccgccgtgttcgtcggggggaagctcctcggcgggctcgaccgcctcatggccgtccacatctccggcgagctcgtgcccatcctcaagaaggccggtgccctctggctttaaatcaccatcatcttccttctctccttccaattttttcttcctttcttcacaacatcgtgccatcgtggttcaatcctggccgttggattcggttttacatcgcggcggatttcctctaggatatttttcctcctccttttccgtagggtgtgctaagctttgagaaaaagaaccagagagagctaaagctaatgttgctagttaatagtagtaattcatttagcaaaatatatcttcgtgcgtgcgtacgtgatgatgagtattttactccccaccatgtgaatacggagcgagagaggaagagggacagtgacatttgccacatctgtacagttttgcatttctgaattaattaatgagaatgagacgttcattttgcccccatttcc

SEQ ID NO: 7988 - DNA, 373 bp, Oryza sativa
  ref <308>: DATABASE ACCESSION NUMBER: AK105336
  ref <309>: DATABASE ENTRY DATE: 2002-08-28
ttatgctagctccaacgaaagattcaagaaggagctgaatggcattcagttggaagtgcaggctactgacgccggcgaaatcagtctcgatgcgctcaaagatcgtgtgaaataagcattgccatgcctttcatgatcttgcaatatggacttgtctattatggatttgtgtgtcactataaatttggtagtgtgagactgcttgatggtttgtgggtttgttcatggaaccatggagatatggctctatcctgtatttcgttgttgcgctcagaatgtatgggcctgtgatgcactgttccaagtttaattgagatgtgtcaatgttcaagttacagaataaattgctgatatgttctcagttctcatggac

SEQ ID NO: 7989 - DNA, 1764 bp, Oryza sativa
  ref <308>: DATABASE ACCESSION NUMBER: AK105337
  ref <309>: DATABASE ENTRY DATE: 2002-08-28
gtgtcctcttttctctctcgattgattccacgcgagtcgtcttcttcttcttcttcttcttcttctcgccccccacttgttcatggattccaaccacatgatccatatgacgtcgtcgtcttcctagttcctcctcgtgttaatttttccatgcaattttagctgtctttatcaaagctaatttgagctctctctctctctctctctctctctattctatttgtttccttgctctgctctctgaatttcttctcttcttccttctaccttcttaatttgcctctctgaatcataccatctcgtttctactccatgaacagctttagcatcttgtcactgctcactgggattaaaagtgtctccaattagtagagttcttggtcttttttttcggatgctactctccaaagatttggttcttggtgtttttaatcagcaaggaggcctcctctcaggtttaatttgctagcccatcagatatggggtgcttcgcgttcaagagcaaggccaagaaccagcgggcggcggcgtcgggggccaggtcgccggcgccgacgtcggacgggcagaagagcaaggcatcatcggcgtcgacgccgacgaggagcatccaggagctgtcggacgagaggggcgcgcagcggctgcgggtgttcgacctcgacgagctcagcagcgccaccaacggcttcagccgcgcgctcaagatcggcgagggcggcttcggctccgtctaccgcgccttcttccgctccgccgccggcggcggcggcggccgggtcgtcctcgccgtcaagcgcctcaaccagcgcagcctgcaggggcacaagcaatggctggctgaggtccaattcctaggtgttcttgagcacccgaatctagtgaggcttgttggctattgtgcagtggattcagaaacaagcaagcacaggctgctggtctacgagttcatgcccaacaagagcctagatgatcatctgttcaaccgagctcatcctcccctctcgtggagattgaggctgcagatcatgatcggcgccgcgcggggcctagactacctccatgaaggcctgcaagaagttcaggtgatatacagggatttcaaggcagccaatgttcttcttgatgccgatttcaagccaaaactttcagactttgggctagcaagagaggggccaactgaaggaaagacacacgtctccaccgcggtggtggggacgcacgggtacgcggcgccggactacatcgagacggggcacctgacgaccaagagcgacgtgtggagcttcggcgtggtgctgtacgagatcctgacggggcggcggtcgctggagcggagccggccggcggaggagcagaagctgctggggtgggtgcgccgccacccgccggagagccagagcttccggtcgatcatggacccgcggctgggcggccggtacccggcggcggcggcgcggcaggtggcgcggctggccgaccgctgcctcgtcaagaaccccaaggagcggccggcgatgagggaggtcgtcgaggagctcgagagggtgctccagatggagccaccgacgacgacggcggccgacaaggacggcgaccgccgcctgccgccggcgaagaggtgacgtcagatcagtcaccggaggaggctgcggtcaacgacggtcaaccagtgcgtgaggaacaaattgtggagagatcgatcattgattcatttgtattgtagagagagatgatgatcaatgcgaataatttggagcatgc

SEQ ID NO: 7990 - DNA, 1246 bp, Oryza sativa
  ref <308>: DATABASE ACCESSION NUMBER: AK105338
  ref <309>: DATABASE ENTRY DATE: 2002-08-28
atatgctaacaagattttttttagagacgtacccaacatccacaaagctagctagctagatcctcctcttctctgcactctgctagagcaagctcgatcgatcgatcagtgatatttccccttatccaaatccagcacaaaccaacaatatccatggaggccgtagcagtgcacgccagcttctcgtcctactcccctccggtggtcgccggcggccgcgacgacgccggcagcagcagcagcagcaggagcatgtcccgcctgccggctcgcgtcgccggcgccgtagctcgcggcatcgtcaccttcgtcttcgccacagtgggcacgatcctgggggcgatcaccggcgggctgatcgggctggcgacggagagcggcatggtgcggggcaccgggatcggggccatctccggcgcggtggtcgccatggaggtcgtcgactcctccgtcgccatgtggtgctcccacgactccgggatctggagcgttctctacgtccttgacgtgatctggagcctcctgacggggcggctggtgcgggagaaggtggatccggcggtgcagaacgcggtggacagccagatgaacgccgccgacgcgcccttcagggagagcgcgccgacgctggcggagatgttcgacaccggcatccccggcgtcgccgccgccgccacgggcatgccggcggacgccatcgccgcgctcccggtcaccacgttcgccgccgccgccggcggcgacgaccgcgccggctgctccgtgtgcctccaggacttggaggacggcgagcgggcgcggaggctgccggagtgcggccacacgttccacctccgctgcatcgacagctggctgctcaggcacgcgtcgtgccccctgtgccggcgcacggtggtcgccgccgccgtcgccgtcgacgacgtcgtcgtcggctgagctggcgcgagctcgcatctggttggctcgttcgtggttaattaggcttaagctagaagattagtgagaagggcgtgcagtgcacggcacgccgccggcgacggcgtgaggatcacgactgacgtgcgtgtgtgtacctactacctcaccttcttttgataccttgattcgttttggcgtagtacatatgtgtagcggatacttgcattatactagtatatacacacacacttgtatgtattgtagatttatatacttgtacatggagaccttgtgattaacataatagagagatccagattttgtctct

SEQ ID NO: 7991 - DNA, 707 bp, Oryza sativa
  ref <308>: DATABASE ACCESSION NUMBER: AK105339
  ref <309>: DATABASE ENTRY DATE: 2002-08-28
aaaaaatcgtcgcctcgcctcgtccccaattgagcaaaccctagccgccgccgccgatcaatctcctagctgctgcctactatggcgatgcgctacctcgccggtaagctgcgggcccccgcccccgccgccgccgctctccgtcgccctcgatccctctccgccaacgcctcccagggaggacgcagcaatgcaactacagagaatgttgcgaggaatatggatggtgatctgggttgggtacgggaagaaatagctaaacttgaaaagttaagactggaaatcgaggagacaacaaggtacaacaggctccacaagcggtgtttaattgggtctgtgtttgctgggttcggccttggaggtctcgcttgtgcctggtatactcgtagctacaggaaggccctcaaggagcattttgacaacccgatcgtttggatgccgccgtattcaacatcttcgcctgagtagcctgggttggggatccagctcacttatccttttgttgccatgtaataatgtttgactctggcgtatggcatgtgatttggggtaatgcttgcaagagctagctagcgcacactctagcttacagtatgtgcttgtgccgtgttatgttagaccaattaactcttatgtaagaccaaatgaagtcgttttcacaaacagcttgtggctatgacatatttatgctgggttaagttgctgct

SEQ ID NO: 7992 - DNA, 471 bp, Oryza sativa
  ref <308>: DATABASE ACCESSION NUMBER: AK105340
  ref <309>: DATABASE ENTRY DATE: 2002-08-28
attcccctcccctcccctccctccccttcccctctctagaggggcggcggccggccaggcgggaggggcggcagccaagcgagctggcgcggcggcctgcgcgtgcagaggccgagagggcaggggcagggagggcagctgagttatgagcgcgcggagggggaggccggtggcgccctcccctctctgggtcggcgcgcggaggcgggagccggcgacgccctcccctctcccggcagcgccggatttgttttttgtttttttttcaatctgtgatttattggatctgatctgtgatatacgtgatattggatctgatctgtgatgtatttgagttgtgatgtattttttttaggatttgtgatgtattttttgtttgagaatttgtgatgtgatgtatttgtgatatgtgatgttatttgagttgtgatgtattttttctaagatctgtgatgctacttaaatttgtgg

SEQ ID NO: 7993 - DNA, 1448 bp, Oryza sativa
  ref <308>: DATABASE ACCESSION NUMBER: AK105341
  ref <309>: DATABASE ENTRY DATE: 2002-08-28
aatgacggtatctgaggaataagcatcggctaactctgtgccagcagccgcggtaagacagaggatgcaagcgttatccggaatgattgggcgtaaagcgtctgtaggtggcttttcaagtccgccgtcaaatcccagggctcaaccctggacaggcggtggaaactaccaagctggagtacggtaggggcagagggaatttccggtggagcggtgaaatgcattgagatcggaaagaacaccaacggcgaaagcactctgctgggccgacactgacactgagagacgaaagctaggggagcaaatgggattagagaccccagtagtcctagccgtaaacgatggatactaggtgctgtgcgactcgacccgtgcagtgctgtagctaacgcgttaagtatcccgcctggggagtacgttcgcaagaatgaaactcaaaggaattgacgggggcccgcacaagcggtggagcatgtggtttaattcgattcaaagcgaagaaccttaccagggcttgacatgccgcgaatcctcttgaaagagaggggtgccctcgggaacgcggacacaggtggtgcatggctgtcgtcagctcgtgccgtaaggtgttgggttaagtctcgcaacgagcgcaaccctcgtgtttagttgccactatgagtttggaaccctgaacagaccgccggtgttaagccggaggaaggagaggatgaggccaagtcatcatgccccttatgccctgggcgacacacgtgctacaatgggcgggacaaagggtcgcgatctcgcgagggtgagctaactccaaaaacccgtcctcagttcggattgcaggctgcaactcgcctgcatgaagcaggaatcgctagtaatcgccggtcagccatacggcggtgaatccgttcccgggccttgtacacaccgcccgtcacactataggagctggaagcgaaactatggcgaacgcggggctgcgcgcgtaccgggaggtgctgcggctggtgcggcggctgccggcggacgcgcggccgtactacgccaagtacgcccgcgagaacttcgtcaactaccgcgacctctccgctgacgacgacctcgccgccctcctccgccgcgcctacgcccactcctcctgggtcctctccaagtactcgatcgacgcggatgctgcggcggggcggctcaaggaggtgtgcggcgccgagggcggagcgtgagcacgcgtgcgcgcgaggtgttcgacgaaatgcttcgccgcgtcatgccagcgtcagttagctctaccccgttgtttttacttgccttgctagcggttggcgggcatttggacttcttgttttttgcaacagtttagttgatagttgataaaaatgtgtggggaataagttgaatactctgcttctgcacaccgtattttagtttgatccctgctgccgcctgcctgtttc

SEQ ID NO: 7994 - DNA, 1638 bp, Oryza sativa
  ref <308>: DATABASE ACCESSION NUMBER: AK105342
  ref <309>: DATABASE ENTRY DATE: 2002-08-28
ctcacccaaaagcccatccagaacctcccccgacatctagggttttcgccgccatgggttcggccgcctccgccgccgcgcctcccccgccgcccacagcgcagccccacatggccgcgccgccgtacggggccggcctcgcggggatcctcccgccgaagccggacggcgaggaggaggggaagaagaaggaggtggagaaggtggactacctcaacctcccctgccccgtgcccttcgaggagatccagcgcgaggccctcatgtcgttgaaacctgaactttttgaaggattgaggtttgacttcactaaaggattaaatcagaagttctcactcagccacagtgtttttatgggttccttagaagttccatctcagtcaactgaaactataaaagttccaacatcacattacgaattcggtgccaattttatagatccaaagttaattcttgtaggaagggtgatgacagatggaagactgaatgctcgtgtgaaatgtgatctgacagatgatcttactctgaaaataaatgcacagcttactcatgagccgcattactcccaaggaatgtttaactttgactacaaggggacagactaccgagctcaatttcaaattggaaataatgcgttctatggggcaaattatattcagagtgttacgccgaacttgtcaatgggaactgaaatattctggcttggccaccaaaggaagtcaggaattggttttgcttctcgatataattcagataaaatggtgggtactctacaggttgccagtactggtatagttgccttgagctatgtccagaaagtttccgagaaggtttcccttgcgtctgacttcatgtataatcacatgtcaagggacgttacttccagctttggttatgactatatgcttaggcagtgccgactaaggggaaaatttgactcaaatggtgttgttgctgcatatttggaagagagattgaacatgggagttaattttcttctttctgcagagattgaccattcaaagaagaactacaagtttggttttggaatgaccgtaggagagtaaaatatgttaactggaatggtcgtgacttgtgagaggacatgtggtacttctgcggttggctgtatgccccttggaaggatgttcacatacttcaagcttcgtgttacgagtgaccaggttcttgcccttctgagttgtgaatgggaatataggaacgctgttgctacttttacagtctttttttggcgtgatggaggttgtctcattttggttgctagataaaaagggcattaggggagggtagtacatgattctttgttcaatcttggatggagcaagctgaatagtgttaataatgttgtactgtctggcaaaattttaccccgagtgtccgacgctcgtcctttttgtgtaatagtaacaccttgcacgagctgcagaagatagcatttaaagtcatctcatgtttgatgtcctcacgcgcatcctatgttcataaattgtaagccatttgcggtctgctgaacaagttattgctaccgactgatgcacctatttttgttagtgtaatatacattttttgtttgttagtgcataaaaggtattaaaattgcgtacccgccttatgtgc

SEQ ID NO: 7995 - DNA, 1067 bp, Oryza sativa
  ref <308>: DATABASE ACCESSION NUMBER: AK105343
  ref <309>: DATABASE ENTRY DATE: 2002-08-28
acaagccaagccaaagccaagcgaaacagctgcgcgcagcatggcaaccacggcgtccccgttcctgtccccggccaagctgtcgctcgagcgccggctcccgcgcgcgacgtggacggcgcgacgaagcgtcaggttcccgccggtgcgagcccaagatcagcagcagcaggtgaaagaggaggaggaggaggcggcggtggaaaacctgccgccgccgccgcaggaggaggagcagaggcgggagcggaagacgaggaggcaggggccggcgcagccgctgccggtgcagccgctggcggagagcaagaacatgagccgggagtacggcgggcagtggctgagttgcacgacgcggcacatccgcatctacgccgcgtacatcaacccggagaccaacgccttcgaccagacgcagatggacaagctcaccctcctcctcgaccccaccgacgagttcgtctggaccgacgagacgtgccagaaggtctacgacgagttccaggacctcgtcgatcactacgagggcgcggagctgtcagagtacacgcttcgtttgatcggatctgatcttgagcacttcatccgcaaactgctatacgatggggagataaagtacaacatgatgtctagagtcctcaatttcagcatgggcaaaccaaggatcaaattcaacagcagccagatcccagatgtaaaatagaatgcgtgttgtaccctaaagagaaagcatgtaactatcaatgattttcccgttcaaagatgcccaatgtatattttgctcttccagaagagccatgagctagggtatttccgaactcaaatcgggttcatacaaaagcagaacattcacagtcgataataattttgtcgactccaacatggttacataaagagaagctgagcaaactgagggtattaccctgtcgtgaagactaaggaagggtctagcactctagtttcatggcatttccgttctatggtttttgctgagtattagcggtgtgaaaatgtcgatacttcaggtaatccaatcacattgaaataacaccactgctttattgctt

SEQ ID NO: 7996 - DNA, 1608 bp, Oryza sativa
  ref <308>: DATABASE ACCESSION NUMBER: AK105344
  ref <309>: DATABASE ENTRY DATE: 2002-08-28
aaaccagcagagcagcagccgccagcagcggcgaccggaggagagagcggcgtcgcggcggcggcggcgatatcggtgtcgtgcgggctggagtgggtggtgtgcctggggtgcacgcggtgggcgtggaagcggctcacctacatcggcgcctacgacagcgaggcgtggccggcggcggcgccgggggagttcgagcccgtcccgcgaatctgccgcgtcatcctcgccatctacgaggacgacctctccaaccccaccaagttcgcgccgcccggccgcgggtacgccggcgtcgacctcgccggcgtcgtcaagcgcgccacctacgagcacgtcggcaacacctgccctccctacatcgtctacgttgaccaccgccacaaggaggtcgtcctcgccatccgcggcctcaacctcacccgcaacgccgactacaaggtcgttctcatggacaacaagctcgggatgcagatgttcgacggcggctacgtccaccacggccttctcaaggcggcgcagttcatcctggagagggagacgaagacgctgcaggagctgctgcagcagaacgggcccgactacaagctcatcttcgcggggcactcgctgggctccggcatcgccgcgctcatgaccgtgctcgtggtgaacaaccggaagatgtttgggaacataccgaggagccagatacggtgctacgcgctcgcccccgcccggtgcatgtcgctcaacctcgccgtcaagtacgccgacgtgatcaactccgtcgtgctgcaggatgattttttgccaagaacgccaacaccgttggagtacatttttgggtctatattctgcttgccctgcttgttgtttatcatgtgcctgagagatacatttaagcaagacaagagaaaatttaaagatccaagaagactctatgctcctggtcgaatgtatcatatagtcgagaggaaattttgcagatgtggaagattccctcctgaggtgagaactgctattccagtggaaggccgatttgagcatattgtgttgtcatgcagtactacttctgatcatgcgattgtatggattgaacgagaatcagaaaaggctttagagcttatgaaaggaaatgagaaaccaacaactccgcctgcgcaacaaaagatggaaagactgcagagttttgaggaagaacacaagaatgccctcgagagagcaaagaccttagatgttcctcacgcagttgacttgtctgaagtggagatccaggagggttctagccctacgccgccctctgatactcatagtgaagccacctcagaagcaaaatctgcaggaagaaccagttgggatgagctgatgcataagcttttcaccagggacgaaggtgggaagcttgttgtgaaggaggacattaaggcgaggaacattgttattgagtaataccgaccctcagacttttgatctggtaattgattcttttgcgtgcatatacagaagttcaacatgaaaatgtttttttttttggatcgagccattttgcggtacgaaaactgtcccgtgtatatgtagacctatctgtgcattcttgaatccccaaagttttgttaatttacccgt

SEQ ID NO: 7997 - DNA, 566 bp, Oryza sativa
  ref <308>: DATABASE ACCESSION NUMBER: AK105345
  ref <309>: DATABASE ENTRY DATE: 2002-08-28
ctgcgaccaacgacaaacaccacaagctaagtaaggagtaagtagctttgcaagattcagcacaaatgggatcgttgggccctgctgttgtggtgagcgcgagcgcggcgaagatggccggcggcgggcagcagccgtcgacggagaggaaggagacgtcgtcggcgttcggcggcgggtgctgcggcggcggcttccagatgccgctgcactacccgcggtacaagaaggcggactacgaggcgatgccggagtggcacgtggactgcctcctccgggagtacggcctccccgtcgacggcggcgtggaggagaagcggaggttcgccatgggcgccttcctctggcccgaccagtactgaagcttgctgtgcttcgccttggagatattcagaagccgatcgagcagggtaccagtaactgcatgatgctaatttgattaggagcgctctatatatattaattaatctattatgtgtttttattatgctgagctcgtgttaatctgtcatccgcatataatggcgccatggaaatatggaatgatgatgttgtaaatatttcct

SEQ ID NO: 7998 - DNA, 659 bp, Oryza sativa
  ref <308>: DATABASE ACCESSION NUMBER: AK105346
  ref <309>: DATABASE ENTRY DATE: 2002-08-28
gtcgggggccttccccgggcgtcgaacagccgactcagaactggtacggacaaggggaatccgactgtttaattaaaacaaagcattgcgatggcattgatcagattatggcaactgacggttgctcagataatttaaatagtgatatgaacagtaaagaaggtggttgtgcaaattcttctttggttggtgctgacaactcagttgatgctaactttccagaaaatgggaaagttgctttactgaaaacaggttcgtcacttgttgacacaactgaacaggcagacagcaaagcatatcgtcgagagattagggatttgaacaactcagcagtggaatatacatcttcgagtaagcaacctcatgattctgcccagcataaggatgaacataatgtggatgtagcctctgaagaaacaactgcaccagagtgttcttgtgacaacgaatctgcctcttgcagcacaaccaataagaatgaagctgaatgtggtgttggtgctaaagaaattgttactagtagccttccatctgagacgcaaagaatcttaccaggtgaaaaagacaatgaagatgttgtcacgcggaatcatggcagaaggaagcgaatgaagatggttggcaaggcacatcaagggcaagataaccaaaatgaacag

SEQ ID NO: 7999 - DNA, 1005 bp, Oryza sativa
  ref <308>: DATABASE ACCESSION NUMBER: AK105347
  ref <309>: DATABASE ENTRY DATE: 2002-08-28
atcgctcgcagcacagtgcacaccgcaacgagcgacacggtagacatggcgacccgagccagagcaacgatccttctcctcctcgcggctgtcctcttcgccgcggcggcggcggcctcaggtgaggatcgccgccgcgagacatcactgcggcgctgcctgcagcggtgcgagcaggaccggccgccgtacgagcgggcccggtgcgtgcaggagtgcaaagaccagcaacagcagcagcaggaacggcgacgagagcacggcgggcacgacgacgaccgccgcgaccgcgaccggcgcggcgaggggtcgtcggaggaggaggacgagggccgcgagcgcggaagccggcggcggccgtacgtgttcggccggcgcagcttccggcaagtcgtccgcagcgaccagggctccgtcaggctcctcccgccgttccaccaggcgtccagcctcctgcgcggcatcaagaactaccgcgtcgcggtgctcgaggcgaacccgcgctccttcgtcatgccgacccacacggacgcgcactgcatctgctacgtcgcccaaggcgagggagtggtggcgatcatcgagaacggcgagaagtggtcgtacgccatccggcaaggcgacgtcttcgtggcgccggcggggacgatcaattacttggccaacaccgacggccggaggaagctgatcgttaccaagattctccataccatctccgtccctggccagatccaggcacgaacacgatcgatcaaatcactattcataaactctaatcaactctctacgcacaagtaatcaatcaatcaatcaatcaatgttgcagttcttcttcgccccaggcgggaggaacccggagtcattcttgtcgagcttcagcaagggcgtgcagagagctgctttcaaggcacgtagtagcattaatccgatcaatctgtcacttaagtacttgattaacatattggttatacagcaaggataataagttaataactaattaagttg

SEQ ID NO: 8000 - DNA, 693 bp, Oryza sativa
  ref <308>: DATABASE ACCESSION NUMBER: AK105348
  ref <309>: DATABASE ENTRY DATE: 2002-08-28
attggactcggaatcatccctctgcagccagagatgggattcagctgccgcttggtgatggctcgagctctgctcctgctcatcctagcagcgctagcttcggcctcgtcaatggctgccaagaagcaggggcgacagcctcgcggctgcggcggccacacctcgacgtcgccgacgccggagctggagctgccgccgtgctccggccaccgcggtcaagccccagcgccagtgttggggcttcttggccggaggggatcacctggagctccgcctccgccgcggtcacacccgccggtatcatacgtacgcccacagccgcgcccgtggccaccgccaccgccgcatccgcagcctccattcccgatcagcccggttgcgccgccgccgccaccaccgccgccaccgtgcttgtagtcgccgtcgttgcaggttcagtcggattcaggattttcagtcaggaaggaagctcaaatgatttgctaatctgtttcgggcacttcggaactattgtaaattctttgccttttgggggttcaagattttcttttgctcatttcaaacttgttcgttctagatcagctgatgtgtcatgtactcgtgtgcaatctctcaaaaatgttcatgtactcaggtgcaatctctgtcctcctataaatatgaaattggcacatcctgtgccggttcgttcag

SEQ ID NO: 8001 - DNA, 1536 bp, Oryza sativa
  ref <308>: DATABASE ACCESSION NUMBER: AK105349
  ref <309>: DATABASE ENTRY DATE: 2002-08-28
taaagccctcctccccttcccgtggcgattcgccggtccgtcccccaagtctagggtttatgttcgctttctccccacgcattcctcccacccgcggcgctccctgatctggtcaagcccaccagaatccgctctccagagttggtgggggcggagggggaagggaggggcggcggatgcagacggaggcgagagtggggatggccgccgcaacgatggacagcggcgccgccgccgcggccgctcggaggtactcgacgcagcagcagcagcagcagccgccgccgccgcagctgcaccaccaccagccgcagctcgggacggtgccccacctccttgccggcggcgtcgcgggcgccgtcagcaagacttgtaccgcgcctctcgcccgcctcactattctattccaggtgcaaggaatgcattcagatgtggctaccatgcggaagactagcatatggcgtgaggcatcccgcattgtctacgaagaaggcttccgagcattctggaaaggaaatcttgtaactattgcacaccggttaccttactcctcaattagcttttacacatatgagaggtacaagaacctgctacaaatgatacctggtcttgacaggaatggtggatttggtgcagatgttggtgttagattgataggtggtggtttgtctggaataacagcagcttcgatgacatatcccttggacttagtacggactcgtcttgctgctcagacgaacactgcttactacaggggcatatctcatgctctttacgccatctgcagagacgagggtgtcaaggggctctacaagggccttggtgccactttgctgggagtaggtcccagcatagcaataagcttctgtgtctatgagacattgcgatctcattggcaaatagagaggccatatgattcccctgttctgatcagtttggcttgtggaagtctttcaggaattgcatcctcaactattacatttccgttggatctagtaagacgccgcatgcagttggaaggcgcagctggaagggcccgtgtctaccaaactggactttttggaacatttgggcatatcgttcgcacagaaagtttaagaggattgtatagaggaattttgcccgagtactgcaaagtggtcccaagtgttggcattgtttttatgacgtatgagacgctgaagtccatcctcacggaactggcatcagatgattagctgtccaacatttgtcacgcttgacaattttgatgtttgggccagaataacacttgaggctgattagagcgagaaaaatgactttgtagcatatgttaggatctagatggtactaggtttttaagtttataatatcatggaatggaaggatattcatatggttacagattttcttgtagtgcatggtaaaagaagagccgctgccataggtcttcaaatttctgtccaccagttttagtgtatgttaacagtttcagttttgtaatgatacatgaggccattgtcttcagctctacaatactattgaaagatggcctcc

SEQ ID NO: 8002 - DNA, 1300 bp, Oryza sativa
  ref <308>: DATABASE ACCESSION NUMBER: AK105350
  ref <309>: DATABASE ENTRY DATE: 2002-08-28
accacttcgctcgccgcaccaaaccaccacccccagccagccatggcggccgccgccgaccacgcagccaccgccattgccatccccggcgaccctctcgccgacagcgcctgctccaccccgttcgtcagcgcgccgtccagcccgacgcgggagcgggagcgggagcaccacttcgcttctccccacggcgcgccgtgcttcttcagcgcgccggcgagccccacccgcggcggcggcggcggcgggtgcctcggtgacttcgacttcgacttctcgtcgcggttcccgtctccctccgcggcggcgatgtcgtcagcggatgagctcttccacaacggccagatccgcgctgtccgtctctccgcgatgctcctccagcctcagcctctggctccgctcgtcgacggcgacggccacgcgtcgcatctggcggaggaggatgcggcggcggtggaggaggatggtgcggaggccgacgagcgtggccgcatccgcagccggtcggttcgacggaaggcgcggtcgatgtccccgttccgcacgcgctggagggcgccttctcccgcgccggagaccgccgaggaggtcgaggcagtcgccacgccggcggcgtctcgctcgtcgtcgtcctcgtcgacggcttcctccgcttcgtccacctcctcacgaggctcccgccggtgggcgttcttgaaggatctcctccaccggagcaagtcggacggcggcaagaaccaccaccacgacaccgcgccaccgcctcctccgccaaagaggagcccgtccccgtccccgtctccgtctccggctccggcggcggcgagcgcgagaggagggagaggggcagcaacggggaggaggagcaggaggagatcggcgcacgagaggctgtacgaggcgaggagggcggaggcggaggagatgcggcggcggacgtacctgccgtaccggcaggggctcctcctcttcggctgcatcggcctcggctcccgcggctacggcgccgtccacggcctcgcgcgggggctcaacgccgccgccgccgtctcatcgcggtcatgactcgtgacctccatggctgctcccgccattgatgccgttcttggagctcggatgcatgctgctctgcttgctcgtctgtgtagtggcaaatgcagtgtggaaaaacctgcaaaaattgcatagaaaatagtagtagctagtattagaagtttgcttttgccttaatactagtttcttgtatggattttggtgatgtaaacaaagcttgttcatctggtgatggtgatgaccactc

SEQ ID NO: 8003 - DNA, 840 bp, Oryza sativa
  ref <308>: DATABASE ACCESSION NUMBER: AK105351
  ref <309>: DATABASE ENTRY DATE: 2002-08-28
gatccagtaggcaggcagtggcaatagcaatggctaggccttctctcccgtgtgccgtcgtggccgtcctcctcctcgccctcctccccacgccgtccaccgccggcgaccctgacctgctccaggacatctgcgtcgctgacctcacctcagccgtgaaggtgaatgggttcgcgtgcaaggcggcggtgacggaggacgacttctacttcaaggggcttgccgccgccggcaacaccaacaacacgtacggctcggtggtgaccggcgccaacgtggagaagttgccggggctcaacaccctgggcgtgtccatgtcccggatcgactacgcccccggcggcctcaacccgccgcacacccacccgcgcgccaccgagatggtgttcgtcctgcagggcaccctcgacgtcggcttcatcaccaccgccaacaagctgtacaccaagaccatctctgccggcgacgtcttcgtcttcccgcgcggcctgctccacttccagaagaacaacggcgacacccccgccgccgtcatctccgccttcaacagccagctgcccggcacgcagtccctcgccatgacgctcttcgcggcgtcgccggaggtgcccgacggcgtgctcaccaaggccttccaggttggcaccaaggaggtggagaagatcaaatccaggcttgcacccaagaagagataattaatttctttcagaattcgcacctctgcatttctgtccatggatgagctccgcaatgctgctccggcagcaggcacaaaattaaagcttgtaggtcttcattgtaataaaggcgtttgttcattataaaatccaatcatttgac

SEQ ID NO: 8004 - DNA, 1506 bp, Oryza sativa
  ref <308>: DATABASE ACCESSION NUMBER: AK105352
  ref <309>: DATABASE ENTRY DATE: 2002-08-28
acccaagcagattaagctaattaactaccatcaacacaccctaatccaaaggtgccaagcttgcaggaaacagtaagctagctagcagtctagcactgcttcatttgatcatggccaccattactgctgctagtcccagacccagtgctgctcctgcagccatggaagagaccagcaaggcgatgcctactagcgagtggcctgccgccagcggcggcaatgcgtcgccgccggcgaggtcccggccgtcgctgctggtcatattcagcgcgtgcctcgtcctctcggcgccggcgggccgctcctcctccgcgtctacttcgtgcacggcgggacccggctgtggctgtccgccacgctccagatctccggctggccgctgctgctgccgccgctgtgcgtgtcgctctaccgcggccgcaggcacgggatcggcaacctcctcctcccgcggcgcctcgtcggcgccgccgccgtgctcggcgggctgtacgccgtgtcgtgcttcgtgtacgcgctggggtcgcaggcgctgccgctgtccacgtcgtcgctgctgctggcgacgcagctggccttcaccgccgtgttcgcgttcctcttcgtgggcctccggttcacgccgttctcggccaacgccgtcgtgctgctcaccatcggcccggcggtgctgggcgtcgggccgtcgtcggggaagccggcgggggagtcctccagggcgtactggacggggttctgcgaggccatcggcgcggcggcgctagccgggctggtgatcccgctcgtcgaggtcgccacggcgaggtacgggcgccgcacggggcccgcggcgagggtgccgcctccctacgcgacggtgatgcagatgcaggcggtgatgggcgcggcgggcacggcggtgtgcgtgctcggcatggcgatcaagggcgacttccaggcggtggcgcgggaagcggcggcgttcgggctcggcgcggccaactactacctcgtcctcgcctgggacgccgtgtcgtggcagctgctcaacctgggcatcatggggctcatcacctgcgcgtcgtcgctgctcgccggcatcatgatcgccgtgctcctgccgctctcgcaggtcctcgccgtcatcttcctccacgagaagttcgacgggacgaagggcatcgcgctcgtgctctcgctctggggattcgcctcctacctctacggcgagaaggcgcagaagaagaaggaggcgcagaagatgcgcgagcgcgagcaggaggtggcgctggcacagaagaccgcagacgtggagtcagcggcgccttagtttacaatgggattgtacgtgtctacttgggtgggtcgtatacatatttacgggtgtagtgaacatgtttctcagtgtagttttacagtacagtggcatgcataaattttgtacgagattgtttcaaattctgtatgacattgtttcattatatggtactagcacgcagaaaaagcaagtgctatagttgtatcaac

SEQ ID NO: 8005 - DNA, 647 bp, Oryza sativa
  ref <308>: DATABASE ACCESSION NUMBER: AK105353
  ref <309>: DATABASE ENTRY DATE: 2002-08-28
ctctctctccccccacctccgcttcctctctctcctctctctctctctctctctctctcctcctttccccctccttccccttccttccttccttcctccctccgccctgctcctctctcgggattcgcctccgttcatccgcccgtgcgggagagcctagcggagcagaagcaggcgcgcgcggcggcagcggcggcggcgaggagtaggaggaggaggaaggcgaggacgagggcgaggacgaggacgaggagggaggatatggcggcggctagggtttcgatcccggcggcggtgcggcggacgatccagaacatcaaggagatcgcgggcggccacaccgacgaggaggtctacgccgtgctccgcgaatgcaacatggatcccaacgagaccaccgataggcttctcaaccaagttgcactgtacggctggtggtttcactgtaggcgcagtggtttctataggatggatgcttccacctttgcaacatggaacttctagtgctacctgtagtgaaaatttgaagttgatgcacaaatgtttgtgtggaaattgaagccgaatggcctaccaaaataaagatgccatacatgtaaatcaaactaaacttggatagaatcatactgttctggagtatgaagcac

SEQ ID NO: 8006 - DNA, 582 bp, Oryza sativa
  ref <308>: DATABASE ACCESSION NUMBER: AK105354
  ref <309>: DATABASE ENTRY DATE: 2002-08-28
gtgtgctgcgcgctttatgctcacgctggtgataatttgtaaactggaaagcgacgtactgccactatttatgctggatgcgcgcttccactccgcacggccggaggcgtaataataatcaggttgagctccagcatccggggcacggggaggaggaaggagggatcgggggatccatggcggacaccggcggacggccggaggtgtcgctggccacggtccggtcgccgggccacccggcagcttctacgacggcagcggcggcggcggatctcggccacgctgacaccgggcaagagaagcccaccgtcgagcgcccaaccggcgaacggtgccgctccgatgggcgagtgcggcacggagtacaggggcctccccgacggcgacgccggcgggccaatgccgtcgtcggcacgcacggtttcgatgatccctgccctttgtacacaccgcccgtcgctgaaaagatagaaaagagagaaaaaaggaaaaagaagacagacatagaataagaataatagaatataaatagcagaggagtaaacagatagagaagtgaaagaagatgaagagaaatgagtg

SEQ ID NO: 8007 - DNA, 490 bp, Oryza sativa
  ref <308>: DATABASE ACCESSION NUMBER: AK105355
  ref <309>: DATABASE ENTRY DATE: 2002-08-28
aaaccaagctttggcctttggccccgggggctcggtggcctcggcgaaatccgccgaccttgcgcctctgtccgcctccgccgctgccctccgccacctcgggggaagggaaccgtcgggccgccgccggggttgtcggtgaggggggctcgctccagtcccccacaatcccaccgttccccctccgtcgtcgagatcttcccgactactacgagcggaggcccggcgcgcgcgcgcgatgccgccgaggaggaagaagggcgtcgccgccaagcagaagccgccggagccacccgccgccgacgcgccgctgcgggaccggctgaggtggctcaacgaccaggaatgtacggcgcctctaatccctattcttcatcccctttcacgaattttaggggtttttttttttttttggccttgtttatgtattctatagacccggccttgtaattactgtaagttgggggcaagattggttggttggttgtgc

SEQ ID NO: 8008 - DNA, 724 bp, Oryza sativa
  ref <308>: DATABASE ACCESSION NUMBER: AK105356
  ref <309>: DATABASE ENTRY DATE: 2002-08-28
aaaaaaaggtgaccacgagcacgagcgcgggcggaggagctcgggcgtgggcggggagggcggatctgccaccgtcgagccgcggggagggcagatccgccgctgccgggccgcgggaagggcgcctccaacctcgtctttcgggccgcgccatccaccaccaccggtacgtccgtctcctcctccttcctccctctcggcctctccctcagccgccgaatccgccacgggtggccacgagctcggacgcgggtgaggagggcggatccgccgccgccgtgccatggggagggcggatccatcaccgttgggccgcggggagggcggatctgccgccgccgcagggagggcgcctccaccgccgcctccaacctcgtcttctgggccgcaccaccaccacccgccgtcgcgtgcccgcctccgccgtgcggttcgaccggccctccgcggtgctcctgctcctgtccgcggcggagacgggcttgtgcaggccagggcggtcgccgccgccgaggcatcctgaggcatgaatcctagagagagagaacactgctgctgcatgcatggatggtttcagtgaagagcttaactagatgtgattatctgctgatgactttgtgggtgtaaatcagattatgtgttgttaatctgtttatgtgttgttgatgatgccaatgttgattctctgtatttggattgatgccaatattatgtattaattttg

SEQ ID NO: 8009 - DNA, 1377 bp, Oryza sativa
  ref <308>: DATABASE ACCESSION NUMBER: AK105357
  ref <309>: DATABASE ENTRY DATE: 2002-08-28
aaactccccaaactctccaaacccgcctcctacccatttcgctcgccgcctccgacgccgcggccgccgccaccgccacccatggagcccgcgccgctcgcctcgctgcaggaggagggtgagggggagcccggcgagtcgccgtcctccgccgccgccgccgtgccgccccgccccgccacgcaccactcgctccacaagtacgcgccgctggactggtcggcctacttcgacgaggagcgccgcgtcgccatccccgacaccgaagacgttttcaatgtgtacatggccagatcggaggggcctgtcgtgttctgcctgcatggtggcggctactccgggctttcgtttgctctagcagcaagtcgtatgaaggaaaaggctcgtgttgtttctatggatctgcgagggcatggaaaatcaaccacaagtgatgattcagatttgtccattgaaactctcagcagcgatgtcatagctgttttacgcacattgtatggagattctccaccagccattatacttgttgggcatagcatgggcggttctgtggctatacatgtggccgcaaagaaagttattcgcaatcttcacggtcttgttgttattgatgtagttgagggaacagcaatggcttcattgattcatatgcagaagatcttagcaaatcgagcgcaacatttccctagcattgaaaaagctattgaatggagtgtcaaaggtgggccactcaggaacattgattctgctcgtgtttcgattccatctaccttgaaatatgatgaatcaagggaatgctatacatatcgaactcctctcgaggaaacagaaaaatactggaaaggatggtatgaaggtctttctgaaaagttcttgtcttgtccagtgcaaaaggtcctattattagctggaactgataggttggacagagctttaacaattggtcaaatgcaaggaaagtttcaaatggtggtggttcgacacactggacatgccatacaggaagatgtgcctgaagaatttgcatcgcacatactaaatttcatagctcgcaacaaaataggtcctaatggtgttgagattcctggactgattaaaaaatggcagcattagacggaacggaccttgcgttccaatgttgacagtttttaggaaaacgatgaggcttctatctccaccggattgccatattttccacagggtagaaggtgttgcaagaagattggggatatcataggcacgagcgatctaggtttaaccattctgttgccgctcgccttgatgcatgtcatgagtgatttttatatgacacggcttgtgaattcctttcatggcaggttgtgagagtgaataaaatggagtaatttgactgctttc

SEQ ID NO: 8010 - DNA, 499 bp, Oryza sativa
  ref <308>: DATABASE ACCESSION NUMBER: AK105358
  ref <309>: DATABASE ENTRY DATE: 2002-08-28
actcccaattcccaaactcccgccgccgccgccgccatcgatggagtccgccccggccagccgcgtacgccgcgaggacgtggcccgcgcggtggcggcgctcctccggtggctccagcaccaccccaccccggcgccggagcccatctacctcctcgtcaccctcaagcgcgcccccgcccgccgcttcgagcacaccctccgcctcccgcgctcgccgttcccgtccatctccctcgtctccgaccgcctcccggcggacctgcccgacggcggcaacggcgaggcggaagacgcgaagaggaagagcgtggcggtgaaggagcaggggattgtgaagaggaggaagaagagtagcagcgtcagtgtgggcggtgatcagttgtaaacctgtactaaaatacttcagtgttgaattcgaattcgaattctgtctttcccttgcatttcgatgcttaattgatcgccaagaacaattcaatgaacgatattgcagggt

SEQ ID NO: 8011 - DNA, 1381 bp, Oryza sativa
  ref <308>: DATABASE ACCESSION NUMBER: AK105359
  ref <309>: DATABASE ENTRY DATE: 2002-08-28
aaaaccaacggcgcgccgccgccagacgaccggacagagtgctcgctcgctgctgtctcttcgagcttgctttgcgtttgcgttgcgttgctttgctcgatcgatcgatcgatcggtcactctctgtcttccccatatgctgaggtcagtgtccgggtccaactcgtcgaggggcatcgccgccgtggtcggcgtcggccccaggctcggctccgccgtggctcgcaagttcgcctccgagggctacaccgtcgccatcctctcccgcgacctcgagaagctgtcgcagctggcggaggagatcgcgcaggaggcgaaggcgcaggtgttcgcgctgcgggtggactgcgccgacgcgcggtccgtgcgcgaggccttcgaaggggtgctctcgctcggccccgtcgaggtgctcgtctacaacgcctgcgagccacccgccgacggcgacggcgacgcctccccgcgcccgactcccttcctcgccatctcccccgacgccttccaccgcgccctcgccgtctccgccgccggcgccttctactgcgcccaccaagttataccggggatggtcgagcggggcaggggcaccgtcatcttcaccggctcgtcggcgtcggtcaccggctacgccggctactccgatctaagctgcggcaagttcgcgctgagagggctgtcccagtcgctggccaaggagttccagccggccggcgtccacattgctcacatgatcatcgacggcgtcatcggcgaacccaggtcagggagggggaggtgcggcggcgagacggcgtcgtcggcgggggcggacccggacgcggtggcgcagagctactggcacgtccacgcgcaggacaggagcgcgtggacgcaggagatggacatccggtcgccgtcgctcatgtagtcggccggccgatcggggaggtggagaggcatgcactgtagctccggcggcggaatctctactgttgccaaggaaggaaagaagaaaaaaagaaaattcattgatcgtgtcatcgtgtggtgtggtgtgcgtgtgcgcggctgcggaccgggcatcgtgtccccgttccgcgtcgcatgtcttctttttttcgcgctgcgtgcgcgcgccgcttggcgcttcgcgcgcctaatttttagtgtgtggttgatgcatcatccgtccgccgtccatcggcagcatccagcagccggtgcacggggaagttgccgacgacggcgacctgcaaaaattcatgtgatttttctgtacggttttctataaatgtatagtagtattatgtctcgttttatgtggttttctgtacggttttctataaatgtatagtgtgtctcgttttatgcatggttacctgcacttgattgcatgaac

SEQ ID NO: 8012 - DNA, 726 bp, Oryza sativa
  ref <308>: DATABASE ACCESSION NUMBER: AK105360
  ref <309>: DATABASE ENTRY DATE: 2002-08-28
gtcttccccaaagactcgagacttctctacgcttctcctcgccgccgaaacgaagcaacccgtcgcctcgccgccgccgccatgtcggtgacgctgcacacgaatctcggggacatcaagtgcgaggtgttctgcgaccaggcgccgcggacggcggagaacttcctggcgctgtgcgcgagcggctactacgacggcaccatcttccaccgcaacatcaaggggttcatgatccagggcggcgacccgacgggcacggggaaggggggcacctcgatctgggggaagaagttcgccgacgagttcagggagtcgctcaagcacaacgcccgcggggtgatgtcgatggcgaacagcgggcccaacaccaacgggagccagttcttcatcacctacgccaagcagcctcacctcaacggccactacaccgtgttcgccaaggtcatccatggattcgaggtgctcgacctcatggagaaggcgcagacggggcccggcgaccgccccctcgccgagatcaggctcaaccgcgtcaccatccacgccaaccctctcgccaactaatcctatctactccatctagtttaaaatctttggaattctgattgcttttttctgtgtggatgtgttgtgttctgctgctatctgaatctttgttgcaagaacaccgtacaaactgagtctgtaactgatatcccaaaaagtgtttggcttcacgattgatgc

SEQ ID NO: 8013 - DNA, 1381 bp, Oryza sativa
  ref <308>: DATABASE ACCESSION NUMBER: AK105361
  ref <309>: DATABASE ENTRY DATE: 2002-08-28
acgcatctctccccccatcgcccatcgccaactcctgatccaatccctcctctcggcacccatcgcccccatccccaatccccgaccatcctctcactagatcccaatccctcctctgtcgcccctatccccaatccctcctctagctgcggttcttcgattcggcagtcggagatggcacgacggtcgaagatggcgaggtggcggtcggagatggcgcggcggcggttggagatggctacagcgtgcatggccagaaggcgcacactcaagcggagggtggcggaagcggcggcgaaagccgcagcgtaagtggagtctacagaggaccacgttcagcgacaagtagaatactggaggcgtgggttttgggtgtctctcaaaggcaagaacaaggatgaaagtagtgtggactcaccacatccatgtggtggaaggtgacgaggaggcgggtggcatggtggtggtgtggttggcgccgacggcatctacttcaccaccgagttggagcaacaagatggtagtgacgtctccgatgtggagcaacatcccgacggcggcgcccctcccgactccgagttacaagtgggtggtggagggcaccgtgtggagcggtgctcggcactaaggacatctacttcgtccccaagtcagagctgcaaggtggtagcgatgtccctgacttcgaagagcaagtgggtgctggggtgcctaacggagagcagcagctgaacaacggcctcttcaccgacttggacgatcaacagatggatgacgttgaagagccgattgatgtagaggagatggccatcctaggagatgatgatgacacagtggctggcgacgagggcatcgacgaatttgctgaaattcgtgaagattccaagcacggtactacgaaaatgaccatatactactactacttgctgggttttggcaataagtcctgacagcaagaaagaagccttgtgcatatgatgaaaagcgtcaacaaagccactcctctcccgatcagagcttgcaggttgagatcaagttggagggcagcattaccatattcttcgtcttgcacatcatcttgtcggagaccatgttcttcaccgcactcttcatcttcttgtagtgctaggttcagatctatgttcattgtggcctcgtgtatttgttgggttgtggatggatggtgttgagttctctcttgatggatgttgtggatggaggagagtgttttgatgcttaagtgtgctagcgctagtgatttttgagcttggttttgatttatgtaagcaggcaagccatgtgatttggcacgccttcagctgtaatatttggcgcttagcggttcaaattttgttttgtctatcgcttgtgattattgagt

SEQ ID NO: 8014 - DNA, 1275 bp, Oryza sativa
  ref <308>: DATABASE ACCESSION NUMBER: AK105362
  ref <309>: DATABASE ENTRY DATE: 2002-08-28
ttcaaattgcccaatgcaagaccaatattaggaggttggaggatgaacaagacatgatggccgacaagttgacagaactagcaaataagaaatcaccatatggtgatgtgtaccgtcgttatatggcgaaggaattttcagtggttgccattgcgcctcccattcgccaaaccaagcgtcatgtggagatgtctgcaacgaatcggtatccccatggtttatattctcttctacaagttgccaaatcgatttctttgatagatgatatttatgtctcctgccttactaaactgagctcctttgacaagttggaggactgcaagcttcgctcatgccatcacatgaagcatgttttagaatatgcatattccatggggcaatctctacaaaatgttcgagtgtctcagctccaaagtctaattcatttctacaaacctttggagtacaatgatacttcgaacttcgattccctgaagcacctgcacctggagtactgcccaagactagagcgcatcgtgccacgtgagtctgcactaccaagcctcacgacactcgacatcctattctgctacaacctcaagacaatcttctaccaacatccttgtgagcaacccatcaactatcagctccctatcctccaaaggatgcgcctccaggagttgccactactgcagcacctccgcgatgatgtcaacgccgccatatccgcaccggcgtggaaggagctccatgtccgcgggtgctggagcctacgccgtctcccgctcctccgccaagaacattcaagccaggcggtggaggtgagcggggagagggcatggtggcggaagctcatctgggacgacgactccaccatgcacagcgccagctataaatccaagcttcccctgccgtttgcctccttcaacgagcgcgccacggtgatgagctacctcaggtgaatcatggccgagctcatcaatccattctcagctttccatgcatccatgacatgccacgtgacttctcttgccattttggcaatgccctctgctagctagctcatctgccatatattcaccatgtgctagctaaacacctaccttgattcactacaacaacaaaaaaaacttaccttacttgacagtattccacctacacccattctagtaccatacatatgccacataccattatattataccgcccatcaatccatacatatttcacaatgcccatccactgcttccatccatgtatattgaaaaaaaaaagaaaataagaaaacttttctgc

SEQ ID NO: 8015 - DNA, 1391 bp, Oryza sativa
  ref <308>: DATABASE ACCESSION NUMBER: AK105363
  ref <309>: DATABASE ENTRY DATE: 2002-08-28
acccatcatcactactgcaccaagctagtctcaagtgttcaattagctagctctcttttgcttagccatgagtgcagcaatggctgcctttgccttcctactagtcatcgccatcgtcttccccctcgcatccgcattcccttcccctcctgtttcatggggccaacagcagctagaccctcacttctacgaccactcgtgcccacaagcacagcaaatcgtggcatctatcgtcgggaaagcgcattaccaggacccccgcatggccgcatccctcctccgtctccacttccacgactgctttgtcaagggctgcgacgcgtcgatcctactagacagcagtgcgacgatcatgagcgagaagcggtcgaaccctaaccgggactctgcgagggggttcgaggtgatcgacgaaatcaaggcggcgttggaggccgcttgcccacacaccgtctcttgcgctgacatccttgccctcgccgcgcgtgactccaccgtcatgacgggaggccccgggtggatagtgccgctggggaggagggactcgcgtggggcgagcgtgcagggctccaacaacgacatcccggctcccaacaacaccctccccaccatcatcaccaagttcaagctccagggcctcgacatcgtcgacctcgtcgccctcctcggtagccacaccatcggcgactcccggtgcacgagcttccggcagcggctgtacaaccagacggggaacggcctgccggacttcacgctggacgcgtcgtacgcggcggcgctgcggccgcggtgcccgcgctccggcggcgaccagaacctcttcttcctcgaccccgtcacccccttcaggttcgacaaccagtactacaagaacctgctcgcccaccgcggcctcctcagctccgacgaggtgctcctcaccggcggcaacccggccacggcggagctcgtcgagctctacgccgccgatcaggacatcttcttcgcccacttcgcgcggtccatggtcaagatgggcaacatctcgccgctcaccggcggcaacggcgaggtcaggaccaactgcaggagggtcaaccacaactactgatagatcgatcgatacccatcatcgtctatcattcgtcgtcgatctgctgcttttggttaataattaatttggtctagatggttcatcttttggtcggttatattattattagttgtcgattaagtaaaacactgttttgtcgatcgagatgtgagatttgttggttgtgtttaattgtgttattttgtttcttgaattgtttgttagcctcttagaggaaatttgatacgcttggtgtatcatgcatgctgttattagttggttcttgttaataaaatgagtcatgtttgtggctgatctc

SEQ ID NO: 8016 - DNA, 1782 bp, Oryza sativa
  ref <308>: DATABASE ACCESSION NUMBER: AK105364
  ref <309>: DATABASE ENTRY DATE: 2002-08-28
aaacaaaaagtttaattcgccgccacgcgctttgccggaaagccccaaaagcccgaccaccactgccgccgcgccgcctcctcctcctccgcctccgccgccgccgccgcccgccggccatctccgtcgatccaccgtccggcgagcagacagcagcccggcagatctgcccccaccacgggatcgaatcggcggggggaaccgaatcggggagcgcgggaggcggggagcttagtttgagctcggtcggcggcggcggcggcggccatggtgaaggagacggggtactacgacgtgctaggggtgagcccgaccgccaccgagtccgagatcaagaaggcgtattacatgaaggcgcggcaggtccatccggataagaaccccaatgacccgaaagccgcggagaatttccaggcactaggagaggcataccaagttcttagtgaccctacgcagcgccaagcttatgacgcacatgggaaatctggcatctcaacggaagggataattgatccagcagcaatttttgcaatgctatttggtagtgagttgtttgaagattatattggtcaactggctatggcatcaatggcttcacttgataatttcggtgaagatgaacatattgacacaaggaggttgcacgagagaatgcaggctgttcaaaaggaaagggaagagaaacttgcagagacactgaaaaaccgactgcacatttacgttcaaggaaataaagaggaatttgtccagcttgctcaagctgaggtgaccagacttagcaatgcagcatatggcactgttatgttaaacactatcggctatgtatattcgagacaagctgcaaaagaacttgggaagaaagcaatattcttgggtgttccatttgtagctgagtggttcagagacaaaggccatttcatcaaatcccaagtaacagctgcagcaggtgcaatagctttgatgcagttgcaagaagacttgaagaagtatcttagtgctgaaggccattacacagaggaggaactagaaatgttcatgcaaaaccacaaaaaggttatggttgattccttgtggaagcttaacgttgctgacatagaagccaccctatcacgagtctgtcaaatggtgcttcaagatggaagcgtcaggagggaggaactgcgtgctcgtgctaaaggactgaaaacattaggcaaaattttccagcgggttaagctcaacaatgatgagggggaagcatcggatatgaggaatatagataacatggatgacaatgacgggagctcccccgatacatcaccaagaagggaaccaccatacaatcctatccctaaccctcctcatgctcagagcccatatgtggaggccccacagtttggaggaacctattacccattcaatttcccaatgccaacagctccacctggtgcgcagagggatccaattccatgacaccatttaagcttgcatgtgctgttgttctgtgcaatattgctggtgaaatactagatcatttgtgtgatgcatcatttgtacctgtagtagagaacggaggtttagctatccttcgcaccatttattcggttgtacaatcagagactggtcaggtagcagccgtgtactgttgtgtacagttgttaacgctcgtgttgaggcagtagtaggtcagcattggtgtacatggtttggtgttaatctgcggcctcgttccgtttagcttgacgtgcatcttctatggaaaatgaagctgagaaataaaatcatgtttatagttttgggtgt

SEQ ID NO: 8017 - DNA, 1519 bp, Oryza sativa
  ref <308>: DATABASE ACCESSION NUMBER: AK105365
  ref <309>: DATABASE ENTRY DATE: 2002-08-28
acacacaagctaagcttagctcgagctcattcatataccttagcttagctaaagcctagctcactctcactctcactcttgcattgcattgcaatattgcaatattgcattggtcatgaacactcgaggcagcggcagtagcagcagcagcagcagcagccaggccagcctgatggcgttctcggagccgccgaagccggcgagccagccgtcgccgccgtcgtcgccgatgagcgagcggccgccgtcggggcgcagcaggcggcgcgcgcaggagccagggaggttcctcggcgtgcggcggcggccgtgggggaggtacgctgccgagatacgcgacccgaccaccaaggagcggcactggctgggcacgttcgacacggcgcaggaggcggcgctggcgtacgaccgcgccgcgctgtccatgaagggcgcccaggcgcgcaccaacttcgtctacacccacgccgcctacaactacccgccgttcctcgcgccgttccacgcgccgcagtacgccgctgccgccgccgcgccgtcctcggtgcagtacggcggcggcgtgggcgcggcgccgcacattggctcgtacggtcaccaccaccaccaccaccaccaccacggacatggcgcggcgtcgggcgcgtcgtcggtgggcgagtgctcgacgatgccggtgatggtcccggttgatccccaccgctccagcatgtcgtcgtcgctgctggacatggacaggaacggccacgacttcctcttctccggcgccgacgacaactccgggtacctgagcagcgtggtgccggagagctgcctccggccgaggggcggcggcgccgcggccgatcatcaggacatgcggcgctactccgacgccgacgcctacggcatgatggggctccgggaggacgtcgacgacctcgcgcagatggtcgccggcttctggggcggcggcgacgcggcggaccagctcggcgcctgcgggttcccggcgagcggcggcgccgccgacatggtcgcctcgtcgcagggctccgactcctactctccattcagcttcctctcccattgatcgagttgcaccgggcattgcatggctaatcacgcactttgcctctgagcgatcatgcatatatcatttcctgtctaccatgatcagatcgagttgatcttgatcaatctgcgtttgatcgatcgagcaagagatcgagtagtatagcagcagcagcagcagcagctagcagtagatcgaacaagaagagtggcttggcgccatttctagttaattaagtagagcttcttcaaatatgtacttaggcagatgatctctctctctctctctctctctctctctctctctctctcttctatattagcattagtacctacttagccatcatattcatgcatgcatgcatgatatattgcatggcacagcttgttaatttcttctagcatcttaatcaattaatccatgacctggttcaaaaaaaaaaaaaaaaaaaaaaaaaaaaaaacc

SEQ ID NO: 8018 - DNA, 852 bp, Oryza sativa
  ref <308>: DATABASE ACCESSION NUMBER: AK105366
  ref <309>: DATABASE ENTRY DATE: 2002-08-28
aaaccctccaaagtccaaacccctctcctcctcctctccaacgccataaaccacagagagggggagaagaagtggaagcgtgagccgccgcagccgcacgcgatgcagcagcagccgatgccgatgcccgcgcaggcgccgccgacggccggaatcaccaccgagcagatccaaaagtatctggatgaaaacaagcagcttattttggctattttggaaaatcagaatctgggaaagttggcagaatgtgctcagtatcaagcgcagcttcagaagaatctcttgtacttggctgcaattgctgatactcaaccgcagaccactataagccgtccccagatggtgccgcatggtgcatcgccggggttaggggggcaatacatgtcgcaggtgccaatgttcccccccaggacccctctaacgccccagcagatgcaggagcagcagctgcagcaacagcaagcccagctgctctcgttcggcggtcagatggttatgaggcctggcgttgtgaatggcattcctcagcttctgcaaggcgaaatgcaccgcggagcagatcaccagaacgctggcggggccacctcggagccttccgagagccacaggagcaccggcaccgaaaatgacggtggaagcgacttcggcgatcaatcctaagggctaagttggcctttcaggtcgcgacgaaaaacaaaaaaaaaacatgtaggcaacgactgagtggagaggggatcattcctgtgcccttgaacggtgagtggccgtgatcttcgcctgatgatggtcagtggttgttacatttacctgtgtttttgagactttcagtctggtacaaacgtagattgctgc

SEQ ID NO: 8019 - DNA, 822 bp, Oryza sativa
  ref <308>: DATABASE ACCESSION NUMBER: AK105367
  ref <309>: DATABASE ENTRY DATE: 2002-08-28
attgtgagagcccaaatcctggctagtttcattggtccaagtgctgagctactgataccaacaaccgccatcggagagaatgggcgtggacgacatcatcgccgagctgcgcgtgctgccggccaagatccttctcaagaagaagcccaagcagttccagaaggtggaggtgaaggttcggatggactgcgaagggtgcgagaggaaggtccggaaagcagtggaggagatgaagggcgtgagcagcgtggaggtggacgcgaagcagaacaaggtgacggtgacgggttacgtggagcaggaggaggtggtggggcggctgcggcgtcgcgccgggaagaaggcggagccgtggccgtacgtgccgtacgacgtggtgccccacccctacgcccccggcgcgtacgacaagaaggctccccccggctacgtccgcaacgcgctcgccgacccggacgccgcgccgctcgcccgcgccaccgaggaagaggagaagcttgcctccgccttcagcgacgagaaccccaactcctgcgccgtcatgtagtatagccattatagttagctagtcatgcacccatgcggccatgccatgtcttattgttttttttttttaagtgtgctgctttgttttgagcttgtagtctcaagtgtgtctgtgtgcagtctgttcgccgctacgctttgtacactgattattagttgggagttgtaggatgagtccctcgtggctgtcaaagttttgcctaaaatttttgtatgaaacgtgtttgagtacgatcgagatgagcaaatgtttctttggctcataatgctgctatt

SEQ ID NO: 8020 - DNA, 1337 bp, Oryza sativa
  ref <308>: DATABASE ACCESSION NUMBER: AK105368
  ref <309>: DATABASE ENTRY DATE: 2002-08-28
gtcagccagggccagccccctcgtcttccccttcctctctccactcctccaccaccaccggccgcctcgccctccccgccggccatggcgctcgtcctgcccgacatcaccgtcgccacgatcgaggatctccacgtcctcgccatgctcgatgagccgcgcttcatcgacctcgtctccattcccgccgtccgccgcgcagccgagttcgaggtcgccatcacgccgaaggtggactacgatgggtgggtctgcaacaagctcgaggatctccggcgcgtcaggcgcttcgacgacctcctcaccgacctccagaagaggatcctccccatgctcggcaacaaccccgacgacaaggcggccctccgcaatctccgtacatgcgggtacgcaatgtggagcgttcgtcaacatgctcacccctccctccacaacctcgtcgggttctactccaacacggtgacccggaaggctcgccaagctctggatccgtacaaggcctacacgatcaagcaggagtggctgcacgccatggcgcttcgggtggagggatcccggtctgctttcatgccgttcgacagcgactacgtgccaccatctccgcccatgcccaccatcgtcgtcagctcgctcgtcgatgtccacggcgtgcgcttcgccatcgacccgcaccgcgtcgagctcggcgccgtcgacgccgtccgcctcgccccggagtacctccacatcctcctcgagaaggtggagcaggagggatggatctgcccgacgctccccgctctgcgccacgtcgctcgcttcgccaacctcctcaccgatctccaggatcgcgtcctccccgggctcctcaacgaccacaccgacccagccgtcctacgcaagctccgcacctgcgggtgtgggatgaagaagctgcgtgccgtcgccaagggtcctctcctccgcttgacgcgcctcttcagcaactgcctcacccgccacgctcgtgacgcgctcgacgcccggaaggacttccgcatctctgccgattggatcgataagattgcagttcgcgtcgacaggtgtctcactataccacttcatcttcaccaccacctggaggacccgttcgttgatcatctccatgatctcccctgagttgagtgccaccctgatgtcgagttgtacagacctcgctaagtcccactaagatgtcgttttagtcgtacaaggatgaacctcccctgcgtcccgtcctagtcctaagatgtctttgagtcttacaaggatgaacctcccctgcgtcctaagatgtctttgagtcgtacagggatgacagtctgatgtctttcagtcgt

SEQ ID NO: 8021 - DNA, 727 bp, Oryza sativa
  ref <308>: DATABASE ACCESSION NUMBER: AK105369
  ref <309>: DATABASE ENTRY DATE: 2002-08-28
ccccctccgccgccgcaggacctcgccggcggcgagcagcggcagcaccacccgctcctcgcggccgccgccgccgcctccctcctcgccttcctctatctcccgcggccgctcctcccgctcctcctctcccccgcctccctctcctccctcctcgtcctcctctccctcctccgcctcggctccccgccgcctccccccgcggaggccacccctcctcctcctcctcctcctcctccgcccgagcgagccgtcccggaggccgccgatactcctcctcccccaccgccgccgacggcgccgacgccgacgccgcccgagctcccgagcgtgttcgtggagacggagttcgcgtcgtcgtgggcggcgaaagggcgcgcgctggaggtgatccacgaggagttcgaggcggagtgggggccggaggagatgggcctcacgtggacctccgactccgactcggacagctacagcggcagcgacgacgacgtcgacgactaccgcgacggcgacgggatgatcgagatcgagctggaggaggacaacctcatcgagatcgacatctccaagtgccggtgatgatggattgcttacctattttgcccggacaatcttattatcaggtcttcttctcttttttttttccttggggatttcttggtcctttgggtttggtaatttgatttctgacaaacaaattaaaaaaagtgtgctgattcggcgtgtg

SEQ ID NO: 8022 - DNA, 375 bp, Oryza sativa
  ref <308>: DATABASE ACCESSION NUMBER: AK105370
  ref <309>: DATABASE ENTRY DATE: 2002-08-28
gcatgctcaagctcggcctcaacatcgacgacgacgacgccgccgcggccgacgacgacgctgacatgcccgcgctcgatgacgccgccgccgaggagagcaagatggaggaggtggactgaattaaataagtactcgctgccatgtcgaaatgcatcatggtgccatggttgggtgtgtctgcgctgcacttcaacagtgtgtggtcgtgtttgcgtcgtgtcgccagtgttagacatgagtcttacgtaagtatatgtcgccagtgttagtatgttgcatttgcgttactcatgcgtacatctttctaagccatcgttgagaaagtagtagtatcagtattaaaaaatgatcgaattcctatgtctgaaactg

SEQ ID NO: 8023 - DNA, 1267 bp, Oryza sativa
  ref <308>: DATABASE ACCESSION NUMBER: AK105371
  ref <309>: DATABASE ENTRY DATE: 2002-08-28
acggtggtggaggggaagaaacaggagctactactccgccgttccggcagcagcgcagccatgcagcgctcaccggtggacaaaccgccgttcacgctgggggacataaagaaggccatcccgccgcactgcttccaccgctccgtgatcaagtcattctcctacctgctccacgaccttgccatcgccgctggcctcctctactttgctctggtcggcatccctgccctcccaagcatcctccgcctcgtcgcctggccgctctactgggccgcgcagggcagtgtactcaccggcgtgtgggtcatcgggcacgagtgtggccaccacgccttctcggactacttgctcctcgacaacctcgtgggcctagtgctccactcggcgcttctcacgcccttcttctcgtggaagtacagccaccggcggcaccacgccaacaccggctccatggagaaagacgaggtgtacgtcgcgaagaagaagtccgcgctgccgtggtacaccccgtacgtgttcggcaaccccgtcgggcggctggtgtacatcgccctgcagctcaccctcgcgtggccactctacctcgcgttcaacctgtccgggcagccgtacccacgcctcgtcacctgccactacgacccctacagcccgctgttcagcgaccaggagcgcgtccaagtcctcgtctccgacgccgccatcctggccgtgctgctcgcgctgcacaggctgacggcggcgtacgggctctggtgggtggtgcgcgtgtacggcgtgccggtgatgatcgtgggcgcgctgttcgtgctcatcacgtacctgcaccacacccaccgggcgctcccgcactacgactccagcgagtgggagtggctgcgtggctcgctcgccaccgtcgaccgcgactacggcgtcctcaaccgcgtgctgcacaacgtcacggacacgcacgtcctccaccacctcttccccagcatgccacactaccacgccatggaggccaccagggcagcgaggcccgtcctcggtgagtactacaagtttgaccgcacgcccatcatcgaggcaacatggcgtgaggccaaggagtgcatgtacgttgagcccagggagcgcgatggtatctactggtacaacaacaagttttagctacagacaggggatgagattaagatatgattataagttttatatacttgggtatgtcactgcttctgaataaatatggtgctggtctcacaataattaattaaggggaccggccaac

SEQ ID NO: 8024 - DNA, 849 bp, Oryza sativa
  ref <308>: DATABASE ACCESSION NUMBER: AK105372
  ref <309>: DATABASE ENTRY DATE: 2002-08-28
gaaaagcagtgaactgtgccgacatcgcccatctttgcacctccgtgacaggccacctcctccccaagtcccaagagatcgaagcaagcgaagttgctcgacgaatcaacggccatggcgagagtggaggccgtggtggtctgcctcctgatcattgccatggacgtcgtcgccggcgtcctcggcatccacgcggagaaagcccagcaccaggggaggcggctgaggatactgttcatcgagtgcaggcagccggtccggcgcgcctacgagctcggcgtcgcggcggccgccgttctggcggcgtcgcacgccatcgccaacgtcgtcggcgggtgctcctgcgcgtgctcccgcgaccgccgcgccacgcccaaccggcagatggcgtccttcgccctcgtcatctcgtggatcgtgctggtggtggggttggcgctgctgatcctgggggcgctgccgaacgccgagaggaaggcggccaagtgcagcctcccgcgccaccacttcctctccatcggcggcatcctctgcttcgtccacggcctcttctgcctcgtctactacgcctccgccaacgccgccaagcgggaggagggcggccgccacccttgatcgattcgttgcttctcatccatttctcctgcagaaatgggatgaagacgaatgtaggtggtgtgatttttgcttgatgtgcgtgaggtgatgggaacgattagatgctaattattagtgattagagcatgtaaaattatatcaatgtgcatgtaatgtactggtaagctagcgtcagtgtgcttgcagtggaaggaaaatcttgtaggaaatgcagaggttggtttcagtact

SEQ ID NO: 8025 - DNA, 813 bp, Oryza sativa
  ref <308>: DATABASE ACCESSION NUMBER: AK105373
  ref <309>: DATABASE ENTRY DATE: 2002-08-28
tagccaaaacactcccactctcactgactcacaccccgtcactcccctcttctcctcacctcgcctcgccgcgccgcgccgcgcgctgaagaggaggcatgaagcggacgagagcgcagcagccgaagctccaggaggggcaggacggcggcggcgcggccgggaacgccaacccgaagccgcagcggagggcgaagcagccgaggcagcccaaggcggcgtcggcggcagccaagaaggcggcggcggcggcggcggcgcgcgagtcgtcgtcgtcgtctgtgggggcgggggcggcagtgacatccgcggcgtcctcctcctgctcctccggagcggacatggcgcccaccgtgcccgacgtgtgtggcggcggcggcggcggcgcgggatacgaggccggggcggcgaccaccgtcgagtgggacctcgacggcgggctcagcaacgggttgtcgtggtggacgttcggggtggaggaggagaagctgctggggtggttccccttcgtggaggaggacttccgctgcctcggcgcccgcggcgacgccgagatggccttcgacgacgacatttggaggatccaccaaatctacgagatacccaattacgccgccaagtgatcgatcggattcatctttggttttttcccctagattacttggtagtaattgttgcgtggtacaggaatcaatgtcgagtgcgtagccaacaatgtgttgacgaggttagctagctggagtagctgatgatgtggtggcatctcaattcccagattgcaaattgctgcaattccaaatgccccttctttgc

SEQ ID NO: 8026 - DNA, 1501 bp, Oryza sativa
  ref <308>: DATABASE ACCESSION NUMBER: AK105374
  ref <309>: DATABASE ENTRY DATE: 2002-08-28
atgcaaaaaaactcccataaacccctcctcttcgagaaaatccctttttgttcaaccacgacgcgaattcccaagcaacccccccacacccagctgagtagctgacgcagcaccagcagtcgcggggaaagggacacgtctcgccgccccagcttcccgcctccctcccatcccgccgccgcggacgcgtccaagccacagcaacagcaaccactccgacgaacacctcgcctgcgcgatggtggcggcggcgctggacgcgatggcggggacgaggtgggggaggtggctggggctcgtgacggcggtgtgggtgcagtgcatctccggcaacaactacaccttctccaactactcccactccatcaagacgctcatgggcctcacccagctgcagctcaacggcctctccgtcgccaaggacgtcggcaaggcgttcggcctcctcgccggcctcgcctccgaccgcgtccccacctggcttctcctcgccgtcggctccctcgagggcctcctcggctacggcgcgcagtggctcgtcgtgtcccgggccgtcgcgccgctgccctactggcagatgtgcgtcttcctctgcctcggcgggaacagcacgacgtggatgaacaccgccgtgctcgtcacctgcatccgcaacttccgccggagcagggggccggtgtccgggttgctcaagggctatgtggggctcagcacggcgatcttcaccgacgtctgctccgcgctcttcgccgacgacccggcctcgttcctcgtcatgctcgccgtcgtgccggccgcggtgtgcgcggtcgccatggtgttcctccgcgagggggaggttggcggcggcggcgcggacgggcgggaggaggaggaggaggatgggtggtgcttcgccgcaatcaacacgctcgccgtcgccatcgcgctgtacctcctcgccgccgacctcaccggcgtcgggggaggcggcggggtcgtgtcggccgtcttcgtggccgtcctccttgtgctcctcgcgtcccccgccgcggtgccggcgcacgtggcgtggaagtcctggatgaagacgcggaagctcgcgaacgccgacgtcgaggaggcggaggagtgcgcgtccgccccgctcctcgtggcgaaggcgacggcggcggcggcggcggaggcgcgcggccccggcgagaagccggtgctcggggaggagcacacgatcgcgcaggcgctcatgtcgctggacttctggctcatgttcgcgtcgttcctgatgggcgtcggcacggggctcgccgtgatgaacaacctggggcagatgggcgtcgccatgggctactccgacgtctccctcttcgtctccatgaccagcatctggggattcttcggccgcatcgcctccgggaccatctccgagcacttcatcaagttcgtctccttctcccatccctttccccttccatctccgtacacaaaattgaaccgcaaaatccccagcgcttattattcc

SEQ ID NO: 8027 - DNA, 1034 bp, Oryza sativa
  ref <308>: DATABASE ACCESSION NUMBER: AK105375
  ref <309>: DATABASE ENTRY DATE: 2002-08-28
aagccatctctctatttttcctttttctgtccatggcggcagcaggggcaatgcccggtggccttctcctcacgttcctcctccttgctgtcgtcgcttccggcgcctacaatggcgccggcgagccgccggtcagccggagaagcttccccaaggggttcatcttcgggacagcctcgtcgtcgtatcagtacgagggtggcgcagcggagggcggcagaggaccaagcatctgggacaccttcacacatcagcacccagagaaaatcgccgacagaagcaacggggatgtggcttcggattcctaccatctctacaaggaagatgtgcgcctcatgaaggatatgggaatggatgcatacaggttctccatctcatggacaagaatccttccaaatggaagtctgaggggtggagtcaacaaagaaggcataaagtactacaataatttgatcaatgagctattatcgaaaggggtgcaaccgtttattacccttttccactgggactcacctcaggcgttggaagataaatataatggatttcttagccctaatatcataaatgactttaaggactatgctgaaatctgcttcaaggagtttggtgacagagtgaaaaattggatcaccttcaatgagccttggactttctgctctaatggctatgcaactggcctgtttgcaccaggccgttgttcgccctgggagaagggaaattgcagtgttggagattcaggaagggagccttacactgcatgccatcatcaactacttgcccacgcggaaactgttcggttgtacaaagcgaaatatcaggtcactgaagaatccctttgagcacttgcaattcatccatgacaatgagttaaatcaaagatctgcaaatttggttttgataatccatgcttagcatttagttccagttcggtcctggtggtagaatttgttagtacatccattagcaaattactttagtaacttcagctatctgtttaaaatatcacatatcatggattggattcctatcatatc

SEQ ID NO: 8028 - DNA, 1850 bp, Oryza sativa
  ref <308>: DATABASE ACCESSION NUMBER: AK105376
  ref <309>: DATABASE ENTRY DATE: 2002-08-28
atgtgataagctttgaatggaagccccggtaaacggcggcagtaactctaactgtcctaaggtagcgaaattccttgtcgcataagtagcgacctgcacgaatggtgtaacgactgccccgctgtctccgacatggacccggtgaaattgaattctccgtgaagatgcggagtaccaacggctagacggtaagaccccgtgcaccttgactatagcttcgcagtgacaaccttgatcgaatgtgtaggataggtgggaggtggtgacacacaacgaccaatcctgaaagaccactctttcgtctaaggatgcctaaccgccgcaccgatcattcggggggggcgggacactgcgaggtgggtagtttatctggggcggatgcctcctaaagagtaacggaggtgtgcgaaggtaggctcaagcgttgattctgctcgtgagcgtaatggtataagcctgcctgactgtgagaccgactggtcgaacagagacgaaagtcggccatagtgatccgggagtcccgtgtggaagggctctcgctcaacggatcaaaggtacgccggggataacaggctgatgactcccaagagctcttatcgacggagtcgtttggcacctcgatgtcgactcatcacatcctggggttgaagaaggtcccaagggttcggttgttcgccgatgaaagtggtacgtgagttgggtttagaacgtcgtgagacagttcggttcctatctaccgttggtgttaaagggagaactgcgaggagccaaccctagtacgagaggactgggttgggtcaacctatggtgtaccggttgttatgccaatagcagcgccgggcagctaagttggtatggaagaactgctgcgccgcgggaaatccttctctatacaagttctcgtacgaggtttttgaacagaacttcgataggcgagaggtgtaagcaccgcgaggtgtgaagcgatctcgtactaaacgaactatctcatcgatctcagatcgggaaaggggaataagcggagggcaaattccggcgccgtcgatggactctccggcgacgaatcaatccgtggaagacaaagctccagcaattgatccttcggaaaggcatcccttggaggaagacaaagcttcggtgatggatctttcgggcaaaggtaaggccttggtggtagatccttcggacctaggagtatgtagaaccgaagtgaaaatcccggcgtctgcggtgaatccctctggcgaaggcaaggcgccgatggagaagaagaagaagaagaagacgaagacgaagatggcgcgatttacccaagcgcagatcaacaactgcatggctttcaaggaagagatgcccgacttcgacaacatgccgagtatcatcgagatcctcggcgacgaccttgccaaatgttcgcaggaatacattgatgagctgaaggcgatcgacgacagccgagaggaggataagaaattctggatagagatgaaccgccaaatccgcgaggaacgggagggcatcctcaaccagtactacaccaaaggctacgccgagtacgaggtcgacgacgacgaagacgaagacgaaggcaataaaggtcatgctcgagttgctgctacctccggcaggagaaggttccgtcacggggtcgccctgaagaagaaccaatcaggaggaggaagcattagaaagatatgatgaataaatatcagtgtaggcatcgatccaacttagtgaactgaataatcatcagtgttgttggcatcgatccagcttagttagtgtgggggattttacttaccttttatttatcaatacaataatgtactgtgggttgactatgatttgcc

SEQ ID NO: 8029 - DNA, 1688 bp, Oryza sativa
  ref <308>: DATABASE ACCESSION NUMBER: AK105377
  ref <309>: DATABASE ENTRY DATE: 2002-08-28
tgaagaaaatgcagtgtgcagccaatgcagtgttcccatgcaccctgaagattctgccaaaccgtgtataccgtaagaaggatccatttctttgtgatgttgaagtcttggaaggtgtcgtcaaggtgggaacaccaatttgtgtctatgttggaggcacagtccatggtcttggaaggatctcctcaatgcaaacatcaaatggtaatcagattgattcggcaaagcgaggagtagtagtatccgtaaagataaccggggagagccccaaggagaagacctggttgtatggacgccattttgatgagagcaatgagctgatcagccaaatctcaaggagatccattgatgtcctcaaagagtactatcgagatgaaatgaatgatgagaattggcagcttatccgcaggctaaagaaactactcgatatagcctgaaggattggaatacttctgtcgtcttctcgtgtcggcaatttagatcacgttcatcattttctggtctgtgttgtgtccagaaactccagtcatactttgtcatcatttgtcaaaccgttttgttactttgtgaataatggatgaatctatagatgtttgtaatggcgaatattgtcgttaatggtgaatgttgcatctgtgatatcttcctggagtgaaatccttctgtgttggactaccctgtcttcctatgtgctgctgaagccatgagaagtaccactgcaacgatgaacatcgacaacatgcaaccgagcaacaggtaagtcttcctcgatgatctccggtactcgccaaagaggatgactccccagaatgtactgacaagaggcagtgcctgatcacaccatatcatgaacaccatgagttttagttgtattacagctgaaatgcaggtaaaatgcagcaaacattgcagagctgatatgaacctaaggagaggatcacctggacagcatcagcagctgcatatccagcagcctgcccacccatgaactggaacccattgccaaacccacagagcagccctgccaggagcgcccagtgcctgccgttccagtctccggcataagctccgatggtcgacggcggtacaccggccaccgggcggtagaggagccgggcgttgaggccgataccgacggcgaaacacgagacggagaagtagaagaaggcggtgtagaccgtcaggtgggggacgctgtctctcagggtgcgccactggtcgttggtggccaggttgatcgccggcgagaagagggagaagcagactccggcgaggagcaccattcccagtcctagccacctgctggagccaaacacctgaaacccacaaaccggtattcaggtttctgaatttcagggcctatattactcctttataagcttcaccaatcttcagaggcagtgggtgatgtgaccttgatggatcgcctcttctcaacctgaacgatgaactctgcggtgccggtatcgaaatcgtcgtcttcgccattctccagttcttcttgatttggcagcaacttcactgaaaaaaaatggtagcaaagtagcaactttgttagcttctgcattgcataatctcaccctttttcaggtggttagaagatagatagtaccaccttggtcagcaacatcactgctgagctctatgcctctactcctgcaaacaaacgaattgtacttcttgacatc

SEQ ID NO: 8030 - DNA, 655 bp, Oryza sativa
  ref <308>: DATABASE ACCESSION NUMBER: AK105378
  ref <309>: DATABASE ENTRY DATE: 2002-08-28
aagagcactagctagctagctagcttttgctcctacatcttcacttcagtaccacaccggcttagcaaaagccagctgcaagctagtaggatcgatcgaccaccatggcgtcgtcgtccaaggccctgctcttgctcgctgtcctcctcgcatccgccgtcctcctcgccgccgccgccgaccaacctcatggcaaggagcagaagaagacggagagcggcggcggcgcgggcgtccaggactggcacgacgaccacggtgggggcggccatcacggaggtggcggcggcggctaccccggtgggcagtgccatcacggatgctgcgcgaccgccgacgagaagccggaccccatgtaccgccccgaggcgcacaactaattaagtctcagacgatcgtccgacgtacgtacgtacggccggcgccggagctcgctagcaacgtacgcagcaactaaaccaagtgaatactgaataatgaaaatgtgtatgccagcacgtatatatgtgtacatataaaagtctgtgcacgtatatgtatatatggaccacgtacgtacgtatgtatctgcgtgcatacggcggcggggtttgtgccgatatatgttactatacatgagtatatgtcaataaaaactagtactagtacttctaat

SEQ ID NO: 8031 - DNA, 431 bp, Oryza sativa
  ref <308>: DATABASE ACCESSION NUMBER: AK105379
  ref <309>: DATABASE ENTRY DATE: 2002-08-28
ctcctcacttaccaaaggcggctgctgcttcgctatcctcctgcagctcgcccagcaggcagcaggtcgccgtcctcccaagctagcgaacagcggcggcggcggtgaccggaaccgaaggcggcgggttggttggagtggccagcggcggcgctccacggcgcgacgacgacacaagccgcgtgggcctcgcgaggctggacttctggagtggccggcggcgtctctgcggctcttcagcaccacgacgacgacacaagccgcgggcctcgcatcctccgtttggctggagttgccgccggcggctccatcgctcttcggcagcacgacgacgaccggacgatgacacaagccgcactagccttgcatccttgcgtgtttcattctcttgttcctctgctttggatttaatagactcgatgcttatctat

SEQ ID NO: 8032 - DNA, 227 bp, Oryza sativa
  ref <308>: DATABASE ACCESSION NUMBER: AK105380
  ref <309>: DATABASE ENTRY DATE: 2002-08-28
atatatatgcccctagtatcttttaaactcggtctcgatttcgatatttccataaaattatgcattgactaactgtagtattgtcgacgtggcttgatgtaaacttgagcttggcagggtgcatatgtagtatgatcagtttatgcaaaatttgcgtttacttacgttgatatataaatcaagaacgttgtgaatactggagataatccatggtcatgctgcttaac

SEQ ID NO: 8033 - DNA, 1942 bp, Oryza sativa
  ref <308>: DATABASE ACCESSION NUMBER: AK105381
  ref <309>: DATABASE ENTRY DATE: 2002-08-28
gtgcactttatgtggccttggaggagtgcctggtgcaattgacagaaaaggttggtgatgttgggcctgttcttgacatggtgggagtaatgcttgagaatctctcttgtactgccaccattgccagaacaacaatttcatcagttttccgcacagtgcaaatagcagcttccatccacaagtcattgtacaaccagaaggcatttcctgaagctttgtttcatcagcttctcttagcaatgatgcacccagacaaaaagacaagggttggttcacatcgtgtcctatccaccattattgcaccttcacttctatgcccatggtcaggcataagttttcctatccctgtgaagggcaatgattcacagagcattactttgttggctctttctgccttttcttctgaggccgtaatggatgaagtccggatcaaaagcaggacccatgaacagttacaaaacaatgtaaaaccagaaactgtagttggctctgagaacggatacacacatacagaaccaaattcaaggaagagccctggtctcggaattccattgaaagatgaaaatcttaagttcatgaagctgaacagtagccaacttgttctcctcctttcatcaatttggagtcaagcacctctagaagataactcaccagcaaattttgaagcaatgtgccatacctacaatattgctttattgtgttcaatgacaaagagctctagtcacgcagcattagttcgatgtttccagttggccttctctctcaggaggatgtcccttaaccaagaaaatggtttgcagccatcacgtaggaggtgtttgtatacaatggcatcagcaatgctgattttttcagcaaaagttgctgatattcctcagacaattcctcttgtgaaagcagcagttccagagaaaatggtcgaccctcatctttgcctgattgatgattgcagactcgttattagttcaccacagtcatctaacagtgggatagtttatggttctgaggaagatgaaagtgatgcacgcaattttctttcttgtgtaaataaaaatgatacacagttaaaagaaattgtgatatcccacttcaaggagaagtttgaaaatctatcagagaagtttaatggtatagaagagcagcttcttcaggagttttccctggatgattcattccctctcagtgctccactattcatggaaacaccacactcttgttcgatgtacgctgaaaaggatgaccattgttttgatgaggaagtcattccttgtgagatggatgatgacgatgacatcgttttgaacacagtggatcgcaatctgacaggaaaacctctggatctatggcttcatcagatgttctaaacgtcaatcaactaatagaatcggttcatgagacagcaaggcaggttgctaatgctccagtttctgccaaccttgtaccctacgatcaaatgaagagccaatgcgaagccctagtcatggagaagcaacagaagatgtctgttctcctgagcttcaaacactcgaggaccgattcccgtggctcgactgcagaaaatggactggaaacaaacgagtcatctgctcggtctgagcctgagacgcagtcgacgaggaaggagcgaatgcgacgcagcgactcggcatcaagcgaatctgaccggtcgttcaggctgccaccggcaagcccatatgacaagttcatgagagctgctgggcgataggctggtgcaatgcaatgcgatggcgccaaggatctgatactagttttcaagcctgtatacagaaatgtttttacagatacaagtcttctaaagctgtttcttttcattgtcgccttgtattttttattcttctgagtgtaaatttctcgagaaggtgtacaaatttctgttactgttgtagagacccagaataaataaaagtataggcattggtgc

SEQ ID NO: 8034 - DNA, 4111 bp, Oryza sativa
  ref <308>: DATABASE ACCESSION NUMBER: AK105382
  ref <309>: DATABASE ENTRY DATE: 2002-08-28
gagcttgctctctctctctatcactctgctcagctcaagtagccagctcgaacaagaagaagaggagaaaaaaatcgcgcagcttctctccctctctcttacttatagcagcagcagatccgcctcccgaaacccagctctttgtgatcctcaagagccgcctccaacccccaatccacgcgcgacccaagaatccgagaaatttttctgtccagaataagagggtttggtttgattttgggagctccagttgttttcttctcctccttcttcttcttcttctttcttgcaatttgaggaggtttgctctggtttggtttggttctttgttgttgctgccgctgccgcggcgaatggtggcgacgcgaggaagggaatgggttcgttctcctgcgccgcgggcgatctgtcgtgtcgagatagtggcgcgccctgacctgagagatgtttgttcttgttgatttttgtgtgtttgtttgactgaaaggtgctcgtccttttcggaaagtgagggggtttgttcttatttctggttcttgattattattaggattagtttgttcctttgtgtgattcgattccttgccgcgccaaatcttggtttgagatttttctcttttccttttctctctcttggattggatcctttgcctccctcgccgcccattcctccgtgcgatttgagtacttcttggagtgagttcttggtgagtgagatcgagtactttgaggaggatctagaggagatggtttcgagatcctactccaacttgctggggcggcgacggattccgcgggtggtgacggcgtcgggcattgtcccggacctggactactccgacgacgacgcggcgtcggcggcgtcgtcgtccgaccactcctccgcccactcccacgcgccgcgcgagcgcgccatcatcgtcgccaaccagctgcccatccgcgcgtctcgccgcggcggcggcggcggcgggtgggagttctcctgggacgaggacagcctcctcctgcagctcagggacagcctccgcgcccacgccgaccgcgccgacgacatggagttcgtctacgtcggcggcctccgcgacgacgtgcccgcggcggagcacgacgaggtggcgcaccacctcctcgagggcttccgctgcgtgcccaccttcctccccgccgacctccggtcgcggttctaccacggattctgcaagcagcagctgtggccactgttccattacatgctcccgctgtcgccggagctcggcggccgcttcgaccgcgcgctgtggcaggcgtacgtgtccgtcaacaagatcttcgccgacaagatactggaggtgatcagccccgacgaggactacgtctgggtgcacgactaccatctcatgatcttgccgacgttcctgcggaagcggttcaaccgcgtcaagctcggcttcttcctccacagcccgttcccgtcgtcggagatctacaagaccctgcccgtccgcgaggagctgctccggtcgctcctgaacgccggtttgatcgggttccacaccttcgattatgccaggcatttcctgtcctgctgtggaaggatgctcgggttgaagtatgagtcgcagaggggctacattgcgctggagtattatggtcggacggttaccatcaagatattgccggtgggagttcatttggagcagctgcggtcggtgctcaatcttccggagacgggggtcaaggtggccgagcttctcaagcaattctgcgatcagaaccggctgatgttgcttggcgtagatgatatggacatctttaaaggaattagcttgaagcttttggcatttgagcagctcctgatgcaacatcccgaatggcgaggaagggtggttctagtacagattgccaatccagcgaggggacgggggaaagatgtgaaagaggtgcaggatgagagctatgcaatggtgaggcgtatcaatgaggcatttgggcagccaggttaccagccggttatattgatcgatcggccacttcagttctatgagagaatggcttactatgttgtcgctgagtgctgcctggtgaccgcagtgagagatggcatgaatcttatcccgtatgagtatgtaattgctaggcagggcaatgaaaaactagacgggatcttaggtcttggcccatcggcacggaagaagagcatgcttgttgtgtcagagttcatcggctgttcaccttccctaagtggtgcgattcgggtaaacccttggaacatcgatgctgtggctgatgcaatggactctgctttagagatgcctgaaggggagaaggtgctgagacatgagaagcaccacaaatatgtgagcacacatgatgttggatactgggcaaacagcttcttgcaagatctggagaggacttgtctggaccatagcaggaggcgttgttgggggataggattcgggctaaggtttagggttgtagcccttgatccaaacttcaagaagcttgcagttgagcaccttgtctcaacctaccggaggacgaccacgcgaatcattcttttggactatgacgggacgctgatgcctcaaacatcatttggtaagagcccaagctctaaaacgatagatatgctgaacagcctgtcccgtgatcagaacaacatggtcttccttgtgagcacaaagaagcggtcgactctagaagaatggttctcatcatgcgacaacctaggcttagctgctgagcatggatactttctcaggctgaagagagatgcagaatgggagacgtgtgtcccagtgacagacagaagctggaagcaaatcgcagagcctgtgatgaaaacatacaccgagacaacagatgggtcaacaattgaggacaaggagaccgcgatagtgtggagctacgaggatgctgatcctgattttggatcttgccaagccaaggagctccatgaccatctggagagtgtccttgcaaatgagccagttacagtaaaagctggcctgaaccatgtcgaggtgaagccacagggtgtaagcaagggccttgtggcaaaacggcttttgtcgataatacgggagaacagcctccttccggactttgtcctctgcatcggtgatgaccgctccgatgaagacatgttcgaggtgatcaccactgcagcacaggacaactgcctaagcccagacgccgaggtcttcgcctgcaccgttggtcgcaagcccagcaaggccaagtactacctggatgacctggccgacattgtgaggctgatccagggcctcgccaatgtctctgacgagatgcacagcacaatgcccacacctgtcgacgccgcagacaccgccctgaggtgaaaacacacctgccccagctccacccccaataaggcatgccatcttggaagaagggatcatcgatcgctgctccccccaggtgtacatactcgaagggatgcgacaaaaatgcaatcaaaacacatcatccaccatcttcatccctgcgtgttttcgcatcaaaataccaaacctttcaccggtgtgtacagaaactcggccgagaaattaacccccccccccccatgttcttctatcaaaaactcagatccatctcaccatcacagtcagatcaggctccaaagtttggccgggatgaatccgcaaccactggagccggagccactccttttgctggcatggtgcaggtgtcaaatggttggtgcgtactaccctttggtggaggcgctaattatttcatcttctttctttcttttctttcgggctcgtgctgtactgtgcccatgtactgctgctgcacattgctgtggggctttggattggattaggtctcttccgttccagcttgtgtggtagcagcagtagttcttgctgccaatgatggatggcaatagtggaggcttgtgtttttcttggtgttatgccgtttgggggttaaaaaacaaagaggctatgatcatgctggtgatgagataaggctataatgctgtctatgttgaattgtagtaaccggctgtaaagagattaatgtgttcctggctgaattgagcaaaaaaaacatttcttcgtctgctccggctgggctaatcatcttctgatctctc

SEQ ID NO: 8035 - DNA, 920 bp, Oryza sativa
  ref <308>: DATABASE ACCESSION NUMBER: AK105383
  ref <309>: DATABASE ENTRY DATE: 2002-08-28
atttgttgttacctctggcatccataagatggaggtcctgagttggagaacggtgtgcctcttggttctctgcaccgtggcgttgctgcgcccggctgcggctatccgctttgtgattgacagggaagagtgtttctcgcataacgtggagtatgagggggatactgttcatgtatcgttcgtggtgatcaaggctgacaccccatggcattatagcgaggacggagtggatcttgtggttaaggatcctaatggtgctcaagtccgtgattctcgtgacaagactagtgataagtttgagttcatagttcagaagagaggcgtacatcgcttctgcttcaccaataaatccccataccatgaaactgtagattttgatgtgcatgttggccatttttcgtactttgatcagcatgcgaaagatgaacattttgctcctttgtttgaacaaatagcaaaattagatgaagcgctttacaacattcagttcgagcagcactggctagaggcccaaactgaccgacaagctatattgaacgaaaacatgagcaggagggctgtccacaaggctctattggagtcagcagcgctgattgcagctagcgtcattcaagtctatctattgcgccgcctctttgagcgcaagttggggacatccagggtctaaatactccaaaagtagcagctcctcctaatttacactctcgtcatcccaactaaagctgtaattccgaactgtattggttgctagatctgctgtttacatgctgtgggttgctgtcacatagacctttaattattatgattccattagatgttttccttgaaactatactatcaggaccacatactcgcatcagcttcactatgcagcttccatctacagctgcaacggtcccatgaatgttctcttcgattgg

SEQ ID NO: 8036 - DNA, 758 bp, Oryza sativa
  ref <308>: DATABASE ACCESSION NUMBER: AK105384
  ref <309>: DATABASE ENTRY DATE: 2002-08-28
aattttgcaacgagagagaagaaaagagctcgaaaaaaaaaagaaagaagaaaaacaaagcgcgtaaagagaagcgagagaaatcggagaggaagatgggggaagaggcggcgaagcaaatggcggaagccccgggcaagattgaatccatgaggaagtgggtcatcgaccacaagctccgcgccgtaggttgcctatggcttactgggatcagcagctcgattgcgtacaactggtcgaggcccaatatgaagactagcgtcaagatcatccatgcaaggttgcatgctcaagccctaacactagcagcgttagtgggatctgcaatggtagagtactatgacgcgaagtacggcacatctggaccgaaggtggacaagtacacaagccaatacctggcgcattcacataaagattaagatcttcatattcgctgttggatggcgggttattttaggttcattttggggttcctatgagctccccatgatgattattttgtctccttaactacaaatgaaacttgccagggcattcctgagcaacgagggtgtaatacagggttgatctgcatagatcaatttcagattgcgatatgtaacctcacttgctgacaatcttattttattatttttcaacgaggaaaagtgttcctgtcttgcattgaatctgtcttagttttctgcagttgaatctgccgtaagatagaatggtccacggattttgttcttactgtttgtaatgcaggagcattcccc

SEQ ID NO: 8037 - DNA, 1060 bp, Oryza sativa
  ref <308>: DATABASE ACCESSION NUMBER: AK105385
  ref <309>: DATABASE ENTRY DATE: 2002-08-28
agcgaagaaggggacacgcgacgcgaccccgcggccaccgatccggcggaggcggggcattcccggcggccagatccgcggcggcgccgaggatgacgggagggggagggggtggaggaggcacggcggcgcaggcgtacggggaggcgtggtactgggacgagcggtacaggaaggaggccggcccgttcgactggtaccagaagtaccccgccctcgcgccgctgctcgccgtctacgtccgccgccaccaccgcctcctcctcgccggctgcggcaactccgtttttggtgaaaacatggttgatgatggttatcaagacatcgtcaacatagatatatcatcagtggtgattgatcaaatgaagaagaaatatcgtgacaagcctcaccttaaatacatgaagatggatgtaaggaacatggctgaatttgagtcaggttcattcgatgctgttattgacaaaggaacgctagattctataatgtgtggccaaaattcacaagagaatgcgtctcagatgctagaggaggtcaatagaattctcaaggacaagggagtttatattctgatcacttatggcgacccaagttatcgattgcgtctccttaaagacctgcagctttggacagtaaagcttcatgtcatagatgggaaaggagtcgggagccttcatgggaactgacgaagccactgcctttagatggtgatagcacatcaattgttagtcttcttggcccaaaacctgatgttcactatatttatgtctgtataaagggcagcgacgacgggaagtcgcatttggattcgagggctgaagtcaatggagaagcatagtgatttcacctcataacccttctggatcatcttgtataaccagtgtaggaataatgtagtgcagatactgtataattatgctgttgcttgatgaatcacttggttttattggcagtagttaatttgatttttcacatatgccttatcatgtttcatgtgctccctagtagaaaatgcgacatattgagtccatacagctgatcccatcaaaattatggtttg

SEQ ID NO: 8038 - DNA, 583 bp, Oryza sativa
  ref <308>: DATABASE ACCESSION NUMBER: AK105386
  ref <309>: DATABASE ENTRY DATE: 2002-08-28
agcttgtccattacttgggccggcaaccacctccagatccgcccacgctttcccctcgccggagacggagaagaagccagctgtcgccggcggcgaggagatcggatgggggcggtggtgacggcggtgatagccatcgcggcggtggtgctgggctggatcaccatcgagatggcctacaagccctgcctcgactccggccgccgcgccatggaccgcgccctcgaccccaactacgaccccgacgagcccaccgccgccggcgccgccgccaacgagcctctcctcgcggacctctccgccgcctccgccgccgcgctggccaagaccatctgatccccccgccgccgctgccttcagtcgtcttccgtgtgtgtgccttcttgtctgttcatgtggttcttggctaagaaatatgacagattccttgctttctatgtgagctaatttctgtgagatgagatgttatcttggcaatctataatacagttatgattcagagtttcagacacatgttgatgtttctctgcaacgagtgagactgtgaccttcatttccacaatctgagatatttctgttctgt

SEQ ID NO: 8039 - DNA, 469 bp, Oryza sativa
  ref <308>: DATABASE ACCESSION NUMBER: AK105387
  ref <309>: DATABASE ENTRY DATE: 2002-08-28
atactgaacagacagatcaccatggcttccatcaagcttgctctcccaatggctctcctgctgtgtggactcatggtgattggatccatacagagcgccgaggcacaaggggggaagttttgcccccagttctgctacgacggcctcgagtacatgacgtgcccgtcgacgggaagccagcacctgaaaccggcgtgcaactgctgcatcgccggcgagaaaggctgcgtcctctacctgaacaacgggcaagtgataaactgcacttgaaagtcaggagctgttgtttcttcagttcttgcatggtcacttgctgctgaataaatattctccctggaaggctggaactgtctcttcagttcttgcatgttcagagaagatttgtactgctgcagaataaatgtctccctggtgtgatatataataccattggaaaaaataaaattctcgtggctacctctggtttatg

SEQ ID NO: 8040 - DNA, 637 bp, Oryza sativa
  ref <308>: DATABASE ACCESSION NUMBER: AK105388
  ref <309>: DATABASE ENTRY DATE: 2002-08-28
caaaatctgaaggagctggcaagtagtgccggcgaggatgtcgtttttgctatgaatgcattcataaagcgccttttggctgtctcagatcctgcacagatgaagacaacagtttcagaaacaagtgctaatcagctagccaacttgatgttttggttgatgattgttggctacagcatgcgcaatattgaagtgcggtttgacatggaaagagtattgggtgctgccccaaagataggggaattaccacctggagaaaacatatagcagggaggaaaggggcgtaagagtggggaagtgatgattagttaaaatctagggttactggccggccaagataactgtatttgcgtggtcatattattttgagtggaatggattacagcatttgtgcaaagacaccaatccacattttgggaactaagatgagatgctaggcatagccatttctgatatatttctcggggaggtatagacgacgagatacatagaaacaatagaacgggacctgatgctgtagttttgcaacctgactattgttggtaaaatacaatcaaggcaactcatattaccatattgtactcccatgttgtatgtctagttcaccaatcaagttgagtctgatgtgagtttgttt

SEQ ID NO: 8041 - DNA, 1008 bp, Oryza sativa
  ref <308>: DATABASE ACCESSION NUMBER: AK105389
  ref <309>: DATABASE ENTRY DATE: 2002-08-28
aacagactcgagtaggggagagagagagagagagagagagagagagagagagagagagaaggcgacgcggcaatcgatctgcccgcctcacctccggccaccgaccaccgccgcctccgcgtccctctgcctcacctcgacgccggctagcatcgccggcgatgggttgctcctcctccgtgccagctcgaagcactggagggttgaacaatattagcaacgataactccgctactgattcaaaggacttgcgtgctaagttggtattgcttggtgactctggtgtagggaaaagttgcattgttcttcgctttgttcgtggtcagtttgatcccacttccaaggtaactgtcggtgcatcatttttatcacaaacattggctttggaggactcaacaatagtgaaatttgaaatatgggataccgctggacaagagaggtatgctgccttggcacctctttactacagaggagctgctgctgcagttgttgtctacgacataactagtccagaatcatttagcaaagcacaatactgggtgaaggaacttcaaaaacatggtagtcctgatattatcatggttttggttggtaataaagctgatctacatgaaaatcgacatgtatcttctcaggaagcacaagagtatgcagagaagaataatatggttttcatcgagacatcagcaaagacagctgataatataaaccaagtatttgaggaaattgcgaagaggttgcccaggccaacggcgtcttgataattagcttcggtgtttgttgaagtggaacacatacaagctggtaatgtgcatgtaacatgtctgtcagggcaaaaactgctgtatggtcgattgtttggaaaacaaaggatactgtacagtttatcccattgtgttcaatcgtatcgtattgtatatgttaatagtgccgtcgtgtaacatcttagtttactaaaacaatctaatatcggtactaaaaaaagttgcttagttgctgtgcctgtgt

SEQ ID NO: 8042 - DNA, 692 bp, Oryza sativa
  ref <308>: DATABASE ACCESSION NUMBER: AK105390
  ref <309>: DATABASE ENTRY DATE: 2002-08-28
cttttttcccatcctgcctcaaagataggttcttgacgggggaaggaaagctgctcgcctccgctgcacagctcgtctgctcgcctggaagcacggaaattatgtctcattaaagggaatccagggtatggtgttgagctgtctgggctccatgtctaagtgggaaccagtcacatttgaggaatctctttgctttgtcaagaaagttaaggctcgtgattatgtgttgtacttgtcgctgcttgatgtgctcagtcgaaatgagcagatccctctggaagcttacagcgagctttcacttcttttccgggatcacgacgatctgctggaagagctagcgaagttcagaccccttcctaccccaagcacagtttatagccacagctcagtctggctgctcttcttcctaatgcccctccttgtcctaagcattctcctcaagtgcttccttcttcaacagccagttgcaagctgaaaaagatcaagcgtgcaatgtcatgtgatatctctgttaaaagccaaagcgtctttgtggcgatgtctcgctgtttatattggagatatctccgtgtactgatgcaaggaagtagcctcttagcttggaagagcgccaatacatggtaaaaacagtattgttttgacttgctgaaaaagaaaaatcactattcaggaaatgagatgaattgcccagc

SEQ ID NO: 8043 - DNA, 960 bp, Oryza sativa
  ref <308>: DATABASE ACCESSION NUMBER: AK105391
  ref <309>: DATABASE ENTRY DATE: 2002-08-28
aatgacacaggaacagatcttagcctttgaacaaagtggagaaatttcattctttggtcattgcttgaagttagacgatattaaggtgatccggcaatttaaacgtcctgcaaatgtggcagagaatgaaattgatgctgcgggagatggtgatgtgttagtcgttttggatcttcgagctgatcaatcattgtttgaagctggagttgctcgagaggttgtgaacagaatccagaagttacgaaagacagcgcaacttgagccgacagacttagttgatgtatattacaaacctatggacgatggcaagaatactctagtagagattgtgcagtcacaggatcagtatataagggatgctcttggcaatccactaattccaaagatggcggcgccaccagatgcagtaatgatctgtgaggagtctcacaatgtacaagacatgtcgtttgtcatttacattgcaagggtttctccagtggtcacagatgatctccttgtccatgccgctggcaaccgtgagcattttgatgcattaaaagtatatttactgtcaaggtctatttccagattgaagaatgaattccaggctgggaatggcaagattacggtggatttcattgaaggcttcccaccaattgatctccagctgggaaaacatgtttttcttagtacaggagatttctacctggctactcgttcttgatttttctttcaagcatcccaattttgagtgatttatctttttttttactgcaatcattttaccccgggccctattctatttgtgcccacaaagcaatgtatgtggtttcatctgccatgaaagaatgaaaggggtactatcatattgaatggtctaatcgaaaactcgtgtatgctgtactgaatactgatacacccgtgttcatgtggctacacaccgattatttaattgtgccaatagcggttaaagcattc

SEQ ID NO: 8044 - DNA, 2153 bp, Oryza sativa
  ref <308>: DATABASE ACCESSION NUMBER: AK105392
  ref <309>: DATABASE ENTRY DATE: 2002-08-28
agctcagctcggccccctcccctccccgctcccaccgcctcccgaatccggcctccaaatctcgccgggatccgccgcgcggccgcacggattcgcctcccggagccgcggctctgtcggcgcgggggcgggagaaggggggcctgctccggcccgggggacgccggatctgggtcggggggtttctcttcgggctcggaggaggaagggcaagtcacggtggcgttagtggtggtggtggttgttgcagcggcggcggttgatttgtgggtgtgattcgtgggcttcttggtgtcggtgtgcctggtgctggtgacgcgccatggattacaaccccgtggacagcagcggaactgatgatgatcttccaccgacatatcagaacagaggtgtaagaggcagtggacgtgttagtggtaatgggagagatattgttagcgctgttccatataatagaactaagccacagacagatatggaaacacaaattcatcagcttgagcaagatgcatattgttctgttcttcgtgcatttaaagcacaatctgatgctatttcatgggaaaaggaaggtcttatcactgaacttagaaaggaacttagagtgtctgacaaagagcacagggagttgttaaacagagtgaacggtgatgatatcattcaaagaataagggaatggagagagacaaaaggtgggcttcaggcagatatggtgaataatgctcaacgttcacatgatcgcgtgcccagccctaccacctccgctcgcaagaggcagaagacgtcacaatccatcccttctgcttctgtacctgtaccatctcctgctgtgcattcacagacactgactgccccaatgcaaccattgtcatcagcaacaaaaaaagtagctccacctggtacaaaaggcaaaaagactaagccaggccagaagataccaggtggctctgcaatcaagaccatgtcttctgctggccctagtggtaggggaccaattatgaataagaacctatcaggtggtcttcctactgaaccaatatcagtaaatccattaatcggacggaaggtcatgactcggtggcctgatgataatagcttttatgaggctgttataactgactatgatccacagctggatcgttatgcactggtttatgacataaatacagcagatgaaacctgggagtgggttgactttaaagagatggcacctgaagatattagatgggaaggtggcgaccctggaataatccagcaaggccgtggcgctactgttcatggtggtaagaagtcaagcagccgtaatggccccatgtcaggtcctggaagggggagcagagggccgcaaaagaacacatccaggaaagagtttccaccttcacaaaatggtgttgggaagaaaagctctgattgcatagaaatactccatacggagtcattaataaaggaggtggagcgggttttcagcgcaagcaaccctgatcctcttgaaatggagaaagcaaagaaagtgctcaaggagcatgaacaatctttgattgatgcaattgcaaggcttgctgaggcatctgatggcgaaagtgaagaaagggcacaacccttgcaacacaaccgtggatggagaaaccatcatggtggaaactatgcaaatgatatgactatcgatggtcacatggttggagatgctgatgccctgtaaacaattactgaactgtatacagaaccctttttttatctattgtataacttcaatgctgatttattctagattagcactaggttcaaaagtatcctctaattgtttcaaatgagtttatctgttatgatgggcctctcgaattgtggactttcggaaaatcaatattggtgagaggagagcgttttgtagaattgtagtctagcagatcatgatgacactgtaaatttagatgtggagatatttttggtgtcgtactactttcagatgtgactactcactggagatgtatgttgttttgtactcgctagcaagcagaacacgcattttttttgtttttttttgcaatgtttctttgagccatggttgatactttttagaaagggtaatttggaaccatgccattataatttttcaaagtttgagatatgccatcggtatctcaatgtttgttatg

SEQ ID NO: 8045 - DNA, 4089 bp, Oryza sativa
  ref <308>: DATABASE ACCESSION NUMBER: AK105393
  ref <309>: DATABASE ENTRY DATE: 2002-08-28
atcaattgctaacacgagtagtctatcatcattaactcgcatcccttccccttccattgctcattgtctttccattcatacggtgttgtgttgttgtggcccaagaagaagaacaagtacaccacacgccattactcccatctctcttactcctcctcgagtttgattgattcgagtggtcgcatcgcatgatcagaaagtgaggcgatcgatccatggcttccagcggcggcggcggcctgcgtcacagcaacagcagccgcctctcgcgcatgtcctactccggcgaggacggccgcgctcaggcccccggcggcggcggcgaccggccgatggtgacgttcgcccgccgcacccactcggggcgctacgtgagctactcccgcgacgacctcgacagcgagctcggcaacagcggcgacatgtcgccggagtctgggcaggagttcctcaactaccacgtgacgatcccggcgacgccggacaaccagccgatggacccggccatctcggcgcgcgtggaggagcagtacgtctccaactcgctcttcaccggcggcttcaacagcgtcacgcgggcgcacctcatggacaaggtgatcgagtcggaggccagccacccgcagatggccggcgccaagggctcctcctgcgccatcaacggctgcgacgccaaggtcatgagcgacgagcgcggcgacgacatcctcccctgcgagtgcgacttcaagatctgcgccgactgcttcgccgacgccgtcaagaacggcggcgcctgccccggctgcaaggacccctacaaggccaccgagctcgacgacgtggtcggtgcgaggccgacgctgtcgctgcctccgccgcccggtggcttgccggcgtcgaggatggagaggcggctgtcgataatgcggtcgcagaaggccatgaccaggagccagaccggcgattgggatcacaatcggtggctgttcgagaccaaggggacatacgggtatggcaatgccatttggcccaaggagaacgaggtcgacaatggcggtggcggtggcggaggcggcgggctgggtggaggcgacggccagccggcagagttcacgagcaagccatggaggccgctcactcgcaagctcaagattcctgcgggtgtccttagcccatacaggcttcttattcttattcgtatggctgttcttggtctattccttgcatggagaattaagcacaagaatgaggatgcaatgtggctatggggcatgtctgttgtttgcgaactctggtttggcctctcttggctcttggatcagctgccaaagttgtgccctgttaaccgagcaactgaccttgctgtcctgaaagataagtttgagaccccgacgccatcaaatcctaacggaagatctgacctgccggggctcgatatatttgtgtctactgctgatccagaaaaagaacccccattggtcacagcaaatactattctgtccatccttgctgctgattatcctgttgagaagctttcttgctatgtttctgatgatggaggcgctctcctgacatttgaagcaatggctgaagccgctagctttgcaaacatgtgggttcctttctgtcgcaaacatgacattgagcctcgcaacccagagagctactttaatctgaagagggacccatacaagaacaaggtccgttctgattttgtcaaggacagaagaagggtgaagagggagtacgacgagttcaaggtcaggatcaatagcttgcctgattcaatccgtcgccgctccgatgcatatcatgccagggaggaaatcaaggccatgaagcggcaacgagaggctgctctcgatgacgtggtggaggctgttaaaatccctaaagctacctggatggctgatggcacgcattggcctggtacctggattcagccctctgctgagcatgctcggggtgaccatgctggaataattcaggtaatgctgaaacctcctagtgatgatcccttgtatggaaccagcggtgaagaaggcagacctcttgatttcactgaggttgacatccgtttgccaatgttggtctatgtgtcccgagagaagcgtcctggttatgatcacaacaagaaggctggtgcgatgaatgcgttggtccgctcatctgctgtcatgtcaaatggacctttcatcctcaaccttgattgtgatcactatgtttacaactcacaagctttccgtgaaggcatgtgcttcatgatggatcgtggtggtgaccgtattggctatgtccagttccctcaacggtttgagggcattgatccatcagatcgatatgctaaccacaacactgtcttcttcgatgtcaacatgcgtgcacttgatggtatcatgggaccagtctacgtcggcactggatgtcttttccgtcgcatcgctttgtatggatttgacccaccgcgctccaaggaacatagtggttgctgcagctgttgcttcccccagaggcgcaaggttaaaacttccacagttgcatctgaagagaggcaggctttgagaatggcagattttgatgatgaggaaatgaacatgtcacaatttcccaagaagttcggtaattcaaacttcctcatcaactctatcccaattgctgaattccaagggcgacctcttgctgaccatcctggagtcaaaaatggacgtcctcctggtgctctcaccgtccctcgcgaccttctcgatgcttccacagttgctgaggctatcagtgtcatctcatgctggtatgaagataagactgagtggggtcagcgtgttggatggatctatggttcagtcacagaggatgtggtcactggttacaggatgcacaaccgtggatggaaatcagtttactgtgtcaccaaacgtgatgctttccgtggcactgcaccaatcaaccttactgaccgtcttcatcaggtgctccggtgggctactggttcagtggaaatcttcttctcccgcaacaatgcactacttgcaagccgaaagatgaagtttcttcagaggattgcatacctgaacgttggcatttaccccttcacatcaatcttcctcattgtctactgcttcctgccagccctgtccctcttctcgggacagttcattgtgcggacgctaaatgtgaccttcctgacctatctgctcgttatcactctgacaatgtgcatgcttgcggtgctcgagatcaagtggtcaggcatcagcttggaggaatggtggaggaatgagcagttctggctaatcggaggaactagcgcccaccttgctgctgttcttcagggtcttctcaaggtgattgctggtatcgagatctccttcacgctgacatccaaatctggaggagatgaagcagacgacgagtttgctgatctctacatcgtcaagtggacatcactcatgatcccaccgatcgtcatcatgatggttaacctgatcgccatcgctgtcgggttcagcaggacaatatacagtgaaatccctcagtggagcaagctcctcggcggcgtgttcttcagcttctgggtgctggctcacctttaccccttcgccaaggggctaatgggaaggagaggacgaacaccgaccatcgtcttcgtctggtctggcctccttgccatcaccatctcattgctgtgggttgccatcaatccgccgtcacagaactcgcagataggcggctccttcacattcccctgagcttcctcatgaacatgaaccttttgtatgatgaattataagagtggtcccagtagcagttgtccttgctgttggacaagtaaattctttacctatgtttacttaggtttttcttttttttttgggtcgaagatgatactattatgaatcatgcatgatactagttcttttgttcgtttttgtgccaaaatgagaagaggttctgtttggacctgaacatcaatcaattgcaaaaattcggagactaggaagttcagagttgcactcctgcacttctttggagctcttccattctgcataactgcgctgtctacttgtattgcatttgcctactcttaatccttcactttgcagtagtact

SEQ ID NO: 8046 - DNA, 3542 bp, Oryza sativa
  ref <308>: DATABASE ACCESSION NUMBER: AK105394
  ref <309>: DATABASE ENTRY DATE: 2002-08-28
tatgtttgatcaaaagcagtctatgctgtgctctgatgatagacctggtggttcacctgcaaatgcgggtgaggagatccctgaagacaggactacgcttaaagatagcaggtttcgctttgtttactcaaggaagcgatcttgcaggagaaagaatggatttctcaacacttcagaacaagattctgatcttaaatacagaaaagttacaggtgcgttgtttgcttcagttgctggctgggggtctgttactgaaaatgttacttcgagaagacatggcatattagtactgagccagccattaaaatctatttataagatcatgtctgaagcatgccatgtctggcttctcaatgctcttgttctccttcaccgtggtgcaatggtttccttgtggcctgccgtacatctggagatacttcttgttgatgatactttaggattgaaacacttgcttcttgagacttccttaagatcagctgtatccttattctgtttacttgttggatgtttcaattcgtattccaaggcgagtacacgcaatgagtcaaaaatgctatgcacctcagtcagagttcggatatctggtttgcacggtagaagccaagttgtgtttttgatgttcagcttcgtgggggtaaagtaccccaaatggaagcacctgcaaggacagctgcagcatcaccatataaaaagggggctatctaaagttaattgcgcatgtgctgacataaagcaacttacaaatggaactgatcaaagagtctgtacttcaacagaacacttctctaagggtctatcactcgatgctcaggactctctgtttttcacagaatcaaaatattcaaatgtcgaccctatcattttttgtcttgatgagcgaagtaaatctgttcaaaatcatctggatgtggcagctgcaccttcactgttgttttttcaccacttaaaattgcgcagtgaaagcaacttgacttctaaaagtcttccggaattcatgccgattactttagaagaggatcagcagtctctgccacagcacacatctgatctggttcatctggctgcttctgcttctgaagtttgttctgtttatgttagtccatctaatactggttccttggatatgggtaccgctggttgcatcaatcattctggttctgctagcagcaagctcaatactgctaaaaggactgtaagtctggattgtaatagcagaggtattggtggtgccaacataacaagcaggagttttccagatcaaattatggatggaagcctttctgctgtttgccctcctcagaagtatcaaaagaggtgttcttctatatctattcctggagataatatatcagatccaccagatgataagctacttaacaaagaagaaaaggccatgcagcctacatctgacttggtccaggaactgaatgagtatcctattggtcgtgttacaccaactgcccccaggactccctaccatcggaaccgatttacatccctatcacgcacttttggtgatggttcaaaattatggcaagaagatattatggtgacaggctttgctggtggctctaagaagccaaggactcaggttttgtactcggtttctcctagaagtgatgaacctggctcaaaacacaaaggacatttccgcaagatacagtctcatagcagtgcaaagagacttcctgataattcaagaagtgaacagagcagtcctgagtcattggcttgtgttgcaaatgtcctagttacagttggtgatagaggatggagggagtacgatactcagatcacaattgactctgatgggcagagtgaacggaggatttgtgtgaagcttgcagaaggaactaagtatgctcacaaagttcttcaagttttgcagcctggggcgacaaaccgctatacacatgcaatgatatggaaaggggggacagagtggtgcttagaatttcctgacagaagtcagtggttgattttcaagcaaatgcatgatgaatgttatagtcataacattagagctgcatctgttaagaatattccaattcctggtgtctgctttgctgaagctcatgatgatcatgatgctgtatcctttgtacgctctcaagattatattggtcatattggaacagatgttgaaatggcacttgatgaatctcgtgtgatatatgacatggacagtgatgatgaagtgtgggtttcaagatggaggaaactaggcaaggacagcacctctgtgacagatgacttgtttgagaggatcatggacaaattcgagaaacttgcttatagccacaactgcaatgaactcactattgatcagatgaaggaactagatagtgataacataccactggacaccattaaagtgatacatgattattggcaggacaagaggaagaaaaagggaatgccactcattcgacactttcagtccgctatgtggaagatccacgagcagcagctacaggaatgggaatcaacagcactcagaatacagggttcatcaaatggttaccaagttaagttgcctccaaaacctgccttgttcgccttctgtttgagacctcgaggactccaaccccaaataccgtataagggaccgaagcagcgttcccataaaaaacttatgtcctcaggaagcttttcgagagagcaagatggcttttaccgaccagggagaaaatacagcgaatatgtgggggatgggagggcatgtgaatcctatgacggtggttctatctattcaccaacagggtactctcccaggttctctgtgaaaacagaatcccctcgcgcatttgatggtttggaaagatgttctacaccaaggtttttgagaaccaacagtgtcaaaaggactgcaagctttgcattctctgaggatcaccagccatcaccttccttccgtcatcagagagtgaagcgaggcgcgcctgatcactggaacgcggtcatccacgaatggcagagctcaaagcacctgctcccgggtgcgtcccagagcccccgcgtcgacatagaggagctcaagcagcgagatgcctccagtgcagcgcagcatgcggtggccatggccaagctcaagagagagaaggcccacctgctgatgcacaaggctgaccttgccctccacaaggccacagttgctctcatgatggccgacgcgatcaaggcgtccagcagggactcttcccgggatgggaggagagatttcagggacgactgacgacaacgctttttccggcttgagccgatgcaagactacccatcttttttgttgatagaaaggagctcatctgctccatccgaccaagtcagtagatagcatcttgccccccttttttctctcttttttcttcatcatttgtacatatgttgatttctccttttctttttcccccctcttatttagacctctgggttaacgtattgttgggggaaatgggccaaaatgataggcagctgttggtgcagcccggcattttctgcataacgatgatatatccatgtcttctcattgttgtgacgtt

SEQ ID NO: 8047 - DNA, 2798 bp, Oryza sativa
  ref <308>: DATABASE ACCESSION NUMBER: AK105395
  ref <309>: DATABASE ENTRY DATE: 2002-08-28
ctcttttttttttccccttccccaccaccaccaccgcctctctcgccggcgaagagaagggggaagcgcggctgcggcggcggcggcggcgcgcggcggaggtagggcttgaggtcctgaggtctctcctccgtctcgatctgcctcctaaccccgaagcgagagggattttgcgcggggagggtgggggtccgtacagcccggccgccgtatcccggggtggcgctgaggctgccatcagaccaaaaagtatttattcaaaccaaacactatgaccacacaagcttgtaagaagagaagagcagtttatataagcagtgaatcagaagactctggtacagactctgaggttgagggaagcaaactctccaaaaaaagatggggtcacgtcagtctatacatgtggtcaccagccaacctctaagaataaggttgatccgatgaatactagcaagtcaaggcagtgtggaagtattctgaagaagctcatggatcacaaaagtggatggatttttaatacaccagttgatccagtggtatatggaattcctgattactttgatgttattcgcaatccgatggacttgggtactgttaaaaggaaactcacaagcaagcaatattccaacccttatgagtttgcagcagatgtgaggctaacattctcgaatgcgatgaagtataatcctccaggaaatgatgtccacggaatagctgatcaattgaacaaaatatttgattcggaatggaaattattggaaaggaaatggaaagacagaaatttggtacaagagcagccatcactgaaggtattaaaggctcagcctgctgttaccccaaaacctgtgctacctaagggggtgactgcaggcacaaattcagctgtgagcaagacactggcaactgcattatcctccaaagtaaaaattaaattttctgtgcgaggctctgagctgacctcttccaaagacacgcctttgcaagcagttggcagaagagacggcacaattaaccaatctctcccttgcaccaaggacaatgctaagacaccaaggatacaatcaagtgaggacagatctgaatcaactggaaatgaattgcggccttgcgatgatgcttctacttcacctcttgcttcttccagacaagaagaggaatatttgcctgaagaacctttatcaccaagcaaggctcttcgtgcagcaatgctcaagagtcgttttgctgctgcacaattaaagctagacgaagaaatgaagatgaagagggagcaggaaagacgagcagcacgcctggcactacacatgatgaagaagactgttgatattgacaacagtgacttccttaaggacctggaaaacttaagcaaaaagtgggagctgaatccccctggcaaacttattgttgattttgtcgacgggatcgatctaccacctggcttagggagtccgctagagaggcttggccttttcatgaagaaggatcttgaggaagaggtcgaacatgaaatggaggacagtgtatcaccatctacggagatcgacgtggaggaaggagagatcagcttctgtcaatagcacggctctaaaatatccattgtttcttcctttttttctttccccccatcagactctgaagcaacatgctcgcatggcttataaaattgtgcgcgagtgctgtgttatttattctgcctcaagacaacatcataacataagccgagtaaaatgaagcgttggttcatctagtttgtgttgtctaaccagaaaacaaaaatgtcagctgaacactgaagtggagttatcggttgcgtggacttcgccccgattttgtcggttctgtgaaaccctgtatgttgtaggtgttccacgtatgcaattctgtaaaaaaaggaaaataaaaaaaaagttgtatgtaatgtgatgttagactgttagtatataataatattatagttaaacgatatcctctatcccaaaaatcgagccttttcctccccccttcctcctccaccgccgcccatctcgccgccgccgccgccgccgatggctccctccaccgccctctctccggtggccttcaagtcctccttctcgccgctcctcttcaacccgacccgttctaagataaatgtcgaaggtgcattctgtttgccatgttacaataggaaaaaggctagcaatagatcctttcgcgtgtacagtttatttgggggaaaaaaggacaaagacgagaatggtgaagaagcaccatcaaaggcaggaattttcggaaatatgcaaaatctttatgaaactgtgaagaaggcccagatggttgtccaagttgaggctgtccgggtgcaaaaggagcttgcagcgactgagatcgatggttactgtgaaggggaactaatcaaggtaacactttctgggaaccagcagcctgtaagagttgaaatcaccgaagctgcaatggaagtgggtgctgaaaaactttctgagctggtgaacgacgcctacaaggatgcacatcagaggagtgtccaggcaatgaaggagaggatggctgatctggcacagagcttaggaatgccagcaggccttggtgatggactcaagtgatagtgtggtacatgaatgcttttcaataaaaaaaaaagtgtatctcaattttgtatactagctgtattgagtcatcagtttaaaattcgtggcgagtactgttagctgtgtaagaactgtaatcgagaacatctgatcctgttttccttaatcattggcacaccataatgcattgacgcaagtgtgctgttttac

SEQ ID NO: 8048 - DNA, 244 bp, Oryza sativa
  ref <308>: DATABASE ACCESSION NUMBER: AK105396
  ref <309>: DATABASE ENTRY DATE: 2002-08-28
tttgaatagggtcttagaatgaatggtctctcttcttcccctggtttttggttcttctgtttacagaccaatgatgggtcaatgtcagtcaaattgtgtgatttagatcaatgggtcaaagtgtatgatgtgattgtgtaattgtgtcgattatatataaaattttgaagtctctcgtagtttgaatttgaaattgtacacactacgtataggatagtggttataaattttgaattttgatgcg

SEQ ID NO: 8049 - DNA, 2487 bp, Oryza sativa
  ref <308>: DATABASE ACCESSION NUMBER: AK105397
  ref <309>: DATABASE ENTRY DATE: 2002-08-28
ttcagttcgaaggaaataaatactcattttcctggacttgttgcactatcaattgaagaaactagtggagactgcaaaattatgttgtattaaattcaagttggattggccatctgatttttcattctactgttcaaaaaacttggttattcttcaaatgatctccttggaccttggggtgacttgatgacttcccagtgagattgtagtattgcactacatgtaatcataaaaaatggtatgccgaaatctaaatcattcgtcccagtggctggtcatgctaattacctgcataaagggtcttccctctccgcgaagcatgcctctaatgtactgcggtcaacggatggcaccttctcgttcggcttctacaacctttcatccactgtgttcaccttgtcaatctggttcaccaattcagctgacaagaccatcgcctggagcgcaaatcaagaccgccctgtgcatgagagcgggtcgaaagtcatgctgaacaaggatggaagcatggttctcacagactatgatggcacggttgtctggcaaatcagtagctctgcagaagctgtccgtgccgagctcatggactctgggaaccttgtggtgaaggatcaaggtggaagcatcctatggcaaagctttgatcatccaaccaacactctgctcccgatgcagcctgttacagccaccgcaaagctggtatcaactgatccctcacacccaacaagttactacactttacggtttgatgatcggtacgttttatcacttgcttatgatggaccagacatctttaacctctactggcctaaccctgaccagagtagctggacaaactataggatctcttacaaccgtagcaggagtggtgttcttgataagctggggaaatttatggcgagcgataacacaactttctatgcctcagattggggtttggagattaagaggagactcacgttggactatgatggaaatcttcggctttacagcctgaatgagtcagatgggagctggtacaattcttggatggctttctcccaaccctgtgaaatacacggcctttgtggttggaacgggatatgtgcatacacaccaaagattggctgctcttgccctcctggttatgtggtcagtgatcctggtgattggagcagaggatgcaagccagcattcaacctcacttgcagcaatgatggccagaaaatgagctttgtgcgcattcctcagactgacttctggggctttgatatgaactatgtcatgtcaacatccctgcacgcttgtagagcaatgtgtttggcgagttgctcctgtgtagcattcgtgtacaaagtgtaccctaatggctgcttcttgaagtctgatctcttcaatggcaagacagtttcaggataccctggtgcagcatatatcaaggttcctcagagctttctgtcccggtcacaagcacatgtttctgaacttgccaatcgccatgtttgcaatgcatcaaaaacacaaacgttcaattacgctacacagagcaacaaaggaacgggcatgatgtggtactactactactgtttcctggctgcattctttcttgtggagctctgcttcattgcttttggctggtggttcatggcaaaaacacactcagcacgatcagcgatatgggctgcggaggaaggctacagggttgtaacagatcatttccgtaggtttacctacaaagaattgcggagggactgttacagtggcagcataggtacaagattgcagttggtgtggccaaagggctagcttaccttcaccatgagtgtatggattggatcatccattgtgacgtaaagcctgagaacatacttctcgaccaggatttcgagcccaaaatcagcgatttcgggttcgcgaagctgctacagagaaaccagactgatcccaacatgtcaaagatccgaggaactaggggttacatcgctccggaatgggtttctggtgttcccataactgaaaaggttgatgtgtacagttacggagtggtgcttctggagttagtcatggggcttcgaatgtctgagctaccagcaaatggcagtgcagatgaaggtgctgcattgaggcagttagtgtggacagtaacagagaagattaaaaccggtgaccaaacattgatcgatggtgttgttgatcctagattgaatggcaactttgtgcgctccgaggtgctactggtgctggagtttgctgttctgtgcctggagaaagaaaggaaccaaagaccaaacatgaatcatgtggtgcagaagttcctttcgtatgaatgaattcgacaattttccatgtccctgtcgcctgtttaccttaaatgaaagccataatgcagttttataattttcgtactacttggatgcaatggaaacaaatgtttgatgtatcactcttgttcttgtattacacattaattcaagatgatcctgtggttagttgttttgatgagatcct

SEQ ID NO: 8050 - DNA, 1639 bp, Oryza sativa
  ref <308>: DATABASE ACCESSION NUMBER: AK105398
  ref <309>: DATABASE ENTRY DATE: 2002-08-28
ccggcccccttcttccgtcatggactccggctactcctcctcctacgccgccgccgccgggatgcacgtcgtgatctgcccgtggctcgccttcggccacctgctcccgtgcctcgacctcgcccagcgcctcgcgtcgcggggccaccgcgtgtcgttcgtctccacgccgcggaacatatcccgcctcccgccggtgcgccccgcgctcgcgccgctcgtcgccttcgtggcgctgccgctcccgcgcgtcgaggggctccccgacggcgccgagtccaccaacgacgtcccccacgacaggccggacatggtcgagctccaccggagggccttcgacgggctcgccgcgcccttctcggagttcttgggcaccgcgtgcgccgactgggtcatcgtcgacgtcttccaccactgggccgcagccgccgctctcgagcacaaggtgccatgtgcaatgatgttgttgggctctgcacatatgatcgcttccatagcagacagacggctcgagcgcgcggagacagagtcgcctgcggctgccgggcagggacgcccagcggcggcgccaacgttcgaggtggcgaggatgaagttgatacgaaccaaaggctcatcgggaatgtccctcgccgagcgcttctccttgacgctctcgaggagcagcctcgtcgtcgggcggagctgcgtggagttcgagccggagaccgtcccgctcctgtcgacgctccgcggtaagcctattaccttccttggccttatgccgccgttgcatgaaggccgccgcgaggacggcgaggatgccaccgtccgctggctcgacgcgcagccggccaagtccgtcgtgtacgtcgcgctaggcagcgaggtgccactgggagtggagaaggtccacgagctcgcgctcgggctggagctcgccgggacgcgcttcctctgggctcttaggaagcccactggcgtctccgacgccgacctcctccccgccggcttcgaggagcgcacgcgcggccgcggcgtcgtggcgacgagatgggttcctcagatgagcatactggcgcacgccgccgtgggcgcgttcctgacccactgcggctggaactcgaccatcgaggggctcatgttcggccacccgcttatcatgctgccgatcttcggcgaccagggaccgaacgcgcggctaatcgaggcgaagaacgccggattgcaggtggcaagaaacgacggcgatggatcgttcgaccgagaaggcgtcgcggcggcgattcgtgcagtcgcggtggaggaagaaagcagcaaagtgtttcaagccaaagccaagaagctgcaggagatcgtcgcggacatggcctgccatgagaggtacatcgacggattcattcagcaattgagatcttacaaggattgaagcatctcaggatgtacacctgcaacagtgcaactacaaaatccttggaataaaatgatttttgttttgtagtccacttacccaaaatatgcaaaggccgaacggtggggaaaattctaatcctgatttttttttcatttttgtttttctttgttatttatcaatttgataccgcccagacaaagttgaaatttaattgtaaaactttttatagtaaaaaaaaaaaaaaac

SEQ ID NO: 8051 - DNA, 2500 bp, Oryza sativa
  ref <308>: DATABASE ACCESSION NUMBER: AK105399
  ref <309>: DATABASE ENTRY DATE: 2002-08-28
aaatccctcctccccatcgcggctcctcctccggcagccagccatggccacggtcacgccgggggtgctgctcaagctgctccaggcgatgcacaccgacgaccgcgtcgccggcgaccaccgctcccccgtcctccaggtcaccgccgtcgtccccgccctcaccgcctccaccgccgactccctctggccctccaacggcttcctcctccagctctccgacggcctccactccacctacgtccagccctcctccgccgacgccgacgccctcgtctccgcgcgcccgcaactcgtcggccacctcgtccacctcgaccgcctccgcttcgcccgcccggtgccccgcgccgtcgggatccgccccgtcccgtcctctcgcagcgtctccttcgtcggcaacccggagccgctcgtcgcccgccccgccgcgtgctcccgcggctacgtcatccagcccgggtcccactccgacgccgcgccgccgctcatgccatccagttccggcaatgcggcgcagtccgatgcaacgaatgccatcaataggacggttctcgcgcacaagaacgtccccgaggccgcgccgccgcccgccgtttcagccgccaagaggcggttctcgtctccggcgccgtccaagcagcgagatccgtcgccttcggtcaagggcggcgcgtcacggccttcgtcgccctcggtgaagggcgcctcccgagcgtcctcacctgcggtcaggggcacgcccagggcgacgtcaccagcgccgtccaaatgcgtggtgcccagccttgttgcggccaaggaggagaatcgccgcacggcgagggagccggcgattatcgtgccatcaaggtacaggcagccgtcaccagtaggagggaggagaggggcggggtcgcccgcacccggtgggaggcgcgcgtcactgtcgcctagctcccggaggctgtccggggaaggtagcagcaagaagaaggtcggggtgttggtggctggtatctccaagatgacggatttgacgaatgggtcggctgttaagccggggaggaagagctgggacaatacctcaatcgcagcagcggctggctctgtgatgaaatcgaaggtcaaggtggataagagtactattctgaggacacaggaagcaatggcaagacgactgagtgatgttacaacagaactatccagtaacgatgatgattcatctgtagatgagaagccaaagccacggaagaagatagagtcacctgcagtaaagacgaaagcaatggctccaaaaattatgcttcatgatcctaaatggaccgatggaagcattccattggatggagtttctgatgtgctttcaaagatgggaaaggaagccactgaacgaagagacgcagcagcaattgctgcagctgatgctctgcaggaggcattaatcactgaatccgtaatcaggaacctaagtaaattttctgaactaacttcagcatcgaagacctccaatccccttccaacagttgatatcttccttgctgtctatgaggatactctcaaatggaagaaaattgctgagtctatatccaccaatagaactgaaactgcatcatgggagaattcagttactcattgggttgaagcagcattggcaactgatcttgaagtcctaaagttgatgaataaggcacctgaatcgctctctcggaaaaggggtgctgataagccaaaggctcccttggtggtagaagctccaagaacaaccatatccaagaggcaatcacatgggacttctgcaaaggtccagtcaaaggtcttaccgacctcttcagcgagctgcgcatggaacaaaactcagggcgtgaatgagacggctgagcttgccacgaccttgtgctgtgagatgcatacgtggttcctgaaatttgtggacgaggcaatggatttaggtttccacctttttgaagatcagaatgttgcaagtaggggaaagcagagcagccacataacaatggtactgtcccagttcaagaagatcagtgactggttggatggagtaggcaagattgcagaagaggctacaactaaggataaggttgagcagttgaagtgcaagatttatgggttcgtcatcaatcacatgggatctgcatttgatagctcggtctcgatttcatcaaggaattgaggaatgcttaaagtaagcctttaagtttcttctcttgtatttttgttcattggggatgggatcaaagctacataattctatgacgagaggtctgctacagtttgtagaagctactccttcagttattacctttggttttgccttgtgaataagttgtttgtgaaatggttcttgttttatcggttacaattatgtacacttgatagtttagcttgctgtagtctgagtgaatgactgacttgttaaagctacaagatatcattcttacatccttgcaaatattgtgctaggattaatggtatgttaatttgattggtgcccaatcttttc

SEQ ID NO: 8052 - DNA, 1608 bp, Oryza sativa
  ref <308>: DATABASE ACCESSION NUMBER: AK105400
  ref <309>: DATABASE ENTRY DATE: 2002-08-28
gaagcaaacactgcgatcatccgaagcaatctcaatctcacctgtccatatcgcgcacgaattcgtaaagtgcaagctagaaacatgtgtcacatgtcgtgctgatcgttcgatccaccacggtgcgagcggtgagtgtcgtgacgaagcaaaggcagaggcagcagcgggaaacggcgcccccccgtgtgtcgatcggctgtctcgccgaacagggcaaatacgccaacaaaaaacggcctcgttttcccttgctcgcacgcaccgtgtcgctcccaggcgacaagccgtggcgcgactcgccgcccccctgcgccccctcgcccccgcgcgtcgctttcacgtcgcacctctaaataccaccaccccggactcggcggcgagcccccgcgccaagaacgaaaggcgagagtgagagagatggtggagatcccggcgatcgacctgcggctggccggcggcggcggcggcgcggaggagacggcgaggctgcgcgacgcgtgcgcgcggctgggctgcttccgggtgtcggggcacggcgtgccgccggggctccaggccgagatgaaggccgcggtgcgcgcgctcttcgacctccccgacgacgccaagcgccgcaacgccgacatcatcccgggcagcggctacgtcccgcccggcacagccaacccgctctacgaggccttcggcctctgcgacgccgccgcccccgccgacgtcgacgccttctgcgcccgcctcgacgcgccgccccacgtcagggagaccgtgaaggcgtacgccgagaggatgcactcgctgatcgtggacgtcgccggcaaggtcgccgcgagcctggggctgcacggcgcctcgttccaggactggccgtgccagttccgcatgaacaggtacaactacacgcaggactccgtgggctcccccggcgtgcaggtccacacggactccggcttcctcaccgtgctccaggaggacgagtgcgttggcgggctcgaggtgctcgaccccgccgccggcgagttcgtccccgtcgaccccctccccggctcgttcgtcgtcaacgtcggcgacgtcggccaggcgtggagcaacgggaggctgcacaacgtgaagcacagggtgcagtgcgtggcggcggtgccgcgcgtgtcgatcgccatgttcctgctggcgcccaaggacgacacggtgagcgcgccgggggagctggtggacggcgagcacccgcgccggtacagggagttcaagtacgacgactaccggaggctccggctgtccaccggcgagcgcgccggcgaggcgctcgcgcgtctggcggcctgacacctggccacggtccattgtcgcgaccgtttattacgcggagtgctcactgctgactagaatgtccattaggcctccctgtatggccgtgtcgattctgaacaataaaatcttcgacgtacgacagtgaaaaaaatttgtaaaggatgctgaggggatgggaattttaggggttaataagtcttttgtttggctggaggagatgatgagttgtaggaataactggaaggtggagtttgtgagtaaattcccacctttttaatatagaggactataattgggagg

SEQ ID NO: 8053 - DNA, 2351 bp, Oryza sativa
  ref <308>: DATABASE ACCESSION NUMBER: AK105401
  ref <309>: DATABASE ENTRY DATE: 2002-08-28
aaaaaaaaaaaaaaaaaaaaaaaaacccgacctactaccctccatggccgccgccgccgccatcgccgccgcactcctccgccgctccacatcctctcaacaccaccggcgcatcctcctcctcccggccgacgacgcgcacgccctcctcctcccggccttcgctgagttctgcgtgacccacctcgcggacgagctgaggaagcacgagtctgtcatggccgcggcggacctcacggcgccgcacgcgtggtaccccttcgcccgcgccatgcgccggcgggtggtgtaccactgcgggcccaccaacagcggcaagacgcacaacgcgctcacccgcttcgccgccgccaagtccggcgtgtactgcagcccgctctggctcctcgccatggaggtcttcgacaaggtcaatgccctgggcgtctactgcagcctccgcactggacaggagatcaaggaggtgccattctccaaccacgtcgcgtgcacgatcgaaatgctctccacggaggagccctacgaggttgcagtggttgatgagatacagatgatggctgaccctgtcaggggctatgcgtggacacgagccgttcttgggctcaaggcagacgagatacatctctgtggtgaccctagtgttctgaagattgttcggaagatttgcgcagatactggagatgatttggaggtgcatcaatatgagcgcttcaaaccgcttgttgttgaagcaaagacactgcttggagacctcaagaatgtgcgctctggtgactgcattgtcgcgttttcacgcagagagatatttgaggtgaaactggcaatcgagaagtttacgaagcacaagtgttgcgttatatatggagctcttccaccagagacacggcggcagcaagcaaagctgtttaatgagcaggataatgagtatgatgtgcttgtagcaagtgatgctgttggtatgggattgaacctcaacattaggagagtggtattctatagtttggccaagtacaatggggacaggatggtacctgttgctgcttcacaggtaaaacagattgctgggcgagctggtcggagaggcagtatttacccagatgggctgacaaccaccttcttgttggatgatttggattatttgatccagtgccttcagcagccatttgaggaagcgaagaaagttggtctattcccttgctttgagcaggtggaaagttttgccatccagtttcctgaccttaccttcaatgaactgctggataagttccgtgaaaattgccgcgtcgacagtacatacttcatgtgtcaccaggaaagtatcaagaaggttgctaatatgcttgagaggatccagggtctctccctcaaggatcgctacaatttttgttttgctccagtgaatataagggatccaaaagccatgtaccatcttctgagatttgctacaaactatagccaaagccgtcgtgttagcattgcaatgggaatgccaaagggttctgcaaagaacgacactgagcttctggaccttgagacaaaacatcaggtcctgtcaatgtacttgtggttgtcacaccattttgaggaagatcattttcctcatgtgcagaaagctgaggaaatgtcaataaatattgcagatttacttgctaagtcacttgccaaagcaagctggaagcctacatcaagacaacaagcaaaaccaagacgagaaaatgaagaagacaacgatgtggagcaggcatcagatgataatgcaaagaatgattcagaagatggttatgaaaggtcaatatcacgtataaaaccgttcatgaggaaaaggctggatagacctagtcaggacccttcttccttgaactttgtggcatgaattacttgtggcctgggtgattaaccccgactgattgcttcatgagatcgtgtgtagccaagtcgttgcagccatttcaacctcccagaactggcagttcatctatcagttctggtgtaggatggttggttatgttggctgaagtttggaattgatcttatcctcaaaatgacactgaagccatccagaggtgtaagctagtatgctttagtggcgccacgggatactttaacttcagttttgtagattatttgcacgagaaggatatatcgacatgaattcatcagaattaagttattagtgttttcctgatatgaacaagggagtaagggactgtggtaataagttagctgggggatatacggtttttttattgggtattcacttagccttggatgtaagggactagaaagtaaacttgttttgtttcagttctgtttgaatcaatggcagcggtataaccttctgcaacgttctc

SEQ ID NO: 8054 - DNA, 2889 bp, Oryza sativa
  ref <308>: DATABASE ACCESSION NUMBER: AK105402
  ref <309>: DATABASE ENTRY DATE: 2002-08-28
agacaccaaagccgtctctgagaagaagagagggagagagagagagagagagagagctcggtcggtggaggcgacgacgacgacgcgcgcactgcggccgccatggaggagagaatacctctgctctcgaaacgattcccggcggacggcaccgccggagtgggaggagggagggaggaggagggcggagataggtggtggagcgggctggcgcgggaggcaggaaaggtggggtccatggcgctgcccatggccgcgatgagcgtggcgcagaacgccgtgcaggtggcgtccaacatgatggtggggcacctccccggcgtcctcccgctctccgcctccgccatcgccacctccctcgccagcgtctccggcttcagcctcctcgttggaatggcaagtggattagaaactctctgcggtcaagcttatggggcaaaacagtatgacaagttaggagtgcaaacctacagagcaatagtcacactaacagtagtcacaattcccatctcacttctatgggtattcataggcaaactcttgaccctaataggtcaggaccccgtgatctcacatgaagctggaagatacatagtgtggttgattccaggactcttcgcatacgcggtctgccagcctctcacaaaatttctgcagtctcagagtctaatatttcccatgctctggtcctccattgcaactctgctcctgcacatccctctgtcttggctgttggtgttcaagaccagcatgggatttactggagctgctttagcaattagcatatcttactggttgaatacattcatgctcgctgcatacatcagattctcatgttcttgtaaggtgactcgctcgcctcctacaatcgaggcattcagaggagtcggtttgtttctgcgaatagcactaccatctgcactaatgttatgttttgaatggtggtcatttgagatccttgttctcctgtcaggacttctacccaacccagagcttgaaagttcagttctttccatatggtaagaaaataagagtcctcaatgtcgcacttaacaatatattctcttatagctgcaccttttgttattttataagcactccatttatgcagcttgacgactacctctttgatgtatactataccatatggtcttggaggcgctgcaagcactcgagtagcaaatgagttaggcgctgggaatcctgaaggagctcgatcggctgttcaccttgtaatgtctattgctgggacagaggcagttcttgttactgggatgctgtttgcagcacagcgcatcttgggctatgcttacagcagtgatgaggaggttgtcacatatttcacctcaatggttccttttgtgtgcatctcagttgctgctgatagcctacaaggagttttatcaggttacatttcctaacatttgatttatctgttaattattcattcccttcaaaagaatggaaaaaatggagtattcagctatgcctgaagttttcgaaaatttgatctaactggccttgcctctctcttatttcattttttttatataactggttcttatagttttggggccattacatttacaccattcagtatctttagcctgttagcccaacggtatcttttaccccttagtttgattgcttaattcaatgtgtgcgctgttgtcaaatctctaccaagacctcaggtagcaagttaatttcagtcactccggtatcgtaaagacataccaggtaacttgccgcttcttgtttttcctttgttcaatgaaactaatgctattttgtgttgtggaggccgacattgttactcggggagttacctgtttgttccttcaaacatgtgctcttacgtgaacatggatatggtggtgtttacaatcaacacgcatctatcagcgatgtcgtcttaagtgtggactccacttcactaagtatgcaattacacctttcccctggctagtggtagactggtagtgtggcactggtgtttgcttcacaggtctatttcattgtttgtgcttctgagcagttgtggacatgccaaaaacaatgaactgaacttgcgaaaacacacatctcattcagctccagcacggaaacatactattgtttctcctctctagaagattatatcaagatagatgcaccacacgtcattgcttaacactgacagatattacttgttatcaggtattgctcggggttgcggatggcagcacctgggagcctatgtaaacctcggttcattctacctggttggcattccggtagccctacttcttggctttggtttcaagatggaaggcaaagggctttggctgggcatcgcctgtggttccgtattacaattcttgcttctcgccgtcattgcattcttcagcaactggcaaaagatggtttgtttctttatctgaaactccaagccttctccccaacatcatcaaatcttgatcactcgaaaactgaatcatgtttctcccgcctactgacctgatgctgcttctgcaggccgagaaagcgagggagagaattttcggcgagacaccgtcagagaagcaacatttggtgcttgatgcaacgaattcggtctgattctgcatcctgatccgttgacgcgaactgaagcggatgatcggatcatgtggaggagactggctcctctggatgtgtagggaatctgctgaagaagtaaagcagtgtgcatagttgtactgttgcatttgttggatccgggagaatgtatcaagaactctatgtgaaatgtatgatggcgatatgtatgtacgagatcgaggttccgaatacttccagcctatagaagtatagataaattttccactcttcgtggacagaaagaataaaaggctaatcttctctcgg

SEQ ID NO: 8055 - DNA, 2972 bp, Oryza sativa
  ref <308>: DATABASE ACCESSION NUMBER: AK105403
  ref <309>: DATABASE ENTRY DATE: 2002-08-28
caagatgttagtcaatgataaggtttcgaagactgaaaagaagcgtaagagaggagacacaggagcggcagaaaataatgggaaagggaagaaaatgttgacaggtgaaaacgccttaatgtgtcaccaatgccagagaaatgacaaagggagagtggtctggtgcaagacttgcaacaataagcgcttttgtgtgccatgcattaatcaatggtatcctgatttgcctgaaaatgaatttgctgcaaaatgcccttattgtcgcaagaattgtaattgcaaggcatgcctgcgaatgagaggtgtcgaagagcagcctccaagaaaggaaatttctaaagaaaatcagattcgttatgcctgtcatgtgttacgcttgttgcgtccttggctgatagaactgcgacaggagcagatggcagagaaggaattagaggctaagatacaaggtgtttcagttgatcaaataaaggtggaacaagctgtgtgtgatctagatgagcgtgtctattgcaatagatgcagcacttctatagttgattttcatagaagctgcaagcactgtttctatgacttgtgcttgacctgctgccaggagcttcgcaaaggtgagatccctggaggagaagaggtggaaattttggatcctgaagaaagagacaaggattatgcttttggtaagattctgtcagatggtgagaaccaaagggactctttgaagtgtcgcagcgacacccaaaacagtgagtcaaacaaaggcatggcttctgacgaaaaccaaaagaaggctctgttactttggaaagcaaacagtaatggtagcataccttgcccacgaaaggaaaaggaagactgcagtttttcatctctagatctgaaatgcttgtttccagagaagttgctccctgaattagaagatagatctgagaaggtcttctggagtgaaacatttgcaaaagaactaggtagaacaagtgagctgtgcccttgttttgatcactcaggcaagataagaagtgacagcaagaaattacgtcaggctgcaaatagggaggactcgagtgataactacttatactgtccggtggccactgatatccaggacgctgacctgttgcactttcagatgcattgggcaaagggcgaaccagttgttgtttcagacactcttaagctaacttctggtcttagctgggagccgatggttatgtggcgggcagtacgagaacgaaccaaagggaaggcagaagatgagcagtttgctgtgagggcagtagattgcctcgactggtgtgaggtggaaattaacatacacatgttttttatgggatatacaaggggcagaactcatcccaggacctactggcctgagatgcttaagctaaaggactggcccccttctagctcatttgatcagcgattgcctcgccatggtgctgaatttatcagtgcattgccatttccggagtatactgatccacgatatggtccgctaaatcttgcagtgaagcttcctggtggtgtcctgaagccagatcttgggccaaaaacttacattgcctatggattttctgaagagttgggcaggggtgactctgtaaccaaacttcactgtgacatgtctgatgcagtaaacatcttaacacacacagcggaagtgccctgtgagacttatgatgctgttcagattaaaaacacgcagaaaaagatgaaaatgcaagatgacatggaaatatatgggatgatagaatcaggcagtgaactcaagccatcagcatgcccagttgaattggggaacaaagctgttggtgaagcaccaaaggcctcatgcagcaaagaaaatgttcataccttgaaagacaagtctaatggtttggatataaacgcttcaccacctgatgatgctggaggtgatgccagggatgaagcattgtcctatgaatctgtggtacatagtgatgtagctcagtgtccaaaccataaccatgagaccaataattctgatgatgcacgtattggagctcagagatgtcaaaagaaagctaaaggtcgtcctccgaagacaggttcaggggtatcagagcaccaggaaagtggtggtgctttgtgggatattttccgaagagaggactctgagaaattacaagacttccttaggaagcatgcgccagaatttcggcacatccactgcaatccagtgaaacaggttattcatccaattcatgatcaagctttctatttaactgcggagcataaaagaaagctgaaggaagaatatggtgttgaaccttggacctttgaacaaaagcttggcgaagcagttttgattcctgccggatgtcctcaccaagtcaggaatttgaagtcctgcatcaaggttgcactggactttgtttcccccgagaatgttggtgagtgtgttaggctgaccaaggaatttagacgacttccatcttcccacagggctaaagaagataagctagagatcaagaagatggctttccatgctctgaatgaagttctaaactttctggatcctccttcctcagaagggtcgaaagaagcggcggagaagcctcgaagggggcgtggtcgcccaagaaaacactagctgcaacaagtgatgacttgatttgctgcgtccggctccctctctgatcatcttttgtggtgatgagtgggctaaaatcgttcatgcattttggaggaaggggaggaatcttgtgcatgtcaaaatgtggtagcaatagcatgatcgatgtaggtaggctgctaatgctaatcagttaatggcttgatacttttccttttggcttgaacaactaactagctgtctgtctgtctgtttgacttgtgttaagtggattcagacatgtaatctggtccatggtttcagctgtagcacatgatgttccatgtctgctttttcaaggttgttgtacccccaacgaaacggatgggattgatggccc

SEQ ID NO: 8056 - DNA, 2518 bp, Oryza sativa
  ref <308>: DATABASE ACCESSION NUMBER: AK105404
  ref <309>: DATABASE ENTRY DATE: 2002-08-28
attggttgcagcgttgttgttgtgttagtggtggtggtggtggtttgtgtgtttgggcgtcgatcaggagagataagatttaagatcagcgcgtgtgcgtctgttctttgcctgtttcaagatgaaattcatgaagcttggatcgaacccggatacttttcaggatgatggcaatgaagtcagcattgtggcaactgaattagtgagcgatgtcactgttcgcatagggactacaaagttttaccttcacaagttcccacttctgtccaagtgcgctcgctttcagaagatgatcccaactactggtgatgaaaacattgagattcacatccatgatattcctggtggcgccaaggcttttgagatctgtgccaagttttgttatggtatgattgtcacgctcaatgcctacaatgtcattgcagcccgctgcgccgcagagtacttggagatgcatgaaactgtcgacaagggtaatctcatctacaagattgaggtcttcctcagctcaagcattttccggagttggaaggactctatcattgttcttggtactacaaaggctcacttgccttggtcagaggatcttaagctggttagccactgcatcgactccattgcttcgaaagcctccactgacacctccaaggttgagtggtcatattcatacaatcgcaagaagctcccaactgagaatggccttgatttggaatggaatggagtcaagaagcagcagtttgtgccgcatgattggtgggtcgaggatctcgcagatctcgacattgattcatacaagcaagtcataacagcaatcaagaccaagggtatggtgcccaaggatgtgattggggaggcaatcaaggcttacacatacaagaagctcccttccttaagtaaggtttcaatggtccatggcgacgcaaaagttcgggccatgctagttaccatcacatgcttgttgccatcagagaaaggatcagtttcatgcagcttcctcttaaagctactgaaagcaacaaatttgctaaaatgtggagagctctgcaggaaagagcttatgaagcgtattggacggcaactagatgaagcgtccgtgtcggatcttctgattcctacagtggatggggagaccacagtttatgacattgacatgatactcagtatagtggaagaatttgtcaggcaagacagtaagaatgctcagaaacataatggtggtgaagtggacagtcatgtccaagcacctagtgcatccatgatcaaagtggctaaagtggttgatgggtatcttgctgaggttgcaaaagatccaaatacacccattttgaagttcattcatctagccgagacaatgtcgataaattcaaggccagttcatgatgggctataccgcgccatcgacatgtatctgaaggtactcttgcaaatttcaacttccaatcaaaaatgcactactcataggacatgttcacaagcacactgaatatctagcacatagtcctaatgcatttcagctcgtgacatttttgcttcaactcacgaatttattcatatgcattgctcatataaattcttctgtatttacggttgtacaaaatttgtttttaagtataacatctgtttatttttcttaaatgagcaggagcacccaagcttgggaaagaatgagaagaagaagctgtgcagcctcatggactgcaagaaactctcaccggacgcgtgtgctcacgcggtgcagaacgagcggctgccactgaggaccgtggtgcaggtgctgtaccacgagcagacgagggcttctgcggcggtcaccatccgagccgacagcatctgcgtcggctcgtacgagagctcgaggtcaggcgccaccaccaacacggaggacgagtgggacggcgtcatggtcgtggaagacctcagcctgtccaccaagaccaccaccaagctagacggcgcagccaatagccattgcagcaacggcaaggcgaagaaaggcggcgcgtcgacgccgaagaaggcggctcaccggaggacgacgacggtgccaaccggcaaagggcagtccggtgagcgcagcagctcggactcgtcggacagtgcgatcttgcagaagctggagcttcccaagaggaccccctccaggagcacgaagccggctgctgtgtagcgttagcttcctgcatgaattctcagtggattcgtaaggatcgttaggttcttagctgctgcttcttttctttctttcttcatgaatgttgcatagaagcaagaactaatggtttacacgtctgttggtagggatgttataatgtgaggtctgcttttaggtgatcttgttagtagcattgtaggcttgccatgaaacctatgaaaatgttggttgctactttgaggttttatgccatactcagaagttagtagctgttatgaaaaaagtttagaactttgttagaacttggaagcataattcatctgctgctagcctgtttatactggtatagtggtatgatctcagttc

SEQ ID NO: 8057 - DNA, 1486 bp, Oryza sativa
  ref <308>: DATABASE ACCESSION NUMBER: AK105405
  ref <309>: DATABASE ENTRY DATE: 2002-08-28
aaccagatccaccatgccaccacctgctattgcatttagcttcttcgatagtgcatttccgtattgagacggattcacccctcctcgcctggatcccatagtttctctgcctccttctcgcgcagatccgccatcgtcggcgacgggaggggcggatccggcgaccccttcccctcctgcacggatcccgtgggcggcttcactcctcctcgcttggatcctgtcgtctctcctccccactgtcgcgcggatccttcgtgggtggtgatgggaggtgcggatccggcgatctcttcccctctcacacgattctcgtcgtctctccgcccccctctcgcacggatctgccgccagcgacgacgggagggcggacccggcggcctcccctagggtgacgacggcaattggtttcaagaggtgccgatgtccatgatgagaccgtatgcgtctcatggtctccatcaccaaagccgccgatagcgccaagaagatgtacattgctcttgagctcccccgatccccactcgttccatcaccatcactcaacggactccccgctagctgtccggccggccggagaggagggttcaagcttgcagacgaaggtggaccgaggagagcgcagccgagtggtggcactgaagatagtgggcgtttcttcatgatttcaggggaggagcggattgttgagtggattcgaggcagagatggtggttaggatggagtggtgatgtcatcggaggttgtctcgaatgctgcagtcgaggtgtctgaaccgaaatctattttccaacttcgggagtggaggagaaactgggttcatgttttcaccgccgctggtcggaaattggtaaggtttttgtcatgaaattaccaatcttaattgaattggttagttttcagtagtttgaatttagtcttgaagcttaacagctaaagtaggaaactcaacctctaaatgataaatgatactgttcatattgatatttgcaaacattcaagtactgtgaattttattacctcaaggtgttactgtgaattttccaatcaatatgacacggtggttcaaaaattgcagattaaatcaaatcattaatttcatgctactatgatatgatctcatattaattttgttacctcaatgtgttaccgtaatggagtagaactgcattagaaattcttgagttatatataaacctaatggaattgtaactgcattagaatttcttgagttatatataaacctaatggaattgtaactgcattcagggttcagtttaatgataacgtggaagtggcttgacccccgaggaagagcctcgtgatttgtatttttgtattttcttgtgtgtttctattatttctatatgtatgtcttgcctgtgattgtattcgtgtatgtgtatttttcccctgcgagagaaatctgtaaaatcgtgttagtgtgagcgctaaaaaatagcggtagaaataacagaagaaaagg

SEQ ID NO: 8058 - DNA, 1190 bp, Oryza sativa
  ref <308>: DATABASE ACCESSION NUMBER: AK105406
  ref <309>: DATABASE ENTRY DATE: 2002-08-28
actaatcgatgtaccccttcgtctcggcccgccgccgcctcctccgctcgagccgcaccgcgcagccgccggcccaaaccctatggctcgcaaagcgcgacccgcggagcctcctacaccggggcggaagggcaggaaacctctcccctcccacgcgccgccgaccgaagccgccgccgccgccgccaccgccgccgcctctccagccgcagccaccgcctctccagccgcagacgccatggaggccgaagcgggcggcgtggccatcgtgtacgacgcgctcccggggctgacactggcgttctcgccggaggaggaggagcacctagagggtgcgactgccgacctaggcggcgcgtcgacctccgcctcggctgcggtggtggaggaggtggaggacgccaccgcggcctactccgtgttccgcaacgagatcacggcggctggggacgcgctcgtcgatatccccgcggcggatttcttctccctcgacgtgtcggcggcagttgaagacgagccggccaccccgcgtgcgttgtcgccgcagcctgctccggaggcgacgctatcgggttctctagctcccgctgagcagccagcgcaggggtcggagcgcgcgtggtttcggggagggaggcggttcaggagccctatgctgcagcttcacaaagagattcttgacttctgtgactttatatcaccttctgctgaagaacaatcttcacgaacagctgctgtgaaagctgtctccaatgttatcaaacatatatggcctcaatgcaaggctgattcttcgagtggtaacaatgctgaaaatggtttcaagcgggggaaaggattagcacaatgtgatagatcgcatcaaagtgcaggaagcagcagacggagcaaagggccgagagagtatgacagatttacaaataccctcccacaatatactcagcacattagtaggtggtgactttaggctgttactgatagcatttacagtacagttcgggattgggagatcccacgaggttttgacaggcagaatggcgccttggcagacgtcgaagttcaagcagctttctgtagccatatgtatgatttattatttatttgtttgtctaaggttattcggtcctttgtaacgccgatgaaaccgatatattcagttatattatcatcgtatgaactgcaatttcgcc

SEQ ID NO: 8059 - DNA, 2644 bp, Oryza sativa
  ref <308>: DATABASE ACCESSION NUMBER: AK105407
  ref <309>: DATABASE ENTRY DATE: 2002-08-28
tatgcctgagcggggcgaagccagaggaaactctggtggaggctcgaagcgatactgacgtgcaaatcgttcgtctgacttgggtataggggcgaaagactaatcgaaccatctagtagctggttccctccgaagtttccctcaggatagctggagcccattacgagttctatcgggtaaagccaatgattagaggcatcgggggcgcaacgccctcgacctattctcaaactttaaataggtaggacggcgcggctgctccggtgagccgcgccacggaatcgggagctccaagtgggccatttttggtaagcagaactggcgatgcgggatgaaccggaagcctggttacggtgccgaactgcgcgctaacctagaacccacaaagggtgttggtcgattaagacagcaggacggtggtcatggaagtcgaaatccgctaaggagtgtgtaacaactcacctgccgaatcaactagccccgaaaatggatggcgctgaagcgcgcgacccacaccaggccatctgggcgagcgccatgccccgatgagtaggagggcgcggcggccgccgcaaaacccggggcgcgagcccgggcggagcggccgtcggtgcagatcttggtggtagtagcaaatattcaaatgagaactttgaaggccgaagaggagaaaggttccatgtgaacggcacttgcacatgggtaagccgatcctaagggacggggtaaccccggcagagagcgcgaccacgcgcgtgccccgaaagggaatcgggttaagatttcccgagccgggacgtggcggttgacggcgacgttaggaagtccggagacgccggcgggggcctcgggaagagttatcttttctgcttaacggcccgccaaccctggaaacggttcagccggaggtagggtccagcggccggaagagcaccgcacgtcgcgcggtgtccggtgcgcccccggcggcccttgaaaatccggaggaccgagtaccgtccacgcccggtcgtactcataaccgcatcaggtctccaaggtgaacagcctctggccaatggaacaatgtaggcaagggaagtcggcaaaacggatccgtaacttcgggaaaaggattggctctgagggctgggctcgggggtcccggccccgaacccgtcggctgccggcggactgctcgagctgctcgcgcggcgagagcgggccgccgcgtgccggccgggggacggaccgggaacggccccctcgggggccttccccgggcgtcgaacagccgactcagaactggtacggacaaggggaatccgactgtttaattaaaacaaagcattgcgatggtcctcgcggatgctgacgcaatgtgatttctgcccagtgctctgaatgtcaaagtgaagaaattcaaccaagcgcgggtaaacggcgggagtaactatgactctcttaaggtagccaaatgcctcgtcatctaattagtgacgcgcatgaatggattaacgagattcccactgtccctgtctactatccagcgaaaccacagccaagggaacgggcttggcggaatcagcggggaaagaagaccctgttgagcttgactctagtccgactttgtgaaatgacttgagaggtgtaggataagtgggagccctcgggcgcaagtgaaataccactacttttaacgttattaaaagaacaacacacaactcggtctctagttgaaaagctatagccatggcggaggagaaggagctggtgctgctcgatttctgggtgagcccgttcgggcagcggtgccggatcgccatggcggagaaggggctggagttcgagtaccgcgaggaggacctcggcaacaagagcgacctcctcctccgctccaaccccgtccacaggaagatccccgtcctcctccacgccggccgccccgtctccgagtccctcgtcatcctccagtacctcgacgacgcgttccccggcaccccccacctcctccctccggcgaactccggcgacgccgacgccgcgtacgcgcgcgccacggcgaggttctgggcggactacgtcgacaggaagctctacgactgcgggtccaggctgtggaggctcaagggtgagccgcaggcggcggcggggcgcgagatggcggagatcctccgcacgctggaggcggagctcggcgaccgggagttcttcggcggcggcggcggcggcaggctcgggttcgtcgacgtcgcgctcgtgccgttcacggcgtggttctacagctacgagaggtgcggcgggttcagcgtggaggaggtggcgccgaggctggcggcgtgggcgcggcggtgcggccggatcgactccgtcgtcaagcacctcccctcgccggagaaggtctacgacttcgtcggcgtcctcaagaagaagtacggcgtcgagtagatcggtggatgcgaagttgcagggatcgattggcggttgcgttcgctacgtgaacgattcgtccgttgtttcagtggccaagtgtgtgtgagtttgttgttaccgttgagtgcttgtgtgtgggatggttggtggcagcagagagttgcctccgattctctgagattgtcactaaataaagtttgtcctttgaaactaaaaaaagttggctttggtt

SEQ ID NO: 8060 - DNA, 1670 bp, Oryza sativa
  ref <308>: DATABASE ACCESSION NUMBER: AK105408
  ref <309>: DATABASE ENTRY DATE: 2002-08-28
accgccgcgacgagcagcgtgagatctcggtgccaccgatcgagtcgacgcagaggagagagagatcggggtttggttttttggaggggagagcggagtgtaggaggaggaagaagcgggtgatcgattttgcttcgatggtaagggagacggggtactacgacgtgctgggagtgagcccgacggccaccgaggtggagatcaagaaggcgtactacatgaaggcgaggaaagtgcatccggacaagaacccaaatgatccgctcgcggcggcgaagttccaggaattgggagaggcataccaagtactcagtgaccccacacaacgtcaagcgtatgactcatatgggaaatctggtatttcaacggaagcaataattgatccagcagcaatttttgcaatgctgtttggtagtgagctttttgaggattacattggtcaattggcgatggcatccatggcttcacttgatatatttggtgacgaagaagagattgatgcaaggatgttgcaagagaaaatgcgagttgtacaaaaggaaagggaggagaaacttgcagagacactgaaaaacaaattgcacctttatgttcaaggaaacaaagaggaatttgtgcagtttgcagaagctgaggtgtccagactttctaatgcagcgtatggggttgatatgctgagtactattggttatgtatattcaagacaagctgcgaaggagcttggaaagaaagctatatacctgggggttccatttatagctgaatggttcagaaacaaaggccattatattaaatcccaagtaacagctgcaacaggtgcaatagctctcatgcaactgcaggaagacttaaagaagcatcttagtgctgagtgccactacaccgaagaggaacttgaagcttacatggagacccacaaaagtgttatggttgattccttatggaagcttaatgttgctgatatagagggaaccctatcacatgtctgtcagatggtgcttcaagatagcactatcaggagagaggaactaagagctcgagctaaaggattgaaaactctaggcaaaattttccagcgtgttaagcttggttctagtgagggggaggtcacaacaatcaacaatacaataaataattctgatgacaatgatggtagttctcctgattcatcaccaatgtccccaagggagcatccatatgatccaaacccaccgtattaccagagcccgtatgtggaggcccctcaattcgtcggaggttacccttcactcaactttccaatgccaaccgctccccccggtgcacagagggatccaatcccatgatctatatgggacggacgcggtagtagctttggttccagaaagggtcatcattttgtacaatatttttcttcctcctggtagatggttggtcacattggtcaagatgatttgtgcttattagtcgtagtagagtgctggttgtcctactcctctgcatgctttttttttcccttcagtttcagttgtgtttgtgtcgtgtacaggcaggtgcgcgtgttgtgcaaatagcgctgctgttaaatctgtaatgctgttgctgaggcggcaacagatcggcatttgttgtacatgaacaacaatctccatatgtctatgggtgcataactgtttttgcctatggcccat

SEQ ID NO: 8061 - DNA, 1475 bp, Oryza sativa
  ref <308>: DATABASE ACCESSION NUMBER: AK105409
  ref <309>: DATABASE ENTRY DATE: 2002-08-28
cgaagacgtaccagctggtggaggacccggcggtggacgacgtgatctcgtggaacgaggacgggtcgacgttcgtggtgtggcggccggcggagttcgcgcgggacctcctccccaagtacttcaagcacaacaacttctccagcttcgtgcgccagctcaacacctatggatttaggaagatcgtgccggaccggtgggagttcgccaacgactgcttccggcgaggggagaagcgtttgttgtgtgatatacaccgccggaaggtggtggcggcggctgccgcggcgccgccgccgccgtcgccggggatggcgacggcagctgccgcggtggcttcgggagctgtgacggtggccgcggcgccgatacctatggcgctgccggtgacgcgggcgggctcgccggcgcactcctcggaggagcaggtgctgtcgtcaaactctgggtcgggggaggagcaccggcaagcgtctgggtccggctctgcgcccggcggcggcggcggcggctccgcgtccggcggcgacatgggcgaggagaacgagcggctccggcgggagaacgcgcggctgacgcgggagctcggccacatgaagaagctctgtaacaacatcctcctcctcatgtccaagtacgccgccacccagcacgtggagggctccgcggggatatcctccatagcgaactgctccggcgagtcgtcggaggccgttcccccgccgccgcctctccccccggcgatactcgatctaatgccctcgtgccccgccctggccaccgccgccgccgctgcggggctcgccatagacggcgagcccgacccgagcgcgcggctgttcggcgtctccatcggcctgaagcggacgcgagacgacgccgccgccgccgccgacgaagacggcggcggcgaggatcaggccgagcacggcggcgcggacgtgaagccggaggcggcggatccgcatcccgccggcggcggcggcggaagcagcacggaggcgtcgccggagtcgcacccgtggcccatataccggccaacccccatgtaccacgcggtcaggcccacttgcaacgggccggacagggccgggtccgaccaagacgggtccagctccaggtgagttggcccccccaaccctgtagaagcttctagacccctatattacttaattgcccctcccctacactattataagcaactaattatgattagtacgtaattagcggcgaaataataattactaccactagtagtactagatgctcttttgcttcttggcgaggaagaacagatgagagctcaccttgtctctcgatcgatcgccttgtaatccgtctgcctctttctcttgattgtgttgttgtaaatcatcagcgtaagatccatcaggatgccggtaaggcggtaattgcaacctgggtttaccagtgtattggctgcctgctgcggaaatgagaagtgcatttccttg

SEQ ID NO: 8062 - DNA, 2918 bp, Oryza sativa
  ref <308>: DATABASE ACCESSION NUMBER: AK105410
  ref <309>: DATABASE ENTRY DATE: 2002-08-28
gttccgttccgttccattccattcggtgcctctgcccggagccgaactccgacgccttatcgactcactcaccaagtgctcgacgcaattccccaccggggagcccgcccgccatgccggagagcaacggcgccgcgtgcggcgcggcggagaaggtgaagccggcggccagccccgcgtcggaggagccggccgccatcgccggtaacatctccttccacgcgcagtacagcccccacttctcgccgctcgcgttcggccccgagcaggccttctactccaccgccgagagcgtccgcgatcacctcgtccagagatggaacgagacgtacttgcatttccacaagacggatccgaagcagacgtactacctctccatggagtacctgcagggccgcgcgctcaccaacgccgtcggcaacctcggcatcaccggcgcctacgcggaggccgtgaagaagttcgggtacgagctcgaggccctcgtcgggcaggaaaaagatgcagctctgggaaatggtggcttgggtaggctcgcatcttgctttttggattcgatggcaacactaaatttgcctgcttggggatatggtctgcggtaccgatatggtctattcaaacaatgcatcaccaaggaaggccaggaagaaattgctgaagattggcttgagaagttcagcccatgggaaattgtcaggcatgacattgtatacccaatcagattttttggccacgttgagattttgccagatggatctcgtaaatgggtggggggagaagttctcaatgctttagcatatgatgtgccaattcctgggtacaagacaaaaaatgcaatcagtcttcgtctttgggacgcaaaagctagtgcggaggattttaacttatttcaattcaatgatggccagtatgagtccgctgctcaacttcatgctagggcacaacagatatgtgccgttctctatcccggtgatgctacagaagaaggaaagcttctcagactgaagcaacagtatttcctttgcagtgcatcgcttcaggatatttttttcaggtttaaagaaaggaaagctgacagagtttctgggaaatggagtgagttccctgcaaaagttgctgttcaattgaatgacactcacccaactcttgcgattcctgagctgatgaggctactcatggatgtggagggacttggttgggatgaagcatgggatatcacaaataaaacaattgcctacaccaatcacactgttcttcctgaagcccttgagaaatggtcgcagattgtaatgaggaaattacttccacgacacatggaaattatcgaggaaattgacaagcggttcaaggaaatggtaatctccacccggaaggaaatggagggaaagattgactccatgagaatcttagacaactcaaatcctcagaagccagtagtgcgcatggcaaatttgtgcgtagtgtctgcccatacggtgaatggagtggctgagttacacagcaacattttgaaggaagagctttttgcagactatctctctatatggcccaacaaatttcagaacaaaacaaatggaattacacctcgtagatggctccgtttctgcaacccagagttgagtgaaatagtaacaaaatggctaaaaacagatcagtggacaagcaaccttgatcttcttaccggacttcggaaatttgcagatgatgaaaagcttcatgctgagtgggcatcagctaagttggctagcaaaaaacgcctagccaagcatgtgttggatgtgacaggtgttacaatcgacccaaatagcctttttgatatacaaattaaacgcattcatgagtacaagagacagctgctaaacattttgggagctgtttacagatacaagaagttaaagggaatgagtgcagaggagagacaaaaagttacgccacgcactgtcatgatagggggaaaagcattcgcgacttacaccaatgccaaaagaatagtaaaattggtaaatgatgttggtgctgtggtgaacaatgatcctgatgttaataaatacctaaaggtggtgttcattcccaactacaatgtatctgtggccgaggtgctcattcctgggagtgaactgtcacagcacatcagtaccgcaggcatggaagcaagtggaacgagtaatatgaaattctctctgaatggttgtgttatcattggtactcttgatggagctaatgttgagataagagaggaagtgggacaagaaaatttcttcctttttggtgccaaggcagatcaagttgctgggctgaggaaggatagagagaatggcttgttcaaaccagacccacgttttgaagaagccaagcagcttataaggagtggtgcttttggcacctatgactatgctcccctcttggattctcttgaaggaaattctggatttggtcgtggtgattatttcctcgttggctatgatttcccaagctatattgatgcacaggcccaggttgatgaagcctacaaggataagaaaaaatggatcaagatgtctatactgaacacagctggaagtggcaaattcagcagcgaccgtactatcgctcagtatgcaaaggaaatatggggcattactgctagccctgtctcctaaatacgagatgcaccaagacgaagctcatcaagatggacgctatattatgcaataataaggattagataacgatccacggtgaataacacttgcttccgttgtaagctggagcgcggagaacccagcaacgagtgaagctggcactttgaagtgcgctggaaaacgcaaccctcttttgctttatgctaatatatatgtatttggtctggaacaaggtacttgtgagatgtactggatggaatcttccgtcacaaaataaaacgattcaaatttttggtt

SEQ ID NO: 8063 - DNA, 2799 bp, Oryza sativa
  ref <308>: DATABASE ACCESSION NUMBER: AK105411
  ref <309>: DATABASE ENTRY DATE: 2002-08-28
accacactccccgaggatggaagacaagcgtcttcttcgtcttcctcgcttgttctctgcctgcccctgcctagcttaatgtggaactaactaggagtattaattaattccttccactaattaccaagcggcaatcggcggccacggccagtgaggtcaccgtccgctccgacgacgacaagctgccactgctcactgctctctcgagtctggaagcaggcgttgctcggcttctctcactatgaagggccaccattccttgccgccgtcgacgccgcccaagcgccgctgcactgccctggccgccgccgtcccggcgctcgtcgtctgctccatcctcctgcccctcgtcttcctcctcggtctccaccgccccgggcatggatcggaggagcgcgccgcggttgtcatcagcactgaattagggtttagcaagcacaagcatctggatgggagaatgaagcacaagctactcaaggatgtttctagaaagaaaattcctggatctgatgggattttggatgagaaatctggtagtagatcaaagtccaagagtgtttctaccaaatcaaaagaaaagctcaagggtgttttctctttagttcagctaaaaaatgagaccagaaaaaacaaagaacttcatacacaaagaagataccagttaaaggacttatcctggagatcaaaggatactactattgataagaaagagaaccaagaccaagaagtcgagcatgagaaccccagatcctgtgaacttgaatatggtagctactgcctctggtctgttgagtataaggaagtgatgaaagattttattgtgaagaggcttaaggatcaacttttcatggcaagagctcactatcctagtattgcaaagctgaagaaccaggaaacatttacacgtgaactgaaacaaaacatccaagagcatgaacgcatgctcagtgacaccattgcagatgctgatcttccaccattttttgcaaagaagctagagaaaatggagcgcacaattgaaagagccaagtcttgtgaagtcggctgcacaagtgttgaacggaaacttaggcagctacttgatataactgaagatgaagcttatttccatacaaggcagagtgcatttctctatcatcttggggtacaaactatgccaaaaactcaccattgcttgaacatgagattgacagtagaatatttcaaatcaacgtctattcatacggtccagtcaaacaagcagaaacttgaagaccccaccttccatcactatgtgatattctccaagaatgtgcttgcagtttcgactacaattaattcaacggttatgaactccaaggattctggtagcattgttttccatttgttcaccgattcacaaaatttttatgcgatgaagcattggtttgacagaaatatgtatttggaagcaactgtacatgtaactgacattgaggatcaccagaagctctctaaggatgttgattttcatgatatgaaactgttacgacctgctgaggaattccgtgtcacgttccgtaatcattatcaatctttccagaagcaaatgaaaactgagtacatttctacttttggccattcacatttcctcctgcctgaccttcttcctagcttgaatagagttgtagttctagatgatgatttgattgtccagaaagacttgtcatctctgtggaacctcaatatgggaggtaaagtggtgggagctattcagttctgtgaagttaaattaggacaattgaaggcttacaccgaggaacgtaattttggcaccaattcatgtgtgtggttatctggtctgaatgttgttgaactgaaaaaatggagggatctccacattaccagtcggtatgatcaattgcttcaaaagttgcaaaaggacagtgtgacatcatttccacttaaagtacttcccataagcttacttgtctttcaagatttgatatatcctttggaagattcatgggtccaatcaggtcttggacatgattatggagttagtcaaaccgatataaaaaggtctgttactctacactacaatggtgtcatgaaaccttggcttgatttgggcatacatgattacaagggctactggaggaaatatatgaccaacggggaaaggtttatgacagaatgcaatatacattaataacagactaacagtgacatgagattcactacattctacatttctgggattttggagcaacagaactttcgggaacaaagagggttagagtgagatgaaatctgatgcagcattataatgaattgagtatagtaagggtggcatggtggcactacattaattccaaaatggagataggatgaaatgtttttgtgccagattttaagcaatacttcatagtagctaaagatggtagcaggccaccagcatgatacctttgaagtagatccctggttaacaatggtgtatgttgattccttcacctgttacacgatttggatggatcttcttcacatttaccactttgggattgcaaaagagcagttccctggtggttattttttcgtataaattctttcatgtgtatctttgctcgttgtataagagctatactgtataacttgagtgttcactagcatggcatgtacagatgtagaatgcctcaacccgcaagtattgggtgattctttctttcttcttcaaggcctatgtaccatgtcacaccaatgtctaagttttgagatctttgcattttgtacatcggaaggattcttgtatcatcagtttgataaaagatagtacatagagct

SEQ ID NO: 8064 - DNA, 1606 bp, Oryza sativa
  ref <308>: DATABASE ACCESSION NUMBER: AK105412
  ref <309>: DATABASE ENTRY DATE: 2002-08-28
agaaacctagtccacctgaccacctccccacttccctttccccgattcttctcactactgccgaccagtgtgggctactacactgaactgaacaccaaccgaagcagcgacctcaacaaccatcgagcaaactagcaatggcctccccaatccactcgccgccgccggagccggccaccgatggcgatgatgcccaatcccaccctccccctcccaccccgcacccggcaaccgatccccctcccatctcaccccaaaatccaacccctcctcctcctccccttcctgcctccgccgccgcccctactactccgtcaccaaatcactccggcgatccctctcgccccattccttcgcaggccccggcaccgccccctcctcccaccgccgatccgtctcctcccctcccccacgacaaccgaactccacagccgcgggcggcgccccctcccgctcccgctcccgatcaaccagcaccgccttctccaccaccatcactgccgccttctcccccagcaccggggtccccggaatccatgctggagcgggaggcgtcggaagcggatggagaaccggagaacatgacgcttgcccttgcgctggcggagacggagacggagaaggcgatgccgccgacgccgccgaaggccgcggaagcggcggagtccccaaccggatcgccgcagaaggagtctgccctgaccattgccaagctcctctccggcgaggaccacgcggggacggagacgaagccggtgcccgagaaggccgcaccagcagcaaccaccaccaccgccgccgtcgcatcagtcggcggcggcggcggtggtggaggaggaggcgtggggtctaagagatggcttcttggcggcgtcccagagaaggtgcggcggtcggagctcaggagggccgagctagggttcagggttttggccgccgtcttctgcttggtctcgctctccgtcatggccgccgataccacgccgggctggtccggtgactccttccgccgctacaacgagtacaggtatacactttctgcgagtgtgttggcttttacttactcggggttccagttggtcgtggaagtgcactactttgtcacggggagacgtataattcgagacccatcagggaagtacttcaatctcgcaatggatcagatattggcttacctcctgttgtcagcatcttcagcagcactttctcgcaatgatgtttgggtgtctcggtttggagtggatcaatttgccaaacttatcaatgcttcagcctccatggcattcttagctttcgttgctcttggttttagctccataatctcagcgtatcatgtcttcagctcggttttttaaacccattgtacattacttgttgtaagtactatgtgctagtctgctagatgtatcttggtcaagccaaccttgattgttgcttcttgtttgtagaattgtggcaacgatattggactccgaaatgggaatacacggtgatctttttaagagcgtgtaatggcagttgggccttggggaccaatcggttctgtaataaaaattctgtagagcaaatcattcaaggatgcgacttttactggtattgattgact

SEQ ID NO: 8065 - DNA, 3542 bp, Oryza sativa
  ref <308>: DATABASE ACCESSION NUMBER: AK105413
  ref <309>: DATABASE ENTRY DATE: 2002-08-28
aaaacaatcctatcgccgcgacacaccacactgttcctctcgctcgctcgctcgacgcccgccatgcttccgcctctcgccgccgcgccgccgcctgcgcagcacgtcgctcccgcgttccccaacctcccacggagccgccgccgccacctcctcggcctccagctccttctccgccgccaccgccccgtcagcgtcggccaccaccaccaccaccaccaccgccgccgccgccgcctcctcctcgccggcgcgtacgcgcccggcgatgggggcgcaggacaggatgttgatagttcggagagcacctctagtacaggatctgcatatattggcctctttgttcgaatgctaggcttggacaatgatcctcgtgatagagagcacgctgtttacacaatttggcaatactcccttggcggacggaagtgcattgatgagattatgcagttccatggctgtgtcgccctcatcgtcagcctcctaagatcagattctgtccgtgcctgtgaagcagctgcaggtcttttgcgtaatataacttcagtgaagttatacagggatgtggccatcgagagtggcgccatggaggaaatttttagccttctctgtaaatctacgataaccccagagatgttggagcagtctttgtgtaccatttggaacttttctattgaggaaaatttgagatacaagattttgtcaagtggtatgctaacacggatggttagatttctagatgacgaagacattaaagtcaaagaggctgctgcaggtatcatatcaaatttagctttaagtcattcaaatcatggagctttggttgaagcaggtgttattccaaaattggttcaacttttgcaaaacaaagaggacgactataagattatcagaaaggaagctaaaagttcactcttggcactatccactgatgaatattatcatactcttataatagaggagggtttagtccgggttcctctagttggctcagctgtgtataaagcatttagacctcttccacactcatggccctctttccctgatggctctgagatccagcggagttctcgcccttcaaaatatggtgctactgagttgcttcttggcctgagtgttggcgagaaggaaacggagcctgatgaagcaaaagttaatgctatgataggccgttcaaatcagcagtttcttgcgcgcattagtgctattgagttggatgatgaaggaaatgaacaatctggtggatctcaaaggaatgatctctataccattttaccatgggtagatggagttgcacgattagttttaatcattggtcttgaagatgcttctgcaattgcaaaggctgctaaagcaattggtgatgcgtcgaaaaatgaacatatgcgctcctcattcaaggaagctggagctgtcaaacctctacttcagttactgaatcatactgatgtgcctgttagaaaagccgctgtttatgcattggaaaaactaagtgtcagttccatagtctgtgagcagatcaaaacagatggtggtctaaaactgcttgcagacatagtgaaggatcccaataccccagttgagcaactggagaagataatcatcatgctttctcgaatattcaacacgggtatcagcatggtagctgtgcctgatagctcagctattaatgggtctgaggatacaatgcattctgagaagagtaatggtagctgtggtgatattgatggtggaaccaatggaacttccttcgcatatttgaaacaagaggagacatctagtgtgtcaatcatcgatttcgacgtcatttcacgcttaactagagttctgagggaagcatctccaagtttgcaagaacaagtcgcttctgtactggagcatttagcagcttttgatcagcatgcaacggcgatgactgctgctcgcattgagtcagtgattgaagctgttctggaaatgggagttattcatggtaccatgggcgatcctgaaaactttgatgagcttcctactgttgtgatcgagcaagttagtcgggctgtttctgccactgttaggttactcacaaaattactcgactttgatatttttgttcgcagcataaataccgagaaatgtattgctctgttaagaaaaatgttcaagtccagtattcctcttcagtcgaaggactggcttgcagcatgtctcattaagctacaatcaacggctggcttatcaggacatgagagtgtcagtagtatagatatggagataactatctacgagactattccgaggctagttgaccagatgatgacctcattttcttttgaaaataaaagaaatgctgtaatagagctgaataagatagtatcaggaggtgtgatggaatacacgagagcaattgccacagctggaggaatatttccactggtgaaaatgattgaagagggtgatggtgatgcattggaagctagcctagctatcttgtataatctgagcatggatccggagaatcatccagcaataattgctgctggagcagtgccgctattgaagcggattgttgttgctgaaagttcacactggaatcgtgctcttgagttgctgagaacgttgcctgtatgacatctcgatgacaaatgaccaattgttctcagtacaccttttaaacttcaccttattgcactgacagtgttgtaatagtaaccaaatggccaacaaaatatcccgaatattgacaatttgcagattgcacttacggtggtaccaagctggctcaaatatgtcatgtagatagataattttcatggcaatgaagaagcattggtggagccttctatgaaatcaggggtgttcctgatttccggcaactcgacaatgatttcaccatttcatgaccgaccaccagtttatcaagcaacctgtgacctgagcaggatgaataacttttttgtgctgacaggtaaagggacaaaagtgtgcgccagacatagtagcagttcttgatagtaccaagacactgcagaaaattcacattgttgcggaaatccacaatgtgctgacgctgcttctgtaaatgattctaaagagtagaattctggtgttacttcatcatccttgtcctactgccacagttaattttgcccttctcccagttagattattgcattggggagagtatttccccaacatgtaactgaagtattatgagcttagcaaatgtagtacttgaagtaaaaaaaaaagcctaacaatcagcttgaagcaatgggtgactgtagctgcgagtctggttcgtctgtcccatggcgttgaagttgaacccagagggacgcgtcgtatatgatgctattgggtcatcacgtgcagctcacgtaatttctggaattgtttttccttcacctatgttggcattcatgatggatgcttggtaactgggaggaaatatgtagtggtaactgttggagtaagtattgcattcaacgtttcctactgtgttcagacctacagctcgatcagttccttcatcagcatatgcatttacgttcgggacaagc

SEQ ID NO: 8066 - DNA, 4209 bp, Oryza sativa
  ref <308>: DATABASE ACCESSION NUMBER: AK105414
  ref <309>: DATABASE ENTRY DATE: 2002-08-28
aaattcaactcttcattttgatatcaaatttgctattttaagattttatttgaatttccttaatttattcaaatgccatttgaataaatatttgatttaatcttataattgaatttacaatttaaacttatatttgcttttcaaatattttcttttatttccaaaatgcccgttagccactaaaaagccgccggttggaactttacgccttccatggggacgtttgcgcggtctacggacctcaacgtcggaccgttggttgtaaagcccggcaaaaaccaaacctaaggtcgaagtgctgctcctggcaccccacgccttgatgcgtacagcggtcggagcttcactatcccctcgacctccattgcacgccgcacagttagctcttgagctctgtgtgatcctagccgctctgccgccactcacggttgtcggagtaacacttccgccccactaaacctgcacccacctcctattcttctagccgatatgttgtctatcgacacggctagaaataataccaaacctagtcgtcatgttgtccaactctagcgacgactagcaaacacccaaaaccctagccgatatttatcctacctcgatatcggcctaaacaactaaaccttagccactattctatcaaagccaaccttaacccatattagccacatgcctatttaaccatatcaactattcagtatatttcctatcgtccaaaccacgagagcctccacataaaatatagagcctagccgagatactgtcctactccacagtcgactcccatataactaaaccctagctattatactaccaaaacctaccactagcaaatactagccccataatccctataccctataaaagagataggttataccttaaaccctagccctcttagtcgtttatcgttttcttattattttatggcttttattgaatttggttcttcctctttctcagtaaagactattgtcttttggatggcaacctatggtatttcgagaatcgtataatcaggttgcctatcttggattcatttgcgttggagcaaggcaagttattattcctccccttgagcataattatcctatattctatatctctattctatgcattagccattcatgattttgaatgcataacttgaacatatagcaaaccagttatatgctagcttttgcttagccctgcctagttagattgcataaaacataatgaacttagattgggacagtacgcaagatttggttgatttccgggtggctagtactgtctcggtcgatataagtttaccaagtacttatgtcaaacgaacgagtacgaccgcagcttctagaatggggacagacctagatattatgttaattaacagtgtggtacctctgtacagtggttcttatgtaagtcctcgcgaaggaggcaaatatatgccgcgaagggcaaatgtgatatttaccgaggcgcaggtaaatatcttgattatcgcgcgatgtgtgtgtgaatttatgaaaacctggttgagatgacatggggtctctcatccagttctctctaaaaaccccgggaacgccagaactcctctcgctgctgataacgttacattcagagcgcatggggattagagttcatggaacaagtgccacaattgttaataacctaatactgggccatgactaagctaatgattattggcaagtcgtggactgcgggtaaagcgtacatctactgcagtatgaatatccttgaatctattcgaatagccgtgctcacggattgagcatcgggactcatatggtactttggttagaaatataattcaagattttcttaaatactgttgcatatcaagcatttcaggatttctacctctttattctcagctttctgcaagtaaacctagctctacacagatattaccatttcatatattcattattggttaatataatagcttgctgagtacgttgtactcacccttgcttcaacccctctttttcagagtttaattggagtttttgccgaagctgggagttcaatcacataagttagttccctttaaacctaatcttcaagtctagtgtagttagatggtttaattctatagtaaaacggcagagttgagtcatcgtatagcctctgctgtaatagttagccacaaacttgtgaatgtcctattattttatataaagatatctcctttgaagtctttaccaaatgtatgcgatgaagatccagattgttgaacctgtatcaatctactgatccagagcttgatacagttaaacatgtcggtttctgaatcgttagttttgggatccgacaactatgcattagacgaacgatggcggcggcctaagtttgttcaaatttatagtactataaaatgttatatctaattctaagtttttatattttgagatggagggaataccagtatttggggggaaaaaattctaaagtgaagtaaaggtaagaaaaaacgtgaaaatattagttaaaggggtctaaaataaatatttggtaactagagggactaaatcgaaattcactcgaaaaataaacccctccctctcccccatcgtacgcaacgaagccgattgcctagaggcggtctcgccgcgccgcttcccgtggagcccaagtggtggcgagggtttccgccgcctctcgtccgcctcgccgacctcggaccccggcctccatcctcctcgccgacgacagccaacgtgtgccgctccccttggagcccaagtggcggcgagggtttccgccgcctctgctccgctcgccggcgacagccccatgttctcgatcgccgtccccaggtccgcttccggaatctcatcctttgcgggctgctactgcttcgcgcgtcaagccatcaccagctgctccctccgtctccggaacaacaatattctctccgactgctcacgacgggagagcggcgcttcggcgacggcgatcccggtacgcacacgcttgagaggctcccactttcttcattctgctactgtacggttggattcgtgcataacaatcactcatatctctatgtctagcctgcccatgattatttattaagttcgagttggttgaagaatccactttgttttgtggggaacttttacatgatagagaaatgaatggtcttctattgtgaaacaccacgcttgattttacaggatggtgttgtgtcgtctcgtttctaggtttatagacggaaggacctgctttttatgtgacctgtcgtttgctatagaacctcatggtttatagttaaactgcacattagatctgtcaggagcagttgacagcagtactgaacgtttctcgagaatgttgaaatgttggtctcatcagtattgcacatttgttgacaatccataactattagtggccaatgtgaacatttcttgtaaaatgtcaatcgcagtagcaggctagcagcagtaatgtacatttcttcaaaatgtaattccaaggtttgtgcactatttacttcaatataaggacgcatagcatgcattcactgttgcacctcaattatctatgcgactattctagttttattttatttttagatggaggagcagcaacaggaggagaacagcccagtgcttttccgccaaaatgcaaattcttctcttggcttgctacccagaataggctatggacggctgacagattggggaaacaaggctggcgaaatcaaaaggtttgccccctctgccgcacaatcgacgaatcagtgcttcaccttctggccaaatgtagagtcactaagaggatttggacagaaatccagagatgggcgcatactgaccttcaaatggacaaatgaaatgactgcccctcgatcgaacactggtggaacctcgtcgttgaatcccccaacaccccaagagcccctctgcgaactctactgatgctagtcacctgggagatctggggggagcgtaatgcaaggatctttcgaagcacagcctcaacaccagcctcaattcttgcaaagatcaaagaggaaagcagagcttgggtcaaagccggagcggctaggctgcaggagttcggatttttgggagatatcacctaaagaacttctctcctgcgggccggtcttctgactggccctgtacatactttgtataattttttccctctctattaatatatgaggcaaagcttttgtcctcctttcaaaat

SEQ ID NO: 8067 - DNA, 2641 bp, Oryza sativa
  ref <308>: DATABASE ACCESSION NUMBER: AK105415
  ref <309>: DATABASE ENTRY DATE: 2002-08-28
acctcgctctctcctctcttcctcttcccccaatctccgacagttgccaaatttcccttcccacccccaaacccaaaccccagcgacgacggcgacgacgcgcagcagacgaaagcgagcgagaggcgagagaaatcccatcgtttcccaaaccctaaccccctcctcctcctcctccagatctcggcggccgcgcggctgatgcgaggtgagccccgtccgccctagggtttgcggcggggtgcgtggtggtggtggttgggccgggggggacggggccctcctgctcgcgggggtgggggttgggtggggatggcggcggcgcgcgcgcacgtgaaggacccggcgcaccggaccaaggtggtgctccggaggctgccgccggcgatcgcgcagcaggccgtcgtggaacaggtcgacgcgcgcttcggcggccggtacgactggtcgtgcttccgccccggcaatgccagccaaaagaatcacagatattctcgactctaccttaacttcaagggcccagaagatgtcgttgaatttgctgaggtcttcaatggtcatgtgtttgtgaatgaaaagggtgctcaatttaaagctcttgtggaatatgcaccatcgcaacaggtccccaagtcaaacacgaagaaagatgctcgtcaaggaactataatgaaagatccggaatacttggagtttcttgaatcgatttcaaagcctgctgagcatctgccaagtgctgaaattcagctcgaaaggaaagaagctgaaagggcagctgctggaaaggaaccacctgttgtgacgcctcttatggtctatgttcgccagcaaagggcagctaagagtatggctcagagatctggaagtagtagactcagtagaaaagttgcgggtgttgttactagcagtcctagtccttctaaaaggggttctgagaagcgcaggacctctgcttcgacgcaatatgttctacgagagaatgctaaggagaagccaacttatatcttagtgccaaagagagacgagcatgcgcagagggaaaaagatgctacaagtggcgggatttctggttctgctcatgtcgcggaaaacaaaaaagagaaaattgtgcttttgaaaggaagagcaagggtcgattctaatacatctgatgtcacatctcagcagcagtcagggacccctatgaaaaatgctgcacaatctagttctaggcaagatccgcggcttgagggcagtggcagaattattaagactatactttcaaacaaggaaggacggcatgtggttacgtctcaacatgatcaggaaggtcacataattacagctgagaagcgcccaccacggattccaaacccacgttccgttgttaaagatcaggtagttgaaaatgctgagaaaaaccatttggatgacaaacatagtcatctccatggttctgggctcatcagtgaaaagactgaaagacatgctagaaatagagataggcctgatcgtggtgtatgggcccctcgtcgctatgacaaatctgcatcaggtgggacgcattcctcgtcatctgagttctcaccaatgcagcaacattctggtgaaaatttctgtcagcaagcagatggccatggagagagaaaaatagacccaaggggtcatggtggtattcgcggaggccctgtggaaaatggacatagacatgctaaccgccgtggtcctccacgtggtctgaaggagatggaaatttctgcaagcacatctgatggaaagccttcaaagagagcctctgccaactatggtgctcatgagaggcaagtgtgggttcaaaaatcaagctcggcgacgtgatcttgtccaatgatgatactcatcaaaacaaatattgcaagttgtggagttctggattttgcagcttgatcctgtgaagtactgttaacaaaatgcccccgatcatatgcttccatgaagtgcaatctcagatttgtcaatcgaaatctcagctttagctgaaaagggagcttatatgatttgattcacagcaatagtgaattaacataacccactttaggtagctcttgattgctttgggtgagacttgatttgggcccaaggttgctattctggagcaatggaaggatttaggttggcatcattaccctcgtgacagtggtcacatatttctgagacccctggagaatatacacgacctcaactaatcagagatgggtgtacatatctctagagaaagaagaggtctggttctgacttctgttcgcaggttagcggtgccatgtatctacaaaagagataaaaaaaagttatcagactgcctggtttgctaaataaaagtgaattagttgatagattatgagaatccactgtttaggcggctgcgaccgtggtcaccaacagaagttaccctagagtgcaaagtggcatctcattttggttttgtgcccctgccccccctgagtaacgggatgtggtattgttttgacatgtggatgttgatggtgtgcgtcttcctgttaatgtttcaccagataattatgggggtattgttaagaatgatgatatgatgtacagcatcaaaggtgcttgctgttttaatcttgagcaagttgtcgtgcttctatgaaatgtgattgttaac

SEQ ID NO: 8068 - DNA, 1414 bp, Oryza sativa
  ref <308>: DATABASE ACCESSION NUMBER: AK105416
  ref <309>: DATABASE ENTRY DATE: 2002-08-28
acaaaaccaccatcgatcatttccatttccattttcaggagagatccacatcgccgttggcctttcatccagtgagtgagggagggagatctcgatctcggtctcgcgacatgaagaaggcttcgtctctgtcggagctggggttcgacgcggagggcgcgtcgtcggggttcttccgtccggtggcggacggcgggtcgacgccgacgtcgcaccggcgtcggctgacgaagatatcggtgatcggcgcgggcaacgtggggatggcgatcgcgcagaccatcctgacccgggacatggcggacgagatcgcgctggtggacgcggtgccggacaagctgcgcggggagatgctggacctgcagcacgcggcggcgttcctcccccgcgtccgcctcgtctccgacaccgacctggccgtcacgcgcggctccgacctggccatcgtcacggccggcgcgcgccagatccccggggagagccgcctgaacctgctgcagcggaacgtggcgctgttccggaagatcgtgccggcgctggcggagcactcgccggaggcgctgctgctgatcgtctccaaccccgtcgacgtgctgacgtacgtggcgtggaagctgtcggggttcccggcgagccgcgtcatcggctccggcaccaacctcgactcctccaggttccgcttcctcctcgccgagcacctccaggtcaacgcccaggatgtccaggcgtacatggtgggagagcacggggacagctcggtggcgatatggtcgagcatgagcgtggccgggatgccggtgctcaagtcgctgcgggagagccaccagagcttcgacgaggaggccctggagggaatccggcgagcggtggtggacagcgcgtacgaggtgatcagcctcaagggctacacctcctgggccatcggctactccgtcgccagcctcgccgcctccctcctccgcgaccagcaccgcatccaccccgtctccgtcctcgcctccggcttccacggcatcccccaagaccacgaggtcttcctcagcctccccgcccgcctcggccgcgccggcgtcctcggcgtcgccgagatggagctcaccgaggaggaggcccgccgcctccgccgctccgccaagacgctctgggagaactgccagctgctcgacctctaataaatcttattattatcatcgtcgtcgtcgtctcgtcacggaattaattaaagtacctactccgtacttagctagctacaataataaggattcattgatcactacaagagtgatcgactcgactgtagtatgtgtgtgcaatataatgtgctgtctatcaacaactactagtattgtcatttttttcgaaccagggaactttttaatgataagaagaaaaagacaagtacttattgtcgagc

SEQ ID NO: 8069 - DNA, 2455 bp, Oryza sativa
  ref <308>: DATABASE ACCESSION NUMBER: AK105417
  ref <309>: DATABASE ENTRY DATE: 2002-08-28
cgccaacaagctcttctcccagcgcgtcatcgaggtcctcaaccccgaggatgactacatctggatccacgattaccacctcctcgccctcccgtccttccttcgccgtcggttcaacaggctccgcatcggtttcttcctgcacagcccgttcccttcgtcggaactctaccgttccctccctgttcgcgacgagatcctcaaatcactgctaaactgcgatctgattgggttccacacctttgattacgcgcggcatttcctgtcctgctgcagccggatgctggggatcgagtaccagtcgaagaggggatatatcggtctcgattactttggccgcactgttgggataaagatcatgcctgttgggattaacatgacgcagctgcagacgcagatccggctgcctgatcttgagtggcgtgtcgccgaactccggaagcagtttgatgggaagactgtcatgctcggtgtggatgatatggacatatttaaggggattaatctgaaagttcttgcgtttgagcagatgctgaggacacacccaaaatggcagcgcaaggcagtgttggtgcagattgcaaacccaaggggtggtggtgggaaggaccttgaaaagatacaggctgagattgatgagagttgcaggaggataaatgcacaattttcacggccaggatatgttcctgtggtgattatcaatagagccctttcaagtgtggagaggatggcttattataccgtggcagagtgtgtcgttgtaactgcagtgagggatgggatgaacctcacaccatatgagtatattgtctgtagacagggatttccagatttggatggttctggggatgatgggccaaggagaaagagtatgttagttgtgtccgaattcattggttgctcaccatcacttagtggagcaattcgggtaaacccttggaacattgatacaacagcagaggcaatgaacgagtcgattgctttatcagagaacgagaagcaactgcggcatgagaagcattacagatatgtcagctcacatgatgttgcctattggtccaagagctatattcatgatttggagagaagctgcagggaccattttaggaggaggtgctggggtattggactaggatttggatttagagtagttgctcttgaccgcaacttcaaaaagcttactgtggattctatcgttactgattacaagaattctaagagcagggttatactgctagactacgatggaacgctagtaccacaaactacaatcaacaggactccaaatgaaagtgttgttaaaatcatgaatgctctttgtgacgataagaagaatgttgtttttattgttagtggacgaggaagggatagccttgagaaatggttttccccttgccaggatcttggcattgctgccgaacatggctactttatgaggtggaccagagatgagcaatggcaattgaataaccagtgctcagaatttggatggatgcagatggccaagccagttatgaacctgtatacagaagcaaccgatggatcatatattgaaaccaaagagagtgctttggtctggcaccaccaagatgctgaccctggttttggatcttcacaagctaaagagatgctagatcatttggaaagtgttcttgctaatgagcctgtctgtgtaaagagtggccaacagattgtggaagtgaaaccgcagggtgtcagcaaaggatttgttgctgagaagatcctatcaacgctgacagagaacaagagacaggcagattttgttctctgcataggcgatgatagatcagacgaggatatgtttgaaggaattgctgatatcatgagaaggagcatagttgatccccaaacatcattatatgcgtgcacagtcggccagaagccaagcaaggctaagtactatttggacgatactaatgatgttttgaacatgcttgaggcgcttgcagatgcatcagaggagactgattcacaggaagatgcagaagagataacatctatcccggacccggaataggcgtgatgatgttttaaatctcctggtgatgtcaatgcgtcaattgccaccagcagtcttcctgactaaaattgaagctgattgccatcagcaggaagtgcaactttagtaatactcagttagacaaatcaatgtcaataatcttagcgctgctcgattttctgccatttttctgatttctcttatgatagttttggagtaattctcataatattggtagatagaaaggagcctggggggaaagaatccatggcgtagtacatcatttttcttttaccttgcttgttaggtacagtatggaagattggagtatttgcgggagtacaagtcggaaatttggtgagcaattttgtattagatccttttaagtttaaagcgataaaacactattgccatttaaactagagtaaatttcat

SEQ ID NO: 8070 - DNA, 2054 bp, Oryza sativa
  ref <308>: DATABASE ACCESSION NUMBER: AK105418
  ref <309>: DATABASE ENTRY DATE: 2002-08-28
ctctctccccccgcaccaccgcctcccctcctctcctctcctctctcccgccgaccaggagaaagaaggaaaaagaagaagaaaaatcctctgcgatggcgaagaagaaggagagggcggtgaacgtgtcggggaagccgcgccactcgctcgacgtcaaccgcgccaatgacaagaagggcgcgggcggcggcgccgggggcggcggcggcggccgctcggccgccacggtgcggcggctcaagatgtacaagatgaggcccctcagggaccgaggcgggaagatcctgaagcacgacctccagtccaaggagctccccaacacccgcatcgagcccgatcgccgctggttcggaaatacacgagtcgttaatcagaaagagcttgaattctttcgggaggaactccagagtcggctttccaataactataatgtgatactgaaagagcggaagcttccactgtcactactgcaggatcatcaaaagcaagctagggcgcatcttcttgacactgaaccttttgagcatgcatttggaccaaagggcaagaggaaacgcccaaaactaatggctcttgattacgaatctctattgaagaaagctgatgattctcaaggtgcatttgaggataagcatgctacagcgaagttgctgaaagaggaagaggaagatggcttacgagacctagtccggcacacaatgttcgagaagggacagagcaaaagaatttggggtgaactctataaagttattgactcttcagatgttgtcgtgcaggtgttggatgccagggatccaatgggtactagatgctaccatctggagaaacatctgaaggagaatgccaagcacaaacacttggtattcttactaaataagtgtgatctagtacctgcttgggccacaaaaggatggttgcgcactttatcaaaggactaccccaccctagcattccatgcaagcatcaacagttcatttggcaaaggatcacttctttcagtgttacggcagtttgcacgcctgaagagtgacaaacaagctatatctgttggttttgttggataccccaatgttgggaagtcatcagttatcaacacgttacgctccaagagtgtttgcaaagtggctccaattcctggagagacgaaggtgtggcagtacattactctgactaaaagaatatttctgattgactgccctggggttgtgtaccaaaacaatgattcagaaactgatattgttcttaagggcgtggtgcgtgtgacaaatttggcggatgcttctgagcacattggtgaagttctgagacgtgtaaaaaaggagcatcttaaaagagcttacaaaattgaagactgggttgatgataatgattttcttgtccaactgagcaagaccactggaaagctactcaggggtggggagcctgatcttacaacaacggccaagatggtgcttcatgactggcagaggggcaagattcccttttttgtgcctccaccacagcaaggtgaagatagtccatctgaaacagctgaacctgtggagaaatccgatgaggaaggggtgagcagtgacagaactgctgccgccatgaaagcgatagcgggaataatctcatcacagcagcagatgaatgttccttgccaaaaggaatttggtgtaactaatgaagatagtgaagtcgcggagcaatcagagtgatctacaaaaggctaggaaccctgcatgataaagaacagggcacaattttgccaaatacctagagattttatgaagatttggtgtctaacaggaatgttacgatgaatgttacgatcgttcagttcaccggtgcgttctactgcaacgaaagagcgttcactgcaacgaaagactggaatcaagggtgtgggactgggaaacttctgtaacttcatatattgtgtgggcctttgttgtagaccagatagagtgttttggtagcttaatataaccattttgttccaactgtacttgaaacaaatttattccgatacattaattccgcaaagtcgttcgtatttgtatggggtc

SEQ ID NO: 8071 - DNA, 1926 bp, Oryza sativa
  ref <308>: DATABASE ACCESSION NUMBER: AK105419
  ref <309>: DATABASE ENTRY DATE: 2002-08-28
gctttgctctagcctttttttttttgttcagattattttcttgcggtttgttcttaagtactcgctagtgtccctaatttcctggtaatttcttggtaatttttggctgcttactttgctcgagctgggatctgtgtttcagtgctcacttgctaaatccgaaccaaattaaaccttggattttaaaactccttccagctatttttccgtttttatttgggaaattgtgggtttaccatttcttcctccgattttcttttccattttctcccctcatttgagcttccttctcacccattccaagaaatcaccatccttccgctgtaaaatcgttgaaaaaaaaattgttccacagctttgagcagcgcggggtttatggtggtttttgcagctctcgtcttcttcctcagctcgccttgaaatttcggtccaagaaatcactgagctgagtgagctgctgagctgagcttctgcgagagaaggtgtgggaatgatggaggtgactcaggtgagggcgtcgtcggagatggcgggaggaagggagccgttcgtgctgcccaagagcccgccggcggcggcgcctgcgccgccgccgccgtcgtccggcggcatgcagagcgtgcgcatggcgtacacggcggacggcacgcccatcttcgctccggtgaactccgccccggccccggccccggcggcgacgtacccgcccgcaggaggcaatggcgcggcggctctcgacgccggcgagccggtggtcaagaagaagcgtggccggccaaggaagtacggccccgacggctccatgtcgctggcattggtgcccgtgtccaccgcggcggtggcggcctccgggcctttctcgccggcggctgccgcgaagtcgccggacgccgtgtcgtcggcgccgccgccgggggcgaagaagagggggcggccaaagggctccacgaacaagaagcacgtgccctctttcggaattggagatatcgggtcagcaggagctggattcacacctcatgttatttttgttaaagctggagaggatgtatctgcaaagatcatgtcattctcccagcatggaactcgtggagtatgcgttctgtcagcaaacggcgccatatcaaatgtgacacttcggcaagctgctacttccggtggaacagtaacatacgagggacgatttgagatactgtcgctgtccggttcattccttctatcagagaatggaggccatcgtagtcgaactggtgggctcagtgtttctctagcaggccctgatggtcgcgtcttgggtggtggagttgctggacttctgacagctgcttcaccagtgcagattgtggtgggaagcttcaacaccgaagggaaaaaggggccaaagctgcatgctccttcagacccaatgtctgcaccgctaaagatggtgccgatgagcgggacggggccaagcagcccgccatcaaggggcacattgagtgaatcatcgggcggcccggggagcccgctgaaccaaggtgtcacggccagcaaccatggccagccagggctacccagcttatcctggaagtgagctcctcctcctcatcatcatcagtgaccagaccttggtcccgtctgaccgccgtagaacttgcgaaaggaaatgtcgtggcggtggtactcgaggtactccggtgcgacgccatggatcctaactagcccccctatctagtgtaatgtctgaacctgaatcagggaagaaaactgtagccgttgcatctctagctagctcttctggtgtaggtgctgttactattggagactagactcaatgtgttatttaggtggttaaattgtttttttatcttccagacaccgatgaaaaagctcattgcttctatgtaactatgttggcatgttgcggttagcttgtggctcagttctttt

SEQ ID NO: 8072 - DNA, 2365 bp, Oryza sativa
  ref <308>: DATABASE ACCESSION NUMBER: AK105420
  ref <309>: DATABASE ENTRY DATE: 2002-08-28
atcagtgtgcttgctctctctcccatcgctttcccctcccctcgcttgccgccgcatccatccaccacctctccccctcgcggatgcgattccctcccgccgccgccgccgccgccgccgccgccgcgactagctagctagctcggaggtcggaggggaggggtggtacgactacaatggcgagcgcgtcggaggacgacgccggctcggagcggtgctgcgggagctacagcccgagcgcggacgtcagcgagtcggagacatccagcgactgctccgcgccgacgaccaccaccaccacccgccgcttcgcctcctcctcctcccgcggcgtcgcctcctcctcctcctcctcgctcctcccgacccctcccccttcctccgccgccgccttcttcctctccgccaagcccgccgccgacctctccgaggtggacatgatgaaggagcgcttcgccaagctgctgctcggcgaggacatgtccgggagcggcaagggcgtctgcaccgcgctcgccatctccaacgccatcaccaacctctccgccactgtgttcggcgagctgtggaggctggagccgatggcttcggcgaggaaggcgatgtggacgagggagatggactggctgctctccgtggccgactccatcgtcgagctcaccccgtcaatccaggagctccccgacggcgggggacagttcgaggtcatggtgccgcgcccccgcagcgacctctacatgaacctcccggcgctcaagaagctcgatgcgatgctcctcgccatgattgacgggttcaaggagaccgagttctggtatgtggatagggggatcgtggttgatgacagcggcgggccgttctcgtcgtcgtcatcctcctgcgggcggccgtcggtgcggcaggaggagaaatggtggctgccatgcccgcgggtgccgcccaaggggttgtcagaggatgcgaggaggaagctgcaacaggacagggattgtgcgaaccagatactgaaggcggccatggcgattaacagcgatgtgctcgcggagatggagatcccggaagtgtacttggagtcactgccaaagagtggtaaatcttgcttgggtgagataatttaccgatatataacagctgaacaattctcaccggagtgcctcctcgattgcttggatctgtcatcagaacaccacacacttgaagtagctaacagaatagaggctgccatccatgtgtggaggttgaagggccaaaagaaatccacgcctcaagcaaaatcaaagaaatcttggggtggaaaagtgaagggacttgttggagatacagaaaagagtcatgttttgtcccaaagagctgatgggttgttgcaaagcttaagattgcgataccctggtttgccacaaacctctctcgacatgaacaagatccagtataacaaggacgttgggcagtccatactagagagttactcaagggttctggagagcttggcatttaacataattgccagaattgatgatgtaatttatgtagatgatgcaacaaagaagtctgccgctgctgactctgtttccatcttcaatcgtggcattggcgtaccagttcagaagaggatctccccaagcccgttctcaattcagcatacaccatatgcctctccatttgctacacccactttctgctcctccactccagttacaggcagccctggaagagtacagcctccattgaacaaagacaacttaccgacaaaacaagaggttaaagttgagaagctgttttctggtgatatcgagaaggtctggacgtatgccgggaaccttagcgcaaggaaagacgcaggagatgcccctgaaagagactgaaaggcagtgaagaaagttcttcagatctttagacgtgtctcagcaaggtcaacaggtttcaacacatcctgttctggtctctagctagattttccctgtacagaagcaacatgattcatttttttgtgctttcttagcgagccaagggtcgtctagccctacttacaacaagtaagggaatgactctttgagtcttgatcgcatctgaacaagtcatagtttcacgtagctgcctctgtcggacatgtactcttcttgttcatgtttatactagctggtttagttagcagcaagtgattgaacttcagatgctgcagttctttttttttttttttgtccctggaggcatcggttccctaacaatcaactgcacttgcagtgcaatgtatcatgattttctgatgctgttgtatatggcacctaatggacagatctgacgctcttcagtgactctgaagactttcttatatcaactgtgaatctgtgatcgatcacaactgctg

SEQ ID NO: 8073 - DNA, 2653 bp, Oryza sativa
  ref <308>: DATABASE ACCESSION NUMBER: AK105421
  ref <309>: DATABASE ENTRY DATE: 2002-08-28
catgttctcaggtcaaattccggctgaattgactaaattggctaatttgggacatctcaatctctcttccaatggttttggtggtgcattgcctttgggtctccggaacttaaggaaactgaaatatctggaccttcgtggcaatggctttactggcaaattggatgacatatttgcagaattacagagcccggttcatgttgatttgagctgcaaccggttctcgggttcattgatatcaatatctgacaactcatctgtggttagcacacttcagtacttgaatgttagccacaatatgctgtcaggagcattatttgagagtgatccaatgcctctgtttgatagcctggaggtgtttgatgcaagttacaatatgcttgagggcaatattccaccatttaattttgtgatttccctcaaggtgttgcgcttgcagaacaataatttttctgggtccattccagaggcgctctttcgacagacctccatggtgttgactgaacttgacctcagctgcaatcaacttacaggtccaattagacgtgtaacatcaatgaacttaaagtacctgaatctgtcatccaacagccttcagggaactttgcccatcacatttgggagctgttcagttgttgatctgagtagaaacatgctttcagggaacctatcagttatccgaacttggggaaattatattgagacggtcgatttgacctcaaatcggttaacaggaacatggccaaatgagacaacccagtttttgaggttgacttcgttgaggatttccgacaacttgcttgcaggagaactaccaactgttattggaacttatcctgagctgatttccatcgacttgagtctcaatcagcttcatggaccattgcctggaaatctgtttacagcagtcaaactgacctatctaaatctgtcaggaaacagctttgcagggactcttcctcttcctaattctgaagcaaagagctcaacttttatagacttgttagttctccctgtacaaacttcaaacctctcatttgttgatctttcaaacaattctttgaatggctcactgccttcgggcattggtgctttgagtggattggcattactgaacctttgccaaaacaacttttcggggcaaattccgagagaaatcaccaagctaaagcatttgatatacattgacttatcaaaaaacaatttcaatggtaccatacccgaggacctccctgatgatcttgttgagttcaatgtctcctacaacaatctatctggctcagttccaagcaacttgttgaaatttcctgattcatctttccatccaggaaatgagctgcttgttcttcctcattctgcatcacaaaatggccctgacagttctggaggggggagacgcggtatgaaacgtggaattctgtatgcattgattgtatgtgttgtagtctttgttactgggattattgtgcttttgcttgttcattggaagatctctagctggaagagtagtgaaaaaggaactagccaaagcaaacaacccgcaactgtaggagttgccatgggacatcctacaaggctacacttgacaatggatatgcactgacagtaaagtggctgaaggagggatttgctaagagcaagaaggaattttctcgtgaaataaagaagcttggaactgttaaacatcccaatttagtgtccatgcgaggctactactggggtcctaaagagcatgaaaggatcattatatcagactatgtagattctacttctctttcttctttcttgtctgagtttgaagaacggaatattccgcctctatcagtggaccagcgtctgaacattgcaattgacattgcgcactgtctagattacctacataacgagcgagtgatcccacacggcaacctgaagtcatccaatgtcctgatccagaacgcaagtccatctgctttggttaccgactacagccttcacaggctcatgactccaatcggcatggccgaacaggtcctcaatgcaggggccctcggatactctccacctgagtttgctagctccagtaagccgtgcccttccctgaagagtgatgtgtatgccttcggtgtcattctactcgagctgctgacagggaagattgccggggaaatcgtttgcgtgaacgatggtgtggtcgacttgacggactgggtaaggatgctagcaagggaggagcgcgtttcggagtgctacgacaggcggatcgtggaagctcatggctcaggtggcgccccaaaggcgctggaggacatgctgcgcatcgccatccggtgcatccggtctgcatccgaaaggccggagattcggacagtgtttgaggacctttcatccctgtcatcttgacataaaatttcttgacagtgtacatctcgtacttacatcagtttgccgaaattctgggaagggtatactaacatctgtgaactgtttaggattttgtggtggtgttctggtctcttgagcatttgattgtttgggttcctcttccttagaagcgtcgattcatttttagttagtccatgattttagccctagatgattgtgagaataagtttgtgcattgttattttgaacatcagaaagaaaataaagatatgtgtagttatttttctct

SEQ ID NO: 8074 - DNA, 1772 bp, Oryza sativa
  ref <308>: DATABASE ACCESSION NUMBER: AK105422
  ref <309>: DATABASE ENTRY DATE: 2002-08-28
atttccagtacgaatacgaaccgtgaaagcgtggcctatcgatcctttagaccttcggagtttgaagctagaggtgtcagaaaagttaccacagggataactggcttgtggcagccaagcgttcatagcgacgttgctttttgatccttcgatgtcggctcttcctatcattgtgaagcagaattcaccaagtgttggattgttcacccaccaatagggaacgtgagctgggattagaccgtcgtgagacaggttagttttaccctactgatgaccgtgccgcgatagtaattcaacctagtacgagaggaaccgttgattcacacaattggtcatcgcgcttggttgaaaagccagtggcgcgaagctaccgtgtgccggattatgactgaacgcctctaagtcagaatccaagctagcaagcggcgcctgcgcccgccgcccgccccgacccacgttaggggcgcaagcccccaagggcccgtgccaccggcgagcgtcgtcgcagagctacaacgcgatatacaacttcggcgactccatcaccgacaccggcaacctctgcaccggcggctgcccgtcgtggctcaccaccggccagcctccctacggcaacaccttcttcggccgccccaccggccgctgcaccaacggccgcgtcatcatcgacttcctagctgatcgcttcggattgccgctgctcccgccgtcgaaggcgagcggcggcgacttcaagaagggcgcgaacatggccatcatcggcgccaccaccatgaacttcgacttcttccagtcgctcgggttgggcaacagcatctggaacaacggccctctggacacccaaatccagtggttccagcagctcttgccctccatctgcggcaacgattgcaagagctacctgagcaagtcgctgttcatcgtgggcgagttcgggggcaacgactacaacgcccctctcttcggcggcaagagcatggacgaggtgaaaggctacgtgcctcagatcatcgccaagatcacaagcggcgtagatacgctgatcgggctgggagcggtggacatcgtggtgccgggggtgatgccgatcgggtgcttcccgctgtacctgacgctgtaccagagctccaactccgacgactacgacggcaatggctgcctcaagagctacaactccctctccgtctaccacaacggcctgctcaagcaggggctcgccggcgtccaggccaagtacccggccgtccgcctcatgtacggcaacttctacgaccaggtcacccagatggttcagtctcccgggagtttcgggctacaatatggcctgaaagtgtgctgcggcgccggtgggcaaggctcctacaactacaataacaaggcgaggtgtggcatgtcaggggcaagtgcctgtggagacccggagaattacttggtctgggatggcattcacctcaccgaggctgcctaccgttcgatcgcggatggatggctcagcgggccatactgtagcccagctattctgcactgagctgcagcctgcagctgggctattttcatgttcgtaataaattaatactactgtatcacagtatatgttgttatatatggcaggggatactctggaaaataatgctagggtctagggaaatggaatggaaatatgggagccactggtggtttgaatctcattacatgattactcatgtatgcattttcgagcactgccaatgtatttttactccaaaattcaatacatttccactaatgttgcc

SEQ ID NO: 8075 - DNA, 3098 bp, Oryza sativa
  ref <308>: DATABASE ACCESSION NUMBER: AK105423
  ref <309>: DATABASE ENTRY DATE: 2002-08-28
gagccgccgcaagtggcgacggctcccacaacccaatgccgccggcgaaactcgatcccaatccgccgcccatccaccgcctcctggagctgatcaagtccgagccagacgccaccgccgcgctcgcccaccttgagctcctcgtctccacccgcccggccttcccaccgccccagccgctcctcttccacctcctccgccgcctcgccacctcttccccgtcccacctccctcgcctcctcaacctcctcccgcggctgcgccaccgcccgcgcttctccgagtccgcggcgctcgtcgtcctatccgccttctcccgcgccatcatgcccgacgccgcgctcgacgccttccgcgccctcccttccatcctcggctgcaaccccggcatccgctcccacaacgccctcctcgacgcgttcgtccgcgcccgtcgtttctccgacgcggacgcgttctttgcctccctctcccatggcgccttcggccgccgcatcgcccccaaccttcagacctacaacatcgtcctccgctctctctgcgcccgtggcgacctcgatcgagcggtcactctgttcgactccctgcgacgccgccaagttgctcccgaccgcatcacctattcgaccctcatgtgcgggctcgcgaaacaggaccgcttggatcacgccctcgacctgctcgacgaaatgccgaggagtagagttcagcctgatgtcgtttgttacaatgcactcctcggtgggtgttttaaggccggtgagttcgagaaagtcatgagggtgtgggacaaactggttaaggacccaggtgcaaggcccaacctcgctacttacaatgtgatgcttgatggattgtgtaagtttgggagattcaaggaggtgggtgaggtctgggaaaggatggtggcaaataatctccaaccagatgtaattacctatgggatcttgatccatggtttgtgccgatctggagatgtggatggtgcagcacgagtatactctgagattatcaagactgggcttgttattgatgctgccatgtataattcactcgtcaaggggttctgtcaagcagggagggtacaggaagcttggaagttctgggatagtgctgggtttgcagggcttcgtaatttaagaacttacaatataatgataaaggggctctttgacagtggtatggttgatgaggctatagagttatgggacctattggagaaagatgtggcttgcattcctgacacagtgacttttggcactctgatccatggattatgccagaatggctttgctaataaggcatttacaatatttgaggaagctcgagtcagtggcaaacaattagatgtgttctcatattcatccatgatcaatggattatgcaatgttgggaggttagttgatgcggttaaagtatatgagaagatggataaggatgggtgcaaaccgaattctcatatttacaatgcactaataagtgggttctgccaagtatacaggactagtgatgctgttagaatttacagcaagatggcagacaatggttgttctcctacagtcatcacatacaacactttaatagatggtctgtgtaaggctgaaaagtatcaagaagcttcaagtgttgcaagggaaatggtagagaatggctttacaccagatatcactacttatggatcgttgatccgtggcctttttagtgacaagaagattgatgatgctctttctatttggaaacaaattctttataagggtctcaaggttgatgtgatgatgcataacatcctaatccatggcctttgttctgctggcaaagttgatgaagctctccatgttttctcagatatgaaagagaagaagaattgtcccccaaatctagtgacttataacaccctgatggatggactttatgaaactggctatattgacaaagcagcaactctctggacctccataacagaagatgggttggaaccagacataatttcatacaatacaagaatcaagggcctatgctcttgtgacagaatacatgaggggatccagttattggatgaggttctctcacgaggcattataccgactgtaattacatggaatatacttgtcagggctgtaatcaagtatggacctatccaagtataacaccttcaaagtccttatgcttctggtgatgagatatcctgctcgtagatgacctgagcaaccaaaccaatgaatattagacccagagctgcaaccttcctccactccacctcaggtgttgcgaagacggcatttgcaattgtaagcccgagtattgccatgagcccaaggcttcaccttcccaaggcttttgaagaacataccttcatttttctccttctcaatccaatcttcgaagtcttcaagcaccctctcgttcatttctatctcctgcctttgaacttcagcagtctcctcaaaggcctgcatcttgctgtccagcctctccattatctaccacatcaggtaccttgtcaaatgatcgaactcggtgtccgcatccttcgcaaacttggtcaggtaagcagagcgctcgtccaagaagcttgtgatgcgcaccttctgcgcctgaagcattgcgatcttcgcaaggacctcctgctggcgtttgtctccgccaagcgacgacgaagcatcggatccatcatcttcagagctgcaggcacggatacaagatctcttcctctttagcagcgcacatcggtatggggaggatctgtgtagcgaaggaatggacatcctaatggtgtgaagattaagcatctcctcttaatctttgctatgctgctgctcttgctctgcgaagtactatcgtggaaggatttgtttctgcccaccactcgatgcttgagcagttgagcttgagtttgggaacgatatcctttggcttttagctttcatgacaagaccaatttgccccttgcatgttgggcattcgcaggtccatttcttggacgttccttgcgtgttgggaattatcaactaggtccattgtttggaccttatctgagacattgggcacaacttgtcgatactttagtaaaaaaatatcttcttactgagattgacttc

SEQ ID NO: 8076 - DNA, 2030 bp, Oryza sativa
  ref <308>: DATABASE ACCESSION NUMBER: AK105424
  ref <309>: DATABASE ENTRY DATE: 2002-08-28
gcagcttgccttggactccaccatttcaaatcccctgcctcctccgcctccgcttcccccctcaccttctccggcgatcgccgccgcgtccgtacacggctgaggcctgaggcgatggccgccgccgccgcctcccagcctcgcagccaccagcccacctcgctccgccgcgcgccgccaccttcttcggccgcggccaagccagagcccaatgagaaggcctccaactccaagcccgcctcgcccgtccaggcaccgtcgccggagaggacggtgaagaagctgaggttggccaaggcgctcacgcttccggaggccacctcggtgtcggaggcgtgccggaggatggcgctcaagcgagtggatgccgcgttgctcactgattccaacgggatgctctccggcatactcacagcagaggacatatcaggacgggtgatagcagagggactcaggcctgacgaaacaaatgtggccaaagcgatgacgcgtaacccagtttttgttatgtccaactcaccagccattgaagcattacaaaagatggtcaaaggaaagttcagacatcttcctgtagtggaacacggtgaggtaattgccatgctggacattaccaagttcctttatgatgcaatttcaagaatggaaaaggctgcagaacaaggcagtgcaatagcagctgctatggaaggagttgaacgacagtggggaaatgactttccaggtccacattcatttatcgaaaatctgcgagaccagctgttcaagccttccttatcaaccatcataacagaaaataacagtgttccagtagtatctccttcagatcctgtaatagcagctgccaaaaaaaatgagagaataccgagtcaactcagtggttgtcatgacagggaacatgttgctaggaattcttacttccaaggatttggtattgcgattagtggcccaaagtttatccccagatgtgactcttgtagaaaaggttatgactacaaaccctgattgtgcgacattggatacatcgatccttgaggccctgcattcaatgcaagacgggaaatatctgcatattcctgttgccgacaaaaatggacagatcatcgcatgtttggatgctctacaattaacccatgcagctatttcaatggttgagggagcttctgaagcgaacagtatggcaaatactatgatgcagaagttctgggattcagctcttgccctgcagcctgcagaggaatcggatgcccgtagtgaaaaatctcgaatggcaacatcagataatgctgaagggaaacatataccccctcatgttggcaattcattctcctttaaactacaagatagaaaagggcgtatgcacagattcagttgtgtttcagaaagcttagatgagcttgtttctgccgtatcgtacagactgggaatggaaaaagagaagattaatcttctgtatgatgacgatgaaggtgacagggtggttctgaccaccgacggtgacctcagtgcggcaattcagcatgcgagatcagctggatggaaggttctgaggctgcatatggatgagccctggagcaatggggagcacaccacatcgcttgtaaatacttcaccggtgaaaacagggcggtcatttctccggctaggcatcgcagctggtgcagttgcggttgccagcatgggggtaatcttctacttgaaacgttctgaactataattaattcccacacatacatcaacacatcaacattgtaaagattacttcttctccggaaggtgagatgtgttgtatacgtaggagacaaacacgtcaaacatcagcaataaggcgtggactatggttagaaagaatttccacgtgctaaagcttgtaagattggatggtgtttcattcaattttagattggtttattttgagacagatggagcaaagatttttttgaggttttttttcttgagttttcttgtttcagccttcctaccctttttgcaaccttgtgtgatataaataagggattcaaccagcttgg

SEQ ID NO: 8077 - DNA, 1939 bp, Oryza sativa
  ref <308>: DATABASE ACCESSION NUMBER: AK105425
  ref <309>: DATABASE ENTRY DATE: 2002-08-28
gagcacaagccgctccgccgccacctcctcctctcagctccgccgccgctgcctcctcctcctccgttctcgggtcgacagcgacgatgatgcagcagcagcagcagcaggagacgtggctcgcggccgccgcggcggtggggctccggccgaccaagtcggcaccctgctcgcccatcaagcctgcggagtcgtcggcgtcggctgcggcggcggcggccatgctccggaccaactccgactccttccacgtcgcccacaaggtccccgtcggcgacacgccgtacgtgcgcgccaagcgcgtccagctggtggacaaggatccggagaaggcgatcgcgctgttctgggcggcgatcaacgccggcgaccgggtggacagcgcgctcaaggacatggccatcgtgatgaagcagcagaaccgcgcggaggaggccatcgaggccatcaagtcgctgcgaagccgctgctccgaccaggcgcaggagtccctcgacaacatcctcctcgacctctacaagagatgcgggcggctggacgaccagatctcgctgctcaagcacaagctgcagctcatccaccagggccacgccttcaacggcaagcgcaccaagacggcgcgttcgcagggccgcaagttccaggtcaccctggagcaagaagcaaccagacttcttggaaatctggggtgggcgctgatgcagaaggagaactacacggaggcggagggggcgtaccggagggcgctgctgatcgggccggacaacaacaagatgtgcaacctggggatctgcctgatgaagcaggggcgcgtgctggaggccaaggacgtgctcaagcaggtgcggccggcgggggtggacggcctccgcggcgccgactcgcacctcaaggcgtacgagcgcgcgcaggagatgctccgggacctcgaggccaagctcgtcggccgccgcctcccgcgcgccggcgaccagctcgtcgacaagagctggctcttcgacgcgctgctgctcggctcctcctccagcatctggcagccgcagccgtgcatcgaccacatgctgcccccgcccccgccgccgccgcgcgaccagttcgccgacgagaacgccgccgccgccgccgccaacaagaaggcggccgcggccgcgctgcagcccaacatcctccgggtcgacgcgcagccgttctactcgctgcgcatgccgccgctggcgacgaagccacagaacattcagcagaagccgccgacgccgcagccgcaggtgcacgatccgatgggcaacctgaagaggacacggtccggcaacgccatggacaaggcggcggcggcagctgccggaccagtggagaaagaaccgatcaacgacgagaacagcgggaggaggaagtcactctccgccgaggaaagatggccggagctgcccgaccacagcgcgttcgacgaggccctcgtcgcggcggtcctcgccccggtcctcgatgactccgccgccgccgccgcagaacggaacgacaattgctgcaagccggcgccgccggcgggctgcgacacgagcccggcgatgaaggagaagatcgggaagaggctgaggatcttccaggacatcacacagacactgaacactttctgatttgagttcttgatttttttttcttttctttgcaactcacagcagcagccgtggcgacgccgcgaaggagatgggcttgttctcctgcgagctttctatgtcgccgctaagttaatttaggattcgattgggttttagttcgctgatgattcttgatttgattttttttaacacaccctaataacagctgattgctcactttcttcagcttgacaccaaagctcttcttgtaacagaacacgattgattttcatcttgttctaattcagtttgttaacagttgaataacaaagtgtcattaattt

SEQ ID NO: 8078 - DNA, 2895 bp, Oryza sativa
  ref <308>: DATABASE ACCESSION NUMBER: AK105426
  ref <309>: DATABASE ENTRY DATE: 2002-08-28
gtgagcatccgcggtagctgctctgcttcttctccatgcccatggtcgactttcactgagagtggtgtgctacaaacagtaaacagttggtggcacacggccagccagtgtgagactgagagaaggagctgatcgagatctagtacgtacgtagcaatatggtaggaggaggtgggtacaggcagaagctgatccaggtatggaacgattggcaggtgagcgtgctggtgctgctcagcctcaccctgcaactcctcttcctgagcacggcgggcgcccggagacgggcgcagccgagctgggggaagaaaacctacttctgggctctctacatcggctccaggttcatcaccacctactccctcggcatcctctcccgcgcctccacgggcgacgccaacgccgacatccaggcgttctgggcgtccctcctcctgttccacctgggaggccccgacgacttcaccgccctgtccctcgaggacaacaagctctgggatcgccgctgcctggagctcttcatccaggtctcgaccacactctatgtcttctcccgctacgtgctcgaccccggattccgccgcttcatcgtgccgttcgccctcatcttctccgccggggtggtcaagtacgtggagcaggtcgtcgcgctgcaccacgcgacgatggaggcgctcatcaagtccgtcctgggaaagcccgacgctggcccggactacgctgacaccattaaccgattggacgggattatgagatccggcgcattgccgtccctcgacatcaagaacgaacgagttgaccgcccaaactctgatccggaggccaacgtgcaggtgaaagattacagcgaagatgagcaggtggccatcaaaaccatccggtcagcacactctctgttctcgagattcagtgtcctgttcgcggacggcatcttcagcttcgaggacaggcaggagagccaggccatgttcttgcgcaaggacgcgaggtgggcgttcaagatcgtggagatcgagctgggtttcgcgtacgatcggctctacaccaaggcctcggtgtcccgcggggcgaggctggcggtgcgtgtgtgcagcctgtcgctcacgctcgccgccggcctctgggcggcgctggcgatcctgcgggcgagccagtaccggcagcggcaccggtgcgtgacgtacgcgctgctcgccggagcggcgctcaacgacgccgcgatactcgccgcccacgccttctccgtctggtccctggtgcacggcgactggctgagctggtgctccgtcatgctggtgaagcggaggaggtggtcggcgagcatggcgcaatccaacctcgtcaccttctgcctccggaagctgccttccaacaacgactccgacccggcgccgctctcgtcgtcgtttcttctccggcggctactcctcggcggcggccgaggaggaggagtgcaacaacaagacgcatcgcctgctcctgctctttccaccacgttagcgtccatggacgaattccagaagctgttcgagaggcgttccctgctcgaccaggtccgttctggaagcttctggagcaagtacaagcataccaagtatgtcccggtgagcgagaagctcaaggatttcatctacgcccagctagaggagaaggttcgccgtctcagcgagtacgacaagaggatggagagggagcgtgagcgtgagcggaagcgagtgagagctccatctccatctccatctccatctccatctccatctccatctgcatctgctacgactccaacccaaaccggaacgtcgacgacgacgacgacgagtagcatgtacagcattttgacggattgcaggggggaccaagtgatgaaaaaggagcggatcagcaacctgagctggagcctggagaagaaggagttcgacgagagcctactgatatggcacatcgcgacggacctgcggttccgcgaggaggcacaggcggccggcgccgccgcctccgcggcgagtgcggcgaccgtcgatcagcgagagaccaggaagcacatggagatcgcgcgggagctgtccaactacctctactacatcatggtggtgcacccgctgatgctgtcgtcgtcgacgaccatggcgatcaagaggtgccgggacacgtgcgcggaggcgcggaggctgttcctcaaggaccacgtgatggcggcggcggggaaagggaagggcgaccggcggcgggcggtgggcgaggacaacgcgcacagggtgctcctggacgtggacacgccgctgcacgcggcggtggtgaagggggacaagtgcaagtcggtgctgtgggatgggtgcttcctggcgagggagctgaggcagagcatggccgacccggggaggaggtggagggtggtgtgcgaggtgtgggtggagatgctgggctacgcggcggtgcactgcggagggtaccagcacgcggagcggctcaaggacggcggcgagctcatcaccttcgtctgcctcctcatgacccacctcggcatggggaagcactaccggaccgaggttggggatgcctacgcccacctctcgccctacagcgccgcggcctagcgcatctgtattagtactacactccagctaacctgttgcttgtactacctcgattggtgaacagagtttgataatatatgggtgtgtttggataatgggttaggagaggtgggattgggaaatagaaatgatggagggataagatgaaatggagtgagaagaatggatggctatgattgaaacttatcctttgaggggtaagaaatcatattccaaacccattatccaaacatggcctatgtgattgttagctcaggaacaaaacgttcagaaagaaataacgaatagtcgtaggcagagc

SEQ ID NO: 8079 - DNA, 1271 bp, Oryza sativa
  ref <308>: DATABASE ACCESSION NUMBER: AK105427
  ref <309>: DATABASE ENTRY DATE: 2002-08-28
aaaaaaaaaaaaaaaaaaaaaaaaaaaaaaaaaaataaaccaaaaagaaaaccccctttgtcgacaaagccagtcccaagctcctttcccgcctcttccccctcgccttcctcgagcgccacctccgcgaatccgtccgccccgacgcgcgccgccccgccgaggcccgcccaaccaccgtcgccctcgccgccgtgtcctccgcccacggctccgccctcgtccgcctcggcgacaccgccatgctcgcgtcgatcaagctcgaggtgatgtcgccctccggtgaggcccccgacgaaggatctattgctgtggagttccacatgccgcctatctgttccccgcttgtcagaccaggacggccggcagaggtggcgccagtcatctccaagaacctagaggacattctcatgagctcagggatgctaaatttgaaggagctctgtttgatcagtgggaaggcatcttggttagcatacctggatgtctattgtttgaatgctgatgggtctctattcgacgctgcactaatctcagctgttgctgcatttacacatttggaaattcctttggtatctgtcggtgatgatggtagagtatttactgttgggggcaatgaaggcaaagccaaatatgaattggtaaacagagaaaagaggaagcttacgattactaatgttccattttcccttacatgtgcacttcacaaggataatgttctagcggatccaactgctgaagaagaatcaataatagagacttctgtgactattgttctcgattcttcagaccagatagtgtcaatacaaaaacctggaggtgcagtgacatctatgacaactattaaggaatgcattagcttggctaaggacaggagaagaaagttaagagaaattctcatggacaatgttgaagcaatggaagtcgaccaaactgattaagtttgtcacagttctgattcagtgaatctaaccaaattatttttgtagtagctctttcctatctcttggttgtactcgtagcgtgataaattttagcacctttggctactatccgtttaattaaataagtaacagtccgtacctgcctatgattttattgaattaaagtggtatcataattttatttgagtctgtcttatgtcttctttgtattcgtagtatgaggaattttagcgtctatctaccttcggcttaccttctgtgtttagttacacacaacaatacaagtatgtaacagtctttgcctgcctatgatttttttttcttact

SEQ ID NO: 8080 - DNA, 2359 bp, Oryza sativa
  ref <308>: DATABASE ACCESSION NUMBER: AK105428
  ref <309>: DATABASE ENTRY DATE: 2002-08-28
gatgcgcgctctcctccgcctccgccgccggttgcctctgcccataaacacgagggccttctcgccgtcttcaccctcccctgcgccccatgagatccccaccgtctactccttcctccagccttccgtcttcgcgccgcggcccaaaccccagccgccgccgccgccgccgccacctacacctcccgcgcacaagacgctgcccgtcggcgatgccgtcgcgctcgaggacgagctgctcgccgccgtctccgaggaccgctcggacgacgcgtggctcgcgttcaggtccctggcgtcggcctccctctcgccctcgcctcccgccgccgcggcgctcgtctcccacctcgccgcagcgcaccaccaccgtctcggcctcaagcgtgccttcgcggccgccgtgttcctgctcgagaagagcccccacgcggaccccgtcccggaggccgccctgcaggccgtcttcacttcgctcgccgcagcggcctccgccgctccggccttggccctcgtgcgcgctctgctgcgctgcgggcgccgcctcccggctttccctgtctggggctccccgcttatagagctcacgcgcgctgacacgggcgccttcgtggccttcttgaaggtcttcgacgaagcctgcaagcaaatggtgtcggagaagtccccctctgcggcagcggcgatgcgtcctgaccttgctgcctgcaatgccgttcttggtggctgctgccgtctgctcggttcagtcacagaagctgagagggtattggagatcatgtcggctattgcagtgtcgccggatgtggatagcttcggatgtcttgcgttcttgtatgcttggagagatattccaagccgtgttgatgagctcgataaattgctggatgcgttaggattcggcaagaagatttttttcaagaatttgatcagtgggtatttgaagagctgcagctttgagtcagtttcatcagtcattcttcgtgtggtggaggagagaagagttgggggtagcaatgcatttgatttagaaagctatacagaggttgcacagcgttttgtagataatgggaggatcagggaattagctcagttgatcatcaaagcacaggaaactgagtcattgcagcagtcactggcagttgaggattctgttgggtttgggattgtcaatgcttgtgttgagcttggcctattgaacaaggctcatagtatactcgacgaaatgactgctcaaggagcctctgtggggctaggtgtatactcctcaatcctgaaagcgtattgcaaggagcaaaggactgcagaggctgcacagcttgtctcagagattagtgcagcagggctgcagcttgatgctggcagttatgatgctcttattgatgcttctatgacagcacatgatttcctatctgcattctctctcttcaaggagatgagagaggcgaggttaccagaccttaggacaagctatcttactataatgacaggcttaacagagaacaaccgtcctgagcttatggcatcattcttggacacagtcgtcgatgatccgaggatagaaattgcaacacatgattggaactcaataatacatgccttttgcaaggttgggaggttggaggatgctcgaaggacataccgaaggatggtattcctgaggtatgaaccaaataatcagacctacctttcgctaatcaatgggtatgtctcagcggagaagtactttagtgtgcttatactatggactgaagtgaggaggaagggggctgatttcaaccatgagttaattgatgcatttctgtatgctttagtcaaaggtggattttttgatatggcaatgcaagtgattgagaaagcacaagagttgaaaatatttttggataagtggagacacaaacaagcattcatggagacccacaaaaaactgaaagtggcaaagctgagaaagcggaatttcaggaaaatggaagctctgattgcatttaagaattgggctggtctcaatgcatgacattataatctttttatcagtctatcatgactgattttaatggcacgtatctgagatggcatcccatagtcctcttggaagtaacaagcagcggaccttcagagatgaacaagtgaggggttttgtcatcatgtcaaattttgataaggttaggaaggccggtgcgctttcggtttcttcttttacttaaagtaatacatgtttaactatataggctgacctgtctctgtactagttctagtcatttacgctgatgtaatctccaaaccatgaaaatcttaaatgagctaatatcatgtttatcctgaaatactcatgcaatacatatttgtgttcatttggttc

SEQ ID NO: 8081 - DNA, 1767 bp, Oryza sativa
  ref <308>: DATABASE ACCESSION NUMBER: AK105429
  ref <309>: DATABASE ENTRY DATE: 2002-08-28
aacccgtgccgcaaaatccccaaatcccaaatcccaaatcccgccgcctcccagatcgccgccggatcgatggccgccgcctcgccgctcgccgccgcggcggcgctcgccctcctcctcctcctcctcctcgccgccccggcggcggcggagatccgggagacggtgatccggagcgacccgcggagcatcatcccgctcgacgagttcgggttctcccactcgggcgtcctcgagctcaacgtctccggcatcgccttcgacccgccggcctcctccgagctcgacctctcccagctgggattcttcctctccacgctcgacgcctgggtgcacgtcctccgccagctgcaggatctcgacgtcacctgcgcgctccaggccgacctcgtcaagctcgcctactccttcgaccgcctcaggccgccatccaaccccgccggcgtcgaggtcgcccgctcatcatccttctccaccgccttccccgtctccgagccagggcagtacacgctcgtcttcgccaactgcctcggcggggggctcaaggtctccatggacgtccgctccgccatgtacaacgtcgacccgcccaccggcgagcgctcctacctctccgcgggggccaccgcgctcccgaccatcttcggcttcttcggcgtcgcctacgccgcgctcgccgccggctggatcgccatactcctgcgcaagcgcgccgccgtgttccggatccactacttcatgctcgccgtgctcgtgctcaaggcggtcaacctgctcgccgaggccgaggacaagtcatacatcgagcgcactggcacggcgcacggctgggacgtgctcttctacatcttcagcttcctcaaggggatctcgctgttcacgctcattgtgctcatcggcaccggctggtcattcctcaagccttaccttgctgaccgagagaagaaggtccttatggtggtcatccctctgcaagtcgtggccaacattgcgcaggtggtgattgatgagtctgggccgtatgctcgggcctgggtcacctggaagcaggtgttgttgctggtcgatgtgatctgctgctgcgctgtgctcttcccgatcgtgtggtccatcaagaacctccgcgaggctgctcgctctgacgggaaggcggccgtgaatctcatgaagctgacccttttccgccagtactacgtggttgtaatttgctacatttacttcacacgtgtcgtggtttatgcgctgatgaccatcacctcgtaccggtaccaatggaccagctatgtggccaaggagctggccacccttgcattctatgtgttcactggatacaagttccggcctgaggtgcataacccgtactttgcgattgacgatgaggaggaggaggctgctgctgaggcactcaagttggatgatgaatttgagctatgaggatttacaattgccggtcccttcttttgccactgatgatacagatattgtatgtgcctccaaaggacaaatggtatagactggtatctagtccatatccttttcttttcatttcaagttagttatatttttcttgctgtaactggttatggtcaaccttgtgtttgtgttaagaaatgcagcagcttggatttgccttggtctaatctaaaagcattgagatgagctgttctgattgtaccttcgtagcaaatgttgtatctagatgtttacttctcttgtaaaagaagttgactatgattcagtttgtttattcatttagtgctaactctg

SEQ ID NO: 8082 - DNA, 1946 bp, Oryza sativa
  ref <308>: DATABASE ACCESSION NUMBER: AK105430
  ref <309>: DATABASE ENTRY DATE: 2002-08-28
aaaaaaaaaaaaaaaagaagatcaaaccactccccagtccccacactgaatagggtttggttacttttgtcgttctgtaggcgagtagatagctccgcccgccgttcgccggcgccgtcgccgtcgccgtcgccggtgcgaatttgagttcaaaaccgaaccgcaaattggcaggagaggagaagaggagagatctgaaggagggggaaacggaagtgatttctcggtcagatccgagggaggaagggggtatcttcgtgagctcgtctttggggatgttggcgccgaaccggctcatgtcccagcggcgcggccggcggcggcggcggcatcgccggccgcaaatccgagcccgctcagctgggtttattgcctcaacgggtaaaagaaagatatcaccgtgtgaacatgatggcgatggtcattctcaagctggcaaaatgatgagaaattcaatcccatatcttcctgaggacatattgtctcgtatacattcctttatgtcaatgcgtgaagctgctcgtgctgcttgcgtatctcgtgcttttctacgttcttggaggtgtcatcccaatcttatctttaataaagacacgattggcttgaagagaaatgcgtttggcgagaatttccacggaaaaattgggtgcattctcaggaaccactcaggcattagcttgaaaacgttcaagcttgactacagtggcatgtgtgggttcgatggcactagttatcttgacagttggcttcagattgctcttaaaccagggatcgaagaactcaccctttttttgtttgacacaaacaaacaatacaacttcccatgctcacttttgtctgatggggttcgagactcacttcggtacattaaacttcgattttgtgccctccatcccacacctgaacttgcccccttgagaagcctaacaagtctgtctctgtggttagtgagctacatgggctgagttagagtgccttctttccaactctcttgctttggagcatttagagctcactcaatgcacgaagataacttgcctgaagatacctttcgccctacagcagcccagcagactcagttgtggaaacgctgcaaatgaagaaactagacatgggatgtgcaatccatgatgctcgtgccaatctgccatccattatgccaaatcttgaaactcttgtcattgaatcagtgaatgaggtggttgatgcaccaatgctacctaccaaattcatctaccttaagcacctgaccattcgtatgataacaggatcgaccatttcccggccatatgactatttctctctggtttcttttatcaatgcatctccttccttggagactttgatattaaatgtgactctacgtatggtgaatgaatcgattttcacggattcacaactgagacacatacctgaacaccaccatggccacctcaagagtgtgaagatcactggtttcagctctgcgaagagcttggtggaactaacatgttatatcctcaataatgcggtgtcacttgagtgtcttacattggataccatttatggtcctaggtgtgatcaagataagtataggcggtgttttcccatgatagatggtgttctcacggaagctccaagggggctcgcggctatcagaacatacattgaggataaagttccatctacagttaatttgactgttctggaaccttgcagccggtgccatgttagaagaagagtgcaaacatcatctcaatcggacaatgctgtttccatataattttagatgaaccaagatttgtttccttaactatttatggctgtggtccaatgtacattagttccatttaattttagatggacaaagctttctctctgatttatcagacctgtttaatgtttattatttgtagtacaacatatattttggtccaagattgaaattttcacatacaggatgtgtt

SEQ ID NO: 8083 - DNA, 1837 bp, Oryza sativa
  ref <308>: DATABASE ACCESSION NUMBER: AK105431
  ref <309>: DATABASE ENTRY DATE: 2002-08-28
accgccgccgccgccgcctccgctactccgtccacgacttccgttccacagccaagatgtggaggcggcagcatgctctcctccgccgcatctcgctgcccaagcctcccgcggctactgggatcggatgctactacgccaccgagccggaaggcaggaagccaaagacggcgcctttgcagtcaaggggcatggtggataggttccgtttgcgtgccaagggtggtgatggtggcaatggctgcatcagtcttcggcgctccaggtcagatcgccaaggcaaacctgatggtggtaatggaggaagaggtggtgatgtcattcttgagtgttcaaggtctgtctgggatttcagtggtttgcaacatcacatgaaagcaagccgaggagccaatggagtttcaaagaatcagatcgggacaagaggttctgacaagattgcgcaggtaccagtaggcactgttattcatctagttgaaggggagcaaccttctctttctgtaaataagccaaccagagctctagatccctgggatatcccagatgctgttgaacactcaccattcagctccagtcgtattggcagcaagatgatgaaaggtctggatagcagccgatccagtcaacatatttcttccaagaagaacactgctgaaaatgattgtgaaagaggaaacagaaatcatcggggaaaggaaccatattacatgactgagtttgtgcgcaccgaagattatgatggcactagctatccacaccaggtgggggtagatgaaaatgatcaatttgatgatgaggatgatgaattttgggaggacgatgaagaagagttggacatggaggaggtaacggaggaaaaggaggaggaagaagatgttcggtatagtgttgctgaaatgacaaagcctgggcagcggttgatcatagcaagaggaggggaaggtggactagggaatgcttgtatcctcaaggagatgtggctgtccaaagcacataaggaagaggagatggctagcttgagtactggacatcctggaactgagacctatcttatcttggaactgaagagcattgctgatgttgggcttgttggtatgcctaatgctggaaagagcacattgctgagcgctctctctagggctcgcccagagatagctgactatgcattcaccaccctaaggcccaatattggtagcttaacttatgaggactacttctcagtgaaagtggctgatatacccggtctgatcaaaggtgcccacgagaaccgtggccttggccatgctttcttgaggcacatagagcgcacaaaagttctggcttacgtacttgacctggcagccacgctcaatggtcgaaagggtgtcccgccatgggagcaactgcgggatttggtcgtggagctggagcattaccaagaaggcctgacaaagcgcccatcattgattgttgcaaacaaaatagatgaagagggagccgatgaaatgtatgaagaactgaagaagagagtgcagggcgttccaatgtttccaatatgtgccatcttgcaagagggagtaccagatctgagagttggtctgagagaccttatggatgcctcagatcctcagggtattgagttgagcaaaattgtggtagattaaattaagttgagcaaaattatggtagaatttttccttgagatgctgatgcagtggggaaatgttttggaaaatttccctctcggcagttcgtacaaatgtgttgcttttgttttgctttttcttgttattacttaggctggggatgtaaaatccacaacagatcgtgaacaactagtcataaaattagtgtttcc

SEQ ID NO: 8084 - DNA, 1795 bp, Oryza sativa
  ref <308>: DATABASE ACCESSION NUMBER: AK105432
  ref <309>: DATABASE ENTRY DATE: 2002-08-28
gtgcgtgtctgcgaagcgtgagagagaaacgtacgcgacgcgacgagctcctactccgatctccccgatgcgatctcgccaaaccctaatcccacccaccaccgcgccggagtcctagcgccgcccgcagccgccgccgccgtccggatgctgcggccgtgacctcctcctcctccgcctctgacatcccagccatgggagccgccgacaagtggctcctcccgctcgtgtcggtctccttcgtctcgctgctgctcttcctctccgcgctctcgggcttctccgcctcctcctcgctcttcgcgcgcctcccgccgccctcctacgtccgccgcggggcagccgcgccgccgtccttcgcgtacgtgctgtcggggggagaggggaggggaggaagctgctgcggctgctgctcgcggtctaccatcccaggaaccgctacctgctccacctctcggccgatgcgcccgagtccgagcgcgtcgagctggccgccgccgtgtcgcgcgccgcgcccgccgtgcgcgccttcgggaatgtcgatgtcgttggccgccccaccgctggcacaccgatgggatcctcgggactcgcggctacgctccgcgccgcggccgcgctgctgcgcctggattccgagtgggactggttcgtcacgctcaacgccgccgactacccccttgtcacccaggacgacttgattcatgtcttctcctcagtgccaaggcatctcaacttcatcgatcacactagtgatattggatggaaagagactcagagagtgcaaccaatcatagtagatgctggaatatacttggcaggaagaaatcagttcttccaagccacagagaaacgtgatactcctgatggtttcaaattcttcacaggttctccgtgggtcattctaaatcgacggtttatagagtattgcatatttggttgggagaatctccctcgaactcttctcatgtacttcacaaacgtaatgctacctcaggaagggtatttccactcagttgtatgcaactcagacttccgtaactccacagttaacagcgacatgcggtatatggaatgggatgatccaccccagatggaaccccattttctgaacacgacacattatgatgagatagtggagagcggagtgccttttgctagaaagtttcgggagaatgaaccgctgctggacaagattgatgaaagagtactccaccgttggcgtcacagacctgttcctggtgcctggtgcacaggcagaaaaaggtggttcaatgatccatgctcccaatggagcaatgtcaacattgtaagacctggtccccaggctgagaagttccgcaaacatatgaatcagatcatagaggaatctgcatcaggcaacaactcatgcaagcaatagcagcaatgaagcgcgagatttcacttcccatgtttgaagcgatgagcttttctcattttgcatagaggggctcttcacgaacttcagcagttaacgcttccagagcgaacatttttgcacctgggttacaagcacacgtccaaaggtgagatgggtttattctttccagattttttggtaactgtcatggcttcaagggcctcactgcatagcgcatactagcttagttggaagtcagagtgctgatggtcggagcaccaaagctaataggcagtgtaattattagtgatcagttgaatgacttgtgcgactgtttatagaactgatggaattctgggtgctcccatacaggattgagaaaaatgaagagtgggtgatggtggttggattctt

SEQ ID NO: 8085 - DNA, 3163 bp, Oryza sativa
  ref <308>: DATABASE ACCESSION NUMBER: AK105433
  ref <309>: DATABASE ENTRY DATE: 2002-08-28
aatccactccgcccttcatatgcgcgcaccgctcctcccgttgtttccatcgacagaagagagagttcagatcaaacgccgaagcaattcttccgcaagatttcgagtgatcccatctcaatccaagctaaaccgagagattttgatttgttgctgtagattgattgtgtgaggagaggaggagcagccatgaatccggacaacttcacgcacaagaccaacgaggcgctcgtggcggcgcacgagatagcgtcggaggcggggcacgcgcagctgacgccgctgcacctggtggcggcgctggcggcggacaagggcgggatactccggcaggcgatctcgcaggcgtccggcggggacgccggcgcgccggactcgttcgagcgcgtggtgagcggggcgctcaagaagctgccctcgcagtcgccgccgccggacagcgtgccggcgtccacggcgctgatcaaggtcatccgccgcgcgcagtccgcgcagaagaagcgcggggactcccacctcgccgtcgaccagctgctgctgggcctcctggaggactcgctaatctccgactgcctcaaggaggccggcgtgtccgcggcgcgggtgcgcgccgagctcgagaagctccgtggcggggagggccgcaaggtggagtccgcgtccggcgacaccaacttccaggcgctcaagacctacggccgcgacctcgtcgagcaggccggtaagctcgaccccgtcattggccgcgacgaggagatccgccgcgtcgtgcgcatcctgtcgcgccgcacgaagaacaaccccgtactcatcggcgagcccggcgtcggcaagacggccgtcgtggagggcctcgcgcagcgcatcgtgcgcggggacgtgcccagcaacctgctcgacgtccgcctcatcgcgctcgacatgggcgcgctcgtcgccggcgccaagtaccgcggcgagttcgaagaacggctcaaggccgtgctcaaggaggtggaggaggccgagggcaaggtgatcctcttcatcgacgagatacacctcgtcctcggcgccgggaggacggagggctccatggacgcggccaacctgttcaagccaatgctcgcgaggggccagctccggtgcatcggcgccacgacgctggaggagtaccgcaagtacgtcgagaaggacgccgcgttcgagaggcggttccagcaggtgttcgtcgcggagccgagcgtcccggacaccatcagcatcctgcgaggcctcaaggagaagtacgaggggcaccacggtgtgaggatccaggaccgcgcgctcgtcgtcgccgcgcagctctcggcgaggtacatcatgggacgccacctgcctgacaaagcgatcgacctcgtcgacgaggcctgcgcgaacgtgagggtgcagctggacagccagccagaggagatcgacaacctcgagaggaagaggattcagctggaggtggagcaccacgcgctggagaaggagaaggacaaggcaagcaaggcccggcttgtcgaggtcaagaaagagctggacgatctgagggacaagctgcagccattgacgatgaagtacaggaaggagaaggagaggatcgacgagatcaggaagctgaagcagcgccgcgaggagctccagttcacgctgcaggaggccgagcgccggatggacctcgcccgcgtcgccgacctcaagtacggcgcgctccaggagatcgacgtcgccatcgcgaagctcgagagcgagacgggggagaacctgatgctcaccgagaccgtcggccccgagcagatcgccgaggtggtgagccgctggaccggcatcccggtgacccggctcggccagaacgacaaggagaggctcgtcggcctcgccgacaggctgcaccagagggtggtcggccaggcggaggccgtgagcgccgtcgccgaggcggtgctgaggtcgcgcgccggacttggccggccgcagcagcccaccggctcgttcctcttcctcggtcccaccggcgtcggcaagaccgagctcgccaaggccctcgccgagcagctgttcgacgacgagaacctgctcgtccgcatcgacatgtccgagtacatggagcagcactccgtcgctcgcctcatcggagcaccacctggctacgtcggccatgaggaaggtgggcagctgacggagcaagtgcggcggcggccgtacagcgtgatcctgttcgacgaggtcgagaaggcgcacgtcgcggtgttcaacactctgctccaggttctcgacgacgggaggctcaccgacgggcaaggccgcacggtggacttcaggaacaccgtgatcatcatgacctccaacctcggcgccgagcacctcctcgccggcatggtcggcaagaactccatgaaggtcgcccgtgaccttgtcatgcaggaggtgaggaggcacttccgtcctgagctcctgaaccggctcgacgagattgtgatattcgatcccctgtcccacgagcaactcaggaaggtcgcccgtctccagatgaaggacgtcgccgtccggctcgccgagaggggtgtcgccctggccgtcaccgacgccgcgctggacgtcattctgtctctgtcctatgatccggtttatggcgcgaggccgatcaggaggtggatcgagaagagggtggtgacgcagctgtccaagatgctgatccaggaggagatcgacgagaactgcacggtgtacatcgacgcggcgccgcacaaggacgagctggcctacagggtggacaaccgcggggggttggtgaacgccgagacggggcagaagtcggacatcctcatccaggtgcccaacggcgccgccaccgggagcgacgccgcgcaggcggtgaagaagatgaggatcatggaggacgaggacggcatggacgaagagtagtaagtagtagagcgcgtatgtgcgtgttgcgcccccgggcagaggcagaggagggcgccgatcgagctgtgtgaatgaatgtggggtgtctccgttgaataagctgtgaaatatggtgtttttccgatgatgcctttttgtgaagttgttgttctgctaagacgactttcttttgtgaaatttctgatgaactgaagaagtgtaaaaacgtttacgttctggttgagttgagttg

SEQ ID NO: 8086 - DNA, 2343 bp, Oryza sativa
  ref <308>: DATABASE ACCESSION NUMBER: AK105434
  ref <309>: DATABASE ENTRY DATE: 2002-08-28
cgattcgattcgcatcccgtctactgaccacacacggccggacggaagacccgaaccgtatcgcctccacaatccatcccccagaaccataccacgcgttcccgttcccctcctaaatactcgatcaatatcaatcaatctccgccaactccctcgaatcgctcctgaataacttagttttctcttgttagattagggtttcgagtctttcgacgtcctgcttgcttgcagggagattctgatgccgaagaagccgtcgctgtcgcgggttgcttcagagacgcggctgctgttttctagctgggaacctgaatccccgttggatgctaccagcggatccggaaaagatgcacccgccgatcaacaggaaggcgacgggaagcggggccgacaacgctcgcctggtgacgaagcgaggtcattgaaggatcgattcaagggtcgattgaaggagggcgttgcttcagcccgattgaagtgtttagacacactattgaatgagtcgagggatttatcgcaggggaatgagtccaaggggaatttgttgaagagcctcattcaaaaggcagagttggatttgtggcaggtgaaggaactggaaaccgatcccacgtccggtgctagccaatccaaagaagaagcttctgctgcagcttctgatggacagggagacgataaggaaaggggtgacttgcaagcagtcgaggcctatggttctcctcctggtaaggagaaggttgacttgcaagcagctaaggactcttctcccactgctgggaggaagggaaagggcaagcgtattatagggtatgaagcacaacagaaggaaagcaacattcaagatgttaaaacatcaagtcaacaagaaactagaaagccaaagaggaagaagcagaagaagaggcagaggcgcaagatggaggaatccacggaaaatctatcatgccgcagtggcagcagcccatcctcttctcatgatgcaacaagcacatcgacaatagagggggagccagaacaaccatcttttggggatcttgcgagcattgcacaagaccatgatgacaagattgcatctgacgttgttgacatcaaacaagaacaagaatcagcagaagatatcctagctctcctcgacatgatggataaggatgccatccaagaaaaattcaattactatctcaagcagctgggctttgagtcaaatgagtatgatttttggtctgaaacctatgagccagagcaactcactgcgttgcacgagcggttagccatctaccgcatcgtaggttatgagctatcaaagggtaggaagcttggcaaacaggatattgcaaaactgaaagagcagtacaatccgtccattcttcgtaaggaaggatacttccggcactatgaggagagtcttgagtggtacttcgatcttgaatggtgcaagtactctggttttcaagactatcagcggctagtgcttcatgataatgttgagttcttagagtgggagcattaccacttaaattataatacctatgaggatgatctagcatatgtcaggtatcgtgcacgcttagcaaatgagactaagtggattgaagattatctggcccgtgacataactcaggctgagtggcgtagggttaaggatatagcttcagttcaagcactgaagattgcaagagtctctggtggtgtcaaggcacaggcagctttggctggtttcagagatcatatatggagcattcagtttgatttcaatcactataaggattttgatggtgtttacttcaagatttggaagcgggttgctaagagaaagatgaattttagagaagctttgttggaagtgtatagagaagatatgtttcctgtgcgcaagaatggtattaagtacgaacttgataatactcaactaagattcaagtcgatgaaagaaaagtatgatgcccacgtggcttgccttgatgagtcggtgccagaagatgaagttcgtcagttgatcaaagaggccgttataaaaatgaaaccaaaaccacatacctatttggactacgccaggaagaagttacagatatcaatgaatatcgatttgattaccaaaagtacgtgtactcttctcaattatcaaacatgattcaatgctaatcaatgccgtttgaaagaattttagctttcttagtctgagaaatatgtctttcgtttgaattcaataactagtaatctgtccgtgctaatgctatggtgacatttagtaatcgtctgcatgtaacgcttatcatcatgaacataaattaatttgaacatttgcaagaatctgattatcgtttgaaatactatcgatgcatagac

SEQ ID NO: 8087 - DNA, 2699 bp, Oryza sativa
  ref <308>: DATABASE ACCESSION NUMBER: AK105435
  ref <309>: DATABASE ENTRY DATE: 2002-08-28
acattttgctccgctccccccaaaaaccctactccatcggcggcgatggcggagccagcggctgcggcggcggcggcggaggccccggcgacggtggggcaggcggtgatcccgctcgtcaacaggctgcaggacatcgtcgcgcggctggacggcggcggcggcggcggactggagctgccgcaggtggcggcgatcggcgggcagagcagcgggaagtcgagcgtgctggaggcgctcgtcggccgcgacttcctcccccggggccccgacatctgcacgcgccgccccctcgtgctccagctcgtgcgccactccgcccccgaggagtggggggagttcctccacgcacccgcccgccgcttccacgacttcgaccagatcaagcgcgagatccagttggaaacggataaagaagctgggggcaacaaaggggtttctgagaaacagattcgtctgaaaatattttcaccaaatgtcctagacatcaccttggttgacctccctggaataacaagggtgccagtaggagaccagcctagtgatattgagtcaagaataaggtcaatgatcatgcaatacattaagcatccaagttgtattatcttggctgtcactccggctaatgcagatttagctaattcggatgctctccaactggcaaagcttgctgatcctgatggttctcgaacaattggtgttatcaccaagttggacatcatggacaggggcactgatgctcgtaactttttactgggaaatgtgatccccctcaagcttggttatgtaggtgttgtaaatcgtagccaagaggatatcaactttaagcggagcgtcaaagatgcacttgctttcgaggagaagtttttctcaactttacctgcttatcatggtcttacacattgctgtggtgttcctcaactggccaagaagctaaatacgattctactaaagcacattacatatatgcttccaggcttgaaatctcgcatcaattctcagttggtagcagttgcaaaagagcatgctgcatatggtgatactgcagaatcaacggctggtcagggggtcaaactgttgaatatactcagaaaatattgtgaagccttttcttccatggtggaagggaaaaataaagtgtcaacagatgaactatctggtggagcaagaatccactacatttttcagtcaatttttgtcaagagcttggaggaagtggacccctgtaagagcataactgatgaagatatccgtacagccatacagaattctgacggtccaaagggtcctatgtttctgccagagttgccgtttgagattcttgtgcgaaggcaaataagtcgtttgcttgatccaagccttcaatgcgcaaattttatctatgacgagctagtcaagattagccgtggttgcttaaccagcgagctgcagaaatacccgattcttaaaaagcggatgggtgaagcagttagcaatttcttgagagatggtcttcgacctgcagagacaatgataacccatattattgagatggagatggattacataaatacttcacatccaaactttgttggaggcaacaaggttgttgagcttgctaggcaagaaattttacctcccaaagcaccaacctctgtaacgattcctaaggatggtactgctattagtcctgagatacaattaacatctgacagaagtcaaaagtcacgtgctatttttgcaagagatgctactagaggagccacctctgatcagggagtgcagcctgatgctgatacaggaacaagtgtggcaggcagaaatcagaggggtcactcactggttgctgggagttcatcaagcaagtcagttgcacgagttcacagcctagataaccttatctctatcatccagttaagagagccacccatcactttgaagccatcagaaaaccagcctgcacaggatgcaacagaggtagccattgtgaaactattgatcaaatcgtactatgacattgtcagaaagagtattgaagatgctgttccaaaggctataatgcattttctggtgaaccacacaaagcgtgagctgcataatgttttaatccggaaactgtacagagaaaacctgctggatgaaatgctgagggaaactgatgaagtaattatcagaaggcagcgtatacaagaaacactccaagttcttgaacaggctcataggacgctcgaggaattttcccttgaagctgaaaaggttgagaagggatacagccctgctgaatatgctactggcctgccaaaaatccatggtctcagcaatggcgaccccagcatcatttacgcatcctcgcctaaccacaatcgaaagaaagcatctcacgaagatcaacatgggtcggtagcgtcatatagttcgacttcctatccagatgctaatggtgggcttctttccacttgatcttgatcaatttctcctatcattttcaagtgacgtgcttcagttttgtcctgtaaattcaattttttgttagtgggctatttttttctgcaactggcagctatttctggtgccgcaccttgatcttgtaatctagcagttgcactgaaatagcaggactacaggagcccaagtacattcatagccaacaggggcaatggaatggtggctgtgtagattaacaatgtaactagccccttatatcattttgccttttttgt

SEQ ID NO: 8088 - DNA, 1685 bp, Oryza sativa
  ref <308>: DATABASE ACCESSION NUMBER: AK105436
  ref <309>: DATABASE ENTRY DATE: 2002-08-28
aatagcccatctgacatctttgccaaaccctaaccgcctctggctcggcggcggcggcggcggctcgtccccgaagagcagccggagttggagaggatcggtgttcccgctacgcggcggcaaagatcgatggtggacacggatgagcggtggcgcgctgcggtgattggcggtggtggagatgctgctactgcgacggagcctagtctgcccgccgcgataacgcggcgtctgcgggagctcgcatgggaggacaaggacaaggagaaggctcgcacggtcgttgatctagtcgactccgaaacccctatcgaatgcgatcacgaagagggtcatctttgccctagtccctgctccgacattccttctatggttgcagctagcggtggtggtggtggcaatgaagagatgggcaaggtgaattgtaatgagaagcacacatatggtgaggagaaggagaaggagaaggagaaggtggtggagactaagtcggagctgaagcctaaaccgaggaggaagaattgggaggaggaggagctcacatgggaggagaaggtgttgaaggttcttcacatggttcgtatatgggaggtgactgaattcgaccccaagatggagtggtttgagcctacccgcctttgcctcttcaacaccgccttcttcgacctcgacaaagagtctaaggctgggcttgggccaccgattcactcgctcacttcctctgattatcgccatttggagacctccatgaatatcatttcaatcaaggttgtcgaatctgacgtgggttaccctatcagcatcttcggcaccgtgttagcgagagatcagtatgactataggtgtgtgtatttgttcaggcgtagcagggacgatccccagatcatcacctcaccggaggacatgctaactttgacaggcccaaagcgaggtcttggtgcaaaagattatatgtttttcgagttcaatttaaagatgaagggcgatgatggagttgacaaagattttagcaaaggtttgctgccatacaatgtcgtctgtcgaacagggagactcgagactttacatctcaggagctggctaagtgtagtggaatttgcattcgtgactgttcaatatgccgttgaagctacccttgcggtgaaaatgttagggggggcatctgttttcactggtagagtgactgcttggactactggaaatgatgaagatgaaatagttctctatgacagtgaagttgcagacactcggacagagattacagctgatggatctgttcagctaaatcgtggtttagtagttgtcccattggataaggagctggtgctcaatatttgtgtgtttgagggtgaagatgaagctcaaagctttgagttcattctagggcactatgatgaagaatttacctgcaagcaaggctgttatgagtttcaagttaatattatttggacggcagtaaagactcggcgacggcccaatatgtggaagcgcattggttgcattgtactgttactttgaaggctgtaaaaagggtgcacttatcagagtcatatatgatcggtgcactcaaaacatatctatctatccataaaatttcctaagaatattctcttagatatgtattgctagtctcagtctgtaaatgatgatcacgcttatcttaattagacacatgcatgcgtggt

SEQ ID NO: 8089 - DNA, 2514 bp, Oryza sativa
  ref <308>: DATABASE ACCESSION NUMBER: AK105437
  ref <309>: DATABASE ENTRY DATE: 2002-08-28
caaggtgtcggggttaatgtcattaaccgttctgccttccctgcttattcccccaataaccatatagatgtggaactatacaagctcatgaccatgcagacgcgtgtcttcattgtccacatgttgccagcccgtgcttcccgcctctttgcaagggcaaaagcactcggtatgatgactaaagggtatgtctggattgtcacagatagcattggtattgtccttgatgtgcttccccaacattccattgaaagcatggagggaattgttggtttccggccatatattgcagaatctacaaggatcactgatttcagctctcgatttaccaccttattcagaactaagtaccatccaaatactgatattaggatggcaaaacccactatctttcaattatgggcttatgatgtggcatgggcagtcgcaacagcaactgagaaggttcataggaccagatctttgaacccaacttttcatcctccgggaaacataggcaagaacttagtagatgatctcccagcattgcctgctggtccagaactcctcaattccattttgcaaggagagtttgatggattggctggacaattcaggcttatcgatagacatctgcaggttcccacatatgagattgtcaatgttattggagagaaaactagagttatcgggttttatagtcctgattctggactcacaatgtctgtgaactctagaattatccatggtgatgctaaatttagcacaagttcttctgatctggaaaatatcgtttggcctggagattcaacaacagtgcccaaaggctgggacttcccagtgaatgctaagatactccagattggtgtgccagtgagacgtgattttaaaacttttgtgaatgttgagactaatccgaacacgaatagatcaactgtcagtggctacagcattgatatgtttgaggcagctgtcaagaaattaccgtatgctctacgctacgagtacattccctatgattgtgctgtttcatatgacctgctagtatcccaggtcttttacaagaagtttgatgcagcagtcggtgatgtgacaattattgctaaccgaactagatatgtagatttcacaatgccatacacagagtctggtgtttcgatgcttgttctatctaagagtgacgatgaaccaaccacatggatcttcctacagccactagcaaaggacctatggattgccactatgatctttatcttcttcacaggcctagttgtatgggtgattgagagacctataaatcgcgatttccaagggtcaaaatggaaacagtgcatcactgctttctactttgcattctccactttgactttttcacatggtcaaaagatccaaagcattcagtcaaaaattgttgtggtaatttggtgcttagttttgatgattctggtgcagagctatacagcaagtttgtcatcaatgctaacggcagagaggctccaaccttcagtgactgatctaaaacaacttttggccaatggtgattctgttggacaccaaagtggatcatttgtgcaatcaattctgaagaagcttaaatttgatgaccacaagataaaggtttatagcacgcaggaggaatatgcaaaagcattaaggatgggatcaaagcatggaggggtttcggctatcttcgatgagataccctatctaaattctttctgctcgaaatacgggagggagttccagatggttggccccattgacagaacaagtggatttggttttgttttacctaaaggctctccattggtaccagacctttcagaggccatcttgagcttaacggaagaacctgaaaggttgaagattgaaaagacatggttcatggattcgtccttggattattatggcagtcacagcaaaggctcatcacgtatcagttttcagagcttccaaggtcttttcatcattgtcgggtgccttttaggtgctgtgctgttgataaactttagcaagtttctatatgacaaatgcaaagagatgagaggcttcggttcagaccgtgtccatagtggcgagagagttgtttgttacggtgaagctcaaccacaaccaccgcagattgtcatggtcgatcgacgatcctgtgcctgctgataccctccagattaggactgaaaacaaataaagagtgtgaacagttatctgcaccaactatcccaactcccaaggcactagaatggctctgaagctagaaaaaagttcacttgttttggcctgcttgttgcatggccttgcttaactgtgtaagcctcttctgttggttttaattagtcaattgaaagctattctaaaactctagatttgcaataattgtaatgataattgtaatgtagcacaaacatgctgaacgatgttcagttgatgtttttcttttcttgggacaaaactcaattgtaagctattctaaaagaactctagattgacaatgattgtaatatagcacaaacacgacgaacgaagtttttcttgggc

SEQ ID NO: 8090 - DNA, 2049 bp, Oryza sativa
  ref <308>: DATABASE ACCESSION NUMBER: AK105438
  ref <309>: DATABASE ENTRY DATE: 2002-08-28
aagaaacttacgaggattcccctagtaacggcgagcgaaccgggagatgcccagcttgagaatcgggcggccgcgccgtccgaattgtagtctggagaggcgtcctcagcgacggaccgggcccaagtcccctggaaaggggcgcctgggagggtgagagccccgtccggcccggaccctgtcgccccacgaggcgccgtcaacgagtcgggttgtttgggaatgcagcccaaatcgggcggtaaactccgtccaaggctaaatacaggcgagagaccgatagcgaacaagtaccgcgagggaaagatgaaaaggactttgaaaagagagtcaaagagtgcttgaaattgccggcgaggaccaggctttgtccgaccttcgtgaaaagcatcaatttgacctggagagattaacgctaacatcgcagccactcagaacattggcgttatttgcattagccattggacagagtataaaaagcacatgtttatgtgttctgaaagatagtgctcggttgaagttcttggttcttttggttgcttctgcctgtactccgctcttgttaactaacggtccacatgaaaagcatgttcaggagctgctttggtatatcagatttggattatggtgggtcatactaggggtggcttcatccattgggttaggctctggtttgcacacatttgtattgtatttagggcctcatattgccctttttacaatcaaggcagttcattgcggtcggactgatttaaagagtgctccttatgatactattctccttaaaatgagaccttcatggttggagaaagactgtctagaatttggaccgccaatgtaccaggaaacaattccatttagcaaaatactgcatgaagttcaccttgaagctgttctctggggcattggaactgcacttggagaacttcctccatatttcctctcgagagcagctagcatgtcaggacgcaaactagatgagctggaagagttggatgcttccgtttcaggagaaggttttctatcctcaactctgcatcgggctaaaagatggcttatgtctcactcacagtatcttaacttccctaccatcttattacttgcttcggtgccaaaccccctcttcgatcttgctggcattttgtgtgggcaatttaacatcccattctggaagttctttctagcaactttaattggaaaggctgttattaaggtttatatccagacaacattagtaattactctctgcaataaccaacttcttgatttggtggagaaaagaattatgtgggtatttggcaatgttcctatggtatcatccgtccttccctctttagttgccaagttgaagacagccaagagcaagtttttatcatccagtgttgctgcatcagcatcaagtgttgtgaaggaaacgaagtggaatctatcattctctttgatctggaataccgtggtgtggcttttgatcatgaacttcatcgttcagataattacttctacagcacaaagttatctcaagagacaacaagagctagagatccggaagaagttgtcagcgacgatacaaactgtttctgaaactactggcttatcaaattaattcagccagatcattctttctaatatacaaatttcacattcatgccatcaatttcttcccacacctgaggaggatacaattgacttggcaattccaaatatggttaatttagaagttacaacgagctggaaaaccggtattcttcaagaatttacattgatatagttgtcacattgtacagtcctgcgctttccaaaaagaaaaaaaaaacattgtacataacctgtcccatcaagccattacaggagaattagggcccctgcattattgtggagcgctacttattgctgtacttaattgaaaggcacaaaaaggaaatgcatgactagctctccaatgtaatgcctccccagctacaatttctggggcccatttgtacatagtaaaaccaaggtagtatcaattacacagggaatcaaagctattcatgcccctgatgccctcct

SEQ ID NO: 8091 - DNA, 1723 bp, Oryza sativa
  ref <308>: DATABASE ACCESSION NUMBER: AK105439
  ref <309>: DATABASE ENTRY DATE: 2002-08-28
agcgctccccgccgttcccaaatttgttgcggcgggagagggtcggagagacaagcagcggcggcggcggcgcgtgctcggcggcggcgatgaggatcgaggaggtgcagtcggcggcgaagaagcagcgcatcgccacccacacccacatcaagggcctcggcctcgacgccaatggggcggcgatagggctggcttcggggttcgtggggcaggcggcggcgcgggaggcggccggcctggtggtcgacatgatccgccagaagaagatggccggccgcgcgctgctcctcgccggcccgcccgccaccggcaagacggccctcgctctcggcatctctcaggagctaggtagtaaggtccccttctgtcctatggtgggatcagaagtgtattcctcagaggtcaagaaaactgaggtgctgatggaaaatttccgtcgagctataggcttgcgtataaaagaaaataaagaggtttatgaaggagaggttactgaactttcgccagaagaagctgagagtacaacaagtggatatggaaaaagcattagccatgtaatcataggtctgaagactgtaaaagggactaagcagctgaagttagatcctacaatttacgatgctttaataaaggaaaaggtggcagtgggtgatgttatatacattgaagctaatagtggtgcagtgaaaagagttggtagatgtgattcttttgctacagaatacgatcttgaagctgaggagtatgttccgattcccaaaggagaggtccataagaaaaaggaaatagtgcaggatgttacacttcatgaccttgacgctgcaaatgctcaaccacaaggaggccaagatattttgtcccttatggggcaaatgatgaagccacgaaagactgaaatcactgacaagcttcggcaagaaatcaataaggtggtcaacagatatattgatgaaggaattgcagagcttgtacctggtgttctgttcattgatgaggtccacatgctagatattgaatgcttctcttatcttaatcgtgctctggagagcccattatcaccaattgtgatacttgcgacaaatagaggaatatgtaatgtaagaggaactgatatgacaagtccgcatggtataccagttgatcttctagatcgattggtgattattcgaacagaaacatacggtcccactgagatgatccagattcttgctattagagcacaggtagaagagattgagatcgatgaagaaagtcttgcatttttaggagagatcggacaacagacatctttgaggcatgctattcagctgctatcacctgccagcgtagttgcaaaggctaatgggagagaaaagatcagcaaggccgatcttgaggaagtcagtggtctgtacttggatgctaaatcgtcggcgcgtctccttcaggagcagcaggaaagatacatcacctaagatctcttgctgtacgacgatgtatttgtccttagtcattccgctggatctctgataacttggtactaaagtgcgaagacttctttagggcactggattgatttatgcggaaatgtagaatccgaactctgtactcccgccaacctctagaggaaaacttgatttcggcatattgcttgttcacattactccttgctgagtagattgcatatgaattatcgtgtattttggtttcccatgctaattagttccagattccgtttgtc

SEQ ID NO: 8092 - DNA, 2323 bp, Oryza sativa
  ref <308>: DATABASE ACCESSION NUMBER: AK105440
  ref <309>: DATABASE ENTRY DATE: 2002-08-28
gaaaattttcaaaccccctcggcgaccaaaccagagcgcgggggggcgatggcggtgcggagacggggggcgtcggcggtggccgtgcacggcggcggcggccgggtgccgaagcgggcgcgggtgacggcggagccgtcgctgctcgacgtgcgggcgttcccggggcagaaggaggagggggagaagcagccggcgcgcggcggcgggaagaagtcgtcgtcgtcgtcgtcgacgttccgggcccaggtgagggggttcctggcgcggtgcgcggtggcggtgccggcgtcggaggcgggtgagttgtcgccgggcatgtcgtcgtggcacgtggggtttaccaccgccggcggcgaggcggtggcggtgatggaggtggtggaggaggaggtggccagggccaggcgggtctactgcgagcactgcactgttgccggctggagcaagcaccctgtttgctccaagaggtaccacttcataattcgcaatgagaatgaaactggcacctccaaaacctgcaggcgttgcgggttcatggtggcactgcaggaaacaagatgtccgtcctgcaaccacgttggcctctcacgggatgatccggaagattgggactatgtgcagctggagagtccacggcatctgctgcatggcatagtccatgaaaacgggtttggccaccttgttcggattaatggccgtgagggaggctccagcgtcatgacaggatcccaactgattaacttctgggatcggctctgcagatacctcagggtcagaaaagtctcagtgatagatgtttcgaagaagtatggagctgactaccgaagcctccatgctgttgccactggctgttcttggtatggcctgtggggattcaaacttagcagcggaagctttggaatcacacctcaagactactccaaagctgtagaaagcctatcctcagtgccactctctaacttcttccctcacacccgatctccacgaaaccagttacaaaataccattgcattctaccaatctctctcaaggcaccctctcaccacaatccgtgaactgttcgcctatataatggagcttgccaccggcaagagtgtgcacaaagagaaaatggcatatgatgccaattatcaagaggaattccctgaagaggaattacagcgagcaacaaacattgctctcaaaattctccgtgctgcagatagatgggttgctacacggacactaaaggcagttacatcccatccaattggttcgccacagctggtcgattactgcatcaagacccttggtggtacaagaactgacgatgggatggttgttgcaattcgatgcaacagtgagatgaacactgtagagtacaggcttacgactgaaaccctcttcccaccaaacaacgtgtgcaccctaacccaagaccacctattccgtgacatcaagttcttgtatgatgcgcttctctacccatacacaatgcatccttatatgccagaagaaaattatcagcatgccaagaggtctgcaatgatccttttggactgcaagcaattcatcaagcattatgatctggaagaagacttcttacctcaaaacccatcccagttgcacatttggtgccaagtggaactagctgaccaggttgatgatccaccttgtatcccagcagagctcataactcttccacaggcagcaactatcgctgatctcaaaggggaggctgcgagagcatttcgagacatctacctaatgttacagagttttgtagctgaccagcttcttgattgtgcaactgcaagcgacacaacacaaatcaagctcttgtttggagcaaagggggctgtccacatcaaaggcaggtgcattggtggtgaaagacggtttgcaatttaccggatggagaggggtgtggacaaatggacagttaaatgctcctgtggagcaacggacgatgacggtgagagaatgctatcctgtgacacttgccatatgtggatgcacactaggtgtgctggaatcagtgattttgatagggttccaaagagatatgtatgtaaatcatgtaaactaacccacaagccgaagagcagtggtcctaggctcatgtatagtagtgcacctaacaaaagatgtaagactggcacaggttcctttagcaatgcggctgaaggattactgtggcctcaaatcagctaacatgtacataacgataacaaggattcatatgagccatgccagtttttcatggctgcaattatgtaaacatttgtaatggtaagttgcctgatgtctcatgaacttaattgagaaaaattttatcagc

SEQ ID NO: 8093 - DNA, 2474 bp, Oryza sativa
  ref <308>: DATABASE ACCESSION NUMBER: AK105441
  ref <309>: DATABASE ENTRY DATE: 2002-08-28
atggacgcctccgccggctcgtcggcgccgcactcgcacgggaacccggggaagcagggtggcggcggcggcggcggcggacgggggaaggccccggcggcggagatcaggggtgaggcggcgagggatgacgtctttttcgctgacgataccttcccgttgctcccggacttcccgtgcctttcttccccgtcaagctcaaccttctcgtcgtcgtcgtcgtcgaactcgtccagcgctttcaccaccgcggcgggagggggttgcggcggtgagccgtccgagccggcctcggcggcggacgggtttggtgagctcgccgacatagaccagctcctcgacctcgcgtcgctgtccgtcccgtgggaggccgagcagccgctgttcccggacgacgttggcatgatgatagaggacgccatgtccgggcaaccgcatcaggcggacgactgtaccggcgacggcgatacgaaggcggtgatggaggcggccgggggaggagacgacgccggcgacgcatgcatggaggggagtgatgcgcccgacgatctgccggcgttcttcatggagtggctcacgagcaaccgtgagtacatctccgccgacgacctccgcagcatccgcctccgccgatccaccatcgaggcggcggccgcgcggctcggcggcgggcgccagggcaccatgcagctgctcaagctcatcctcacctgggtgcagaaccaccacctccagaagaagcgcccccgcacggcgattgacgacggcgccgcgtcgtcggaccctcagctccccagccccggcgcaaaccccggctacgagttcccctccggtggccaggagatgggctccgccgccgccacatcctggatgccctaccaggccttcacgccgccagccgcgtacggcggcgacgccatgtacccaggcgccgccggcccgttccctttccagcagagctgcagcaagagcagcgtggtcgtgagcagccagccgttctccccgccgaccgcggcggcggcgggcgacatgcatgcgtcgggcggagggaacatggcctggccgcagcaattcgcgccgttccccgtctcctccacgagctcctacaccatgccgtcggtcgtgccaccgccgttcaccgccggattccccgggcagtactccggcggccacgccatgtgctctccacgcctcgccggagtcgagccgtcctcgacaaaggaggcccggaagaagcggatggcgaggcagcgccgcctctcctgcctgcagcagcaacgtagccagcagctcaacctgagccagatccacatctccggccatccacaggagccctcccctcgcgccgcgcactcggcgccggtcaccccgtcgtcggccggctgccggagctggggcatctggccgccggcggcccagatcatccagaatcccctatcaaacaagcccaatcctcctcccgccacgtcgaagcagccgaaaccctcgccggagaaaccgaagccgaagccgcaggcggcggcgacggccggagcggagagccttcagcgctcgacggcttcagagaagcggcaggcgaagacggacaagaacctgcggttcctgctgcagaaggtgctgaagcagagcgacgtcgggagcctcggccgcatcgtgctccccaaagaagcagaggttcacctgccggagctgaagacgagggatggtgtctccatccccatggaagacatcgggacgtctcaggtgtggaacatgcggtaccggttttggcccaacaacaaaagcaggatgtatcttctcgaaaacacaggtgattttgttcgttcaaacgagctgcaggagggtgatttcattgtgatctactccgatatcaagtcaggcaaatatctgatacgtggtgtgaaggtgaggcgcgcggcgcaggagcaaggcaactcgtcgggggcggtaggtaagcataagcatggctcgccggagaaacccggcgtctcgtccaatacaaaggccgccggcgccgaggacggcaccggcggcgatgacagtgccgaagccgcagcggcggcggcggcaggcaaggctgacggcggcggctgcaagggcaagtccccgcacggcgtgcggcgttctcgccaggaggccgccgccgccgcctccatgagccagatggcggttagcatctgaagaaacagatgacagcagcagcagcaagcttcagtccatttgaaggttaattattagctagctagctccgtattataaccgatggtaaaacctcctaaaaaaattaattaagttgtgcatgtgaatcgtagcgctagctagggatgatatttgatcagtaacccgtagtccccgtaccagtgacgcttaagtacgcatggtttggttgttcatcgttgaacccctgtagtgtgtcgtcgtcctgtacatgcatcgaattatggaattaattaattaccttaatcgtcgtgtcc

SEQ ID NO: 8094 - DNA, 2400 bp, Oryza sativa
  ref <308>: DATABASE ACCESSION NUMBER: AK105442
  ref <309>: DATABASE ENTRY DATE: 2002-08-28
attgtgttctctccccccacccttccaatcccaatctcttctcttcccctctcgttagggttaggtttttattttctctctctcgatttctctcttcgcttccacttcccaaaattctcgagtcaaacctcgtggcgttcggccatggcgacggcggcggtgctcggatcccacgacgccctcgacaaccggatgcatctgggggccttcgccgtgtccccggcgtcgaagccgaggcggaggcggcacagcaaggcggcgtcgccgccccccaaggtggcggcggtgagctcgccgccggtggttaagtcggcggcgagggtggcgtcgcctcctcccaaggctgcggcggcggcggcggtgcctcaggggcgtcgctcgccggtggcgaggaagcaagggtcgccgacgaaggagttgccgaagcagaggctcgtgatgggggagatccggatcctcaagcgcggcgaggagccgccggtttcctcgccgtcgcctgctccggttgcggcgcaggccgcggcggttgaccagcgggcgccccgtgttccggctgtggcgcaagccgcgccgactgaccagaaggcgcctcgccccgccagatcgaagcagcagcagcacacggccgctgtgccgacgaagatcaagtccgtcgccgacgcgccagtctacgccggcccggccttctcctcggcttcgcctgagccgagctccctccccttcccggccttcatccgtcgcgccgaggccgaggcgacccgcggcctccgctgcctcctccgcatcggcgagctcccttgacggcctctctcaccgccgtcttccccggagccgtgagccgtgcacgctcctctcctcgtttctcctcctcttctctgatggatggattgcttggtggtttcgatccgatcgaaagcttgtccggatcagatcccggctgcgttccgatcaaactctcccggtattttttcagaggacgagtttgggggaacgcatctgccggtggttggatttggtagtggttaggttttcaaaagtttcgtggtggaattatgttgggggtttgcttctacgaagaacaacactaggttgattagttctttgtcttttgagtttggtttttaggtggtgtcttggttgggaaaaattggggttagtttggtggaaatttaggctggcttggtgttgctgatctgttagtacagcagtagtggtaataatagtagaggtttggttagatgaataattcgtcggtagtgattgtgatttgtggtttggtgagcgtgagttcaatgtcaggtgaagaatagtagcactaaattcgtgttaggtattatgtccagtgtcaaaggcaagacatatatagttcttattatcagtaattaagttatgttaggtgttatctttctgttcgtctgtaagatatatatagatcttatcgggtaatcaaatcaaaaaaaaaaaaaaaaaaaaaaaaaaaaaaaacacgaaacacaagttcgaggagagaaaaccaaaccctagctaggctaaggcggagtggagaacccccgccgttgccggcggcggaggcagcggcggcggcgcgcggagaacactccgtcgcggtcgattccgtatcaacaatgtcagatcctggaagggatagcaacatgcagcagctcatcccgatagcacctccaccaaaggcttcttctggtaccactggcaaggagctcgtggtcgtggatggtacgggaaaggcttcaggaggagtcaagctacgggaagacgaggaggacctggaggtgaagctcaggcgcatcatggagaacgtccctgtccgtgtcagcaacacctccggatcctctgctggttctggctctggtgatttccaccagaaagtgttcttctgatagtatcggcaaatgaggaggagagaacaggaccgtcttgcaaggatggatgctgattaccagaagaggaaacagatggctgagtttgaattgaggagggaggaaaggctaaaagaagcagaggagcggacagcaaagaagcgcctgaaacgccaaaagaagaagcagcggaagaaagagaagaaacgatctaaaactaataatggtggcgagcaacctaacggaggggagtcgtctggtggtgatgaggattcagacgatgaagataagccataggcaagtggcacacatcaatcggatttgaagttgctattagactactgttgaaccatttcttggagattacttctgaagtagagctttgagcatgaactaatattggcaggctgcaggcccccttgtagttttttcttggaaacactcttaagatgagatgtggcttgttttccttgctctgataaagtgactatggagtatggatggatagatgaatcattttctggtt

SEQ ID NO: 8095 - DNA, 1757 bp, Oryza sativa
  ref <308>: DATABASE ACCESSION NUMBER: AK105443
  ref <309>: DATABASE ENTRY DATE: 2002-08-28
agttttgaactttgcatccatggagacagtaatactctctggccagctgaaggtagaagaagaagaaggcaatgatgaggaatgaatgacattagcagttacagacttacagttagcagtgcacagtcattgcagtattcagcaatcggattgtccggcgaggaaggggagtcgccggagaagggggagatgccgacggtgtgggcggcgctcaagaagtcgctcaactgcaaatcgggggattcttgcggcgtgatcgagcgggaggaatctcagggcggcgtcacagccggcaagaagtcgtcgtcgacgtcggcggcggcgctgcgcaggtcggggtgctcgcggtccatcgccaacctgagggacgtgttccacagccagtacggtggcagccggaggcaggaggacgccgtcgccgccgccgccgccggcgaaggcgatgggggatgcggtagcccgaggtcgatagggagcaacgacgtgctgaacccggtgacccacgacgtgctgctcgccgccaggtcggacgcgaagtgcgagctccggatcagcacccccggccgcggcgcgtgggccggcgccggcggcggggtgccgttcccgcacagcccgctcctgctgcggtgcagcaccacccctgtctcgacgaggaagtccccgtccgccatgtcgccgctccgccgcgccgatgacgacgacgacaacgccgaggcgccgtcgcccgctcccgccagggcctcctgcgaggtcggcatccggtgccaccgctgcggcgaccgcttcgccaaccacgacgccctggagtcgcaccaccactccagacacgccgtgaccgagctggtggaaggcgactcgtcgaggaaggtggtggagatcatctgcaaggccgggtgggcgaagacggagaacgcgctgggccgcatcgagcgggtggtgaaggtgcacaacgcggagaggtcggtggcgcggttcgaggagttcagggaggcggtgaaggggaaggcggcgaggctgtccaagaagcacccgcgctgcctcgccgacggcaacgagctcctccggttccacgccacgacgctcgcctgctccctcggcgctggcgactcctccaccctctgcacgtcgggcagctgcagcgtctgccgcatcatccgccacggcttctcggcgaccagagagatcaaggacggcgtcggcgtgttcaccacctccaccagcaagcgcgcgctggaatgcatcgccggagacggagacggcgacgaggcggcgaacgcgggcgtgaggaaggcgctgctggtgtgcagggtggtcgccgggaggatccaccggccgctggagaatctccaggaagtggcggcgcagccggggttcgactccgtcgccggcaaggtgggcgcctacgccagcatcgaggagctctacctgctcaacccgagagctctcctcccttgcttcgtcgtcatctgtaaaccttgatgattccttctgcaaaactgcttttaagaattgaggaatcgaatcattgtttagagtggtgatctgatcccaggtattgttctgttctgttagatgctggcgatttgttagtatgtacattttgctgttgtttcttcttcagaaaaaaaaagcacatgattttagcagtttttttttttagatttgcaaatgcgtgtgtttatcagtggatgtttgcatgatgttgtggtgcttaggaatatggcatcaattcgagatagtggtgaatgttgagctgc

SEQ ID NO: 8096 - DNA, 1799 bp, Oryza sativa
  ref <308>: DATABASE ACCESSION NUMBER: AK105444
  ref <309>: DATABASE ENTRY DATE: 2002-08-28
acaaaaccacccacccaaaaaaaccaaccccctccgcgatccccatttcaaaataaccccgccgcctccgccgccgccgccgacgaggaggggtcaccgatgttgtccgaccaggagctggcccggtacgtggagtcgttcgtgcgccaggcggcggccgtcccgggcgccgtggcggcggcggggggcatatcggcggagtccgtggcgcgccagctcggcccccagctcggcctcgacctcacccccaaggcccccctcatccgctacatcctcctcgccctcttctcccccccgccgcagggggcccccttcacctcctccgctccctccccctccgcctccgcctccgcctccgcctccgccgccgctgctggccacttcttctcccagcagcagcagcagcagcagctgcagacgttcctgacggcgtcgcagcagtaccagcaccgcggcggcgcgggggccgcggcggcgccaccgtcggcgtacggcgtcgcggcggcggcggcggggtacaggtacgggcagccgttcccgcaggacgaaggggcgcatctgcagaggctcgtccagatgcatcatcaccagcagcagcagcagcagcagcagcagcagcagatggcggcggcggcggcgggggtggccgctgcgccgcccacggctgtggagagcccgcgccccgcggcggcatcgaagaaagagagtgcaagtactggagtaaagagaagaggtggtccaggtgggctaaacaaagtctgtggtgtttctcctgagctgcaagctattgttggtgaaccaaccatggctagaactgagatcgttaagcagctttgggcatacattcgcaggaacaacttgcaggacccaaacaataagagaaagattatctgcaatgatgagctgcgtctagtctttgagacagatagcactgatatgttcaagatgaacaagcttttagctaagcatattagaccacttgaggcaaaaaaagattcaaatcgagattcaaagaagttgaagcctgtcgacagcgaacccatttctcctgctgaaactgatgttaaccagcttccaattatcttgtctgatgctcttgcgagcttttttgggactggagagaaagagatgccctcgtctgaggctgttaagcgtgtttgggaccacatcaaaagcaataatttagaggatccagcaaatcccaccatgatattgtgcgactcaaaacttaaacaactctttggatgtgaaagtctaactgccgtgagtgtttcggagttgctgtcacaacaccttttcaagcaacctaacaagctctaactgatgaatcgtcttactggactctagttggtctaacaccctggtagtaggcgctgatgaaacaacagaaaatgctgaaagtgtttattctatgctttgtatccatcaaactgatttacttatgagaaaaaggctgtaggctaatctcttcacagtagcaaggaaaaagaatgatagttgttgcatattatgtagtcttgagtcttcttggaagagtcacatgtggtaggctatcttgaatttctagcttgttaaatactgagtagaaagcagcaccgaagcaaagttaaagctgatgaactttgcttgatgtaaaaatcagcaagcataggtgcgttctatggtaagtagttgctttcacctttgttgcttgaaagcctcttacattgttagtgctcttgttaaaaggacacctgtgctctccctgtattatgttgtcggtgatgcttaatttaaatttacagttttagattgtcatc

SEQ ID NO: 8097 - DNA, 2137 bp, Oryza sativa
  ref <308>: DATABASE ACCESSION NUMBER: AK105445
  ref <309>: DATABASE ENTRY DATE: 2002-08-28
aaaagaaaaaaaaagagaagaaaaccaagaaaggcgagagatacgcggagagcagccaactcctcgccttcgccttcggcttcggctcggcgccgcccctcccctctcgctatgatgagctcttcttcgtcctggtctaccccaagctttgggttagccagggaatcctcttcattgttgtttacacctggccttgtgcaacacatgggtcctaatccatcgtcatcttggtccacccctgctcatccagtctctgatagtcccacgttttctttccccacgccatttttctgtgagcctgcgaaaggcagcagggtctatgcttataccaagactgctgatgatcttcctcataagcatacactatcaatttctgcaatgccagcatacataagcaaatcccatgaggagcttcgacatgaagattatcagagaggagacaaaggcggtgatggcctgcagaaaattatggttaattcagctcctgtacctcccatgcccatgttatcatctgttggagctccagttaatatgatcaattcaagtcaacctgctttcagtttgaagtccaaaacaaatttcagtactccattttcaccagcagcaactgctgatcaacaatctgcacagctacagttctcaacacaaaatcactattatacttccaacccattttggcctgccccaataggattggtgcgaccatgttcatcaacaggactgcaatcttccacgccaggtctaaactgtaccggcatcacatcatttccattcctgcccacaaagcaaccgtctgtgggaacccaatcatcaactttatttcctaccacttttgtgcatccatccgtggagttgcaaaagaatgcctccacccactgtgctagctcacagactgctccttgtacgacacacggaggaattctattcggcacggctgcaaatacagtctcattaactacatcatctactgagccaaccacatcatcccttggtccaacctcatgccctgctactcgacatggagatgcaccttctactggatttgcatgtcaggaaaatgtattcagcaactcagcggcatatacatctactataaatgcggatgttcccacgaataccatagatttgctacttccaaataacatccggctggtaaggcttagattttcttcaacaaatgatggtaatggaagtgttgcttcagaggttcattgtcatcatgatgctaaaacttcagaaacacccatttctttgtgcatatatcctggagagaaccaagagctgattatcaaatcaatggtgcagcctgctaagagtcacactgggaaacaatctagtccaactggtggtcatccagatgatcaaagtggtcgcagcaaagtatgcaacagtgctgctggtctgccatcgtcgggacctggtgagaatcagaaggggaatagcagtgctggtcacaagacaccaaagtctccactggctgctcctcgttgcgaagcgatagcggagtctgtactgcctcgcctgtacagcgccgattactacaccgtgccatctattgtggagctcgccgtgggagagagggacgagccaggctattgctcacatgtgaagggcttcacggtcggcaggcatggctatggcagcgtaaagtttgatggagaaactgattggagaaggcttgatattggatccatcgtggagttcaatgagcgtgagattattgtgtacagagatgtgagcaatacgccgcctgttgggcaggaactcaacaagcctgctgaagtcactcttctgaatgtcaagtgcgtcgaacagaagaatgggttgcagttcacagaggggccggcagttgataggtacaaggagattttggtgcagtggacaaaggaccatggcgcagaatttgtgtcatttgacgcggccaagggagaatggaagttcagggttaagaatttcaatatgtagagtcctctgagaatctataattctcctatcagtaggctcctgtgtctggtagaagtaacaacatagtaatcctgtaaaaaatgtgttctttttgtagttcggtcacttggtacggatagctggatacttctggacgaaataactttagctataaaaactgcctttgttgcgt

SEQ ID NO: 8098 - DNA, 2067 bp, Oryza sativa
  ref <308>: DATABASE ACCESSION NUMBER: AK105446
  ref <309>: DATABASE ENTRY DATE: 2002-08-28
gtgcaacaccgtgcggtagcagagcaagagcagcaaaaaaaaaaaccaccacgcctcgttcagtcactcgcacgctcgctcgatcacccggccgccgcgaagcgtcgaccgaagtgtatcgcacatttcgaaagttcttcgcgggcaacagaaagcagtttgtggtgtgcattgccgatttgccattgcgttgggttcatttcttccatcggcaatgctggcggcgtcgttgagagtcgaggcggtggcggtggttgctgcggctgtgctggtgctgctgctctcgccggctgcggtggtggtggtggccgggcagcatgattacggcgacgcgctccataagagcatactgttctttgagggacagcgctccggcaggcttcctcccgaccagcgtctccgctggcgccgcgactccggcctccacgacggcgccgccgccagcgtggacttgaccggagggtactacgacgccggcgacaacgtgaagttcgggttcccgatggcgttcacggcgacgctgatgtcgtgggggctgatcgacttcgggcggagcttcgggccgcacaaggaggaggcgaggaaggcggtgcggtgggcgacggactacctgatgaaggcgacggcgaagcccaacaccgtgtacgtgcaggtcggcgacgccttccgcgaccactcgtgctgggagcgccccgaggacatggacacgccccgcaccgtctacaaggtcgacccctcccaccccggctccgacgtcgccgccgagaccgccgccgccctcgccgccggctccatcgtcttccgcgacgccgaccccgcctactccaagcgcctcctcgaccgcgccatcgccgtgttcgagttcgcggacaagtaccggggcccctacagcagcagcctccacgacgcggtgtgcccctgctactgcgacttctccgggtacaaggacgagctgctctggggcgcggcgtggctgcacaaggcgtcgcgccgccgcgagtaccgcgagtacatcaagaagaacgaggtggtgctcggcgccagcgagtccatcaacgagttcggctgggacaacaagcacgccggcatcaacgtcctcatctccaaggaggttctgatggggaaggacgagtacttccagtcgttccgtgtcaacgccgacaacttcatgtgcagcctcctcccgggcatctctaatcacccccagatccagtactccccaggtgggctgctgttcaaggttgggggcagcaacatgcagcacgtgacatcgctgtcgttcctgctgctcgcctactccaactacctgagccacgccggcgcgcgggtgtcgtgcggcgcgggcggctcggcgtcgccgacgcagctccgccgcgtggccaagcgccaggtggactacatcctcggcgacaacccgctgcggatgtcgtacatggtgggctacggcgccaggttcccgcggcggatccaccaccgcgggagctccctcccgtccgtcgccgcgcacccggcgcggatcgggtgcaagggcggcgccgcctactacgccagcgcggcgcccaaccccaacctgctggtgggcgccgtcgtgggcgggcccagcgacgccacggacgcgttccccgacgcgcgcgccgtgttccagcagtcggagcccaccacgtacatcaacgcgccgctcatgggcctcctcgcctacttctccgcccacccaaacccagccgagtgggccgacgactagaacaacccgccaaagtatatcagctatacgggcctgggctattgtttgttttgtcagggccgaatcgggtgattattgcctggttgattgatactacttgtgtaaccaaatatagttaacttcctctacaaaaccccaacaaagtatagttaactgcagccacctcctttcatgcgaaaaatatcggccaggaggaatgcataggctttattaggctgctactcctactagcaatgttgtaacagtactgtagacatagttacacttgtactgctatggttcagcgagtggattatatataaagtgcaccaccgacgtttcctctg

SEQ ID NO: 8099 - DNA, 1512 bp, Oryza sativa
  ref <308>: DATABASE ACCESSION NUMBER: AK105447
  ref <309>: DATABASE ENTRY DATE: 2002-08-28
aaaagctggcctcgcactcacactgacagccttgctctcctcctccccctatatctctcctccctccctcgccgcctcctccccaatcctccaaaccctaatcccccacctcactctctctcgatctcgtgctctcctcctttcgcgagcgcgttctttggaggggagatggcggaggagccacagccagaggccgcgcccgccgcggtggcggcgacgaccgaggtggcggtggcggagaaggcgcccgtggaggcggagaaggagaagaaggtggaggaggagacgccggcggtggaggccgaggcgaaggaggagaagaaggatgaggcggcggcggcggcggcggcgggaggtgatgaggccggggcgatagaggggaccggatcgttcaaggaggagagcaacctggtggcggacttgcctgacccggagaagaaggcgctcgatgagttcaagcagctgatcgccgccgccctcgccgcctgtgagttcaatctgcctccccctccgccgcctcccaaggcgaaggttgaagccgccgttgaggagaccaaggcggaggagaccaaggccgaggaggaacccaaggctgaggagccggccaaggaggaggagcccaaggccgaggtggcggcggcggcggcggcgccgccggaggcaggaaccgaggagccgaaggcggaggcgtcgtccgaagaggccaagaccgaggagccgaaggccgaggcggcggccgacgagccggccaaggaggagtccaaagctgaggcggcgccggctgaggaagccaagccggccgagccggagccggaggagaagaccgtcgtggtcaccgaggaagaggcggccaccaagacggtggaagcgatcgaggaaaccgttgagattcctgtcactgagaattccacgattggatgggagctccgggtgcttggatgggaggtgagctacggagcagagttcactcctgatgccgagggtggatacacagtcatcgtgcagaaaacgaggaaggtgcctgcaaatgaggaaccaatcatgaaaggcagcttcaaggttggcgagccaggaaagattgtgctaacgatcaacaaccctgcatcaaagaagaagaagctcctctacagatccaaggtcaagagcaccagtgagtccgtttgaggttgcagctgcctgatcaccagattcaccacaatggcagctgaactcattccctgatggaagagaaaccttttggttttggttctttaatttattggttttgctgttttggttcacattttgtatttgtttaattaaaaaccaaagtgagcttgtttttgtgatagttggaaggagagggttgatatgatataatgacatcgtgatggtttgttgagggcagaggacaaaaattgtggaaggactgaagaatatctgctgctttgtatatctgtctgtacattgcatctctggattctcatggacatgttaaatttagaagtacttgtcatcattcaccaaaaaaac

SEQ ID NO: 8100 - DNA, 2335 bp, Oryza sativa
  ref <308>: DATABASE ACCESSION NUMBER: AK105448
  ref <309>: DATABASE ENTRY DATE: 2002-08-28
ccttcctcctccgctccggccaccggagggacacggcgcacgtcctccccgccggcgccccccttctccacctcctgcccacgcgcgggcgcggcatccctgtgccgtccacgccggcgtcgccgctacatctccgcgcatgcacctcctcctcctccgaggtcggatccccttttcacgtcttccttcgtcggcctccacccaaccatcggcaggtcgagcaccatggctcatcaggaggaccacggcttactaggtgcctggctgctaaaggtcagaaatacctgttggagacttgaaaggttttccaggccgtatacaaactcaatgattctgaacctcagctcaagcctctgaagctctggcattgccccttctaggaagctcagaggtggtagcactggtgccgtaaaacggagcaacctcaactttgtaaaccccccatccggcacaaagattttaccacctgactccaatgtattcttctgcacagttttgaggatatttgaaataccatttgctgcatcaagtgaaaaaatgagagagaaaagctcaggaagcctactaagagtcaccaaagtatctgtcgtaagtgaagtcatggacagagtaagcttctcaaggttgtgcaagcggtcaatccattctggcactttaaacaagctgccagaaagctcaagggtgtaaaggtgttctggttgtgcttgtgaagaactcagtgatctgtcaagaaagcctgtgaaactgtcatcaattgcaagaaacttgagagaacaactgctcaaatgctcaatagcagagagcaacaattcatcatctttcgcttggaaattaacaagcctgtaaatggcaagtttcttaaggttggtgagcttctccaaggctgctagcggacgcaattgttttggcatatccaccttgctgccttccttacgggtaccttgcaagcccgcgatatctccatccttggcatcggtggttgtagcatttctgatgacttcaagaactggtgcctgctccccagctgctgtcctggttgaccttccagagatctcaatcccagacagtgtctgtatagttttcatctttgtgattccttcagttaatctcaatgctctccgcttggttttattgccagccaatagatggaccattcgttgaagcctctccactgatgcaggcaagtttgtgacatccgtgtcccttatgtcaagtacctccaaatactccagcctgcctattttcttcggtatcttgtatatgtccgtcccacgcaagcttaggtacttcatctgatgcatattacatattttcttgagctggtttgacgacaagtccttgcatccttcaagatccaacacctgcagtatctggaatttgagcatagtagaatgaagagctttgaaactctccaacacagtcaaagatcggacatgcgacaacttcatcctctctactagatcagtttcttgcctatcacttttatggacagacaaccgccgcaccttgtagcttggaaacggtgtctgccagtggctaccaattacagtgatgaaattctcatcaccagatttggagacaatgtactcaaggaccatgtcatgaatttgacagctcttcaccttcccattgctgctgttgttgataggccgaatcaagttcctgccaatgagctcattgaagttgtcttctgcaacttcctctgccgtctgcccatgtttctcagtaacgaacccttcagcaacccatcttcttatcaatcgtttcctgctaatattgcggccctttggaaatgtactcaagtagagcaaacatgtcttaaggtcaggtggcagatttttgtagcagtggttaattatctgcactacttctgtgttcactagcaatgagccctgacactactattatggccaaaggcagaccaccacacatcttcacgacaatctcatcattaatggttggagtgggacacggatcattagcatatattatttgaagaaacaatttgctggagttcactggatcgagctgtttgagcttgtgcacatgaccattttgacggcggcaggcttcagctacagagttaaacctggtagtcacaattacgcaactacccttattattcttaggtaatgaatccctaatactttcccatgctgatacagaccatatgtcatcaatcaagatatggtacctgttcaggaattgtttagaagtaagtagttgtaaatagagtgtgctttgatggtacttgtagttgtaaatagagtgtgattttacagtacttgagaaagtactgtaaaagttgctctttaaataacattttatactacct

SEQ ID NO: 8101 - DNA, 2873 bp, Oryza sativa
  ref <308>: DATABASE ACCESSION NUMBER: AK105449
  ref <309>: DATABASE ENTRY DATE: 2002-08-28
aaatgaccggtcggtccgtccgtccattcacgcggcttaagaagggcatccatggcgaccttgacgattctgtagcattaggccattagcatcgcaagctgccccctctccgtctccggtgcgatcgatggcgacgagagctcggccgccattggtgctattgctgtgtctctgcttggcttcttgcttgagctcggccattggtggtgtttcagctgccggcaatggctaccggaccacggcattcctggtggatgaggaagggaggcggctcagagccgagctcgccgcagtcgccggcgccggcggcgggtccacggcggcgtacggcgacgacgtgcagaggctagacgtgtatgccagcctggagacggacagccggctgcacgttcgcatcgccgacgccgacggcccgcgatgggaggtgccccaggacgtcatcccgcgcccctcgccggagttcttcctccagacgtcgcgtccgggccggcccgtcctctccacggcgacctccgacctcaccttcgccatccacgcctcctccccgttccgcttcgccgtctcccgccgctccactggcgacgtcctcttcgacacctcccccaacctcgtcttcaaggatcgctacctcgagctcacctcctcgctgccgccgcccggccgcgcgtcgctgtacggcctcggcgagcagaccaagcgcacgttccggctccagcggaatgacaccttcacgctctggaactccgacatcgccgccggcaacgtcgacctcaacctctacggctcccaccccttctacatggacgtccggtcaggcggcggcggcgcggcgcacggcgtgctcctccttaacagcaacggcatggacgtcatctatggtggatcgtacgtcacctacaaggtgatcggcggcgtgctggatttctacttcttcgccggcccgtcccctctcgccgtcgtcgaccagtacacccagctcatcggccgccctgcccccatgccgtactggtcattcgggttccaccagtgcaggtgggggtacaagaacgtgtctgacctggagggcgtggtcgccggctatgccaaggcgaggatcccgctggacgtgatgtggacggacatcgactacatggacgccttcaaggaattcacgcttgatccggcgaacttcccggccgacctgctccggccgttcgtcgaccgcctccaccgcaacggccagaagtacgtcgtcatcattgacccagggatcagtgtgaacgcgacgtacgggacgttcatccgagcgatcaaggaggacatcttcttgaagtggaacgggagtaactacctcggtgtggtgtggccggggaacgtctccttcccggacttcctcaacccgcgcgccgccgagttctgggcgcgcgagatcgccgcgttccggcggaccctccccgtcgacgggctgtggatcgacatgaacgagatctccaacttcgtcgacccgccgccgctcaacgcgctcgacgacccgccgtaccgcatcgacaactccggcgtgcgccgccccatcaacaacaagacggtgccggcctccgccgtgcactacggcggcgtggccgagtacgacgcgcacaacctcttcggcttcctcgaggcgcgggccacgcacgacgcgctgctccgtgacaccggccgccgcccgttcgtgctcagccgctccacgttcgtcggctccggcaggtacaccgcgcactggaccggcgacaacttcgcgacgtgggacgacctccgctactccatcaacactatgcttagcttcggcctcttcggcatccccatgatcggtgccgacatctgcggcttcggcggaaacaccaccgaggagctctgcagccgatggattcagcttggcgcgttctacccgttctcgagggaccactcggcgatcggcaccgtccggcgagagctgtacctgtgggaatcggtggcgaggtcggcgaggaaggcgctcggcctgcgctaccggctgctcccctacttgtacacgctcatgtacgaggcgcacaccacgggcgcgcccatcgcgcggccgctcttcttctcctaccccggcgacgtcgcgacgtacggcatcgacaggcagttcctgctcggccgcggcgtgctcgtgtcaccggtgctcgagccgggcgcgaccaccgtcaccgcctacttcccggcgggacggtggttcagcctctacgacttctccctcgccgtcgccacgaagaccggcaagcgcgtgacgctgcccgcgccggcggacacggtgaacgtgcacgtcgccggcgggaacatcctgacgctgcagcagcccgcgctgacgtcgtcgcgcgtgcgccagagcgtggtccacctcctggtcgccctcgccgaggacggcacggccaccggggatctcttcttggacgacggcgagtcgccggagatggtcggggcgcggagcaggtggagccagatcaaattcagcggcgcgaccgagagcggcggcagcgtcgtcagagtgaggtcgcacgtggtgcacgactcgtacgcgccgagccggacgatggtcatcgccaaggtggtgctcatggggcttcgatcgccggtgccgcccaaggggttcgccgtttatgccaacggcgtccaggtgaacgcgagcacggcggtcgacggcggcggcggcgggaacccggagaagggagcgctgggcgtggcgcacgtcggcgggctgtcgctggtcgtcgggcaggagttcgatctcaaggtcgttatgacctattaattaagccaaatagaattcgagcatcatctgaaacaaaaacccgacgaaattgagctgaataaattggcctaaatttgaattgtct

SEQ ID NO: 8102 - DNA, 1220 bp, Oryza sativa
  ref <308>: DATABASE ACCESSION NUMBER: AK105450
  ref <309>: DATABASE ENTRY DATE: 2002-08-28
atctgcggcggcggcgacggccgcggaggacggggcgcggctgctgcggctggaggagcaggcggggcacggcggcggcggcgcgtgggagtacctctgcctcgcccgcaggctccgcgcgcgccgcccggagcccgtcctccgcctcggcctcgccctcctcaacgactcctccgcccgctcccgcctcgcctcagaacagtggacgctgtatgagcaggtggcagtggctgccatggattgccagcgtctcgatgtggcaaaggattgtattggagtgctttccaagcagtttcctggcagcatgcgggttggtcgattggaagccctgctgtttgaagcaaagggtgaatggactgatgctgaaagggcctatgcgcttatccttgaaaacaatccgttcgatcagattgtccacaagagaaaaattgctattgcaaaagcacagggtgacatggcattagctgttgagtatctcaacaagtatttggaactatttatggcagatcatgatgcttggagagaacttgctgaaacatatgttgccttacaaatgtataaacaagctgccttttgttatgaggagctaatattggcccaaccaaccgttccactttatcatctagcttatgccgaggttctgtatacaatgggtggtttggaaaaccttcaaacagctagaaaatattatgcatctacaatacagttgactggaggcaagaatacaagagccctctttggcgtgtgtttgtgtagctcggcaatcaatcagttgaccaaagggaggaataaggaagaggaaagctcagaactgcagagcttggcttcagaggcactattgaaggattacaagcaacgagcaccgtcgaaggaggcactcatcaccagcctgttgaagaacatgaaactctcctgatcttgccctccactcatcgaaggttttttagcttgtggcacaatcgcagctagtcagtggcgccacaatggcagtttgacaaatcaattgatagcagtataatgcttgttttttttttctcctgatggcaccgaaattgtaaaacttatgtaagatgcttcaatgggttgtaccacacctgttttgatcatttagaaatatatattcatcgtcgtgttttgattgcaaactgtactaagaccatccgttgtaatttcaggatagaaaattttgaataataccttcgaaagctgtaccatttgtt

SEQ ID NO: 8103 - DNA, 2291 bp, Oryza sativa
  ref <308>: DATABASE ACCESSION NUMBER: AK105451
  ref <309>: DATABASE ENTRY DATE: 2002-08-28
agtgaatgctactctcgctctgctactcactcctggcgccggtgacctctctgccactccaccggacggcgacggcgaggcgggtgagctctctcgccgcctccggctctcctgccaccgggcctccacattcggcgtcgcactccttcgtcttcgcgtgatccgcctggcagatcgggatcgactaagcattggcctttgcaagttttgaagtgcatttcaccgttgcttttgtcttgagcaagagtttatagagccatacagctccgacaaaaggattcacctattccagaatgtctgctttgctccgtgaaacttcgtgtggatcattgctgcaaaaactgcagtcggtatgggatgaagttggtgaaagcgaggaggaccgcgacaaggttctatttcagctggaccaggagtgtttggatgtctacaagcggaaagttgatcaggcaaccaaatcaagggatcttcttctccaggcactggattactcaaagacagagcttgctaggcttgcttctgcccttggtgaaaaatccatagatataagtcctgagaaaacagcacggactatcaaggaacaactaactgctatagctccaacacttgaacaattgggcaagaagaaaaaggagagaataaaggaattagctaatatacagtcaagaattgagcaaatacgtggtgagattgctggtactctggagatgggacagcaagtggcactaccacagattaatgaggatgatttgacagttcggaagcttcgagagttccagttacagcttcaagagcttgagaaagagaagagtcgtaggctggaaaaggttcttgagcatgttggtatggtacatgatctatgcaatgtgcttgggatggatttttttagaacaataactcaagtccatagcagtctagatgactctattggtaacgaacacaagaacataagcaatgaaaccctgtcaaaacttgataggaccattggtactcttaatgaggacaaaaggttgagacttgagaagcttcaagagcttgccactcaactctatgatctatgggatcttatggacaccccggtggaagaaaggagcttgtttgatcatgtttcgtgcaatagaacagcaactgttgaggaggtcatggttcctggtgcacttgctgttgatgtgattgatcaagcacagactgaggttgaaaggttggatcagctaaaatacagcaagatgaaagaaatagcttttaagaagcaagccatactggaagatatttatgctagcactcatgttgtattagacacagcagttgcccatgagaaaatacaggcactgattgagtcagggaacatggaaccttcagaactgattgctgacatggatagtcagatactgaaagcaaaggaggaagctctgagcagaaaagaaatattagataaagttgagagatggatatcctcatgcgaggaggaaagctggcttgaagactatagcagagatgacaacaggtataactcaggccgaggtgctcacctgaatctcaaacgtgcagaaaaggcccgtattctagtcagcaagattccagcccttgttgaaactctggtggctaagacgagagcttgggaagaaaatcacgggctgccatttatgtatgacggtgtttctctgctagcaatgctggatgagtatgtcattcttaggcaagagagggaagaagagaagaaaagaatgcgggaacaaaaacgccagacggaacagctactaaacatcgaccgtgaggggccattcggaacacgggtcaatccctacagagtgaccagtgcaaagaaggtggctggcacaaagccaaacggtggcgcatcaaacgggacaccgagtagaaggctatcaaccggcaatcagctgaacgagagcaagagtactggccggtctgctggtaaggatgacaagaaaggcgcgtcgaagaacacggcaacttcactgaacgaagcagctcctgcagacaaggaagctgcagactcatccaccgaaaacttcgacgctgatccggttcctggctcgacatgatctcgatgtggtacagatgaatggtgatttctgtcttttttgacaccctttattgtgttcgttgtagtatcttgttgttaggttttagacctgtcgtttctttctgttgactggtggttagtgcctgagtggtgttcaaacatatgggcggtttatattagctgtttagctctaatcttgccgtcagaagtaaaattagcctctcgtaagttttattggttttacaac

SEQ ID NO: 8104 - DNA, 322 bp, Oryza sativa
  ref <308>: DATABASE ACCESSION NUMBER: AK105452
  ref <309>: DATABASE ENTRY DATE: 2002-08-28
agatggtgaggatgatgatgatgaggatgatgatgatgaggaagatgatgatgacgaggaccagccgccttccaagaagaagaaatgagctagcctccttcatcctgcatctgcctcctcaacttgtttcagtctgttgtgctgtttagatgatggaacaggttatgggacctatgtagcttatggtttgggttgtttgggtctctcataggagtaggaaaacatttgacatctgatgttaagccgttctcttgtgttttgcctttgtgcatgtagacgtaaaatgctgcggtgtgttatttattggagatctgattctgtc

SEQ ID NO: 8105 - DNA, 970 bp, Oryza sativa
  ref <308>: DATABASE ACCESSION NUMBER: AK105453
  ref <309>: DATABASE ENTRY DATE: 2002-08-28
ctctctctccgtccgtccgcgccgctactcccccctcgccgagagagctctagggtttccgctgccgaattttttttttaattcggggggagagatttgaagaggcggcaccatgttggtctaccaggatctgcttaccggtgacgagctcctgtcggattcgttcccctacagagagatcgagaacggcatcctctgggaagtcgatggcaagtgggtcgttcaaggagctattgatgtggacattggtgccaacccatctgctgagggtggtggtgatgatgagggtgttgatgaccaagctgtgaaggtggtcgacattgtggacaccttccgtcttcaggagcaacctccttttgacaagaagcagtttgtgaccttcatgaagcgctacatcaagaacctctccgccaagctggatgcggaaaagcaagaggaattcaagaagaacattgagggtgccaccaagtacttgcttggaaagctcaaggaccttcagttctttgttggtgagagcatgcatgatgatggcggcttggtgtttgcctactacaaggacggagccaccgacccaaccttcctttacttctctcatgggctgaaggaggtcaagtgctgagcggttccttctgctcgacactgatgttttatctatgcagtccgccgtatttttggtctagtctatggttgtcagttgactcgatatggtctaatgttggtgtcggaaacaactatcgtttgcttgttatggatgttgagatgagtccttttaaaaaaacctccggattattggattcatgagctccttaaatgtttggaacgatattaatttgctttgtgatggctggagaaagataatgatgaaattgttgtgctagctatgttgcttacacttaaaacatacctttggtgtgttctgtcagactgatgcccaaaaaaaaaaaaacctttagaagcaacctttgtattg

SEQ ID NO: 8106 - DNA, 1677 bp, Oryza sativa
  ref <308>: DATABASE ACCESSION NUMBER: AK105454
  ref <309>: DATABASE ENTRY DATE: 2002-08-28
ctctcttgtttctctctcctgctccccccccaacgccgccgccaccgccgccgccgccgccgccgaatccgagacccccatctcggattcacctctcccgcctccggcctccgtcaccgtctccccacgcgcgtcagtcatggcgggaatggcaccagagggatcccagtttgatgctaagcactatgattctaaaatgcaggagcttctgaaccaaggtgaaaccgaggagttcttcacatcttatgatgaagttcatgagagttttgatgacatgggtctccaagagaaccttctcagaggcatctatgcctatggtttcgagaagccttcagccattcagcaaaggggtattgtccctttctgcaagggtcttgatgtgattcagcaagctcagtcaggaacaggaaagactgccaccttctgttctggaattttgcagcaacttgactatgctgtggttgagtgccaggccttggtccttgctcctactcgtgagcttgcacagcaaattgagaaagtcatgcgcgcacttggtgactatctgggtgtgaaggttcatgcttgtgttggaggtacttctgttcgtgaggaccaaaggattcttgcaagtggagtgcatgttgttgttggaacacctggtcgtgtgtttgacatgctgcgtaggcagtccctccgtcctgattacatcaagatgtttgtccttgatgaagctgatgaaatgctttctcgtggtttcaaggatcagatttatgatatcttccagctcctcccgtcaaagatccaagttggtgtgttctctgctacaatgccccctgaggcccttgagatcacccgtaaattcatgaacaagcctgtgcggatccttgtgaagagggatgagctcactcttgagggtatcaaacagttttatgtcaatgtggagaaggaagaatggaagcttgacacactctgtgacctgtatgagacactggccatcacgcagagtgtcatctttgtgaacacccgccgcaaggtggactggctcactgataagatgaggggcagggatcacacagtttctgctacccatggtgacatggaccagaacactagggacatcatcatgagggagttccgatctggttcttcccgtgtgctcattaccacggaccttcttgcccgtggtattgatgtccagcaggtgtcccttgtcatcaactatgatctgccgacccaacctgagaactacctgcatcgcattggtcgtagtggtcgttttggtaggaaaggtgttgccattaactttgtgacccgtgacgatgagaggatgctgtttgacatccagaggttctacaatgtggtgattgaggagctgccggccaacgtcgctgaccttctgtgatcaagttcagaagagttatgttaaggggcctgataaggattgtttttgtctgaagtatcactgtcttatctggggggggggggagtgataaaggtgggggttctgttttaaaagtcactgtggtcgtagacaatttccaaatttttatgccatgttatgggaatttttgtagttgctaggctgtgctatgtgctggtgaggagggaggagtcttttacttttattatatctattgttaaaactatgtatgaccgaatgatgttatttatttgtgtcatggttgactatttgcc

SEQ ID NO: 8107 - DNA, 876 bp, Oryza sativa
  ref <308>: DATABASE ACCESSION NUMBER: AK105455
  ref <309>: DATABASE ENTRY DATE: 2002-08-28
ctcaaacccaacttcttaaagaacaaaaaacgatcagccatgaagagcggcagcctgctgacgctcaccctgggagccctcctcctcgccggcatccccatctcctccgccgctgtcacccccaacagcaacatccgcctccccaccgacggcggcgacgaatggccgtcaccgccgtgggactgctgcgacaagctgaagcagtcgccgctcaggatctggccgcccaagtacaagtgcctggacgaggtcgaccactgcgccgccgcctgcgaggactgcaagcgtgccgacggcggcggctacgtctgccgggactggtactggggcgtcaaccccgggcccaagtgcaccggcggcggcggcgaggaggcggtgaggtcgaggccgtggaaatgctgcgacgacgccgtgtgcacaaggtcgatgccgccgacgtgcagctgccaggacaaggtgaagtcgtgctccggcggctgcggcaagtgcgtgcaggtggagtcgcagccgccgcgcttccgctgcctcgatcgctaccacggcttcccggggcccaagtgtcacaaccagccagcttaattagctactcatgttaattagcctcagatcatacgatccaacggtgaataagagcgacgcgtcgagcaggggcgcacgcgctgaccgctcgatcagcgttaacgccttgcttgctgccgagtagcagtgacatatgtgtaacattcgtgtggtcacgtatgttttttttcctttattgtgttttttttctttattgtgtttgttttatctggatcgtgagggaatgtttcggtgaccagagtacgtagtactagtatgttgtggttgctgtccaataaataagatgaatttggtagc

SEQ ID NO: 8108 - DNA, 401 bp, Oryza sativa
  ref <308>: DATABASE ACCESSION NUMBER: AK105456
  ref <309>: DATABASE ENTRY DATE: 2002-08-28
cttgctactattttgccaagttatatgggtaagaaagagtatgtaccctttgcattggcaaacggaaacttagctgttcatgttggtgtgctgcagaagggattacatcagatctttttgctactgattgaagttgcaaaactttcttttggaaggcaaaggcatgtgcttcggttgtaaaagtacgtactgtatcacatagtaggtggtttctgggtgctgaaccagaagaactacatttgtatatatgggctcctgggttgtgtcagctcagccttccttcaaaccatatgacacccaacccaaatgcagcctgcactgcaggtaggtaaaatgtctacctgtagtttgttctgtatttcttttttgtactatatcactgttaggacaaatgtttggat

SEQ ID NO: 8109 - DNA, 655 bp, Oryza sativa
  ref <308>: DATABASE ACCESSION NUMBER: AK105457
  ref <309>: DATABASE ENTRY DATE: 2002-08-28
ctcccgcaagcaaagcgcacgccgcctttgccttagatctcctcgactccgccgccgccgccggcgcctccccacggtccctccctcgccatggagggtaacagtaccaacctcgatgcggcgatagagtcgctcctcaacgtggagaagcagatgaggctggccggcgatgtcgccggcacgaggaaggccgccatcgacatcgtcgagctctgctacaaggccggcgcctggaagacgctcaacgatcagatcgtggtcctctccaagaggaggggccagcttaagcaggctatcactgccatggttcagaaagcaatggagtacattgacttaacgccagacatggacacacgtattgagctaatcaagacgttgagcagtgtatctgctggaaaaatatatgtggagatagagagagcaagattgatcaaaagacttgcaaaaatcaaagaggagcagggacagattgatgaggctgctgatttaatgcaagaagttgctgttgaaacatttggctccatggcaaagacagaaaagattgcattcattctagagcaggtccggctgtgcttggatcgtcaagattatgtacgcgcacagattttatccaggaaaatcagtcctagggtatttgatgcagacccgtcaaagg

SEQ ID NO: 8110 - DNA, 1378 bp, Oryza sativa
  ref <308>: DATABASE ACCESSION NUMBER: AK105458
  ref <309>: DATABASE ENTRY DATE: 2002-08-28
agagtctcaccgagtgtagggagaactgtcagtgcaacaagaacaactcctgcaacaagggctggaagaggtatgagcaatgctcccagcattcagattcctcaatcacgcacaagattcaaacgagtaggggctacttctccaggcatagtaactctaaatgataaccagtttggttctgctgctccgaacaatacccagttgcaccagccatcctcgccacatgcatcccagccagctcaagttgcaccaagaacattgtttggtactgttcagaaaaatccccctcagagatcgctaagtgccccaatagcgcttcaagggcaacaagatcagtcggcgtcgtcctatcaggctgcctcaaacggaacacacggtacaggaccacaattttctcggtgcatttctcttacggctcagagaacacaattactgcctgaaccagcattggatgtttacagcaaaagctggcaagacataattgatagtctggcatctgatctggaggtaccagattacaatatgggcgctgcagagtctcagcagccagacaggactatttctcaacctcttgattccattacattccagggggtaggtcttcacagtgagcctgttgtggcattggcgaacttgatgccttgtaatgggcagaatgtggccaatggcatgataggcagcaattgtcttgcacaaacaacacaaattttgcctcacctcaatcaccagcctagccttgttcccaatgaatcccatcttaataattcagtaagttccactgcggacggattactaatggaagctgctcatcagagagacacgcaaggatcggattctctagatcttctatttgactttgagtttgaggattgggattcagcagagccctgacaaacaacctccgcatttctgaaccccaaggacaataaaatctggcgtcaccgacaagctggttcgttagcttccttcctaggaagaggaagagatgttccttgtacattctgtaggttcagtggtagaaatgttttttttttccttccatgggtgcttgtttacagtagcggctatacaggccttctaggccttagattagcagttatcgctctgaagttttagggatgaagttcaattcccaaactgttgttgatcatatatctatgggccataactccataatcctatatctatggtccataactccataatccaattgccagaatgcatgtttcaggtagcatagcactgaagcaaaatcttctgagcactggtgtggattggctctagtaactgctgatccagcgaagcaatgtatagtttttgcttgataatggcaaagagtgatctgctcttgaaaagccttaaaaaaaaaaaaaaaacc

SEQ ID NO: 8111 - DNA, 1233 bp, Oryza sativa
  ref <308>: DATABASE ACCESSION NUMBER: AK105459
  ref <309>: DATABASE ENTRY DATE: 2002-08-28
ggagaagccaatccacctcctccctcccctccacctcgccgccgccgccgccgcatctgccgaaggcgggagccgtgaggggaaggacctgtggcacgaggtggtggcggcatggagttcctgcaggggcagagcacggagaccgccgtggccgtggcggtggccgtcgtcgccgtggccgccggcgccgccttcctcctcctcctcctccgcagcagcaagaagcccaagggctgcttggaccctgagaacttcaaggagtttaagcttgtggagaagaggcagatcagtcataatgtggccaagttcagatttgctctaccaacccctgcttctgtgctggggcttccaattggccaacatatcagttgcagagggcaggatgctactggcgaggaagtaatcaagccttatactccaactacgctggattctgatcttggacggtttgagcttgttattaagatgtatccccaaggaagaatgtctcatcattttcatgagatgaaagttggtgactatttatctgtgagaggacctaagggtcgcttcaaataccaacctgggcaagtaagagcatttggaatgttagctggaggatcaggcattaccccaatgttccaagtcacaagagcaattcttgaaaacccaagtgacaatacgaaagtgcacttaatctatgccaatgtcacatatgatgacattcttctaaaggaagaattggatagtatggttgaaacctatcccgatcgcttcaagatatactatgtattaaatcagcctccagaaatctggaatggtggtgttgggtttgtgtcaatggaaatgatccaaacccattgcccggcacctgctgctgacattcagatattgagatgcggacctcctcccatgaacaaagccatggctgaacacctggagaatcttggctacacgaaggaaatgcagttccaattctaagcctccacagtggaacaataccgaaataacagcgatggacaacattttcgttcaccttcagtagaaattgtctgaccctagtgccatttaatcaagatataggcgaactttaaacccgataaaagtagaatgtcaggtcagcatattttgagtgaaagcaaaaaacaacacctacttgagttggggtcagaagttcctgtagcccatcatttttgtgccaatgctgttcaattccagacagacagaatgaaactaattatttttttttcaatc

SEQ ID NO: 8112 - DNA, 1396 bp, Oryza sativa
  ref <308>: DATABASE ACCESSION NUMBER: AK105460
  ref <309>: DATABASE ENTRY DATE: 2002-08-28
acttggccttcctcgtctccggccttcctccaccgcgagctccgaccaccaccgacggcgacgatgcaggcggcggcggcgtggaggcgtcacctcctcgacggcaacatctcccccaccaccgcggcggcgatctccgccttcagatccgcctcccagccggcgctcgcaccccaaggattgggtggagcggatggcgcgaggtacatgtccgcgagggcgccggcggtcaaggggacggggcatctcgtccgcaagggaaccggagggaggtcgtctgtgagtggaatcatagctacggtgtttggagctactggatttcttggccgctaccttgtccaacaacttgcaaagatggggtctcaagtgcttgtaccattcagaggttctgaggattgtcaccgacacctgaagttgatgggtgacctgggtcagattgttcctatgaaatacaatccaagagatgtggattcaattaaggctgtcatggccaaatccaatgtggtcattaacctaataggacgcgagtatgaaacaagaaactatggatttgacgaagtaaatcatcatatggctgaacaacttgcaatgatttcaaaggagcatgggggtatcatgagatttatccaggtttcttccctaggagcatcggcctcttctccttctagaatgctgagggccaaggctgctggggaggaatctgtgttgaaagaatttcctgaggctacaattatgaggcctgcaactatgattggcacagaagatcggattttgaatagatgggcacagtttgccaaaaattggggtttcctccctcttgttgattctgggtctacaaagattcagcctgtttatgttgtggatgttgctgctgctattgtcaactccctcaaggatgacggcaccagcatgggaaagacctacgaacttggtggaccagagatttatactgttcatgagctggctgagctgatgtatgagacaatacgtgaatggccacggtacatcgatgttcctcttcctattgcaagggctatcgcatctccaagggaaatgctgctaaacaaagtgccctttccgttgccaaccccatcaattttcaacaaagatcagattaatgcattttctgtagacaccctagtgtctgataatgctctcaccttttcggacctcggaatcgtgcctcacaaattgaagggttacccggttgagtttcttgtgtgctaccggaagggcggtccagcttttggcctactggctaaatacaggcgagagaccgatagcgaacaagtaccgcgagggaaagatgaaaaggactttgattcttggaaaggaacacttgataatgcgttgtatctatgacgaataccatcaccagctgtatggtttgctattt

SEQ ID NO: 8113 - DNA, 339 bp, Oryza sativa
  ref <308>: DATABASE ACCESSION NUMBER: AK105461
  ref <309>: DATABASE ENTRY DATE: 2002-08-28
atgaaaaggactttgaaaagagagtcaaagagtgcttgaaattgccgggagggaagcggatgggggccggcgatgcgtaccgcgagggaaagatgaaaaggactttgaaaagagagtcaaagagtgcttgaaattgccgggagggaagcggtggcgacctggtggccctgcgacggtggcagcgacggcggcaccctgcccttcctgtgtcggcattttcttgtgttcttgtgttgatggaatctgttcttgtgttgatgagtgctgatgaaatctgttcttgtgttaaaaaaaaaaaaaaaaaaaaaaaaaaaaaaaaaaaaaaaaaaaaaaaaaacc

SEQ ID NO: 8114 - DNA, 1282 bp, Oryza sativa
  ref <308>: DATABASE ACCESSION NUMBER: AK105462
  ref <309>: DATABASE ENTRY DATE: 2002-08-28
gtgccacacctcctctctcttcctctgtctctgtcgctgcagagagggagagagagagagagaggctcgtccacgcgagctgccgggaaggaggaggaggaggaggaggaggcgcgcatcggaggcggaggagctcgcctgcgcggccattcgtgcgggatcggcggtttctgcggtgttttttggaggatttgtggtggtgttttgagttttgaggtggtttttgggagggtggatttgggggggagatcccgcggggatggcgtcagatccacaatcgcaggccagcaaggcgaaggttaggttggttcttccagatccgggctcctccccctcgctcctgtcaccagatccggagctggtcgtcgcaggggtgggggtgggtgggtttctctcgttttcctctcctctctctcttggtcttctctatcgctctcctttctccgaggcggtaggcggtggcgcaagaggagaggcggcgggcgatggatggcggcggcgggtggagacggtgcggcccagcggcgggaggcggcatcggcggagatggccgcgccctcccctccatggcagtggcgtgcggcggcgtcggtggcgtgcggcgggaggagcggcagctgcctggagccgccctccctccgtcagatccggcgggaggaagggctccggagtcgcgccgcctcaccgtcctccacgccaccaccgaatgcgctggtcgccttgaagccgccgcccgcctagaaagcgtcgccgcccacgagatctctcgaagcgccgcctccccttgggacctacgatgagtacaccgccgacgctgccctcaagaccgctggccttcaaccgacgcccaagaaggaagctgtcttccctccgcaaggactgatgccgtccctgtcgccgttctgcgtcgagctcgtccactagcccgatgaccgcgccaagcactttcgctgccgcacgtcgcctgcaacccgacgtgcctcctgctgtctttgtaccatgacctcctcgcttagatggatcggattgggagggaggtaatacatgggtattaggtttcttgttgggatcaaattcacgaggtcgagattaaatttggtattttcgtgttgattttggttgttcggtttattgattgatttggagatctagctcagattttttttgaagacagactcggactcaaacgattgggaggaacggatcgcacggacgatccgtgttgattttggttgttcggttgattgattgagttgggaatctagctcggggattttttttg

SEQ ID NO: 8115 - DNA, 822 bp, Oryza sativa
  ref <308>: DATABASE ACCESSION NUMBER: AK105463
  ref <309>: DATABASE ENTRY DATE: 2002-08-28
gtaccacacaacgtacacacgacgaacccccacgacgcacttagctaagctagcgtatagtctctgatcgatccgatctccgacgacgacgacgacgatggccggtaaagtaagcgcggtggtgctggtggcgttggtggtggtggcggcggcggcgggcggcgcggccgggctgtcgatgtgcggcgtcgaccggtcggccgtggcgctgtgccggtcgtactgcacggtggggagcgcggagaaggcgccgacgaaggagtgctgcaaggcggtggcgaacgccgacttccagtgcctctgcgaccgcagggacatgctccgcaacctggagaacatcgacgccgaccgcgccacgcagatcccgtccaagtgcggcgtccccggggcctcctccagctgcaagtaatttacattaggtgatcgagatgatcactctagctagccagctgcaaaatcacactctagctagctagatgatcgatgatcgatgatcactagtgtgtttctagtggttaaataagtattgttggttggttaattaggggggggctaagtatgtgatcgatcgattgctagtagtggccgtgttatgtcaggccatcgtcgcgtcagctggatcttattttgttctgttgttttgagtagttcacgttctgaatgtcgccaggctagctgacatgtgctcgtgttgctcttgcatatatgcatggcgcagtctgcctgtctctatgtatcaatcttgtgattctcttgtacgtcattgctgtgtgtctaccttaatcgtgttctcataataaattttgctgcttgttttgatct

SEQ ID NO: 8116 - DNA, 1110 bp, Oryza sativa
  ref <308>: DATABASE ACCESSION NUMBER: AK105464
  ref <309>: DATABASE ENTRY DATE: 2002-08-28
attctcaacgcaaaatccaaaagataagcacagttacacagcgagagcgagagaggagtggagagccatggcttccatcgtggcatcgaagaggatcccactgttccgcctcgtggagcagctcctcgccgcgtcgccggcccaaggcgccgcctccgctctcaggccggtggccgtcgccggcgggtcccgtgcatacaacaccggcgcgcagctccgccggcacgagagggacgagtcggacgacgacagcggccgtgggtacgacaccaggcgccccacacgcgacgccaccatgcccgccttcttctcagatgtgttccgtgatccgttcagcgcgccgcagagcctcgggcggctgctgagcctcatggacgacctggcgacgccggccgggcgcgccggcgccgcgacgctgcggcgcgggtggaacgcgaaggagagcgaggaggcgctgcacctgagggtggacatgccgggcctggggaaggagcacgtgaaggtgtgggcggagcagaacagcctcgtgatcaagggcgagggggagaaggaggccggcgaggacgagggcgccgccccggcgaggtacagcggccgcatcgagctcgcgccggaggtgtacaggatggaccagatcaaggcggagatgaagaacggcgtgctcaaggtggtcgtgcccaaggtgaaggaggagcagcgcagggacgtcttccaggtcaacgtcgagtaggagctcaatccgcgcgcgttcggcgtgcgaagttgcaggatgcggatggatcgtctccttttatccaataagaaatgcggcgtgctgtagctttgttttgttttcgaagttatggagataaaagttttggtttacttatgataaaaaaattttacttatgcgattgatctcgtatcgcgagatctctcgcgtcgtggtcaaattcaggcggactccgcgcgaaaacggagcgagcgcgcacgtgaagcggaagaaccgtgcgcgagacaattaaagccaaggcgtccttcattttgctctacatatatccatgaaaaatcaaaacttggcgagaggaatcattttgctgtgcatgataaaattcaaaatttggttagagg

SEQ ID NO: 8117 - DNA, 1761 bp, Oryza sativa
  ref <308>: DATABASE ACCESSION NUMBER: AK105465
  ref <309>: DATABASE ENTRY DATE: 2002-08-28
gtgggtagctctctatccagatgtccaggctaaaccacagtactatgatgctatcctcaatggactggaggtgttcaagttgccgcttagtaatgggagccttgctgggctcaaccctgttccaactgttgagccatcgttggatggtggagcagtgaagaagtcaagtgttgggcctattgttggtggagtgattggaggtctggtggttcttgcacttggatattgctgctttatgatctgcaagcgtcggagcagagtggggaaggacacaggcatgagtgatgggcattctggatggttgccactttcactctatggcaactcacactcatctggctcagccaaatcacatactactgggagctacgcttcatcgctgccatccaacctgtgccgccatttctcatttgcggagatcaaggctgcaacaaacaacttcgatgaatccctcctccttggtgtgggtggtttcggtaaagtgtatcgtggggagattgatggtggagtgaccaaggtggctatcaagcgtgggaatccactgtctgagcagggtgtgcatgagttccaaaccgagattgagatgctgtcgaagctccgccaccgtcatcttgtgtcactgattggttactgtgaggagaagaatgagatgatcctggtctatgactacatggctcatggaactcttcgtgagcacctgtacaagaccaagaatgcaccacttacatggaggcagcgcttggagatctgcattggtgctgcccgtgggcttcactaccttcacactggtgcgaagcacacaatcatccaccgtgatgtgaagacaacaaatatcctcctggatgagaagtgggtcgcgaaggtttcagattttggtctgtcaaagactgggccatcgatggatcacacacatgtgagcacagttgtcaagggaagttttggctaccttgaccctgaatacttccgcaggcagcagctcactgagaaatctgatgtctactcctttggtgttgtgctatttgaggtcctctgtgctcgccctgccttgaaccccactcttgctaaggaagaagttagcttggcagagtgggccctgcactgccagaagaagggtattcttgatcagattgttgatccccacctgaagggaaagatcgctccacagtgcttcaagaagtttgccgagactgctgagaaatgtgtttcagatgaaggcatcgatcgtccttcaatgggagatgtgctgtggaacttggaatttgcccttcaaatgcaggaaagtgcagaggatagtggaagcattggttgtgggatgtcagatgagggcactccccttgtgatgcctggaaagaaggatcccaatgatccatcgatcgagtcaagcaccactacaaccacaaccacgtccataagcatgggcgaccaaagtgttgctagcatagactccgacgggcttactcctagcgctgtcttctcacagatcatgaaccccaagggacggtgagctaacagtctttgcttgtcacctgcaggcattatttattctttaaacgtattctcatgagtttgtgatgttgattttctgtcaatttatggacctggaagtcagagagttgttccatattagatatttttgttttgtgctgtatattgtccatgctgtggtgacttggatacttattggctttgtattgtactctaccgctggtattaaccaccagttgatctctattactgtatacgaaagctatgcgcaagacc

SEQ ID NO: 8118 - DNA, 2238 bp, Oryza sativa
  ref <308>: DATABASE ACCESSION NUMBER: AK105466
  ref <309>: DATABASE ENTRY DATE: 2002-08-28
aaattgttttgaggttgttatgctgtacaaaataattcactaccctgagttgtcgtcaagtgaaggaatgtcacatctgactgtatcatacaatgtagagttccttcagagtaccatgatgaaaagtatgattgagggaagtgttcgggatggactgaaagaaaattttgaaagttacgcagaaattttgtctcggcatgtaaaaattgctgattctgctgggatggataaagagcgattattggcaccgctccagactgatcatcagtcagatatcagacttgcttacaagtatttttgcaatttcacagtcatctctacagtgataatggcactgtatgttcttgtacacatctttctgtcaagaccaggccctcttatgggtcttgagttcaaaggtcttgatttacctgacacgtttggagagctgatcatatctggcatactagttcttcagctagaacgtttactgagtatgatatctcgttttgtagaggtaagggtacagcgaggaagtgatcacgggattaaagcaaatggagatggttggttgttaactgtagctctgctagaggccacaagcttgccgcctgtctctagcggttccgtagatccttatgttgtgttcagctgtaacggcataacacgaacaagctctgtgcaacttcagactcatgaccctcaatggaacgagataatggagtttgatgccatggaagaaccacctgctacgttggatgttgaggttttcaattttgatggaccatttgatctggcagtttctctgggacatgctgaaattaacttccttaaacacacgtcagcagaactagcagatatatgggtgccactggaaggtaaattagctcagacttgtcagagtaggttacatttgagaatatttctggagaacacaaaaggacctgagacatcaatgagagagtacttaagtaagatggagaaggaagttggtaagaagttacatgttcagtcacctcacagaaatgcaacgttccagaagctttttggtttaccacacgaagaattccttatagcagtttatgcgtgctccttgaaacggaagttgccgttgcagggaagactgtttctgtcagccagaatagttggtttctatgccaatctgtttggacataaaacgaaattcttctttctgtgggaagatgtcgaggaaatcgaagagttaactccatctttcacaacagtaggtactccatctttgttgtttgtcttgaagagcggccggggactcgatgccaagaatggtgcaaagtcccaagataaggaaggcaggttgaagtttcagttccattcgtttgcttcatttagcaaggctagcaggacaataattggactatggaaaaccaaatcatcagctattgaacagagggctaaactagaagaagatcaagaagatgaaaactatgtcgatcttaatgatgttcaatctgtattgagcattggagatgtgccactgtcaaaggagtatactttggaactgcctatcgatgcggatctgctgatgggggtgttcgacgggggccccctggaggcgaaggcgatgagcagggcgggttgcctcgactacgccgccaccccgtggcaggacgcccggcccggcgtcctggagcggcacgccagctacaagttcaaccgctacatgtccatcttcggcggcgaggtcgtcagcacccagctcaggctcccctccgacgacggcgacggctggaccgtctacgacgtcatcacgctgcgcaacgtccccttcggcgacttcttccggttgcatttgaggcacaacatatggagcgtggaggccgcgtcgtcggaggcggcggcgagcagcgggagccggtgcgagatactggtggggatcgagtgggtgaagaggagcaagttccagaagaggatcgcgaggaacatctgcgagaagctggcgcacagggcgaaggaggtgctcgaggcggccgccagggagatcgccccggccttgtcgggctagcgagaagctggaggagacggctgttttttctttttcttccagcaaggccgcaacggagaagatctctgcagaggagcagagtgcacgactgaactgtgtcggcttttgccttggctgtagcgtagtagtatctccaaaacagaacgaaacaaataggaatacggagatgtataccaactacagtatatacgatatcttcaagaagtacacatgatccc

SEQ ID NO: 8119 - DNA, 1242 bp, Oryza sativa
  ref <308>: DATABASE ACCESSION NUMBER: AK105467
  ref <309>: DATABASE ENTRY DATE: 2002-08-28
gttgagagcagaaaaccccaaatcccgcggttcccccgcgccgcaaaaatcatccatggcttctccgccgccaccggcggccgccgccgcgagcccgaagcggaaacccaagcccaagccgaaggcagccggcgcctccaccctaaaccctaactgggcgcagctccagtccaagctcccccgccccgtcgccgccaccaccctcggcaagcgcaagcaccgccccgaccacccttctccggcccccgcgcccaccgagcccgccgcggaggaggaggcggcggaggtcaagctcgtgcccacctccgacgacaccagcttgacgaaggcggtcgctgtggattgcgagatggtcggggtcggcgcaggcggcagcaagagcgccctcggcagagtcaccttggttaactcttggggtaacgttgtatatgatgaatatacaagaccggtagagcggattgttgactaccgtacccatattagtgggattagaccgaagcacatgaataaagccaaagatttctgggttgttcagaaagatgtagctgagctgatcaaaggaagaattcttgttgggcatgccttgcaccatgatcttaaggttttgctactaggccacccaaagaaggacataagggatacctcagaatatgaggtttttcgaagggaagggaagaggagatcactgaaagatcttactgctcaagtacttggtgctaaaatacaacagaaagagcattgcccaattgaggatgctcgtgcagcaatgttcatttacaacaagcataagaaagtatgggagaagaatatgaaagaacaattcagatttagaaagaagctcaagaagcgaggcaagaagaaatctgctgaaggcagtgggaatgatcctaatgttcccacggttcttctatagaggatggatttaggaagctagtgtgatgcattgccctacctgacatgaatttgaagatgccaaaggctatttgtgtgagattctcatggaacttaaatgaggcagtatgctgacccaagatgtggtgcagctcaatcatgatgaacatcaacacatttctcgatgacagtgtcacgattccatggatttatcacatttcatgtagtagcatttgttttagggaagcaatatttctgatgaaaattttgtacctgaatctcatattctcatgtaatgttactccatacaaacctccaagctttgcagcaaacatatctattaatttattg

SEQ ID NO: 8120 - DNA, 1627 bp, Oryza sativa
  ref <308>: DATABASE ACCESSION NUMBER: AK105468
  ref <309>: DATABASE ENTRY DATE: 2002-08-28
cttttttcctcctcctcgcgacgacgcctccctcgtacgccggcgctctcgcagttgccgccgccgccgccgcgaacgcccaccgcccgcgctctggtcggtggatcgtgacgtgctgtggtggtctctgatctgctctgggggtgggtgggcgtctcgcggagtcgccgtgttcgtcgagggctcgatcggctcggggagagcgagtgagaagaggtgagggttggggggaggcacatccgcggcggcggagagatggcggatttccggacctccacgcatcgggagaggtggatcttccagacgaacgatctgatggatagatggggggcggcgaaccagcgggccacggagacgctcgttcagtatggaacgacgcggttgaaggtggaccctgttgatgggtcgctgtcgtacccggaacctgcgcctgatcatgttgtagggagctcaggtgtaaagcctctgtcttgtgaagaggagcgattgatgcgggtattttatgagcaaaagattcaagaagtatgttcagcatttaagttccctcacaaaatccaggctaccgcaataatatatttcaagagattttatctgcaatggtctgtaatggaacatcacccaaagcatattatgttaacttgtatttattcttcttgcaaagtggaagaaaatcatgtttctgctgaggaacttggtaaaggaattcaacaggaccaccagattattctaaataacgagatgattgttctcaaatctttagattttgatctgattgtttatgctccgtatcgatctatcgaaggatttgttgatgacatggaggatttctgcagagcaggtaatggtgagcaccaacggttgcaggatttacgtcaaactgcgatatctcaggttgacaaaatgatgttgactgacgctcctcttctctacactcctggacagttggctctggctgctttgcacaaatccaatgatatgcacaagatccttaattttgaaaggtacttggaaagtgttttttcaaggcaacattctgattgtccaatcgaacaatttgttgggtcaatcaatatgatcaattatttggttgagcagcttaaaatacctactcctaaggacatgaggcatattgaccgcaagcttaagcattgtttggatccaagctcacaggatgagcataagaagaaagagaagaagtcgaagcacaaatcaaaaagggcagctaatgaagcccaacttgacagctagaaaacatacggttgggctgcaccgtgtaagaatcagttctttagtttgttgtggctccaattgatcaaaagagctactttcctgagcaggtgaggttccgttttagccgaggacaaccaattttgagatgaagcgagataatacccatgacctcgccttcttgtaatcttgtgtgcctggaagccctagcaaactcctcgttgcaatggctactgtactttttttggggggtaatttatcccttgtcaaatgggaagaagcagcatacatcggatgattgcctccatatacgaaaatgacagctaactcagacttttttcggttgcatttttctgtttacaattctcactattattaacgtatctgattgacttgctac

SEQ ID NO: 8121 - DNA, 971 bp, Oryza sativa
  ref <308>: DATABASE ACCESSION NUMBER: AK105469
  ref <309>: DATABASE ENTRY DATE: 2002-08-28
taggagggcgcggcggccgccgcaaaacccggggcgcgagcccgggcggagcggccgtcggcggcggcgctgggtcggacgacgccgggcagggcgggtggttccggatgttctccgtcgcggcgtacaagccctacttcgacgtggacacctccgacgtggtggagaggatctgggagtccgtcttccccttccgcggcaccttcaccgagaagacctccgagaaccccgacctatatgggccattctggacatgcaccaccctgattttcgttgctgcatccattgccacatttgtcacctacctatcccacaaatggcataagaaggagtggaactatgatattaacctggttacatggtctgctggcttattctatggctacgtgacatttgttccccttggtctatatgtcatccttaagtacttctcagcacctgctggactagtgcaactatggtgcctctatggatactctttattcatcttcattccagcatcgctcctgtctattgtgccaatagaaatattcaggtgggtgattgctggtgtcgcggggtttatgtctgctaccttcgttgctatgaatctgcgcgctcacattgtaaattctggagagcgatggttcttgatcgttgcagggatattcttgttgcagttgggattggctgttttgctgaaactctatttcttcacgataactgtatagggaactgccatacttgcttgtattagtcaggattggatacacggtttttcaggccgaattactcccggattcgttgatgtaattttccaagtatacatccatcttacatgtgacattgtgacaaggaaaggccgcttcgttagcgtacgagacgtattacaatggcaagacttgtccatggattattacgagattaaggcttaaagaatccccttttgtagtccattttgtgttccatacttgagattaataattaattac

SEQ ID NO: 8122 - DNA, 782 bp, Oryza sativa
  ref <308>: DATABASE ACCESSION NUMBER: AK105470
  ref <309>: DATABASE ENTRY DATE: 2002-08-28
aattttgcagctgcaggtgtgctcgatccccatgactgatcagcacagaggagtgatcggcggcggcggctacggtgaccgtggtggccaggagcagcaggagaagcagcccttcatgatgacggctctgaagacggtgaccgcggcgacggccgggggctcgatgctggtgctgtccgggctgatcctggccggcaccgtcatcgcgctcacggtggccaccccggtgctggtcatcttcagccccgtgctggtgccggcggccatcgcgctggcgctcatggcggccgggttcgtcacctcgggcgggctcggcgtggccgcgctctccgtgttctcgtggatgtacaagtacctcaccgggaagcacccgccgggcgccgaccagctggaccacgccaaggcgaggctcgcgtccaaggcccgcgacatcaaggaggcggcgcagcaccgcatcgaccaggcgcaggcgtcttagggcggcctgccgcggcgaggcgccgcttctgctagctagctcgatcgggcggcgcacgggacggcgccggccggcgcgcgtgcgttcgccgtggccacgcccacgctggctactcctcttatctgctgagctctgtaaatgcatgcgtacatgtttaattaagcttggtcgcgtagtactctcctatgtaatatgtcccctagattatctaagaggcgatcgtgcatgtcgggcgcctggtacgtgtggtctggtggatgtcgtgtttatggtcatgatgaataaaatgcagtgttccttcgat

SEQ ID NO: 8123 - DNA, 1562 bp, Oryza sativa
  ref <308>: DATABASE ACCESSION NUMBER: AK105471
  ref <309>: DATABASE ENTRY DATE: 2002-08-28
atgaaaattgtaatgaccaaattatctccctgaatctaatacaccttcttcctccccaagataatctcctctgcttcagagttcttccttcttcttctcgttccttctctccagccttctctcccgatctcttgggttctgtcttctgagtattcttaatgagttttgatcaagtgacattgggagcaagaagctgttttttggccgatcgttttataacacgcctgtgatgtctgatgatatcaagttcgtccttagtctgctgctgctaagcagcttaatgttgttcgtagcttctgatgacaccgaatgcctaaggactctgcagaaatcactggttgatccccgtggtgaactcgaatccacttggaatttttctggcaatggattcaacggtttcatatgcagctttactggagtaaactgctggaatcccagtgatagcacggttcgttctttacatctcgtcagtctgggacttcaaggccaatttcctgagggtcttcagggctgcagtatgatagaagacttgaatttgtcaggtaacagtttttcaggacccatcccttccgacatctcatggcggcttccctatttgagatatctggacctctcgcacaacagcttttcaggtcaaatcccaaccaatatcacagaaatgacaaaactggaatttctaaacctgtcaaataatgatttctcaggacccatcccttctaatatctcattgttggttccacaattaagttccctggatctctcgtacaacagcttttcaggtccaattccagtgagcatcacagacatggcatacctgaaattgaaaacactgaaccttcggcacagcaaactcaatggtgaaattccatggcaattctgttctctcgctcactcggtttcgttcagtgttgcagaaaatttgttttcagggcttgttccatcttgtttcgagaattttacagcttcaatctttgctggcaaccgaaggctttgtggtgcaccgttgggtaactgcaggttgcgcagagtcaacgacgagactagtatcggagcagctgtcggtttcgtggttggattcgtgttggccttctacttcccgcactggttcgtcttctccacgagtctccattcctacatctttcggatttgatcttctggaacttttgtgtggcgttgtggcaacccgccgtcaacttcgggtgggcaaataaacatgtgcaaaaagagcaattctacggtccttaaggatgtattatgaggtaccaaaattttagtgtaaaatttggtacctcatgatacctcatagtacctaggtatcaagaggtaccaaatttataatagaaaaaatagtatctcatggtacctcctcaagaaccgtcaaattgctcgtgcaaaaatgcttgtatttccatgaagattagtgtcattgttatgggtaattttaccaatcttaaaaaaagtaccgggatgtatccactttctaatgtaaaatttggttcctcggggtaccaaaatttttaatgtaaaatcttgatacctccaggtactttctgaagtaccgt

SEQ ID NO: 8124 - DNA, 1316 bp, Oryza sativa
  ref <308>: DATABASE ACCESSION NUMBER: AK105472
  ref <309>: DATABASE ENTRY DATE: 2002-08-28
tttaagagtgttggatctagagagcagtgtgaaattgcaaaactctgatcttaacaacgtggtggatctatttcagttaaggtacttacggattgcagccagtagaatcacacatcttccagaacaaattggggagcttcagtttctcaaaacattggacctgcgtcgtacatggataagaaaattgccagcaggcattgtcaaattgcgacggttgagctgtttttctgctaatggtgcacagttacctgacggagtcggaaaaatgcaatctctataggaactgtcaggtataaccgtgtacgacgaatgctcaacaaattctttgctggagctgggaaatttgaacagcctgagaactctcaagctaacttggtacattcgcgaatcgcgcaaggatagaacacattatactgatagcttggcttcatcacttggcaaacttgtcagttccagccttgaatcattgagcattatcaatggacctttttctggttacatcccctttgattcttggtcttggtcatcatctcctcatctcctgcaggaattatacattccgaaatgctgtttccaaaggatcccagattggatggcttcaatgaataatctctacaggctatgcatcaggtctaagcaagtgacaaagcaaatcctccagatccttggagacttgcctgcattgctagacctggagctgcgttcagaatcagatgatcccatggaaattctcattatcagcaaatgcatattccgatgcctgaagatcttccgtctgtatggatcgttcgtcggcctgatcttcgaggatggatccatgcagaaggtcagagaaatctcggttgttgttagagcacacaaggcaaaatctgcattcgctgatcatcctgatcttggcattcgcaacctcacctctcttatggatctcaatgtatggattaattgcgagggagctagggttcaagaggtgaaggtgttggaagctgccattgcagatgcaaccgctctacttcccaaccatccgacaccacatttcttcagagaaaatgaagaaaatatggtgaaagattatcttcccaaccatccgacaccacatttcttcagagaaaatgaagagaagatggtgaaagatgaagcacacatgcaggagaaaatgttcgagtaggacctgaagattcaaggattcatttctacaaataaacatagaggttaagataagtttttgttggataatatcatatcagtaaattagttggaaaccgaagtcataaacttgaaatccaagatacgatcataatctttatttttttagttgt

SEQ ID NO: 8125 - DNA, 1354 bp, Oryza sativa
  ref <308>: DATABASE ACCESSION NUMBER: AK105473
  ref <309>: DATABASE ENTRY DATE: 2002-08-28
agatcagtaatctgcgtacgctcctatcgcctaaccctataacgtaatattcgagaaatcgttccggcgatgcgcgcgccgccgccgtcgccggcggtggcgaggacaggattctccgacctccagccagacctggtgggcgagatccatggccgcctcagcttcctcgaccgcctagccttcgtggcggtctcctccgccgcgtcacgcgacgcgttgaagccggagccgccgtggctggtcctcccgggcgagactccggagaccgccacggtcttctccctcgccgaccgccgctccgccaccgtgcgcgcctcgggacccgcgatgcgcggccacgtcatcatcggctccttcggcggctggatcgtgaccgccgacgagcgtgggcggatgcgcctcgccaaccccgtcaccggcgatcagggcgacctcccggccatcaccaccatccccttcgtcaacgccacctcgccgtggggtcaccatttcatcatggacatggaacccttcgtccacatccggtacagaggcgaccacgagtcgtggccgcacccgtacggcacgttcacacacaccgccggcgacatccgcctctggttctaccgcaaggtcgtcctctccgcctcgccgcgccccggcgactacgccgccatgctcctcttggacagctacttcggcgcgccggcgttcgccacggcgggggacggccggtggagggtcgcgccctcgcgcgacggcgtcgaggacgcgatccaccacgggggcaagttcttgttcgtcacgtacaccggcatcgtggaggcgtgggaacgcgacggtgtctccggcgagttcaccggcaaggtggtgaccacgccgatctcatgccccccgcagcgccgcaagtacctggcggcggcgccggacgggcggctgatgatcgtgctcaagaacaccaatggcggcgtcaagaaaggctacttcgaggtgcaggtgttcgacgaaatgacgcaacggtgggaggcggcggaggacatcggcgagctcgctatcctcgtcggcgtgaacagctcggtgtgcgtgtcgacggcgaaacacccggagctcaagggcggatgcgtgtactacactgacgacgagatcgggaaggcatggctgcggagagagtacgggtacagcaacagcaagccgaacgtgggggtgtacagcctcaaagacggcaaggagatgagcatcccggggctcggcgagcacctcagctggccgccgccggcgtggttcacgccttccttccggtgatgatatatagttagttcttggcctcttcatggtcttctacatacataatgtttacatcttcagctttgctttt

SEQ ID NO: 8126 - DNA, 2096 bp, Oryza sativa
  ref <308>: DATABASE ACCESSION NUMBER: AK105474
  ref <309>: DATABASE ENTRY DATE: 2002-08-28
gtctccggggagaccgaccgtgcgagatcgcgaccacgtagtgcggcgctcgctctcgctctcccccgcggcagagtcaggcgccgcccggcggagcgcgaggcccgcggagcaatggatttcaaggggttctgggagtccagattcgggggcaagaaggagcaggagccggagcagaacgggcacgccaatggggtggcgaacgggagcgtcaggaagaggacgtccgatttggcggtctacgagcagttcgagcagcaggccaggcagacggaggtgcgcgccgcggcgattcgcgatgggaatgctgatgcgatccagaagcccctcctaccttcgtttgagtcagctgaaatgcgtaatcttgcagagacattgttgcgggacattattcgcggcagtccagatgtgaaatgggaaagcatcaaaggactggagaatgccaaacgccttctaaaagaggcagttgtcatgcccataaagtatcccaaatacttcactggtctcttgtcaccatggaaaggcattttactttttggtcccccaggaactgggaagacaatgctggcaaagtctgttgctactgagtgtaaaactacattcttcaacatttcagcatcatcaattgttagcaaatggcgtggggattcagagaagctagttaaagttctgtttgagcttgctagacatcatgcaccatcgacaatatttcttgatgaaattgatgctattatcagccaacgtggtgaagctcgcagtgagcatgaagctagtcgacgcttgaagactgagctactcattcagatggatggcttgacaaagacgaacgacttggtatttgtacttgcagcaacaaatttaccttgggaactggacgcagctatgctccgccggcttgagaaacggattctcgtacctcttcctgaggctgaagcaaggcatgctatgtttgaggaacttttgccatcaactacctcaaagctagaggttccatatgatactttagttgagaagactgaagggtactctggttcagatatccgtcttgtgtgcaaagaagctgccatgcaaccactaagacgtcttatgtcagttcttgaagccagagatgagctggtgcctgaggaagaattgcccgaggttggtcctctcaaacctgaagacatcgaagttgctttgaggaacacaaggccgtctgcgcatctccatgcacatcgctatgagaagtttaaccaggattacggaagccagatccttagtcaggagcaagcctgaacttctcaaagttcagacataccattttcaggacgcaacattttttctgcagcagtttaagttgtgaggcgaacgttacaaacggatttcgctgctgcagcagttatgaaataaatagcatcatggatatcgaacgcaattgcctccttttatatgtgctccgcatcgtcgaagcagaaggctggatcctatgctgccagttttcctttgcaccggctaataccactagtatggtacgaccaacgtccacatgatccatcccatttataacggacgaccagcgatggagcgcgcaaacaacatgacatcgcaaaagcggccattggcacataatcattccattaaaggctgatcacacgcagaagtgataatatcacacgagaagatgttttcttcacaaatgaacaggcccggcgtgaccgatttccagttcgttacatgcaaaataagataaccaagtgcattcaatcacaacgaactggctcagcagagccaacgcttcgggcaaactcaaggtaatcccctcactgaatcggccgtcttcccagaccttgcatcagaccaggccttggctattgtgcgcttcatgtcttcgtcaccttcctcatacatgttctgcagacataagtagcacaacagtcagaacaggatttccagactaattgttcaagtctgaagtcatgactcatcattatgacgggtaggtgtttaccttcatcaaatccataattccagacattggatccttctccttagccatgcttggcttgaactgtcagcaaattaaagttagcacatctatatatcattatcagtaccat

SEQ ID NO: 8127 - DNA, 2181 bp, Oryza sativa
  ref <308>: DATABASE ACCESSION NUMBER: AK105475
  ref <309>: DATABASE ENTRY DATE: 2002-08-28
agatctaaacccccataaaatccctgctccccgccgacaaacccctcatcctgcctcgcgaatcccacccgatcgccgtcgccgccgccgccgccgccgtcgtcgtgcgtcgtcaccgccagcctccaatgcgcagcgcaggggaggggaggcctggctccggcgcggcggaggcgcggggaagtcgccgccgcggatgtgcgtcgcggtggcggtgctcgtcgccggaaccgtctggctctgcgcgtcatcggcgggcttcatgggaggcccctacggcggctacagggttcaggatgttgatgtgaataagttgtggacgactgctggttcaaatggttggagagcatcttctgcaccacggtcatattggcctccccctccagctgagactaatggatacttgcgtgttcggtgcaatggcggattgaatcaacaaagaagtgctatatgtaatgctgttgttgcagctcgtataatgaatgctacattagttctaccagagcttgatacaaattctttctggcgggataaaagtggttttccaggtatctatgatgttccccattttctgaagactttaaaacatgatgttcatattgttacaagcctgcccgggattatgtcaaaagggaagactaagaagctcaaagctcataagattgtgccacctagagatgctccgctaagttggtatacaacattggctttggaagaaatgaagaagtatggggctatatatttaactcctttctcacaccgcttagcagaagatattgatgatccagagctccagaggttgagatgccgagtgaattaccacgcactacgatttaagccacatatcatgaaaattagcaatgagatagtgaacaagctacggtctgaaggccacttcatgtcaattcatcttcgatttgagatggacatgcttgcttttgctggatgcattgatatatttaccccagaagaacagaaaattctgatcgaataccgtgaaaaaaattttgcaaagaaaatccttgtttacaaggatagaagaatcatagggaagtgccccttgactccagaagaggtgggccttatccttcgtgccattggttttgacaattcaacccgtatttatcttgcatctggtgagatatttggtggtgatcgattcatgagtccatttagagcaatgtttcctcgcctagataaccacagttcagttggacctgaaaagctggaagaaaatactcgaggcttggctggatcagcagtagattatatggtctgtctcctgtcggatatcttcatgcccacgtacgatggtccaagcaactttgcaaacaacctcatgggccaccgcctctactatggcttccagacaacaattacaccaaacaggaaggcccttgctccaatattcatggacagggaggaaggccatgtaaccggttttgaggatcgagtcaggcaagtaatgttcaacacacactttggcggtccacacaagcgcattcatccagagtctttctatacaaactcatggcctgagtgcttctgccatatgaacccaatgaatccatctgacaagtgcccctcggatgatccacatgacgttctaggtggtcagttgcagaatgaagaaattgaagatgtagatttgaagaccactgacaagattgagtctattacccaaattgaagagactatgatttaagtgagacccagccattataacttcatgactgaaacgtggcattgttgggctgttgccattgttgggtcaaggggtaaactgaaatatgactatcaaggaggaactgttgatcagggaagacggcatggtggctttaggcaggttattccggtgaatcggtgatggcatactgatgattgattggctgcaagtactacgttagtacgtataagcaagatgttgtcagctggtattcgtcattgtgggcgtctattgatgtaggacgcagctaaagagggcgatagacgatcgccaaccgcgcgagaacgccgtcagacctctgaacgatcagtttttcatgatggttttttttattgtatatgggtacttcaaggttgtcgtaatgtcaaccagagtttaaacgatatgcgataaaatatacattattttgtaaatactgaaactactatattatatagttaacctacttatgtatg

SEQ ID NO: 8128 - DNA, 1840 bp, Oryza sativa
  ref <308>: DATABASE ACCESSION NUMBER: AK105476
  ref <309>: DATABASE ENTRY DATE: 2002-08-28
ccgtccccttgctcctcctcccgcccttaaatccgacgcgccgcactcgctccctccccgactcacccccgccgcccacagactactccgcgcccccgcgatcgcctccctcgcctccgctgcccatggcggcaacgacgcccagggtctcggccgtgatcttcgacctcgacggcacgctcctcgacacagagagggcaacgagggacgtcctgaacgagttcctggcggcgtacgggaaggtcccggacaaggagaaggaggagaggaggttggggcagatgtacagggagtccaccaccgggatcatcgccgattatgggctaccgctcaccgtagaagagtacgctgtggcgatatacccgttgtacctgaaaaggtggcaaaaggcaaagccactccctggagtcgagaggcttgtcaagcatcttcataggaacggagtgcctctagcacttgcttcaaattccgtcaggagaaacatcgatcacaaactgttaaaattaaaagattggaaagactgtttttctgtgattcttggtggagaccaggtccctcgtggaaaaccttcccctgacatgtgggtggcccttagaatcactgtgttgcttccatccaacaaaacaatctgcaagtttgcaatacattatacatctgatatattagtcctacgatttacacttctaaagcatctacgatggttaatcacaacttgatagatctttagctctgttcatacaatgttattgttgattctgtaatctgttggtacccctagatttctggaggccgcaaaaggacttggtgtaaatccatcatcatgtttggtcatagaagattctctcgtcggagttcagggtgccagggcttctggggcaaaagtagttgctgtcccatcactccaaagtcaaaggcagcactactcaattgctgattctatcctctactcactgctggactttcatcctgagttgtggggtcttcctccttttgaagatcgcattcagggtgctttaccaatcgaacaattattcttgaatgcccagataggccatgcaatttcaaagagtcttcatatggtaatagcaggtgattgtacctatgaatatgttcctgaccaaatatcaggaattttctttggttgggccaagccagaagcaggcggagtatctaggtcggtgataagcattggatgggacttttcgctgcggacagttgaaagagtgatgcacatatatttccttgattcctgttgtaagataacaacggaggagcccctgaagctgcagttagttgggtacatccggaagctccaaagcacggaaaatatatcacaagcattggccataactgacgaagatcaagccattgcaagggatgcattggacctcccagttttctctgaacacgcgaagttataaaatggccttctgctctcttggcatgatctcagaagttatatgctcaggttattgtttaattagcaagcgaaaacgctggcagcatctgttttccttgaattacagcagtataggaatcgcttgcagagaatagctgcaggaacgaagttttagatcttatttaaaccgctcgaaattgtaattgaaaatatttatacagggatagaataaacaggtgttaggtagggattaaggccactgaggagatacgttattgtaacaggcagggattgggaatactatgaggagatacgttatacagggagataatttttttcgttctgttccgcctaagctcataagtacaggtagtgagtaacaaggctatgtaatgattgttcacgaagaaatacagtttaatatgtcttctgaattcaatt

SEQ ID NO: 8129 - DNA, 1629 bp, Oryza sativa
  ref <308>: DATABASE ACCESSION NUMBER: AK105477
  ref <309>: DATABASE ENTRY DATE: 2002-08-28
ttatcatgggatgctgagtgctacgacctacattgggaggcttattccgttattaggaagctgtgaatgatgcatttctctggggactgcatggtacatcatcagctatctaaatacaaggcacagtttttgcccataaacaatcctgttgatttcttgcaactgaatggacaacggagagacagcaatattccctgagtgtgttttggagaaagcatagtgatgattagtaccaacgcacattcaaggtaacaatatgtctattttatttctaccccaaaacacaggtcatacccgaatggcacaaatactaggatctgcaagctggattttcaggatcatagtcatggtggtgtctgaacttctgatccacatttctctgttccatgtcaagcaagctctgcttctcctccggattggcatcacctttatcccaggggtgtagctggtatctcctcagcatctccagcttctcagcgacctccttcatcatcggtcgttcctcaccactcatgctcacacatcgcatcacgaggtgtgtaatctcttggagcacctcctctgtcatctcattcctcacctggctgtcaataagttcctcatggcggccatctctcacagccgtcatgaagcaagacacgaggctcctgtcttcctctgatccgccgaagtagagtgccttcttcctggttagaagctccaggaggacaacaccaaaactgtacacatcactcttgttagtcagctgacatgtcatgaggtactcagggtctaggtacccacatgtcccttgcaccagagttgcaatctcgaactcatcattaggcaccagttttgatgtcccaaaatctgaaacttttgcggtgagtttgtcatcaaggaggatatttgccgtcttgacatctccgtggaggatgggtggtgaggctgaagaatgcatgtaggagagtgcctctgctgactctgccgctatccgaagacgagagtccaaggatatgacagtgttgagagtgctgccatggatgtagtggtcgagggtgccgtttgagacaaactcataaactagcatgggaacttcgacttcaagacaacaaccgagcaacttgacgacgttcttgtggttgatctgggagaggatgcacatctccttcgcaaattccttggtctgtgcctcctctatcatctttgacttcttgatggccaccaccatgttgtcctccaggacgcctttgtagacgatgccgtagccaccgcggccaagaacacggtcggcggcaaagctgttggtggccttctcgagctcttccttggagaaaatcttgaacccacccgctccgccgctggtgccaccataggaactcatctgttgctggagaagcacgccaccgttctgctcaaagaatctttgcttcgttctgatgagcttcctcttttggagccccaggtagagccagaacaacatgaacagtaacaggaacacaccgacgctgacccctgaacatggtatgccaatgatattcattagttcccgacaagaaaataagtgcattaataatgttgcttgataaccggccgattgaatacctgtaacgactttcagagctaacgtgaacttgtccgttgggaggc

SEQ ID NO: 8130 - DNA, 1638 bp, Oryza sativa
  ref <308>: DATABASE ACCESSION NUMBER: AK105478
  ref <309>: DATABASE ENTRY DATE: 2002-08-28
aattaacggcacctcgccggatttcctcggcgagcctctggaacgcggcgtcagacgacccgcccttctcgacggccttccggcacgccgccttcacggccacggccttccccctcgccttcctccccgcctcgccgtccccgccgcccagcagggtgctcaccgcacgctccagctccgccgcctccacgaagttgtcccgctcccggtccagccgcagcggcacggcgacgcccaggacggacaccagcaggaacgcgttcgcgtgctgctcgttgtcgagcggccatggcagcatcggcacgccgaaccagaggctctcgaggatggagttccacccgcagtgcgtcacgaacccgcccacggcggcgtgggcgaggatgtccttctgcggcgcccgcgtcggccacacgagccccctccccttggtcttgtccaagaacccctcggggaggagctcgtcgagcatggcgtccgtgggcacccgttgccccggccggctgtccttgggcgggccgcgcagcacccacaggaagcggtgctcgctccgctccagcgcggcggctatctcccgcaccttgggcggcggcaggaggcccttgctgccgaagcagacgagcagcacggacgccgggggctgcgcgtccagccaccgcacgcactcgtgcggctgctccggcggcggggtgagcgcgatcaccgggccgatcgcgtacaccgtcggcgcgggcaccccgcgcgtgcaccggccgtcggcgatggcgtcgatgacgctctgctcgagctccgccgccgtgttgacgatgaagccggtggccttcatgtagcacctcccggtttcgaggaaccacctgtatgtcgacatcttcttcttgtgaagcatcgtcgccgggagcacggacggcggcaccggcggcagcccgggaatgttcagcgcgccatccatctccgagaattcgccgggcacctcctcgtcgagcaccggcgagtacagcagcagctccagcatgacggcgccggaggtgaagtacacgtaggacggcacgccgagctcggcggccacgtcgagcgccggcgtgcagaagatgtcggtgacgagcgcggccacggggcaatcgagcccggcgatggcggccctcacgtggggcccgtggctccgcagtatgagggagacccactcctcgatgccggtgtggacggtcggcatgtcgacggcggggaggtgccggaagctgatgtcgtcggcgccggaggcctcctcgcgcttcacctgggccgcgatgtcgaccgccgcatccggcgtcggcgtcggcatgaggagcacggtgaccgacagcgcgccgccgctgccgcggagcagccgcttgccggcctcgatcatgggcatgaagtggccggcgccccacacgggcagcaacaccaccgtcggcttcgccatcggttggattcgaacgatgcttctgctgcacgctgtgcggctgctttgtatgaatcagaatgtgttcttgtgcttttatatgtaagcaacttctggacagtcaagggggaaaaatatcgagaaacaactacttgcttcattcaaaatttgaacatttcgagctatgtatgtgaataaatcgtttctggtttgttttcgtc

SEQ ID NO: 8131 - DNA, 1440 bp, Oryza sativa
  ref <308>: DATABASE ACCESSION NUMBER: AK105479
  ref <309>: DATABASE ENTRY DATE: 2002-08-28
agctcgtacaacctcgcatatactccaacatgatccctctctagctaacgtaattcccttctctttcctctccgatccggctctcgttgtgcattaagtgttgatcgatcggagatggcgactcgggagggaggaggacgaggaggagggcggccgccgctgcgagtcgggcggacgcaggagtaccggatggggagggagacgcagctgctcgccgctgagggctcgccgccggtcagcctcttcgtgctgtgcggcgaccgcttcgaggcggcgcggctgttccgctccggcggcctgtcggtgcgcatggcccgcgtcgagggccacccggtctccatggcctcctgcgccgtcggcaaccaccactggatgctgtcccgggacgccctcgtcgcgcgcctcgacgcccgcgtcttcgtcttcgagatgcccggattcttctacgccgtcgtcggcggcggtggcgccgagaggaagtgcgccaccctcgccgagatcttctcccggttctgctcctaccacgatctctccaccacgcagcaaggtgaagacgaagccggcggcgatatgaaccaacactccaacccgtgggtgcgcgcccacggcaggatacagcgtctgaagaagcccacctcgccgcccgccggcgccggccaggccaccgccgacgcggcggccgaacgcgccggcgccggcgccgttgtcggactcgcgagccagctggagcgcgccgtacgcacgtcggcggtcgtcaagctgctcagtcgctccctcctcgccggcgcgctccagcccgcgcgccacctgatgatcaccctcgccgccgccgccggcggcgctgccgccaataatgccgccgggaccagcgccggcgccggtggctcggcggcggcgctgccgagcaagtcggtcgtgtccgaccttctggaggccatcgagacgagccgtacgtcgccgcggcgggaggcggcgcggagggcgggcggcggcgccggcgggcccgggtggtggagcctcaacgtggagggcgtaatgctgctgctcagggtcgtccaggcggtcagggggcggaagctgccggcgccggagaagaggacgcgcgacggggcgagcgacgccgccggcctgagaggcggcggcatcatgggcggcgacggcggcggcgccgcgaggcggtggtgcggcggccggccgaagaagctgggcaacacggtgggcgcgtgtggaactcctgatctgaggctttgtgttaatgttcccaaaagtgaaccgagagagagagagagattattaataggtaattaagcggaggattaggttaatgatatagagtttaacaagttgatctgtactgttagatgcatgatcaggtactaatgcttggtcatagtgtttcttgttctgcttctaataatattcatgaatcggtgtttaatt

SEQ ID NO: 8132 - DNA, 894 bp, Oryza sativa
  ref <308>: DATABASE ACCESSION NUMBER: AK105480
  ref <309>: DATABASE ENTRY DATE: 2002-08-28
gcgcactgataccctggcgcagcaaaaaatcgtttcccctgaaatcacgctgccgatagcttcctcttccccttgatatcgctctccacaaaatcgattagcctacacacgatttcaccatccacaaaatcgctcagcctcctcctccgcttgatcttgctggccatctccttcaccaccgctgtacgcagcctcgccggagatccgcctgacgacggggtttgaggtggcgcgacggagatccaccaggagcgaaaaccagtctctgctcccgcggagcacggcctcgacgacgcttcctccttcccacctcaccccaactctctcagattggcgccgctgccagccactcactcgccatgggcaagatcagtcgcgccgccgacccctcgctctcccttgccaagaacagtgccgctgcacctcatcccagccatctccatgacgaagcaagaactacagatcatgagatcaacaatggcaaggacagagggcaggtaaataaaatgggagttgtgaaagtgattggcaaatattttattcgtacacggtatcaggtcacaaatatctatcaacttaagtctcgacctcaaggagttcctctaagagtcaggaaaatgctaaaatcagcacaagctattgatgaattcaatcaagatggagtttgaacagaaaatttgagatgggagaagaacttctgtggttggaagttgagatgggaggatttagcacgacaatacatccatcaccatgtagtccgctgccatcttcaccatatggtgtaaagccttctgcagttcacttgatgcacagatattttgcatgttaacagctgaggggttttgttaatcataaggcgtgtatctcattcaaattaatcattttttagcaaac

SEQ ID NO: 8133 - DNA, 1306 bp, Oryza sativa
  ref <308>: DATABASE ACCESSION NUMBER: AK105481
  ref <309>: DATABASE ENTRY DATE: 2002-08-28
acaatcattcaactcacatcgatccatccatcggcggcggccgcgtagaacacataggcgaccacgtactcaggcatcgctatagcacaagccttgttgacgtgacttcgccggagcagaagcggtgcacgccgcccgcgctcggcagcggcgtctggcaggaggacgtgcatctgaccatcagccatcacgggaagaaagccgaggtcgatggctgtccgaggtaagagcgctaattagattgtttcttcttatattttgcagcacatgcatgcacgggcagatggagaaccacaacggagaagaagcagatccatctacacacatgaagaacacacacaagagaaaacatgtacagggcctcggcggaagggcacgccaacgtgtgcgccgccggccggcggcagcatggcgcaccaaaagtgtggcccgccgggcgtcgttcgatgctgaaaatcaatcgatcaacacacatccatccaacaattctcatcggtgatccatccagcgccgacacgcaccggcggcagcgagcgacttcggccggagctccggcgtctggcaggagagggcacgcgcggtgacccgatcatcggcaagcacaggagggagtacttcgacgaggaagaaggaacttgatggctaccaaggtagaagctagcaagatcgtttcgtttttctttcatctacagcatgcacacatccatctacacatatggtcgccgccggtgaaagttgcggtggccgattcatctacacgcgatagaagcctcatcgatgccggcgcccatccgagtcgacaagatgtctggacccgacgccgccaatttaagccgctggtggtgcatctactagaagccgcgacgtcgccaaggtgccagacgtcctcgctttgctgcaagtttcaccgtgccggagcagactgactatgtcgaagtcatcgtgacgccgcgccctgctggagcacgtcgaagatcgccggagaaggtcgtcgtgaagttattccgtcggagcacgccgaagatcgccggagctaccgccgactgccatgacttctccccgcttttatgccggaggtcaagcatcacgtacgtagggcgtcgaaaccagcagatgacaacgaaggcaagtgtggctgcagcacaggagggaggatgacgagctgaaactagcagatgcatgctaattaagctaattattgtggtaacgtggccgaccaaccggagggtggcacatcatcaccatgctacagttgcacaagaagtcgtcaacgcgacggctaaagtaaacaaatcctgttgatttc

SEQ ID NO: 8134 - DNA, 1435 bp, Oryza sativa
  ref <308>: DATABASE ACCESSION NUMBER: AK105482
  ref <309>: DATABASE ENTRY DATE: 2002-08-28
atccgagcttaagatctctctctccattagcgccgccgctgccgccgccgccaaaaatcgccggcgaaatggacgccttcctcgccggaatcccgcagctccgcaggccggcggcgctgatcgcgtcgtgctgcgcgctggtcctcctcgccaccgtcctcctcctcccgcgcgctcctcccgccgccccggagcagcttgcctccgccgccgccgccgccgccgtccgcctcgacgcgagggtcgagcggaggagcggcaacgaggtgctgtggcagctgccgccgccgacgacgcctccccgcgccgcggtgttcgtggccccggggtgcaccatccgcgccaccgacttcttcgacgcctcgccggggtgcccgcgctgcgcggggctccccgaggagcgccgcttcacgcgcgaggcgctccgccgcgggtacgccgtgctcgcggtgtccagccgcgcggagtgctggtccctcgacaccggggacgggggcgagctcgccgccgtggagtccatcatcgagtggtgggtcaaggagaggcaccccaaccagctcgccggcctcccgctcgtcgggatcggcgcctcttcaggcgggtacttcctctccgcgctggcggcgagggtcaggttcagcagcgtcgcaatcatgatcgccgagggcgtgttcgccacgatggaggagatcccggcgaggtacccgccggcgctgttcgtgcaaatgcccaaggacggcgagagggcgcgggaggtggcggcgagcatgggcaagctcagagggagccgcgtcagcgtgcgggagatccaatgcggcgagttcgccgtgagcgcccagttcttggcggcgaggatacccgggttgaccctcgccgtcgccgatgggctggtcgatgtgcttcgccggaaggggttcgtggatgagaaggggtttctgaagaatgacgggaggagcacgccgtggaagaaggcggcggaggaggcgaagatcttgccggaggaattccggctggagaggcatgtcacggaggagctgaatcttgcatatgcgtaccatgagtttaccagcctcaagaatggggaaatcttcgactggtttgagtcgcatatggatcataagagctgaaagtgttctagtggcaatgctactgaaactgatttgaagcgagcaattcgatggtggatccagctgatgcttctgattttgaggaatggaatgcacaatcattgattcaagagagatgggaagatggaggaaaacctcgtaaggcttcttctcgcagtttaccgttcacaatgcccacttgtagtttctaatacaattacgttccattcttccattgttgttgttgatgtaacaggcgttttattaccattgtatcttgtaacagaggaattacttcaatccacagaaaaatgataaagatgccgaac

SEQ ID NO: 8135 - DNA, 1609 bp, Oryza sativa
  ref <308>: DATABASE ACCESSION NUMBER: AK105483
  ref <309>: DATABASE ENTRY DATE: 2002-08-28
actgcctgtgcactcggcgccctctcgtcgtatatgggggaaggatccgacggcccagcgcgacgcccgcagtgttctctccctccccacctcgatctctctctctcgcttcgtggctcttctctcctgcgactgcgagaggaatctcccactcagtcccagattgtttctgtgcggcgacagcgtcgctgcgtagcttctgatatctttgccgccgctgtgtttggcgccattgacgcagccgcatccactcctcgaccagacaagggaggcctttctctctgtgctatctccaaaggcttctgagtcgattcagaggcagagctcgaaaccgaaagggcggcgaaggtgaagccgaccggcgggctgcaaattgcgctcgttcgctcaccggcgacgtggaggagaaggcgccggagagagaggaagaggaggcggagcaacccggtcagcgcgcgcgtaggtggtttgggtacgcacactgtttacacggcgagcaaactcggaggagagagagagctgtggctaacgtagctatctgggggccgtcagttacctttcgatacacaaggtgagattgtggggggagcgattgactactgattgatccgtctcgtcgtcgtcgatcgaggagagggaggcagatagggagagggggtcagagaagatgctggcatgcatcgcgtgctcctccaaggaaggcggggaggacgggtcccgtggcgcggccacgcctcacggcagagatgccgtcaagtccctcacctcacagctcaaggacatggtgctcaagttctccggctccaacaagcatcagcactacaaggcggcgacggccggtagcccttcgttcaggagcaggagctaccgccgtccgtacccgggcttcatcgatgactccgcgttcatgacgacgaccaggcctggaggtgaggcctacatgtacacgagagcggcgccgccgccgcccgtccgggccgcgtcgacgtcgatggcgacatgggacatgaccaggagcaagagcaaccgagggtggcagcaggatgccggcaggagccccggcggcacgacgtggatacagagcatcgaggaggaggccggcgccgacgacgtcaccgtcgtggaggatgccgtgccgagggagtggacggcgcagatggagcccggcgtccagatcaccttcgtcacgctccccggcggtggcaacgacctcaagcgcatccggttcagccgcgagaggtttggtgaggacagggcgaaggtttggtgggagcacaacagagacagaatacaagcacagtatctgtaacaaggcatgcatctatgcatgagtcgagcagatcaagagaaaaagggagatagattagggagaggtgataccgctgttagttgctgatcggttatccttgttacagtgcaaggtaaaacaaaatagtgaaagttggtagggataggagtgaaatgtatctttgatgctgtgtccctctttgtgtagacaacatatataacgtggtgatgtgttctcacctggttgctgcttaaatttttcttgtaacgcaaatcttcatattcgttggttcaatttattcgtaagcttgtcaaatccttt

SEQ ID NO: 8136 - DNA, 1473 bp, Oryza sativa
  ref <308>: DATABASE ACCESSION NUMBER: AK105484
  ref <309>: DATABASE ENTRY DATE: 2002-08-28
gaaaacagaaaggaaaccgagaaagagagagagagagagagaggtagggagggaagaagagtcactccacactccacactctcatcccctggtccctttcttggatcatgagaaaccgcgcaacaaaattgcaattctaggcagcatttggaccggggacttggctacgtggtgtttggccatggatcgcagcgtggaattaagaccggcgaggactcagcgacggaggcacccgcgtcattcctacgcttctgtgcccgtcgtcttctcgcagtgagagagagagagagatcgaccaggcgttcactgaattttactagaactcggcatgaagcgacccggcggtgccggcggcggcggaggcagcccatcgctcgtcacgatggctaattctagtgatgatggatatggaggggttgggatggaggcggagggggacgtggaggaggagatgatggcgtgcggcggcggcggggagaagaagcggcggctgagcgtggagcaggttcgcgcgctggagcggagcttcgaggtggagaacaagcttgagcctgagcggaaggcgcggctggcgcgcgacctcggcctgcagccgcgccaggtcgccgtctggttccagaaccgccgcgcgcggtggaagaccaagcagctcgagcgcgactacgccgcgctccgccattcctacgactccctgcgcctcgatcacgacgcgctccgccgcgacaaggacgccctcctcgccgagatcaaggagctgaaggcgaagctcggggacgaggaggcggcggcgagcttcacgtcggtgaaggaggagccggcggcctccgacgggccaccggcggcgggatttgggtcgtccgacagcgactcaagcgcggtgctgaacgacgtggacgcggccggcgccgcgcccgcggcgacggacgcgctggctccggaggcgtgcacgtttctcggcgcgccgcccgccgcgggcgcgggcgcgggcgcagcgacggcggcgagccacgaggaggtgttcttccacggcaatttcctcaaggtggaggaggacgagacggggttcctcgacgacgacgagccgtgcggcgggttcttcgccgacgatcagcccccgccgctgtcgtcgtggtgggccgagcccacggagcactggaactgaagcaaatccggcgtaaccgcagccgagagagagagttggaaaacactatgcctgggggaataaagaattctgcaggaaagcagggtcttatctgcaattttgtaaaaaaaatggacctctacgtacttctctagtctcttttgccaattctcgcgcacattagctgtagcactgcagtgtagtaaaatcctactactccattacctctccaatttctagctctcacttccctacttaaactcatctgagctctaatgtaagcatatgccatccaaaatggaccataaatatgtcactagcagtaggatggt

SEQ ID NO: 8137 - DNA, 1775 bp, Oryza sativa
  ref <308>: DATABASE ACCESSION NUMBER: AK105485
  ref <309>: DATABASE ENTRY DATE: 2002-08-28
ctcgtctcgtgacttcactcgactcgtctctccccaatcccaccgactaggcctaagacggcggcggcgggagcttccccatcaaccggtgatccgtcgacgacagagggtggaaggcttacccgccttcgatcaaggctgctagggctggagacgcctgccgctgaagacgtcgggagagtgggggggccgtctcggaagaagcgcaagagggtgcctccggcggcggtggaggaggcagcggcggcaggagggggtggagtccggcggtcgcctcgtgtcttcccgacgtaccccacgtctggcgaagcgagtgatgttaatcgttggattttggagatggagagactctccaaaatcccacttcctccgggtactgtgattccttgcactcgtaggaggaagccaaaagacatttacaccgccagggacgttgcaagcacgccggacaagctcatgatcaggaaggctgcacgctcggttgttgccattgagaccacctattctgatgggaaaatcattgctgtattttctggcatcgttgtcagttggaatgagacaactaggtctgcaacaattgtaacttgttctgaagctgtgtgcgatgatggtgcattgatcgaccccaaacccaaggtgcttgtgcacttgccaaacaataccattctagatggacagttgctgtttttcaatgaccactaccgcattatgttgttggaggtcgtgtcagacactccattgcagcctgccaattttggttctaccccaaaatttggacaagatgtgtttgctttgtcaagggattatgaatcatcaatgcacgctaggcgtggcacagtcttgtggcaggaaccaccaaacgttttggagtacatgtactactgtctgtctctcagttgtcaactagccccgtgtggcagtggaggatcggtgattgaccagcacggtgatgttgttggaatggcaattggtgctcctccgaatcctgatattcttcccatttcaattgtgcaaacatgcattgaaatgtggacaaagttcagtcgtattgctcgtccagtgcttaatatggagttaagagcttttgagctaatagaagtttcccatcaagaggagatagaacttgatcacaatattaatgatggcttcatcgtagctgtggtttatgatgattctactgctgtgaggctaggcatttctcagggagacataattctttcctacaatggattgcacgatttcactctacacaagcttgaagagttccttctctctcttggctgggaattacttgcaagtggcgatccgagttggaatgtaggtttagagcttgtggtatatgatgcagttagacatgctactagatctattacctatccattggagttttctgatgcttctgagcgggttcttcctccgtgaggtattatggataaaagagtctgtcaagcgatgtgaccaactgctactatgcctgtgcttgtttttttggctgtggtaaggaatttgaaatgtcagctaatgtccttttgattgaccatatctagtactctggtaggtccgtgacttcgtaaattttttggtgagatctgtaaggatattgtgatgcagccttttctttggctgtggtagatattaggtactcttcttatctagtggggttgtggcatagtaaattttttggtgagaactgaaacagaaatggatatattgtgaagttggtggctaggattacagaatcaaaaggggttgtggcatagtaaatttttggtgag

SEQ ID NO: 8138 - DNA, 1605 bp, Oryza sativa
  ref <308>: DATABASE ACCESSION NUMBER: AK105486
  ref <309>: DATABASE ENTRY DATE: 2002-08-28
gtgatcggatcccctccaccccgcgcgcgccatgggcaagaagcacgccgccgccggcagcggcggcgggtggctcgccgccgtcaggaaggtcttccgcccctccaaggacgccgccgacaagaagggtggcggcggcggcgatagggaggaggaggcggcggcggaggctgcgccggaggtccttctgctggagcatttcccggcgggcgggacgtcgccgtcggcggaggggacgggcaatgatcagggcggcacggtggtggggaaaggggagggtgaggaggaggacggcgaggacgggtacggcgaggtggagcgcgcgagggcgctggcggcagcggcggaggcggcggtggcggcggccgaggccgcggcgagggtggtgaggatgtcggcgctccggcgcgcgtcgcgggaggagcgcgccgccgtgcgcatccaggcattctaccgcggctacctggcgcgtcgagccctgcgcgcgctccgcgggctggtgcggctgcaggcgctggtgcgcggtcaccaggtgcggcgccaggtccacctcaccatgcgctgcatgcaggcgctcgtccgcgcccaggcccgcgtccgcgcccgccgcctcatcaccgaccacatccacgccggcgtcgccccgctccgcctcccgccccttcctcccgccaccgccgccgccacctacagctcccggcgacgggaaggcggatactcgtggcatcctctccgcaacaattcgtaccacgctcagctcggcgagcgagacgagagcgacgacgacgtcgacggcgacggcggcaaggttggcgagcacgcgcggcagcagcagcagcggcgacgaggcaacgacgtcaggagcaggagccctttccggagctgggacggcagcagccgcaccccggaggaagacagggccgagggcgtgcgccggcacgacgccgccgctcgccgcgagcgcgcgcgcgcctacgcctacggctaccagcagagacaatggcaggagaaggccggcggcttccaatggctggacagatggatggcagcgcaagcgcagcagcacgcgccggagcccgacaagagccgccgcagagccgccctgacggccgccgccgacggcaccaccatgcccgagaggacggtcgagatggacacgacgtcgtaccggagcccgctcaactcgcactccgccgccgtgcagggccggccgccggctgtcccaggttacatggcggcgacgcaggcggcgcgcgccagggcgcgcacggcgccgccggccaccccggcgcacgccaggagccggtccggcgccgttctcgccggggacacgtcgagctcggggcagagcggcagcggcagcggcggcggcggcgcgcatgtacaaaaaccgtgcgcggtgtacagcccggaatcgagaggcaccggcgactggacgccgccacggctcgccgtcagcagccgcgccaccaggttggtgtacgcttgattcggcgtggcgcgcccatccgcgaaacacaaaatctgatgggatcgtcagggttgtaacttgtgctttgtgtacttcccaaaccatggcagattttggattgctttcttgttgtt

SEQ ID NO: 8139 - DNA, 1737 bp, Oryza sativa
  ref <308>: DATABASE ACCESSION NUMBER: AK105487
  ref <309>: DATABASE ENTRY DATE: 2002-08-28
agtgcaacacacacctctagcttctagctagcttgcttctccgagcatggccgccaccaccaccaccatgtcctcatccatggcggcgtcgctggtgacgtcgctgcgctccctctcggcacacgccctagtgccactcgtcgcgtcggcgctcctcttcgtggtggccgtcgtgctgcggcggcggcggcggccggtgtacctgctgaactacagctgccacctcccggacgtggaccggaaggtgaacctggaggtgtgcgagtacttcggccagcgctgccgccactactccgacgacaccgccgacttcatgcggctcatctaccgcaagtccggcctcggccaggagacgtacgcgccgcccttcatcttctccggcgagttccagaagacgcaggcgttcgcggtgcaggaggcggaggaggggctgtttgccacggtggcgcacctgctggcgaagtccgacgtgcgcccgcgcgacgtcgggttcgtcgtcgtcgcctgctccatgttctcgccggcgccgtcgctggcgtcgatgatcgtgcggcggttcgggatgccgccggggacgaggacgtacagcctcgccgggatggggtgcagcgccggcatggtggggatcgacatggcggcgagggcgctgcgggtgtcgcggcggggcgggtacgcgctggtggtggtgacggagaacatgagcctgaactggtacttcggcgagaacaagcacatgctggtgacaaactgcatcttccgggtgggcagcgcggcggcgctggtgaccgacgtggcggcgcggcgcggcgacgccaagtacgagctggtgcgcacgctgcggacgcaccacggcggcgacgacgcggcgtacaacgccgccgtgcagatggaggacgaggaggggaacgtcggcgtcgcgctcaccaaggacctcgtccgcgtcgccggcgcgggcctccgccagcacatcgccacgctcgcgccgcacgtcctccccgtctgcgagctcctcaggtacgtgtggcgggtggcgcgcgcatatgtcgccgggaacccaaaggccgtggcggcgattgtgccagatttccaacgcgcgttcgagcacatgtgcatccactccggcgggaaggcggtgattgacgcggtggtgaagctgatggcgtttgggccacaggtcgtagagccggcgcgcgccacactgcataggttcggcaacacgtcgagcagcctcgtcttctacgagctcgcctactttgaggccaagcgtcgcgtccgtgccggtgaccgcctctggatgcttgccttcggcaccggcttcaaggcttgcagtaacgtctggcgtgcgctccgtgactctgcacccgatgccgacaacccctggaatgcatgcgcccaccgctaccctgctgcgctgccaccgccttcaacgcgtaggtcgagtggcggtgcgcccgcaatggattttacacacttgaaaaatgataagttgccttaagttaccattttgaaaataaaaaatgaaaataaactttagtattctaaaaagttgggttgagtttttatattccatcaagtaacatgtattttttttctattttcttcgtacttcctcaatttttttaaaaaaagttaaatgatatatatttgtgatcgaacggattaatccactagtgttattgttctttatctacatgtatgtatctatttattatgtaaagttatatattcgttctggtc

SEQ ID NO: 8140 - DNA, 1535 bp, Oryza sativa
  ref <308>: DATABASE ACCESSION NUMBER: AK105488
  ref <309>: DATABASE ENTRY DATE: 2002-08-28
acctagttggcagtaaaaaaagcgccgctacctacacacacaaccgctctgcacaaggggccatggacaacaagccggcgcaagaacgccgcgagacgtgggtcccgggcgccgtcatcgtcggcgcgggcccgtcggggctcgccgcggcggcgtgcctcgcggcgcggggcgttccggcgacggtgcttgagcggtccgactcgctggcgtccacgtggcgccaccgcatgtacgaccgcctcgctctccacctgcccaagcgcttctgcgagctgccgctcctcccgttcccggaggagtacccgacgtacccgtccaaggaccagttcgtggcgtacatggaggcgtacgccgcggcggcgggcgtcgcgccgcgcttcggcgccaccgtcgaggaggccgcgttcgacgcggccgtcggcgcatggagggtgcgtctcgacggcggggaggtgctcatggcgcggtggctcgtcgtcgcgacgggggagaacgccgagccgcgggtgccggactttcccggcatgcagaagttcgccgggtgtgccatgcatacttccgagtacaagtccggcgagcagtttgccggtaagaaggtgttggtcgtgggatgcgggaattctggcatggaagtgagcttggatttgtgccggcatggcgcgaagccctccatggtggtgcgcaacacggtgcatgtcctaccaagggaaatgttcggtctatccacgttcggcatcgccatggcgctgctgcgatggctaccggttcagctcgtcgaccggttccttctcacggcggctcacctcatcctcggtaacacggggcagttcggcctaaggcggcccaaaacagggcccatcgagctcaagaacctcaccggcaggacacccgtactggacgttgggacgctagaccacatcaaatccggcaaaattaaggtagtgggagcagtgaaggagatgacgaggcaaggggtcaggttcacggatggcaaggaggagcaattcgacacaataatcctcgccacaggctacaggagcaacgtgccatcttggctcaaggtaaagcagagtgtgactcactcttgttcgttttatttttctttctgtccgcactgcactatactactactagtgatatatatctcgagatgatacggattatatggtcaactgtcaagcccaaggatgttaattatatgtctatatgtacgtgtgctttatgtgttgtaggatgccggtgtcttgttcacgagggagggcatttccaaggtccccttccctaacagctggagagggcggaatggtctctacaccgtcggattcactcagcgggggctcctcggcacgtcatcggacgccctcaacgtcgccaaagacatacattgccaatggagagaaagggaccgatctgctattaatgtacttgaaataagcaactcttccttttgatttgactggaaatgtacagtgttttgattaggaatattgtattgtgtgcatataacaccatgttctatctcccttttcaac

SEQ ID NO: 8141 - DNA, 1640 bp, Oryza sativa
  ref <308>: DATABASE ACCESSION NUMBER: AK105489
  ref <309>: DATABASE ENTRY DATE: 2002-08-28
gggtgagagtacagatggggagtgcagtgggtctcttgctcaggagccaagtgacaagcagttaaaaattgcacgtgctagtgctgctgctaggggaattaaaagtgtggatgagagctacttcgggtcgtatagttcatttggcatccatagagagatgcttggtgacaaagtaagaacagaagcttacagagatgcccttttaggcaatcctagcctcatgaatggtgcaactgtgctcgatgttggttgtggcacgggaattctaagtctttttgcagctaaggctggtgcttctagagttattgctgttgacgggagtgcaaagatggtttctgtcgctactgaaattgcaaaaagtaatggttttctgtacgatgaaaatatggagatgcaacaaaagcgagatactcaagtgataactgttgttcataccaaggctgaagagctaaaccataaaatacaagttccatcgaataaatttgatgttttggtgagcgaatggatgggatattgcctactctatgaatccatgctcagttcagttctatatgcacgcgatcattttctaaaacctggaggtgctattctcccagatactgcaacaatttttggtgctggatttgggaaaggtggaacaagcttgccattttgggaaaatgtgtatggctttgatatgtcatgtattggcaaagaagtgacagggaattcagctagatttcctgttgttgatatattggcttctgaagatattgtgacagagacagctgttctcaattcctttgatctggcaactatgaaggaaaatgaaatggattttacttcaagctttgagctgaggctcagtgaaagtggtgtatcacaatctggagtaacctggtgctatggcattatattatggtttgacactggctttacgaaccgattctgcaaggagaagccagtcaacctctccacctctcctttctccacaccgactcactggtctcaaactatcttcacctttgaagagcccatcgcaatggcaaaggaggaatcagccgttgtctcatctgcgtcagttggcacagatgagtgcccagctgtgatgatcagatcccgcatcagcattgtgagggcctctgagcaccgcagcatagacatatcgattgaaactacaggaatcagctcagatggcaggaagcgtagctggcctgttcagatcttcaacctgtgagcaaggagccaaggatacctttgggtataaattttgtttcgtgctttgctcctcactggttttgagcaaggatactacccacagcaagtcttagcttttgattgggtcctcaaatctcaagttctgtacgctgaaacagaacggcatccccactgaagttttgtgcaatggtgagcctgaaaacaggccagattgaagcgctgtggaatggtcagggtgaaaaagttcatgggatcgagactgagttgcagtttttttttggctatttctgcacgtgaactgaaagatatatcttgtagtgatgtttgagatatgtatcagtattttacaatgatatcagaattcagattcatttggataccagttcacttcagtttctgtaagatgctcggttgatgtgaacctgaagatcgcactatcttct

SEQ ID NO: 8142 - DNA, 1412 bp, Oryza sativa
  ref <308>: DATABASE ACCESSION NUMBER: AK105490
  ref <309>: DATABASE ENTRY DATE: 2002-08-28
tgtgcaaaaataacttttgctttaggtgcatcttactggtcagatccttggtcatgcatatctgttccagcttcaaccacagcctagcggctgtctcctccttaagcacctcctgcaaaatattattagatagatgaagatgaatatatgacatagccttacgatcccttttcttctcatcgttggaccaatcctgtgtcctcttgtcaaatccagaaagcgcatcatcgaggtcttggtgtgcaagaacggctcgcatcttcacttgccaatgtgagaatcttgtgtctcggtccaggagcggtagatcatacttcaaactcgccatgagaattaatcctaaatttgcaataaagaaattagggtaaacctagcaaaaacgcgaacctctaggtgcactgtctgtgtgcatgtagcgtagatctgaaacttcctggtacacaagcttgtgtgcgtgtagcaattcaacgtgaataaaaatcacgtgaacaggcaggcaggcggctgccctattttctttttctcctcgggacgcgtgctgctggatggtatggacgctgctcctcctcctggtttctctctgcttcgcctgggcggctgctgctgctttgatcttctcgctcaggcgtgggacgaggccgactcggagtcgacgggtagcgtgcagaacagatttgattcggcggaacgacgaacacgacgacacgtgctgccgattagatcgatttcttcgaacggaaaaacaccggtggctgggaatcactagttctatctccaatactctgataccacttattataaatatagatacacaacagagacacgaattttacgtgaaaaacccttacggagaaaaccacatgcgccgaccgacaataaccactataaagatgttgattacaaacgtagaggaatcacaatgggaacgtcacccttcccgtacggcttacgaaagtatatatagaggataaaagaaagacacctaatagaaactcctactaaaaaactaatccgaatatattatgggcccaaaattcggatcacatgtttaacattttaacccacgtcttcctttaacagacgcccgatttctcttcgtcgcctccgcactacatcgcctgccgctcgcctcctctgcttcgtcgcttatcccctcagccgtcacctccgccacggtcgtcgacatcttcttcccgagcgttgaggaaaggggttcacgctgctacaatgccgagaccaagcggagatgtggtttgaggccagcagagctgtacagcaagttttctctattgttgtctttcaatctcttctcccttccgatttgattttgattgtgatgagcaaactattttgacttctactgcccatttgattttgattgcaatgaacgagtaaggctattttgcccatgc

SEQ ID NO: 8143 - DNA, 1473 bp, Oryza sativa
  ref <308>: DATABASE ACCESSION NUMBER: AK105491
  ref <309>: DATABASE ENTRY DATE: 2002-08-28
gcaacaacaacttcaagccatctcctcttcattctctcctagctttctcccaacttccagccattgctctcatagctgatccaccaaggagctagaagtaattccagggttcttaattgcggcaatggcgatcccggtcatcgacttctccaagctcgacggcgatgagagcgaggccaccctggcggagctcgctgcggggtttgaggagtgggggttcttccagctggtgaacactggcatccctgatgatctgctggaaagggtgaagaaggtgtgcagtgacatctacaagctgcgcgaggatgggttcaaagaatccaaccccgcagtgaaggctctcgcccgcctggtagaccaggaaggcgagggcctcgcaatgaagaaaatcgaggacatggactgggaggacgtcttcaccctccaggacgacctgccctggccctccaaccctccatccttcaaggagacgatgatggagtacaggagggagctgaagaagctggcagagaagctgctgggagtgatggaggagcttcttggtctggaggaagggcacatcaggaaggccttcaccaacgacggcgacttcgagcccttctacggcaccaaggtgagccactacccgccgtgcccgcggccggagctcgtcgacggcctccgcgcccacaccgacgccggcggcctcatcctcctcttccaggacgaccgcttcggcggcctccagatgatccccaaccgcggcggcgacggccggtggatcgacgtccagcccgtcgagaacgccatcgtcgtcaacaccggggaccagatcgaggtgcttagcaatggccgcttcaagagcgcatggcacagaatcctggccacccgggacggcaatcgccggagcatcgcctccttctacaacccggcgcgcatggccaacattgctccggcgatccccgccgccgccgccgactacccgagcttcaagttcggcgactacatggaggtgtacgtgaagcagaagttccaggccaaggagcccaggttcgcagccctggcgaacaagtgattcaaattgatgggatgaaattgagctttgcagcaatctgaagtctgaacctgctgcaaagctctctcagccttaagctacatatacagttcgaataagcgtgtgattacaatacggatttgtaagatggataggttgtctaagtatgtgctttgcaatacatatgtgttaattactagtgtctttgcagctatcacaaccatgtaatcattccaatttgtatggtggcatgtaaggttgtcttgtgctgtggtcaacagatgccagagtagtttgtagctagaattaatggcatccgtggggttttttaaattttattcgtttctgtttgaatgtcagtgtgtttgctcaggtggtgtgtacttgtaaattattgagatatttgaggaggtcctgtgtatgaaatatatttttggact

SEQ ID NO: 8144 - DNA, 1753 bp, Oryza sativa
  ref <308>: DATABASE ACCESSION NUMBER: AK105492
  ref <309>: DATABASE ENTRY DATE: 2002-08-28
aatttttctcacagttatacccctttttttccggatcgcaggtaagcgacgggcggtcgagcggcgatcgcaggtcggcggcgcgcggccgccggcttggtcttcctcagcgcgtcgggcgcaggcggcggggtccctccagcttcctccgatggcgggcgacagtgactgcctgttttagcggcgtgcgtcgggctcggcggggccatccactacccggatccggcggcggcggccgtccctcgcccggccccgcacagatccactaggggctgcgggaggagagcccaggggcagtctcggcgatggctggcggacgacggtcgtgcaccgggtggagtccggtggtgggcggcgcagccgctcacttctttctgcctgctgccgtcatcgtggttgtcctccaccagctcgccgtgtggctgccgccttctccccacaccgccgccgatggacgtcgactccgactcggccgccgggggcaagcccacccagatggacctcggggactaggtattccacaatctgattatcctttcttcctcctccctattcatttcttttccctttttgatttgtgcccaggaactctagttcgtcccaatctcaatttcatcattgagttctcccaggagctttttctacttgagatttagctcttgttctgaaactttgggatcaacagagcaatttaagtggaattgttctcgtgattttgatgccagcctatctaaaatacattttgttttctgagcagtacagatgcatgagcagtacatacttctgcggcagtaaacgcagatatgtccatgatgaattttcgggctctgattcattgatagtgctagtaatatcagaacttatttgatggactagctgttcacatctgatgcatttgttgcatttcctggccttttgtgttctcaatgaacaaatatgtttgaatggattcctcttatacatgtgtcctcaatgattttatctgtagatttttaggaaaaaactgttgttaggctagtagttttctgaaattttctgcttcaacagaggagctcgaatgatgcctgaaatgctgaacttctgtttttttagtactgccacatgagcactgaaattgtctagttcaatagagcattgttgatcggttagtatttttctgaaataccctagttcttgtagagcagcacaaatgaattttctttgatccttcactgaatcagttagccatatgatcttaatccttcactgaatcagttagccacatccttcactgaatctgtagagctgttttttgtcatctcatttgtgtggttttgttagtactttaattaaatcgaagtcagggcatattctctaacaattgtgcctagatgttcctttgcgctgaacgtattgttgttgcttaaacatcaaggtattccttagtctcctttgctctctgactatacatattccagataaatttatagctgctatggcacttgtgaagagtgtcaattggtggtaatatcacgggctgttatctgaacggaatagctgatggtgattctgatactatcagagaccatatggacaccgtcgctcaccgaacactgccggtcgccacatccccatttctctgctgccacagtcgctgcttactgaatgctggaatgtgtgttaattttttttattcttgaattgttgtggtgatgtgtctgtaaaattatcacttctgtgcagcttcgttgtgatttaatgtgcatttcagtgt

SEQ ID NO: 8145 - DNA, 1319 bp, Oryza sativa
  ref <308>: DATABASE ACCESSION NUMBER: AK105493
  ref <309>: DATABASE ENTRY DATE: 2002-08-28
tattcttaccccgacgcggcgtctcctcccctctcctctccccttccctccatcgcatctcctcccgctccttcgatcccaaatcggccgccgccgccgctccgccatgtccccctcccgccccgacgaggcggaccccgccgccgacttcggctcccaccccaccgaccaagagctcgtcaccaaatacctacgccgccacgtcgactccggcgggaacccgtggcggtacgtccacgaggccgacgtgtacgccgccgatcccgacgacctcaccggcaagtactccccggccgtcgccagcgacgggtccagggcgtggtacttcttcaccaccgtgcggtccaagagcaccggcgggcagaggagggcgcgggccgtgggcgacggcgggtgctggcactccgaggccggcgccaaggacgtcgtcggaggcatccgcagcccccgcccgatagggcggcgccagttcttctcgttcgtcaacaaggagggcccccggcgggtgcggtcggggtggatcatggtcgagatcggcctcaaatacgcccagcagaacgcctcctccgacgagcttgttctgtgtaaggtgtaccggagcccgcgggcgccaccggctgccgccgccgccaacaaatccatggccgccccacctcccaccgccacgaaatccaagacggaggaggctacaccacctcccgatgacgtgaaaccggtggtggcggctgcgcagactcccgacaccaaaatactcagggcggcgaaggaggcggccgcgactggatgcaagaggaaggctgacgtgaagagctctggtgcaagaaggggcaagcggctctgctcccgctgccgggcggagacatcggaatcggacagcgagacggcggtacttgacaggtcgccgtccatcgaagacgaaacggcggactcttcagaaatccatggaagcagtgatggcaaattcatcaggttcttgtgatttagttcgatctggagccccgagggtgctagcctagattggaatcagcgtgtaccaacaaaatggatagagctgctgtagttctcattttgagttcttaagccctagtataatgcctaccccaaatcatgcgttacccgcaaatttcagcatgatacagacaaggtaagcatttattttcagtatcagttgcaccgtatggtgcacttgtagatagaagttactacagcatggagaaatttggagattaacatatagacattagacattttctttcatgtaatatagtagtagaacacacaagaggttcaagcttgaatgattagaaaagcttcttgcc

SEQ ID NO: 8146 - DNA, 1990 bp, Oryza sativa
  ref <308>: DATABASE ACCESSION NUMBER: AK105494
  ref <309>: DATABASE ENTRY DATE: 2002-08-28
caaagttgactatcgtacggctgtggcgatccctcagaagttgtcccagctcaagttagtcaaggatatcacaccgcatacagccacccaaaagcctgccacgattgcggcgaaggccattcaccagaagaagcggaaagctaacagtgaccctggcgagagcccactggcacggcataagccgactatcaatgacgtgccacccagcccttttgaaagatcatcagtaagcagcattccgcatcacttcagcaaagctatgctgaccgacaatcttaggtcactcacaaagcttcacttggctgatgaactgcctcgcacattaacaacgtcgaccaagaacgatgatatgcgcttcttaacccgatctgagctgatggagaacctgagattccttgcaaagaaccacaacttttcaaatgttgccacgaatgatggtaactagaactctagaagaatttccaggaggaatggcatagatgatgatatgcacctctgctgcctgtaagtttctggatgacgaattgaggacaagaactcgtggcgggaacttttgtgggtgcccgtgccatttgcagcaactctggattgttcgggtctttgggggaggattttccactgttacaccataccatcagatgtggggtgatgacatcagcatgtcgaacgaaatcctggaaaaaaaactctatatgcaactctggattgttcggagaggattttccactgttacaccataccatcaaatgtggggtgatgactgatgacatcagcatgtgcaacgaaatcctggaaaagaactctatatggtgtgtataatttataatatgctgaaggtaatcataactcttgtttataaatgcatggctctgttgacctctcctctcataagtacacaaaattttatgcatttttatttggcagtacttgaggttttctttttctgtttaggtttaattatttatttgttatttatgttaatttcttaatttccagtttgctaaattgatacaagctcagaagctcatcatgccatgcaagatctgattgaatgcttctgatactcattcttcaatcaaactgttcatagttcatacattaaatatctgcgtgtttgctttaggaattagcagagacaattcggctaatgaattgatgcacaacgagacctcgtgaacatgtatgattgtacaagttgttttccctaatccttctattttcataaatatctgttaaccttccataaaaaaaagaggcataaacttttgtgccatcttattaggaacatctcagtgcttcagtgctatggaagagaaagcatggaaattcgttactcctttctaatcaaatatattttgtggaatacacaataacatattaacttttctgtttgcatgttgatcaaggaaaaatcatctaaccaaactccaaatagaacaacataatttattttagaacattgctattagttcgtaagcagctttcttatgtcaatttttgaaagcgtttgcgtcattcaactacccattggcacaacatagttaaagatgctcatctgattttattgataaaaatgacaactgtccccgctgcgtgcagagatgcagagaataggtgtctgacaaaattcaagtgccaaaggctcagcctggctcaggcgaaatccgccatcatttgcagcctggtttctgcagagccctaaaactgtcgctgactcacctacttgcttggcaacacctctagtttgatgtacagaagtaactctttttgacaaaccagcaaattgatcgtgtatgtacggtcatattctgctccatttgatgccaccaaggtcaaccgttaattttcgtaaatctgaagttctgaactttgtcatcatgtctcttggtgtgtgaatgcagcaggaattagaattccatgccatgatgctcttgccaagctgaataatgtgtgtattcaagacttcaaggttaatgcatgaatgtttggt

SEQ ID NO: 8147 - DNA, 1564 bp, Oryza sativa
  ref <308>: DATABASE ACCESSION NUMBER: AK105495
  ref <309>: DATABASE ENTRY DATE: 2002-08-28
ctcctagtgccgatcgatggcgcttcttaataatctctgcaattttcttgtcaagacgcagtactacaacggcaggtgcttgattcccgccatctctatcctcctactcgtcgctgtcatcgccgtctccgacacatacttccctttcccggtggttatgccgtgaacactgtccgcctggctgtcctactcttccttctccacctcctccggtggccggaaggctgacggcgaggcctgcgacatatttagaggcgaatgggtgccagaccctgatgcaccctactacaccaacgacacctgctcgttcatccacgagcactatgactgtatgaagtacggcaagctggaccttggcttcgtgcagtggcggtggcgtcccgacggttgtgatctcccccgtctcgacccgttgcgcttcctctctgccatgaggggcaagaccttggccttcattggggattcccttgccaagaaccacatgaactccctcatctgtctcctgaccagggtaaaaagtaaaaaacgtgccggatttgctacagtactagcttcgatctgaatcattgatcgcttgatcggacggtcagaaatgggccagcagcaaagggtgtgacgttttattggccggcctgcaggttgccaagccaacgacgagctggccgagcagcgagcacacggtgtaccactacggcggcggctacaacttcaccgtcctcaacttctgggcgccgttcctggtccggagcgagctcgtcgacgccgacgggccggcgcacacgggcctgtggaacctctacctcgacgagcccgccgccgtgtgggcgccgcacgtcccggcgttcgactacgccgtcgtgtcggcgtcgagctggttctaccggccgtcgatgctgtacgaggccggccggctcgtcgggtgccaccactgcctcctccccaacgtcaccgacctcacgctgcggtacgcgctccgcatggccacccgcgccgcgctccgcgccgtggtgagcagcgacggcggcggcgtcaccgccgtgctgcggaccgtgtcgccgtcgcagtacgagggcggggagtggaacaaggacggcaactgcgtccggacgcggccgtaccggcgtggcgagaagacgctgcagggcttcgagctcgacttccacacgctgcaggtggaggagttcgaggcggcgaagagggcggcgagcggcggcggggtgaggatgatgctgatggacacgacggaggcgatgatacggcgggcggacgcgcacccgagcaggtacaggggatggacgcgtcgtaaggaatggatgaaagagtacttcaccatcttcaatgactgcgtgcactggtgtgttcccggcgccattgacgcctggaacgacatgctatcacacatgttgctcactgtcagcgtcaccagatggactcaacacaactaaggaaaatgaaaaggaaaagtggaagaactcgaacaactcaggaagaacagagatgtgtttaggcaatcttttactaggataatcttgctccaacccaacagggttgagccgccgccgcc

SEQ ID NO: 8148 - DNA, 2315 bp, Oryza sativa
  ref <308>: DATABASE ACCESSION NUMBER: AK105496
  ref <309>: DATABASE ENTRY DATE: 2002-08-28
aatcgtagtcagtgatagagaaatatatatgaaggttttcacagggaagttggtctttttcttggccattatcctcttcgaaggatgcttggtcagatctcaaagtgttccatatgactactcagcaaacattgagtgcgtgaaggagccggagaagcctctgtacggcggcggtatcctgaaggagaccgaggctaaggggtatgccagcggcaagaagcttctgtcggagaatagcaagagcgccgctccggtgaagggctccgccctcaaggtcgacctcaagaaggaccaccactacgccttgtccgtgtggctgcagctctccaagggggaaggcgacatcagggccgtgctggtgacccccgacggcaagttcaacaccgccggcatgatcgcggccaagtgcggctgctggaccatgctcaagggcggcgccacctcctacgacgacggcaagggcgacatcttcttcgagaccaacgtgacggcggaggtgatggcggaagggatggcgctgcagcccttcagcttcgacgaatggaagggccatcgcgcggagtccgtcaagaaggagaggatgaagaaggtgaagatcacggtggtgggccccgacggcaagccggtgccggaagcggacgtgagcctggagcgggtggggaaggggttcccgctggggaacgcgatgaccaaggagatcctggacatgccggagtacgagaagtggttcgcggcgcggttccggtacgcgaccctggagaacgagatgaagtggtacagcacggagttccaccagaacgaggaggactacaaggtttcggacaagatggtggagctcgcggagaagcacaacatcacgctgcgcggccacaacgtgttctgggacgaccaggacaagcagatggactgggtggagaagctgggcgtgccggagctcaaggaggccatggcgaagcggctcaaggacatcgtcacccgctacgccggcaaggtgatccactgggacgtcgtcaacgagaacctccacttcaacttcttcgagggcaagctcggcaaggacgcgtcggcggagatcttcagggacgtggccaagctcgacagcaagcccatcctcttcatgaacgagttcaacaccatcgaggagcccaacgacgcggcgccgctgccgaccaagtacgtggccaagctcaagcagatccgcgagttcccgggcaacgccgacctcaagtacggcatcggcctcgagagccacttcgccgcgccgaacatcccctacatgcgtggctccatcgacacgctggcgcaggccaaggtgcccatctggctcaccgaggtggacgtcaagccctgcaagaaccaggtggagtacctggatgaggtgatgcgcgaagggttcgcgcacccggccgtcaagggcatcgtgctctggggggcgtggcacgccaagggatgctacgtcatgtgcttcacagacaacagcttcaagaacctccccgtcggcgacgccatcgacaagctcctcaaggagtggacggccggccacaccggcaagaccgactccaagggcgtcctcgaggtggagatcttccacggcgagtacaatgccaccgtcaagcacaaggagttcaaggagaactgcatgaccctcgacctcgactccaaggcagaggccaaaatcgagctcagatccgataaggtgctcacaccatgggtggaactcaaatatccaaatcgtcatctgggtcttcatcggagtcaggagagcggatgcagttaaattgctatcttgttgagcctctgggagagatctccgtccgtcgtatatatggataggctcaccctttcctgagattagggtgttaaaagaatttagttgcagatatatcatccatgtagctcatgcagtcagaatgcagctgacaaggagacctgaaacataagctaacttttggcaaataacttccggtaaggtaagtaccttgatgttcaaaaggaagaacaacgtttgccttgtcactgcactccttctctgacagctcaagattgaactgaacctgttaaatccacatgttgcaatacagtcaatgttgagaagactagattagttggcagtgaagacagaagagtattttaacttgagtaagaaatgtatagcccaaccttaggcaacagactttggctcacttctgtacttacagaaggagcagaaacaaatctaacatcatttccctcaacatgtaactcctcgtactgaaaatgtaggaataatatttatcagtgtacactcttcatgacgtgaaattcagaatgatttg

SEQ ID NO: 8149 - DNA, 1937 bp, Oryza sativa
  ref <308>: DATABASE ACCESSION NUMBER: AK105497
  ref <309>: DATABASE ENTRY DATE: 2002-08-28
aaaaaaaatcaacccaggacatccagggttgttcaaggcggccgcgcttccacgccccacgcaccgccagccgtgatgaccggcggcctcccgccgcctctccgcccgtccaccgcgccgccgccgccctccgtcacgcgcgcgctgcacgcgatcaacacctgcaccaccgccgccgcgctcgcgcccatccgcggcgccatcctcggggaccgcgcgctcctccgctccaccgccgtcgtctccgccttcttcctcgcctgcggccgtctccgccacctcgacccggcgctctccctcttcgcctgccacccgcgcccccacgtgttcgtcttcaactcgctcctccgctccctcggccgcgcccccgcccgctccccgctcccgctcttccgccacttcctccgatgccgcggcgtccgccccaaccgcttcaccttccctctcctgctcacctccctgtcctccctcgccgacctgagggccgtgcattgccaggtggtcaagtccgggttcgggcccgacctccacgtccgcaacgccctcctcgcgcgctacgcggactgcgaccctgacctggcgcacgccgagcagatgttcgacgaaatgccccgaccggaggttgtcgcgtggaccactatgatcacctcatacaggaaccgaggccgcacctttcacgctctggcgaccttccggcggatgcttgctgctcatgttgcacccaaccgcgttaccatggttgctgctcttggcgcttgcgcggcccattgtgcggtcgacactggcatctggattcacgagtacgtgcagaagcagggatgggagatggatgttgtactgggcacagcgctggtagacatgtatgggaagtgtggaaaagtctcagatggaatgcatgtgttctcaaagatggccaagaggaatgtctatacttggaactctatcattggagcacttgctcttgcacaggatggcaagacggcattgcagtggttctctcggatgcagaatgatggtgtccagccagatgaagtcacacttatttgtgttctttgtgcctgtgcacatgccgggtttgttgacattgggaggaaaatatttaacctggccatacaaggtgagtatgggtttcaacctgggatcaagcactttgggtgcatggttgaccttcttagttgctctggacacctcgatgatgcctttagggttgttgagacaatgccatcacagccaaatgcagtgatatggggcttgctattaagaggctgcagggcccgtggcgactcatggttgagtgagcatgtgacaatgaggctggtggagttggaacctgagaatgcatcgcattatgttctgttatcaaatttgtatgctgagacagggaggtggcaggaagctcaggggatcttgcattggatgaagaagaagggactgaggaaagatgcaggctggagccttcgaatgttagaggacaagtcaaagaagtatactactgatggatgtttgttggagtatgttgagtgaggaacaacattggaaggtaattcaatatataccatgtagagaatcatgcctttgctttccttctgagtttggatgtgatcatgtaagttgattcgggagcaggaattgtagaaaggtgcttctttactaagataacggttttattggtcacagatagattgatgagtgcttttggcacatgcacttcatgagatgtggggtctatacttgggaagcaaaattgataatgctctattaattcaatgccatcattaacaaagagtggttaattttggtggaaatcagacaattccgcaactcccatttcatacaatctatttccattttttgttggaggtaattgactaattgtacaggttatggtccttaggcaaaatgttaatggaaattttgactaagcgatattcttcaac

SEQ ID NO: 8150 - DNA, 1403 bp, Oryza sativa
  ref <308>: DATABASE ACCESSION NUMBER: AK105498
  ref <309>: DATABASE ENTRY DATE: 2002-08-28
atttagatcgtgatagaggaatataacaatcacagaagccatggcaagcagcggcaaggagcaccggcgaggtgttccacgcccaccgccgttgtcgctctacatcgagagggagcaaggtgaggtcatcatggctggtcaggcgctggcgacgacgaggatgctccagcaggtcgccaccagcagcagtggcaagaagaggatactgtccaagcagctgtccatgaaggagacaacccgggaggtcaagtgggagaagcggcgcaggcagatacaccggcagaggagcagcatggcccttcaggatgttgaggaagaagcgagtgccaacatgttcgccgccaccactgacagcgaaatgggctccagcaccgagcgggtgcccaagaggctgaccgatggagacctcgatgagctgaggggatccatggagcttggctttggattcgacgaggagaatggtgggcagaacctctgtgacacgctccctgccctcgacctctacttcgccgtcaaccggcagctctcggagcccaagatgcgtttgtccactagctccttgccatcaccgacatcagcgacgtcgtcctcctctaccctcggtggcacatcgaacccgggtagccccgtcgcaccttcttctttcatggactcgtggaagatttgcagtccaggtgacaaccctcagcttgtgaagacaaggcttaggcactgggctcaagtagtggcctgttcagtgaaacactccagctgatcagtgctgtaacaaccatattctcctcccaaaagccattaacaatacaatgtttatatatatatatatatatatatatatatatatatatatatatatatatatatatatgcatatccctgcatgcattggttagatggcgaaggatgagaaaattaaacttcgatggtataaactgaacgtaaccttttttccctctgatgatgacgcccatggttgtgtttgtatatatacagattttagtatacaaatatgtatgtgttggcaaacattaatgttctacatattgcatatatgtgtcctggttttgcaagaatatttttcatgccaattaatctctggccgatctctaattgatacaaatacagccttcactaacataacatgttggttgatttcagtaaaaccatatggaacagaactacagttacagaaacagaaaccagagactatcttagttgtaccagagtcacaaatgattctatgaggacttcatagaggtagagtgtgcgtgtgtattcataggaatgagtgtgagcgcattgtgagcgcctgtgtttgtattttacttataaaaaaaattgctccaaaatgcatatacattttatgttaatatacttggtgagctttgccacaagagcacttaagc

SEQ ID NO: 8151 - DNA, 1350 bp, Oryza sativa
  ref <308>: DATABASE ACCESSION NUMBER: AK105499
  ref <309>: DATABASE ENTRY DATE: 2002-08-28
aagaaatttccaaaaccccaaacccttgttcccttccccgtctccggttggcgcggcgcggggcaatggcggcggaggacaacccggggtacgccctgcgcgcgacgctggcgggccaccgccgcgccgtgtccgccgtcaagttctcccccgacggccgcctcctcgcgtcggcctccgccgacaagctcctccgcgtctggagcacctccgacctcgccagccccgtcgccgagctcgcgggccacggcgagggcgtctccgacctcgccttctcccccgacggccgcctcatcgcctccgcctccgacgaccgcaccgtccgcatctgggacctcggcgacggcggcggcggcggcggcggcggcgagccccgcctcatgaagacgctctccggccacaccaactacgccttctgcctcgccttcagcccccacggcaacatgctcgcctcgggctccttcgacgagaccgtccgcgtctgggaggtcaggtccgggaggtgcctccgcgtgctccctgcgcactccgagcccgtcacctccgtcgacttcaaccgcgacggcgccatgatcgtctccgggagctacgacggcctctgccgcatttgggactccgccaccggccactgcatcaagaccctcatcgacgacgagagcccgccggtctccttcgccaagttctcgcccaatgggaagttcgtgcttgccgccactcttgatagcaagctgaggctctggaatttctcagctgggaaatttcttaagacatatactggccatgtgaacacaaaatactgcattccagcagcattttcaatcaccaatggcaagtatattgtcagtggctcggaggacaagtgtgtctacatatgggatcttcagtcaagaaagattttgcagaaattggaaggtcatactgacacagtcattgcagtgtcatgccaccccaatgaaaacatgattgcatcgggaggacttgacggcgataagacggtgaaagtatgggtccaaaaggaggaagatcagatggaagtctaagttgaaggacttccttctacattgatcttgccatcttaccatgctcagacatcagtacatcacgtagccctcagacaaagcaacacttcgtccacttcatataatggtagtaaaaaagacataaaaatatgctgccttcctattactaactcggtaaactgtcttgccgtgtcttcctttgccagcttgcggattagcagtgtcatgaattcagataagctgtgtatggttgttcctgaacaccaacagtgctgctttcttttctgtgccatttcattgggcacctaggaatgaacgactcgtctccatt

SEQ ID NO: 8152 - DNA, 1631 bp, Oryza sativa
  ref <308>: DATABASE ACCESSION NUMBER: AK105500
  ref <309>: DATABASE ENTRY DATE: 2002-08-28
aaaattcattccaccctccgcgcccacgatcccttctctctctcttgatcgaaaagcgatggcggcggttccggcgcccgccctcctccctaccacgagcggctgcggcggtgcccttccccctctccccgcgagcggcggcgacggctccctccgacctgtctcgctttcctcgccggcggccgctccctttgtcctgtctcgcctcctcgctccctcctcctctcctcctcgcctccctcccgcggtggcgcgggttgacggcggtcgcgggcgaatccgagggtggtggcggcggctccctccatcccctctagccttcctcctgtggcagatccgccggcggcggcggcctccgcaggcggatcaagcggcggtggctccctccgccccctctcgccaagtcccgcggtcgatccgacggtggtggcggcgttggcggcgtccgcgggtggatccattaacagtggcggtgggcagatccggtagcggcggctccctccgccgcctctcttctccctccggcggcggtggtggtgtcggcggcggccgcggatggacccagtggcggtagcaacggccgagggcagcggtggcaacggccgagggccacggtggcgatggccgagggcggatccggtggcaggcgagtgaagtttgtggtgtatattgttgttcttcttggatgattattttgtgattttgtgatgattgtggttgattttttgggggcaaagattggttaggttttgttcttttccttgcggtgtgtgcatctgattcggttgtgccgattttggaaagtgttttccttatccaattcggattcgggggctgcgaaggcgcaccgccgacggacttgcgacgaacagaaaattacgaatattttaattagttaagattaagatttttattatttgcttttaaattgttaatgacacatgcataaggttttacttataaattatttttttccagcaaatttggaaacttcctccacgcaaagccgtagcgaaattctcacctcaagatggccctcaccgtcggccacctccagccgccactcgccggagccggagccaaaagcgtcgccattcccggcccactcatcccacgccgccacatcctccttgccgacgccgacgtactccatccccgccacccggtggccgaacctgacgcagtcgagcaccccgaagcggcgcgcgtaggcgccgaggtagtccatcacctggcggtggtccgggaacacctccgtcaccgtctccggccacgggaagtcggagtactggtacatgggccgcggagtctgcagcgcggtgccctccagcgtccacgcccacacgccacccacgccggtgtccgcctcgaacaccaccggccggcagccgcgctccagcagttgcttgcacgcggccaggccgctcacgccggcgccgacgatgaccacccgcttcttctccatgatggctagtgggctaggaaagtgcgagctgtgtgagttgtttggagtctgatgagcgaggtggtatttatagttggtcagtgctatacttcctcgaaatatatcttttgaccatgtcatctaatcataatatatataatggataaaaatatttttactgtttttt

SEQ ID NO: 8153 - DNA, 1878 bp, Oryza sativa
  ref <308>: DATABASE ACCESSION NUMBER: AK105501
  ref <309>: DATABASE ENTRY DATE: 2002-08-28
gggcaggggttcggatggcttggctcaaagatttccacatagcgcacttccaaaattttccagatcatctggtacaggtcaaacactgttagctggtcgctatagttcaccatcaggtccatcaggttcattgggctcaagtatcgcaacatatgcaggacaggcaaagacattcaaatttgctgagattgagaaggccacaaacagctttgatgattcaacagtacttggagagggtggcttcggatgtgtctaccagggcacgcttgaagatggaaccagggttgcagtaaaggttctgaagaggtatgatggccaaggcgagagagagttcttggctgaggttgagatgctgggacgcttgcatcaccgaaatttggtcaagttgttaggcatatgtgtagaggagaacgcaagatgtctggtttatgaacttattccgaatggcagtgtagaatcccatttgcatggagtggatcttgagacagcaccactcgattggaatgcccgcatgaagatagccttgggggctgcacgagctcttgcatatttacacgaagattcaagcccttgtgtgattcatcgtgattttaagtcaagcaacatcctattggagcatgatttcacaccgaaagtgtctgatttcggactggccaggactgcaaggggggaggggaaccagcacatctccactcgtgtcatgggaacatttggatatgttgcaccggagtatgccatgacaggacatctccttgtcaagagcgatgtgtacagctatggagtagtgttgcttgagctcctcaccggtagaaagccagtggacatgtctaggcccggggggcaagaaaacctagtttcatgggctcgcccgcttctgaccaatgtggtaagcctacgtcaagctgttgatccacttcttggccctaacgtacccctggacaatgtcgcaaaagcagctgccatcgcatcaatgtgtgtacaacctgaggttgcgcatcgcccgagcatgggtgaagtagtgcaggccttaaaacttgtttgcagtgacggtgatgagggcctcggatcaggaagtttcagccaggaattggcggcacaagctgcagcaatctatgatgtaactggcatggaagctgagagggtgctgttatctgagatgtttggctcaacccctgtcttcactcccgctgcggattcaggttctttccgaaagcagtccagctcaggtccactgatgacaggcaagaacagaaagttctggcagagattgcgaagcctatcaagagggagtatgagtgagcatggtgcctcaccagatttcgagacgcgctcgcagtgtagtaataggtgaggtttttttctgttcccttttcaatcttgcgaagataaatattcagttgaatggaaatagagagttttcaggcctagtttctgtacattactcatgtggagataaaaggctgtatagttcagaaatcaggatagtagcagggcagagcttgagctgtggagtattcaaggatttaatgagatgagctcagatttggttccatactaggtttgtctgcatttggatttgtgatgtcgtctctttttcagcttgtcagtttgagttcatttgtgattttctttgttttctttttggtttgagttatgattagttgtttggtaggaactgttgatgtatagattcagactacatttagaaatgcatttgttgcaatgaagatgataagcttctttttttctggctagttgcagcttctggctgattccacttgtttcagaagaaactgccatgtaaatctgacagaattgcttctgttcttccatacctctaacccagtggatgatgctgctgcatcagcaacttgcgag

SEQ ID NO: 8154 - DNA, 1446 bp, Oryza sativa
  ref <308>: DATABASE ACCESSION NUMBER: AK105502
  ref <309>: DATABASE ENTRY DATE: 2002-08-28
gaaaaagaaaaggaaaggcaaaatggagggggagcagcttcttgtgtttgtcgccggtagcggccggctaagagcaggaggaggagctaacggaggccgccgaggaagacgctggcctcggagcgggaggagctaacggaggccgccgaggaagacgctggcctcggagcggacgggcatccggcggctgcgagctttgcggccggcatatccagcgagggaggcgattgcgacgaatcggccgggaggcgccggatctggtggcttcgtcaccgcagatggccggccgagctcaggacgactcgggcgccatgtcgagagacgtggtcgacagcgagaagcggacctgactcgcgagcatgacgccatcccaccatgctgcaacacaatcaacaccggtccaaagaaacagagaagatacatgcctccatgaggcctgagcaagatacaatgacattccgatacaatgacattccttcacagctttccaattaaaatatctccagattgttgcttcctacatactaaacataagaatgcaatgatagtatgaagaataaaatattaagtcaatttttgatcaatttgtcttacatgcatctccgaatctaatttcccgtgcttatatccgccagtgggtttgaaagcctacaaaaataatctcatttcatcttttaaacttgattgagaaatattttaggttgagaaagattttgtcaagatttgagatccacttacatgtcattgatgtattgtctgtttggggtgcgatcagcaagttcagctagtccctgtaatatctttggcaggaaatttttcatgtgtagagcaaatgctgcctcaatttgttcttctgggaactgtttagtgaaaaaacagtgttagacataaatatgttttcactagtgaaaaaataatggagtaagtattatactaaccctgtttcttgcatgcttcaaaaaattattggcaaaatgaagacaaccttttgcattatcagtatataagggatttttccattgtaatggtttcccggatggttgatagataagaacattattgagttcaggaacaagctgcgcagaacctttccaagcatatgcatatggtcccatactagctcttaaactagcgtgtgaagcatatgctgccatagcttttatattagcctgaagatgtgcagggtgtctatgtaccacattgtctaaaatcatcaattgtttcatcctatcaacatatgtttcaatactaggatgatttgtgacaaacgcaactattgcatcgtttctggagttcaccccacaaggacatgttcttaggaattcaaggagatgatcgaaatgtactggatacactggtccaaaccttgtagagaatatattgtagagactagtataatcccgagcacatggatctttatcaaatgccactacagggacattttct

SEQ ID NO: 8155 - DNA, 1905 bp, Oryza sativa
  ref <308>: DATABASE ACCESSION NUMBER: AK105503
  ref <309>: DATABASE ENTRY DATE: 2002-08-28
cgtgatttttttcaagggccagagcggcgcggtccccgccagcgaaaatagattttcgttggcggtaggataagtggtccgtcagcaaaaatatggatatttttgcaagcggacttctaaactcaccaccagcgaaaatagattttcactagcggtcctaaacccactatccctcattagaattttgcaagcagatttcttatataaccgacaatgaaaaaatatgatactgccatgaaaaatcgtttttctagtagtgtgtaactagtgtaattttttttttacaaacaatattatatatttttttaaatgaacaatatgatagtgcaaggtttcatattgatatagcaggaaaaatagtacaagaaaataactctgagaggctataatcaggaaacaaacaaaaggccagccaagccaagcgcctatgacacaaacacccgttactgggagcaaacaggagcacgacacccaacacactcctctctatccacatctaacggttgaaggggggagagggtgagagagaagaatgaatccgctctttcccaataggaacgccaacgttggcaacttatatgccaccataagaggacaaagtctagacaggagtttggctggaaagacctccaaacgacgcattcaataaggtttcgatgctgatggtgccgccatccgccaccttggaaaccagggtgtggttttcacctaaggattccaccatggatgggagagacgccacgacaatgcccctagcggggttacggtggtgttccagagcatccccactgtcggccctgaaaggacttggcttcctcccaaaatctcccaaccctcgcatgtcaaagcgtcaccgtaaaaactagcggccccaccctccgaacaccttcggcgcacggcaaccgaccaacaccccactgtcccccggcaagcaagcaagaggccactttgaagggcctcctccacgcttccttccacaaaccccactaacatagccgcctctccactgcctcgggagacccagcctcaccggcaagcaagcacgagaggaaggagacaaatatcgatggacactcggtagtcgtcgaagccattccctcccaactgcagcgcaaccaacaacgtcatcctcccttcaacgagaggagaggagcagccaccaccattgtggcaagttgccacagttgctcccaccgatccctcaccttgatggtggtggccacgccgtctacgaacaccattgccatcagtcaccactacaccatgcgctaggccacgaggatgccggatatggcctcgctagcaccagatctggtgatgctagtgtctatcgttgcagcagctgccgtcatcatcgtcgtcgtcgccattattgtcgatctcccgctaagcggatctgagtaggcccggcctggatgacctcagccaccgaatatgtggtccaacctcgacgagcatgtcgcgccagccttcctccaccgtcggccacatccctcaccccgccgcaccacacgaccaccaactcgctactattgtctcgatccgctgatgaaagcaaccacgagggaccagatgcgaccaagccgacgccggatctagacaccagtgtccctgcctgctgctagtcctaaagcaccggccttgttggtgccctggctgccatgactatgagcgaggagggagagccctgccgccgccatccttgcaaccgactggctttgccgatggcgaggcggatgagaggatggggagggaggaggtggcatggctgcttatatttcgacttgtatggatattgtgacttgtaacttatattttgcttttgtctatggatgtgtttaggcttatgtgcgtggatgggtgtaattatgaatcttgtgatgcatgtggatgtgatggatgtgt

SEQ ID NO: 8156 - DNA, 1626 bp, Oryza sativa
  ref <308>: DATABASE ACCESSION NUMBER: AK105504
  ref <309>: DATABASE ENTRY DATE: 2002-08-28
tggcccgattcctactcgtcactgtgccaactgaaagcgcaggcggcagcgagaacactggattactggcaaagtggcaatgagaaaggagcacggcaagccagccaaggcaggtatatctgagcagaaggcagtaggagtgcaagtgctgcaatcgatcgccatggatggatggaagcaagcaagatggaggaggagggaggaagaagaaggacctggagaagatggtgccgcaatcgcacttgtactcgcgggtgccgcagatcttggagtgggccttccagtcggagtggacggcgtacttcttggagcacttgtcgcacttccacttcttctcgccgtgcttgcggaagaagtgcttcttgatgccggtgaggtcgccgagggcgcgggaggggtcgtggtggacgcagctggcctccgggcagatgtacaccttcttcctcaccgcctccttgctcccccgctgcttcagcttccacggcaggttgtgcccccgccggtgcagctgcaggttctggtccctctggaaccccttcccgcagatctcgcacacgaacctgttcgtcgccatcagcgtcgccggcgacagcgccaccacctccgcttccgggtctatatataggttcgatcaattgctttcgcttaattgccgagaaaattaacggagcccggatcgatcgaggagctagctatacaagaacgcacctgggttgcccgggaggctgcgcttcctcttgttgctgttgttgccgttgttgccggaggatggcggcggcggcggcggcacggtggaggcggaggaggtcaggttggacatgctgctctcctgctgctgatctgctgcctcggcggcctcttccaccaagaacaatcctcctccctcctcctcctcctgctgctgctgctgctgaagatggtgatgaaacataggagcttcgatcttttcttgctacatagcatgcagcatctgcctcaccatggaagcaatgaattttgggaggctcaagtgaagtgatgaagaggatgcattaaaactgaagaatggaggcaggagacaggagggcatgtaggatgaagggagttcagagaatctcaaggaaggaacaaacaagaaggaggaggggagggggggacaaacaaggaggaaactagggtggtcaatgactctaaagcaattttcagattcttctttctttcccttcctcctcctccttctcctctctctctctacagtctacacacactcagagcagaagcagcagcatcaccaagtgtagaacacaacaaggatgctcaagagaagagagagagagaagcaagcagctggaagctagctagccaggcaagcagcagccatgagagagagggagagagagagatcaagggattgggggagaggagcagtagcagtgtgttgcttggcaggcagcagctgaagtagccagaggggagagtggagaagcaaagctgagcaaatggaagaagagaagggcaccaaaaaccaaatcccttttcttcttcctcctctttatctgctcctgcctgctgatcctatactttactttcagggccctgtgtgagccagctaaaaagattaaaaagatttgtagagcagttcagact

SEQ ID NO: 8157 - DNA, 1254 bp, Oryza sativa
  ref <308>: DATABASE ACCESSION NUMBER: AK105505
  ref <309>: DATABASE ENTRY DATE: 2002-08-28
aaaaacgttcaatccctatatgtccatctctcttctctcgcgctcccaacgacgccgccgcggcgccgcctcctcttccaccccgccatggccgccgcctccgcctcctcttccatgtccccgctggtgccgctcctctccatctgcaccactttggcacgcctccctccatgaccccagtgagatcaccgcgaaccctctccttccacgcgccggcgagccgccatctcctcctcgtcgtcgctggatggggccgaggatctcgatgacggggcgaggaacacggtgaccgcgtgcggagattggggagcagctctccggcagcgacgagctccgccgccggcgtcgcccctccccttaagcttggtggcggcacggcgacagaactcctcgagctggctgcagcggcagcgcaggttcggccaaccgatgcccccttctccttgtcgctggatgggggtgaggaggtcgatggtggcgcgcaggtgggtaggagctgggcggcagctacgagctccgacaacggcgaggcgctctcctcctcccttcaatattgttgcaatcaaggatgtatgtgaggatggccgagcggtgcacattgtgatggagctcttcattgttggtgagctcttggacaagattcaggaggaggggcattataacgagcgaaaggctgcagagattaaagacgatggtctgtcaattaaggcgatagacatccgtaggctgcagagattaaagacgatggtctgtcaattaaggcgatagacatccgtgttcttcaaaccaggtcaggtttcaccgagttgattgggagtccatattatgttgctcccgaggtactgcacagatatgttatagaccagaatcttaggtactgcacttatggaccaaaatctgatgtgtggtcagctacagtggtacttaacgttttgatgagtggagtgccaccattttgggcagagacacaacaaggaaaatatttgatgcagttctgaagggtctcattgattttcaatcagttctaaagatatctgacaatgagaagtatcatatagggaaaatgctctctcaatattcttcagagcatttgaactttgaagggccatgaagtgctaactgctaagtaagtataattgacctatttcttcacctaaattagttgcccttttgtttcattgcctgtccatattgctgagtagctatacattgttcataacatattttgatacataattttaattttcactaatt

SEQ ID NO: 8158 - DNA, 1646 bp, Oryza sativa
  ref <308>: DATABASE ACCESSION NUMBER: AK105506
  ref <309>: DATABASE ENTRY DATE: 2002-08-28
cctatgaaaatcctctaaaccgaataagaccttagctccgccacttaaaatgagacaagaatcccagctctccatcacctgcacatgaatcaaaacgggattttcaactcatgatcagcaagatcccagctctccatatatcaccctgcacatgaatcagaatgagaaattttttttatattattttattttgagggggttcaggctatggcgacatccacgcggtgaacacgagggagatggcgttcacggtggtgtacatctcgttcagcatcgtcctgagcgcgtacctgatcggcaacatgacggcgctgatcgtgaaggggtccaggacggagcggttcagggacaggatgaccgacctcatcaggtacatgaacaggaacaggctgggcagcgccatcaggtcccaggtgaaggatcacctgatgctgcagtacgagagcagctacacccgggaccgcgtaatcgtcgacgacatcccggtcgccgttcgatccaagatgtcacagacactgtacctggatatggtttcgagagttgggctgttcagaggttgctcggatgacttcctaagccagattgtgctgaaattgcatgaagagttcttcctcccaggagaagttatcttggagcaaggcaccgtggttgatcaaatttacatcgtggcacatggatgcctggaagaggtggccaatggggaagatgggtctgaagagatcatctcagaactgcggccttacggcatagttggcgatgtcgcggtgatctgcaacattccacagccatacacagttagagtctgtgagctttgcagccttctgagaattgacaagcaatccttgactagcatcttacaaatttacttcaaggataatagtcagatattgagcaaccttctaaaggggaaagaaacggagtcgaagcggaagcaattggaatcagatatcacatatctgctagcaaagcaagaatcagaactagtccttggagtaaacaatgctgcatatcatggggatatatttcgtttgaaaagcttaatcagtgcaggagcagatccgagtaaatcagattacgatggcaggactgcattgcatattgctgcactgagaggatacgaaaatattgtcaggttccttattcaacgaggagcgaatgtcaacagcatagacaggtttggaaactcaccactgctgcaggcagtaaaatcaggccatgacaggatcacgtcgctcctcgtggagcacggcgcgatcctgaacctggaggacgctggaggttacctctgcagagtagtcaggggtggcaggatcgatctgctgaagaagctgctcagattcgggatcagcccaaactgcaggaactacgatcagaggacgccgctccacatcgctgctgccgagggcctgcaccttgttgccagcacgctgatagaatctggagcagacatacaggccaaagataggtggggaaacacgccgcttgacgaagggagacggtgcagcagcaaaccactggtcaggatactggagcaggctagaactgttgcgactaattgatgaaaaacaatgtgtattcatggggaaactaattgcaatgaaatattctttctgaggcagtgagaaagcttgtcataggatttcctg

SEQ ID NO: 8159 - DNA, 1629 bp, Oryza sativa
  ref <308>: DATABASE ACCESSION NUMBER: AK105507
  ref <309>: DATABASE ENTRY DATE: 2002-08-28
aatcctccgtcctctccctctcctctcccaagtccccaccgccgccacgatgcagctccggcgactccttgctctctccggtgaggtctccggccgcctccgccgccgctcccactcgacgttcgcctctccctcgcgtcctgcgtgggccatggtggtcagcgagccgcaagaggaggcgccggagctacgcgcgaccttccgcctcgcagagcccccgcgtgcctcccaactcctcgtcccctacgacgccatccgtccccgcggtagccagggccccctttgtgccgccgccgaggaagcgaccagcgaggacggcctgctcctcctccgcgccattgttgcgcatggcgcctgcgcctgcgcccacgcgacggctcccaacctccccgcttcgtctcggcctccgggccagaggagcgtcgctcgcgtcgtctgcaaccctctcaccggccagctgctccgcctcccggacatcgacggtgcaagcagcgaggtttcgcccggtctgatgggctacgccggcttgctcacccaagccgacggcggcgacgggccgcccgacaggtacgcggtggccgaggtcagctgcgacgacttcgtcatgcaccgattcctctcggagacggggaggtgggacgcgatgccgggattcctgtccccgctgccggccgcgcgcccgatcgtcgtggaccagccggtggtggctttcggcggccggctgtggtggatcgacctcgcctggggcgccgtctccgtcgacccgttcgccgacgagcccgatttccgattcgtcgagctgccgaggggcagagtgctgccttcatccaacgagatgagcttcgagaggcgacgacggaagaaggtgctgagcacgcaccggcgcgtcggggtcagcgaggggacgctgcgctacgtcgaggtgtccggagtggagcagttcgtggtcaggtcctacgtgctcgacgacgatggcagcagctggacgatggagcagagcacagcgctgcgggcgcaaggggcgcccttcccggggatgccaggcatctcttgcatcgatccggttaacgccgacgtcgtgtacatcatggtcgggagcgggctcgttttgggagtggatatggagagggggatggggtttgggctttctgtgctggatgagcctgcctggccgacaccctgcgtgctcccgccgtggcttgaatcaacccggatcccttcttctacagaaacccttttgagcaagaagaccaatgttgaaaggaagtctttggcagacatgctggttcgtgtagatagatgctgttaaaaatgaagcacactggctaattcatctattgggttcataatctaaatgcaagtgctatgatcaattaagatgttaatggtggtaattgctgaactctttttttttgtgaaaatctggggaatgaagaagtttggtttgtttgtctttgctgataaaatcagttaagtcttattttggtgaggttgtgggagtttcgccatttcagtgctccgacttgttggtcgttccatcagaatgattcggttcaatcagcatgtaatggctactataaagtacaaacagcttgcatggcatcagttctgttactttgtaagcatatt

SEQ ID NO: 8160 - DNA, 1445 bp, Oryza sativa
  ref <308>: DATABASE ACCESSION NUMBER: AK105508
  ref <309>: DATABASE ENTRY DATE: 2002-08-28
ctcccaacccatcgcttcccccctccacccgtctcctccgtctccggcgccggcgccggcgagctcgccccccgcgattcgtgccctccgatcagaggcgaggcgggagaagagatggggctcacgttcaccaagctgttcagccggctcttcgccaagaaggagatgcggatcctgatggtgggtcttgacgcggccggaaagaccacaatcctctacaagctcaagctcggcgagatcgtcaccaccatccccaccatcggattcaatgttgaaaccgtggagtacaagaacatcagcttcaccgtctgggatgtggggggtcaggacaagatcaggcctctgtggaggcattatttccagaacacccagggtctcatctttgttgtggacagcaatgatagggaccgtgttgtcgaagccagggatgagctccacaggatgctgaacgaggatgagctacgtgatgctgtgctgcttgtctttgctaacaagcaagatctgccaaacgctatgaatgctgctgagatcactgataagcttggactgcactcccttcgccagcgacactggtatatccagagcacttgtgctacaacaggtgagggattgtacgagggcctggactggctgtccagcaacattgccagcagggcctaaattttaacaagatttgcataagctaggggagctttggatggatcgatgggtattacaaaacacatcgatccatccctctaccagtacataaacaagaaagataacaccaaaaaattagctagctcgccaatggccttgttgtcctccttccggctcgccgtggcagtggcggcattgttggtcgtcggctcatgcgccactgaggtcaccttcaaggttggtgagggctctagcggaaaaagtctagagctcgtcaccaacatcgccatctctgaggtggagatcaaggagaagggcggcaaggactgggtggcgctcaaggagtcgtcgactaacacctggtcgctcaagagtgaggcgaccctcaagggccccttctccgtccgcttccttgtcaagaacggtggctaccgtgtcgtcgacgacgtcatccccgaaagctttacggccggcactgaatacaagagtggcatcaacatctaattcatagacatgcgtactcttgcattgggttgcatgggaatcattaacatctatataattttgtctaaaaagagatcgcgtcgcatgtgagcgagcaaacaattaatttcctatggttatttttttggtaataggccaatggcaaaataaggcataattgcgtggttccaaaatattgttgtggagctgtatgtgagcacgattttaaatatatgttgtttatagaagatgtatcgaaaaaaatatatttggtcagctttcattaagatgattgtgtggatttgatttcccaaagtttgagt

SEQ ID NO: 8161 - DNA, 1606 bp, Oryza sativa
  ref <308>: DATABASE ACCESSION NUMBER: AK105509
  ref <309>: DATABASE ENTRY DATE: 2002-08-28
agtcttctcttctctatcttctccgcctccgggaagaaggacaagaggagtaggagctccagttgcatggacaagggccacctcggtggtggcggaggaggaggaggtgggctgctcgctctggacgcgtcgccgcgcccgctcggcttcttgaacctgctctccccgccgccgttccacaggtcgaccatggaggccgacgacagcggcggtggcggcggcagggcacgcaggtccgtcgaggtggacttcttctccgacgagaagaagaacatgaagaagagccgtgtctcgggcggcgtcgccgccgaggcggacgacgccaagggacccgccgccgccggcctcgccatcaagaaggaggacctcaccattaaccttcttcccgccgggaacaacgcgaggagcgaccggtcgatggtggtcgacgacgacgcggcgtcgcggccggatcacgaggagaagagccggagcagcaacgagctcgcggcgatgcaggcggagctgggccgcatgaacgaggagaaccagcggctccgggggatgctgacccaggtgaccaccagctaccaggcgctgcagatgcatctcgtcgcgctcatgcagcaaaggcctcaaatgatgcagcctccgacccagccggagccacctccgcctcaccaggatggcaaggccgagggcgcggtcgtgccgaggcaattcctcgatctgggcccgtcctccggcgccggcggcgaggcggcggaggagccgtccaactcgtcgacggaggccggcagcccgcgtcggtcgtcgtctaccggcaacaaggaccaagaacgtggtgacagcccggacgcgccgccgggcgcgccgaacgccgtgccgctcaacgccgcgcggccgggcgcgccggcgccgcagttccaggtgccgctgccaggcggagggatggcgccggcgttcgccgtgccgccgcaggtgctgtacaaccagtccaagttctccggcctgcagatgtcctccgattcagccgaggccgccgccgccgccgccgccgccgcgcagttcgcgcaaccgaggccgccgatcgggcagctgcctggccctctctccgacaccgtcagcgcggcggcggcggcgatcaccgctgaccccaacttcacggtggcgctcgcggcggcgatcacgtccatcataggcggccagcacgcggcggcagctggcaacagcaacgcgaacaacaccaacaccaacaccacgagcaacaccaacaacacaagcagcaacaacacgacgagcaacaacaccaacagcgagacgcagtaaaaacgagttcggatcagtaattttcacatagatttccaagtttttactcttctttgttcaggataggttcttgatttctctcctttggtttcgatagctcggccgagctgtgcagtgggcacatggtatacactttcttttttcttctccactttcctggttttgcagcagcaaaaagttgtattaattcattgctttttcttagttctttttctaccgcaaaaacagctgttgatacttcgcagtaagtaataatcagtacaataataagtataataatagcatcttcctgagaatt

SEQ ID NO: 8162 - DNA, 1455 bp, Oryza sativa
  ref <308>: DATABASE ACCESSION NUMBER: AK105510
  ref <309>: DATABASE ENTRY DATE: 2002-08-28
actgtcacacagcgaaatcacaggactagaatacttgctgactactgaggcgaaaggataccgggtggcgaagatggctgaccttggattcggcgatgccaggagtggcaatggcagcaggagccaatgctccagggggaaggcgatgctgctcgccctcggcaagggcctccctgagcaagttcttccccaggagaaggtcgtcgagacctacctccaggacaccatctgcgacgatcctgcaacaagggcaaagctggaaagactttgcaagaccaccacagtgaggacaaggtacactgtcatgtcaaaggagctcctagacgagcacccagagctcaggactgagggaactccaacactgacgccacggcttgacatctgcaatgctgcagtgcttgagcttggtgctactgcagcccgtgccgcccttggtgaatgggggcgtccagcagctgacatcacccaccttgtctacatctcgtccagtgagcttcgcctcccagggggtgaccttttcctggcaactcgccttggcctccatccaaacaccgtccgcacttcccttctcttccttggctgctccggtggcgctgccgcgctccgcaccgccaaggacattgctgagaacaacccagggagccgcgtccttgtagtagccgcggagacgacggtgctgggattccggccaccaagtcctgaccgtccttacgatcttgttggtgctgccctgtttggtgacggcgcatcagctgcgatcattggagcaggccccattgctgctgaggagagtcccttcctagagcttcagttctcaacacaggagttcctaccagggacggacaaggtaattgatggcaagatcactgaggaagggattaatttcaaactggggcgtgatttgcccgaaaagattgaaaaccgtatagaagggttctgcaggacactcatggatcgggttgggataaaggagttcaatgatgtattctgggctgtgcatcctggtggtccagcaatactgaacaggctagaggtttgccttgaactccagccagagaagctcaagatcagtagaaaggccctgatgaactatggtaatgtgagcagcaacaccgtcttctatgtgttggagtatttgagggatgagttgaagaaagggatgataagggaagaatggggactgatcttggcttttggcccaggcatcacatttgaaggaatgctagttcgaggcattaactgagactgaaaggggtccaagaagactttcagctagatggaagaatcacaaacataccatttccaggttaagtatatagtatgaacttgaaacatctcataaggagcatagatgtcttgacagcatctgtgcactacatagttattgttttactgtaatctatgttttatgtatcaaacaatgtgaggtactctagtttgaatgcaagatacttg

SEQ ID NO: 8163 - DNA, 1264 bp, Oryza sativa
  ref <308>: DATABASE ACCESSION NUMBER: AK105511
  ref <309>: DATABASE ENTRY DATE: 2002-08-28
aacccgcgcactttcccctcctcttcccttcctcgcgccgcgtccaaccgcatcgcatctcaccccacctcctccctcgggttcttggtgcggggagccatggcggccgccgccggggcgccaccggggttcttctccttcctcaagcacggcgtgctcgtcccggcgcgtggccgcggcgtgttcctgccgctgctcgcgctcaccgcggcgctcgcgggcgcgctcctcctcgcgaactcgctcgccgtgcagccgcgcgccgtcgccgcgctcctcgacgccgacgccctcagccgcgccgacccggccagcgccgcgtacccgaagctcgtccggaggttccgcgacgacctgcgggggctcctcgtcgacgccgccgcgtgcgtcgccgccgcggtggtcgccgggtcggcgatcaagatcgccaccgtgttcggcgccgtcgcggcgttctcccccgccggcggcgaggaccgccgcgccaccgtgtccgggctcatcgccgcggcgagggggaacgtgtgggggcccgtgctgaccatcgccttcgggtacgtcctcgaggtggtctgcgccgcggccatcgtcgccatggcgatgctcgtggtgcccctcctcgagtactccctgctgctcctcttcctcgacgccatggccgtgctcctcgcctcgctcttcctcgtctacctcaccgtcgtctgcgcggtggcgctcgccgtgtcggccgcggagcccggggggcgcggcgccggggcggtgtcgcgcgcgtggcgcctcatgagcggcaagaacgcgcaggccgtgctctacgtcgtcgccacgttcgcgctcgccgccgcggtctcgccggtgtacacgctcgcgctcaggtggtggcctcgcagcgcgccggccggcatcgccgccggcgtcgcgtacgtgctcctcctcggcgccgtcgaggtgttctccgtcgcctccgtcacggcgtactacttcgagtgcagggagatgaagcaggtggaagaagacatggcggcgggtcaccaccactacaccaagctctctaatggcgacgaggcaaacatttgaccaaacatttgtgaatttttctctcttccgaattcattgtatgagtagtgtttgatagatgctactactaatattcttacattgggattgacattgcaaattccatacaaaccttcaagcaaggaacagtagtaccatagcaatatcatgttacatctatgcctacattttagtgtggtgaattttgctc

SEQ ID NO: 8164 - DNA, 1348 bp, Oryza sativa
  ref <308>: DATABASE ACCESSION NUMBER: AK105512
  ref <309>: DATABASE ENTRY DATE: 2002-08-28
aagctcaccgccaccactccattgccatcttcttccacctccagcctcctcctccgcctccaatggagcttcccctggacaaggccgcggcccgctccaccccactcgcgctccccgccgctggggcggcggcggcggcgaaccagtccccggcgtctctgccactgggaccacccgcggccgcctccgccaagcccctcgtcgcggccgccaacccgccgctgctgccggtggtggctccggcggcggcggcgcccaagtcgtcgtcaggggccgtggaagagagcaaagagggtgtggaagagagcaacaagagcaatgtgttgaccattggcagcatcaggagcacgctgatgaagcatgaggacaccatcatcttcggccttctggagaggtcacagttctgctacaacccggacacctacgaccccaacgcttccaggatcgtccggttcaatggctccctggtcgagttcatggttaaaaagaccgagaagatgcatgctagaatggggaggtacaagagcccggatgagcatcctttcttccctgagaatttgctggaggtggtggagccatctgttgagtatgagaatgttctgcatccagctgctgctaacatcaacataaacaaaaggatctgggatgtgtactttggtgaccttctgccaaggcttgtgaaggaaggaagtgacggtaactgtggatcgagcgcatgctgggacatgttaattctgcaggcactctccaagaggattcactatggcaagtatgtggcagaggctaagttccagggggcacctgacacgtacacgcctgcaatcttaaacaaggacagtgacaagctgatggaattgctgacgttcgcgaaggtggaggatgacgtgagggcccgcgtgatgagcaaggccatgaccttcggccaggtggtgagtgaagatctggagaacgaaattaagctcaagatcgagccggagctggccgtggagctgtatgacaagtggatcatgccactgaccaaggaagtgcaagtgcagtacctcctcaagaggctggattgagttttgagccccaactatcctttgcctgtccatctacaagatgctctctctctccagtttcagttctgaacttgaataattaggcccttatgttttgttttaccagatactgctttgagttcagttttagtttctgtagtttgcagtttagtatcttcatgtaatcctgtagttgaaagttcagttctcagcagagcatttggtactgaattgcaacttgaatggaggttgtctgaattgaaaagccaagatttgagctatttctatggtgaaacatgatcttgttt

SEQ ID NO: 8165 - DNA, 1253 bp, Oryza sativa
  ref <308>: DATABASE ACCESSION NUMBER: AK105513
  ref <309>: DATABASE ENTRY DATE: 2002-08-28
gatcaccgacacaaacccaaagctaagcttcgagctcccccattgatcagtgagctagctagtagctggttggttaaaaggcctttttgttttgtttgagttggagcagaggagaagaatggcggctctgcttgtggtcgtgttggttgccatgtcggccatggtggcgacggccaactttaaccaggagttcgacatcacctggggcgatggccgtggcaagatcctcgaggatggccagctgctgacgctcacgctggacaggacgtccggctcagggttccagtccaagcacgagtacctctacggcaagatcgacatgcagctcaagctcgtccccggcaactccgccggcaccgtcaccgcctactacttgtcgtcgcaggggccgacgcatgatgagatcgacttcgagttcctggggaatgtgaccggggagccgtacacgctgcacaccaacgtgttcacgcaggggcagggccagcgcgagatgcagttccgcctctggtacgaccccaccaaggacttccacacctactccatcctctggaaccccaagcacatcatattcatggtggacgacatgccgatcagggacttcaggaacctggaggggaaggggatcgcgttcccgaagaaccagccgatgaggctctactccagcctgtggaacgccgacgactgggcgacgcagggtggacgcgtcaagacggactggacgcacgcgcccttctcggcctcctaccgcggcttccgcgccgacgcctgcgtcgtcgccgccggtggccgcacgcgctgcggcgccaccgtcggcaccgacgccgcacccggcaccggcgccgccgccgccgccggtggatggtacaaccaggagctcgacctcacgcggcagcagcggatgcggtgggtgcagagcaagtacatgatctacaactactgcaccgatcccaagcgcttcccccagggcgtccccgccgagtgctccatgtgatagtaagaatatcccatcgtcgtcgtcgtcgtcgtcgtcgatcgccggcggagcaagatggccggagatgaggaaggtgactggctggcgtctgtaaaaataaataaagattggcactgggggtggtaaaaaaaaagtgtaatgtagctgtggtgggtaaaattcttttttgttctctgtttcgtagtaagccactgcacgccctgttcgtgtgtaactgatcgtgtccatgcaacaattcatgtgtaatatattcctcaac

SEQ ID NO: 8166 - DNA, 1744 bp, Oryza sativa
  ref <308>: DATABASE ACCESSION NUMBER: AK105514
  ref <309>: DATABASE ENTRY DATE: 2002-08-28
cttagacagtcagctgtgtttttgttatttgctcgattatcttcttgagcttcttcaccagtgctgcatccactgatgtgacataacaaaatacatgtgcatcaaccattttgttgcatatcaccacaagaagggacatcagagctgctagaaatttcgtttcttcagatagctcatcatttttcggaacccagggcttcttcggaccagattgttttggaggcttgctttcttcatcgttatgtacgtcaaaactattgctttcccctgcccctgggctaccaattgctatttctgtaagaatctccatggcattttcctgaagttgcatgggataagttgcattttggccaagaatccccaacaagttgcggaccgcgtcctcacaagccgagatatcatggcatacccttgtgccagcttctccaggagcactgatgagcagcctcaccagcttcagcaaaatgctcagtatatcaacccatgcattgtcataatctgtgtgaagtaaagcaggagaagtgattggcgcaatgatcttggtaagcagccgttggttgcagcagatctctctgcagtttttttcgtcacatgcgagcctctcaagtatctgtaggccctgatgaatcaactctctagtgccttggggcttgaaggagctcttgtcatccatcgtcccaaataagaatttcttcgctcttctgtccatccttagaagcctgtcagttatctgctcatctattgcagtattcatgttcttgtctttttcttcttctcctccttccttgtcttgatcctgtttctgtggacctttttcaacctcttggcagtattgtcttagtggagatacttgaagcagagaagatatgcactgcagggcacctggtatctgaacaatgtgtaatgcacccgtggcaacatctgccacgatccttgcggcgcgttctctcatctcttggtcctccagtgccgggtcagtccactgaagcattttgatcagattctggatggattcgctggaggacagtagctccagtcttatggatggcctcttgttgacgacgaatgcatcaagcatccgtaaaccatccagatgatcatcccgggacacggatttcagcaatccgacagcatatgtgaccatgttccagccaccgggcaagctcagatcatctgcacacttggctttggtttctcggaggtattgaaggagcaatttttggcccccaaagtccttgttaaggccgaattctttgcttgccgacttggacaacttctcaaggaaatactgaagcaggaaccagcagtagaagcacacactatgagccagagctagggagtaaaatatgaacaaggctgctctgagatttccattgtcatcaccataatcgtgccgtattaggcgggtcattgagatcaccatggatgccatcggcccaagcatattgatgatcagcacagcttcaattaaaagtgcgaggaataccactactatttgcgcgagcaccatcagcacaataccacacatcgaactgaacacgaaggcagcagtggaatgctttttcgcagacttttggaaagccgtaaaggtttcaatcatactagttgtggagttcaacactgcctcaacactctcgatgctgtaatcgtggacggtcaagaccctgttgcattgggtttagcgaggaacatcattagctatcaatcgtttttcttcaactgttatatttgatcgacatccaac

SEQ ID NO: 8167 - DNA, 1390 bp, Oryza sativa
  ref <308>: DATABASE ACCESSION NUMBER: AK105515
  ref <309>: DATABASE ENTRY DATE: 2002-08-28
ggggatctcgcctcgcacctcgcaccgctcgcgccgcccctcgccgtcgcccgtcgccggcgccggccgcccttcccctgtccggcgcggcgcggcgcgagggctgtgccaggagaggccgccccagcacaagtagtaggaggccaaccttgggcttgttcgtacctgccgcatccaccaggccaaccaacccctctcccggtcgcgcggtcgccgggtcgtgccgcgtccacgccggcgcgccgcctcgctgcttcggcccctccacgcgcggcgccggcggcccgctctaaggtgtctcggcgcctccagccgagtagccctccagtccatgcgccagcggcgccgtccggagctccagacgaagcccgacggacgaagttaaaaatcctgggcccatccctgggcgcgtgtcgtggtgcgggcgctgctcagcgtaggctgcgtcaagggcgggcgctgggggcaacgactggcggcaccgcatgccaggcaggcagcaggcagcaagtgagaccatggaacaagaacggaaaggagaagtttccattggcatgtatacttacaatcataattctgacagtgggtttgatgtccatgaaatctatgttaagaggagcagattctgggttctgttgtcatacattggcatggttttccttctcgcaagtgtctgccaactgtatctgtcaaaggaaggcctatccactggttcagtgtggagtattgcctttggaatccttgttgccaaatgtttgcaatacaaacctgtgaagaaagagtcagtggtgataatgccaacttttggggttcagctagaaatacatttttggagtggaagagttcatcgtcgttttgtgccaattggcaagattctgaagccattgctgaatgagtgtgtgacgccggtgacctgttactggagcttggcattgcttctgcgtgatgaagaggaactcaggctagttttccagaaatcccaccctcctgtcaaaatgttggttcctgtctggaaggctctctgcaaattcctaaactctggatgccaaaccagttctgcagtttctgaaccgaaccgttcggaaacatgaccaattttgtgctcaatatagtttgattgcaatattgagaaaaccagctacaattcagataggaatagctaggtgcattttatttggaactatctggtgggggttgtaggacacgctaatgcaagtggcacatcttattggaaggaaatacgtggagaaattttcaagctgatgcacttcacttcacttaacagtgtaaccaatcaatagtttaccctattcatgatgtaaattatgatctcatttgatcatttcattatacgatgataaagagtaacattgttctgctattaccattc

SEQ ID NO: 8168 - DNA, 2478 bp, Oryza sativa
  ref <308>: DATABASE ACCESSION NUMBER: AK105516
  ref <309>: DATABASE ENTRY DATE: 2002-08-28
gctgctgccgcctcccctttgaatccgccttcatcggttgctcctaaattcgattggatgaggggaatttatctactcgttgtcctctatcttttccctcaaaaaccggagtttaattccttgtattttaccaaaatcaaactcgtttagagtttatctctccaaccaaaccatcagattttccggctcaaatcctctcgtttggagtccgatccccctcacccatgcctatataaagcatcccctagtcgtcttcttctgtttgcctcaagtcttagccgcatccgtcgcttgtagcgccgtcgccgccgtagccgcttcagccgctttgcgtcgccgctgtggtcgtcgccgccgccttccgtcgccaccgccggctttgccaggtggaggagcatcccgtccgccccttcgccgctgctgcatctcgccggagcgccgccgctgacgtcaagccgaggcgtgccgccgctggagctcgtcgtcgatcgtcgttcgtcgtagttctttgcactgtttccgacgttccggaggagagggtttacgtcgaggaaggttcagaagcgattgaggaaggtcaaggcaagtcacacagatcccaaacaaccctttgagcatgttgaacctgtttaaagctaatgttttatttcaacttatgcattatttttgaatgtcatcgggtggtgagcctttcccatttaattatggccaacaatgactttattttcctatgggtaataaattgattagcttggaccttatatattggtttggttcagctaaatgctatatatataatttcttagccatgcttagaaacattagctcattaatgggatgaatcatattacattattatttatggttatatttaatggtagctcacgatggttaatcgtgttatgatggttaattgataattaaaacctgattaaaggtgggttgtgagcatatggttttgatggtcgtgctcatgacaattaaggaccggttcgcgagctactgttgtgaaacatttaccgtgccaaccacaagccagcatgggcaacggctttaccttttgtatagcatggttcattacggggtgccagactgagaagcggcgagaagtccgtgggggtcgctggggagtccatgcctctggttgtagagggggtgattatgatccaggaatggtgcactgtggtgagttgtgttgtgcgaggggtattgtcacagttcctttccgaggtaccgtggtggtattgaggcgcatggtgacatgtcgtggagctgtgtcttgtgggtacagtggtacatctctggccagagtaaaactattcgaatagccgtgcccgcggttatgggtgggtctaacaatgtttttcgtgattagtctcacactactcattattggtgataacctgtgataattaaattgactcctggtttggaatggtatattcctggtatggaggtttgatttgtacaaccggggttggttgttcagatgaggttgggcctatgcaacacgggtgtgttgtatagtgtttatttaatattgcttaattgctcaactgttttactattctctcaaatgtttattaaatgatgtttatgcaaatgagctatattatgccatcctttgttatcctgtgcacttgcatatttgctgtgtggcttgttaagtatgtcatatgctcattcttgaaatattcattcatcagaggagtacttcagtgaaggtgatgatcaggaggattaggctttgtttgggtcaagttgcttgtggagtggagtcgccatagctgtttagtcttttgtttatttttccgttgcgtagaaagttattcttttgagaggaactatccacctctgtaataatttatccttttgcgaataacaattagctgtttgatagtgttctattatcaattcgttattgtgtgcctcggctgattcttggatgaggatttaacacacatgtaagcgtttggaattttggatagaaattccgggcgtgacagtgggtatggcaagggtttgctccgacctttgacggcatcggagaaggagggggcagcggaatcccgtaaccctccacctatgaaggtgaagcgtcacttgacgccccctccaattgtaagggcggccggccaataccaagatgatgaagtaaagtcgtcggagccctcggtccataagctcgccgttcaagtaaagaaactccgcaaggagaacatagagcttagggatcgcaacgcggaactaggggtagaacttgctaaacttaggaataatgttgatacccttagtcgcggtttgtgcgctaaaatcaagcgtgcatttgtagaaatgggaaaggagaataaatattatactaattagatgtctcctctcccatgaaaaaagtagtaggtgcttggtttttatttttccaatcatgtaagcacttgctatgaataatgtggctcattggtgttaaccccaatgtttgcc

SEQ ID NO: 8169 - DNA, 1473 bp, Oryza sativa
  ref <308>: DATABASE ACCESSION NUMBER: AK105517
  ref <309>: DATABASE ENTRY DATE: 2002-08-28
aggtatcagggatgcaggcgaggagggaggtgaggacgaaggaggagcaatggcggggggaggagagggtggtggagagcccgctggggagcgcacggtggagcccggaggcggagatcgggatgagggtggaggacacctgggacagcctggaccagccgcagctgagcgaccgggaccggctcaacagctgcttcgacgccatcccggtggcgtcgttcccgcacacgttcgacggcgcgcaggtggtcgagatcccctccgacgccacgctcgccgaggccgtcgacatcctgtcgcgccaccggatcatcaccgcccccgtccgcaacgtcgacgcccccgacgacgccagctggatcgaccgctacatcggcgtcgtcgagttcgccggcatcgccgtctggctgctccaccagtccgaggccgccgccgccagggccgacgacctcggcgccgacgagctggcggccaagctcggcaccgtcgcgcttgagggcgccgccgccgcgagggcgcccgaccagcagcagtcggcggagggggcggtcgcggaggcgttcggcgcgctgccgtcgtcggacctgttgaacaagacgaaggtgaaggacatctccgggtcgttccggtgtgcgccattcctggcgctgcagagctcggacacgttcctgacgatgctgctgctgctgtccaagtaccggatgaagagcctccccgtggtggacatcggcgagggcaccatcagcaacgtcatcacgcaggccgccgtggtgcacatgctcgccgagtgcgcggggctccactggttcgaggactggggcgccaagtcgctcaccgagctcggcctccccatgatacgccccagccgcctcgtcaaggtccgccacgacgagccggcgctcaaggcattccgcctcatgcgcaagcgcggcgtcggcggcatccccgtcgtcgaccacgccggcaagcccaccggcagcatcatgatcaaggacgtcaagcatctcctcgcctcctctgacgccaacagggactacaggacgctgacggcgcaagagttcatcgcgaatgcgaggcagagttcaggcgagaagcagatgaacatcgtgacctgcaagaaggaggagagcataaaggagatcatcttcaagctggatgcagagaagaggcagaggatctacgtcgtggacgagcaaggcaacctggatgggctcatcactctcagagacataatcgccaagctggtgtacgagccgcctggctactttggggacttcttcaatggcgttttccctctacctcagaacagcagggtctgaaaaccaaaacattttcattagtccaaattaaatcaggtttcttttttatcacttcattctttcgatccggtccttttgtgtagtatgtgatgtttctttctttgcaatttcctccttttaccctctagaaagatcaccttagtttgtttgtgtt

SEQ ID NO: 8170 - DNA, 1543 bp, Oryza sativa
  ref <308>: DATABASE ACCESSION NUMBER: AK105518
  ref <309>: DATABASE ENTRY DATE: 2002-08-28
agaacgaactctttctctgcaaggaagaatatttatagtatatatgaagtcaagttttcctgagtcccagagcgatctgatcgaccgagttgtgtcatgccgtactacgcaccgtgtattgaggcatgaagcgcaaggcatcaccctccagtttttccggtgatccaccgccggccgcatcgcccacaaccgtcgactcgttctgcgacgatgtcatcgcggagttcctcgtgcggctgccgtcagtcccgtcgctggctcgcgccgcctgcgctgtgaagcggtggcgccgggtggcctcgtcccccgccttcctccgccgcttccacgccctccaccccggccaagcccaacctctcctcggccactactactacactgaatgctcttcgcggccggtgttccaaccagcgcagcccaccttctccgaccccgaactatccgcggtcgtccgacatggcgatttcttcctcactcccgtcacgtccatgggccgccttgaagttgaagactgccaccaaggccgcctcctactgaggaattgcgacaccaacgagagctcaccgttttcgaccctgtagcccgccgtgtcctggcgaagctcaccccaccgcggcatggcaacaagcgggcatttcatcacaactccggcagcttcttgatccctggccgcgtcggcgatcaggcagcgtcgtcgtcgtcgttccgtgtggtcaccatgcagagatgtagtacgacagtaatatacgcctcgggaggagatcaacggctggacatggagcgactggctgtgtacgactcctccacgggtgcgtggagcgctcgcccgtggaccaacaccagcgacatcgacatgccgctgcctctcaaagtgaaacgttattcagccatgcacgcgccaggtcgcatctgctggaagaggctacgcggcggctctcctaacagtcttgtctccctggacgccgaaaccatggggttccccgaagtcgtgcctccgcccggggtcctcctgggcccgtcgtacgccgtcggcgacaccgacgacggctccatgtgcttggtcaacatggaggagagaggaacgatgaggctggtcatgttgtctaagaaaaaatggcacctcagagtttggcttcttggaaagtctggatgcggcggccgcgcgtgggtgctggaccaagaacaggaaacatcgctgacgacgtcgaccgaagacgctgctgatatgctatgggattatgatcgagcgtgccgcgttgtcgccgtaaacgccggcgtcgtgctgatgtgcctccactcgccacgacgcctgaacgaccgctacattgcctttcgtctcagcaacttagaggttgttgcgagttttagtgcgagtgagcctgtgtttcagtaccagatgccatggcctccggttttgttgcccacggcttagcaatgagtgttatgttgcttctgagtccacttggtttttgtgacctctgttctaattaagaagaacgtgtttcaacacttaagttttttattcctttaacttaaaaaaaag

SEQ ID NO: 8171 - DNA, 1724 bp, Oryza sativa
  ref <308>: DATABASE ACCESSION NUMBER: AK105519
  ref <309>: DATABASE ENTRY DATE: 2002-08-28
cctctcctatccggagttcatcctcgccgccgcgtgcttcctcgccttcgccgccatccgccgcgcgcgcgacgcccggcggcgcgccgcgccggtgccggtgagctggccggtggtcggcatgctgccgttcgtcgtcgcccacctcggccgcctcctcgacgccgccgccgccgcgctcccggagctcggctgcacgttcatgttccgcggcccgtggctcgtcggcgccgacttcctcgtgacgtgcgaccccgccgtgttccgccactgcctcgtcgccaacttcgccgggtacgacaagggccgcgacttcgccgagatgttcgacgtcgtcggcgacggcctgctcgtcgccgacgccgcgtcgtgggcggcgaagcgccacctcgccgcgagcgtcttcacctccgccgcgttccggggcttcgtgctgtccaccgtcgagcggcagacgcggcggctgcttgtgccgttcctcgaccacgccggcggcgtcgtggagctcgaggacgtgttcatgcggtactcgctcgacgtgtcgtacaccgtcgcgttcgccgccgacctcgactcgctgtcggtggccagcgccgcggagccgttcccgccgttcggcgaggcgacgagggtcaccggcgaggccgtgctgttgcggcacatcgcgccggcggggtggtggaagctgatgcggtggctcaacgtcggcgtcgagaggcgcctcgcggacgccaaggcggtgctcgacgagttcgtctaccgcgagatcgccaaccggaggtcgcgccccgcgcccgccgtcgccggaggagacgacctcctctgcatgtacatggcgtcgcccatcgaccccgccatgtccgaccagacactccgtgacgccgccgtcggcttcatgttcgccgccaaggacctcatcgccgccgcgctcacctggctcttctacatgatctgcacccacccgcacgtcgaggccaagatcctcgacgagctcaggtccctgcacaccaccaccaccgccggcgccgtggtgttcgacgccgatgagctccgggcggcgacatacctgcacgcggcggtgctggagacgctgcggctgtacccgtcggcgccgttcgaggagaaggaggcggtcggcgacgacgtgctgcctggcggcacggcggtgaggaaggggacacgggtggtgttctgcctctacgccatggggagggtggaggggatatggggcagcgactgccgggagttccggccggagcggtggctgtccaccggcgacggcgacggcggcgccggcaaggtccgccaggagccgagctacaagttcgcggcgttcaacgccgggccgaggagctgcctcggcaaggacctcgggctcagcaacatcaagatcgccgccgccgccatcgtgtacaacttcacggtggagctcgtcgccggccatgtcgtggagcccaaggactcggtggtgctccacaccaagaacggcctcatggtcagggtcaagaggagggagacagcttgacagcttgagggagacattgtgttccagaattcagagcaaaagtatagagaaaaataatggagtgttagcaaggaaattaagcaaatctcactccatagattctgatttataccatatatagaaagtatgtttgattcagttaagaattgtaattattcatgtgacaagagtaacaccacttgacacttgcttactgttc

SEQ ID NO: 8172 - DNA, 1450 bp, Oryza sativa
  ref <308>: DATABASE ACCESSION NUMBER: AK105520
  ref <309>: DATABASE ENTRY DATE: 2002-08-28
atcatcagtaaatcactgggttaatctctcctctcttaagttttagctactgctacaatatgggtcccaggaagcttcatctggcctccatttctgccctatcaatctttctctacgtgtttgctcacaccaattcagcacaagccttccccgtcgctgacggcacgtaccctcctgaagctgaaggcccagcagcagaaagttcagacatggacgagcagctggagctcactcctggaccgcagccgagggtcgtcgacgtcgacgactacagagcgagagccgacgccggcgaccacacggaggcgtttcttcaggcctggaaggaggcctgcaactcctccgattacccatccgtgctcctcgtgccggaggggaagacatacctcctgatgcctgtaagcttcaatggcccctgcagagccaccacgatcactgcaacgataagggggacgctggaggctccatcgaatcgatcggtttggctcgatcgcgatctgcaggaatggatcacgttcgacaacatcgatcacctccgtgtcctcggcggcgggacgctcaatggcaatggacaccaatggtggatcaactcttgcaagaccaacagatccatgagatgcgtcaccggcccaacggcgctgtacttcaggaggtgcaaccatctggtcgtggagggcctccagatcagggacagcatgcagatgcacgtcgtgatcgcctactcctggagagtgctggtctcgaggctgctcatcacggcgccaggatggagccccaacaccgacggcatccacgtatccaacagcagggaagtgttgatgagtggctgcatcatcagcacaggtgatgactgcatatcaattgtgaccggctctatgtttatacgggcaactgggatattttgtggaccaggccatggcataagcattggtagtctaggagcaaacaaatcatgggcccatgtttccgacgtgctggtggagaaagctacactggtgggcactaccaacggtgtgcggatcaaaacttggcagggaggagatggccatgcagaaaggattacctttcaagatataacaatgcacaacgtcactaacccggtgattatcgatcagaattactgtgactccatgacaccatgtcatgaacagggatcagctgtcgccataaataacatacgctacaggaacatacgtggaactagttcttcaaaagtcgccatcaacttcgtctgcagcaactctgtccattgtgatggcatagtgatgcaggatgtttctttggttggagaaggatcctacgtttcttgttcgtacatgaatgctagagtggtagagttggggtataacttcccgtattgcagagcggaaatgtagtgtatctgtagtactgcagagcggaaatattattcattctttcgataaataatactccctccattctaaaatat

SEQ ID NO: 8173 - DNA, 1368 bp, Oryza sativa
  ref <308>: DATABASE ACCESSION NUMBER: AK105521
  ref <309>: DATABASE ENTRY DATE: 2002-08-28
attctattcaaaaggcccaggttttcaaaaagcaaatatagagctttccccttcgcctccgcgccgccgccgcctctgtccgttccgccgtggtttgcgccgcccgtccgccgccgccggcggccgtactccgtgtagcctactcgtcgctgctcgagctgaaagcccagggtcagggtgggtggtgcccacagctacgcacaaacaatggagggcaaagagaccaagaacaccgtcgctgccgctgcctcctcctcccctctcttctccttctccaactccaacgcttccttcggcttcggcttcggcttcagcgcgtcatccggacctcctccgccgccgccgccgccagccgtcgaggtgctcctctccgaggaatcgcccgtcgcggccggcgaattggagcctgtggtgattgatgactccctgtcgatttacaaggggagagcaagtacttctgatgtttttggagtcaaaaactctgatttagtcccagggaaatatgaaggtgggttgaagctctgggaaggttcactagacttggtgaagactttaaactcagacatcaaagaagaccgattgcttttagaaggcaaacgtgtattggagctaggatgtggacatggcctccctggtatctatgctattcttaagggtgctgttctagtccacttccaagatttcaatgctgaggtccttagatgccttaccataccaaatgtaaaggctaatctattgaaggaatcatctgaagaaaagtttacatctggtagtgttggtttctttgctggtgactggagcgaaattgacagtctgcttcttcgtggagatgctgacctggataaatcaaccaacagtcatgaaaacgatacagcgtataatggctatgatatcatccttatggctgagactgtctatgcagtatcttccctccctaatctctacaggctcatcaagaagtgcctgcgctaccctggaggtatagtttacatggcgggtaaaaagcattacttcggagtaggtggtggcacaaggcactttgttcgcttggttacagaagatggggccatgcagtccgacctacttgctgaagttgctgatggatcatcgaatgttcgggaggtttggaaattatcgttcaaatagactagtattctgcttgtgatcgttgaagaaaccacaaacatgtactggctccatattggtcgagtggaagccttagtttaggtgtttcttgttctattaatgtactgggtcagttctgagataattgctacctcttttcagaggtcttatattaaatacaggaacatccttttactctttgaaaaactcatctaagtaagttttactgagatcttgatagtt

SEQ ID NO: 8174 - DNA, 1365 bp, Oryza sativa
  ref <308>: DATABASE ACCESSION NUMBER: AK105522
  ref <309>: DATABASE ENTRY DATE: 2002-08-28
cttttctagctctgcgacgatgtcgcatcgtaaattccacgcgcctcgtcacggctcgaccgcctacttgcctcgcaagaggtgctcgcaccatcgcgggaaggtaaagtcattccccaaggatgacaagacaaagcctgtccaccttacggcgttcttaggttacaaggcgggaatgacccacatcgtccgcgaagtcgacaagcccggttccaaggtgaacaagaaagaagtcgttgaagctgttaccatcatcgagactccgccgatggtcatcgtcggtgttgtaggctacatcgaaactccacgtggtcttcgggctctgaaaaccatcttcgctgagcacttgtcggacgatgctcgtcgtcgcttctacaagaactggtgcaagtcgaagaagaaggctttcaccaaggcccaggcgaaatggcaacagccggaaggcctcaagatcattgagcgtgactttaagaagatccagaagtactgcactgtggttcgtgtgatcgcccacactcagatggccatgctcaagcgccgtcagaagaaggctcatatcatggagatccaactgaacggtggcagcatcgccgacaagctgaaattcgctcgagagcacatggaaaaggcggtgccaattaagagcgtcttcgcccaagacgaaatgatcgacattatcggtgtcaccaagggtcatggagtcaagggagtgacttctcgttggcacaccaagaagcttccgcgcaagacccacaaaggtctccgcaaggtcgcttgtattggagcctggcatccgtcccgtgtccagttcaccgtggccagagctggtcaaaagggttaccatcacagaactgagatcaacaagaaaatctaccgtcttggagatggattccataccaccgatggcaagttggtctctaacaacggatcgaccgagtacgacaacaccaacaagtcgatcaaccctatgggtggcttcaagcattacggtgaagtcaaacaagactttgtcatgctgaagggctgcgtcatgggacctcgcaagcgagtcatcactctgaggaagagtttgatcacgcaaacgaaacgtgctgctaccgagaacatcacactcaagttcatcgacacctcttccaagatgggccacggtcgcttccagacccacgaagagaaggctgccttcatgggacccctcaagaaggatcgtctcaaggccgaggccgaagcagctgctgcagctgcggccgctaccgcctaagcgttcttggatgtggtttccgaagaagatggctcacgatttccaactctgaatgttccatctttgaaggagcggcaaataaaagaatgccagctattcttgacccg

SEQ ID NO: 8175 - DNA, 2156 bp, Oryza sativa
  ref <308>: DATABASE ACCESSION NUMBER: AK105523
  ref <309>: DATABASE ENTRY DATE: 2002-08-28
atcaaagacgaacgtggcatccgcggttcaactgaataaccagaaaacagggcgttgtggttgtggctctccgtcgcaatcgtcttctccgtgcaatcatgccgggctctcgccgccggcgagggctccaaggaagcggacaagatcgccgcgctgccgggccagccaccggacgtgaagctacagcaatattcaggctacatcaacgtcaatgagacttccgggaagtcgctcttctactactttgtggaagcctccgttgatgctgcccacaaaccgcttcttttgtggctcaacggagggcctggctgctcatccatgggcatcggagcgttccaggagatcgggcccttccgcgtggacacggacggcaagacgctctgccggaacccgcactcctggattactgcggcgaacctgctgttcctggagagccccgtgggcgtgggcttctcgtacgcggcggtgaagccgcaggaggtgtacagcaccataggggacaacatgacggcgcacgactcgcacaccttcctgctccggtggctcgaccggttcccggaatacaagacccgggacctcttcatcgtcggcgagagctacgccggccactacgtcccggagctcgccgtcaccatcctcgacaacaacttgctcccgcacgcgacccccatcaagctcaaaggaatcgccatcgggaacggcatactggagttcgcggctgagcaaacgcagctgtacgagtacctgtggcagcacgcgttcatatcggactcggcgcacgcgctcatcacgcagagctgcaagtaccccgacgaccacccgtcggcgctctgcgagtcggcgaggaaagcggcgtatagccggattggcaacatcgacatctacaacatatactcgtccacctgccacgaacagaaagtcaggccctcagcctccaagtgcatggatttggctgatccgtgctcccaatacttcgtggaggcgtacatgaaccagccccaggtacagaagacgatccatgcgaacacggagttgaagtatccctggactagatgcagggtttacaacctagaccacttcggcgactcgccaaagtcaatgctgccatacatcaaggcagtgataaccggccgcatccgcatctggatattcagcggggacttggatgcgatggtgccggtgacggcgacgaggcagtcgatggagaggctccagctgcgggtggcggcggactggcggccgtggtcggcggacggcaaggacgttgccgggtacgtgatcgcgtacgacgggctggtgttcgcgacggtgcgcgggtccgggcacatggccccgatcgaccagccggagcgagcgctggtgctcgtctcctccttcatccgggggcagccgctcccaccgccgcaacctgatcaacacgacgcctagcgcgcgtgtgccccaccgctgcaccagttgccatacgtagctagggagattggcatggcatggccgagctgaggagctcaacgtgtcgtcgtgcactcgtgcgtcgtcggatcggaagtgaattctcgctgtactcttggtgtctttcgagactcgatcgcaactgtgtttatgtgtgtagggtgacgcatatttcagtcaatccgtgacaacctccaaacctcgatctgtagccaacccgtttttcccaccggttttctagccatatgcccatacgagcgctgggcgatacacaatcaggcaaaagctaggacgcgcctgcaacacagtcagaggctcagagtcagagctcatcaactcaggacgatggagcacgaatttatggagcggatgcaatgcatcggggcctattcattgccatcctttacgcagtggacccaagagcgtcacacaccgccccatactaccatctgttaccaagcacatctggcatcagcatgctgacctcgttcatcatattttcaccgagaaaggaaaccaaacaagcagaatcaatcccctactctactctctgaactgagtgatgaatgacttcaacattccagatctaccagcaacatgtagtaatacagtgagtagtctcctttaattcctcttagaaaagtacaactagctagattaatgttctactcagtagttcctgaaaatctgaatgatggttggagtgc

SEQ ID NO: 8176 - DNA, 1451 bp, Oryza sativa
  ref <308>: DATABASE ACCESSION NUMBER: AK105524
  ref <309>: DATABASE ENTRY DATE: 2002-08-28
ctactgcaccgccggcatctccggcgggcacatcaacccggcggtgacgttcgggctcttcctggcgcgcaaggtgtccctggtccgcgccatcctctacatcgtggcgcagtgcctcggcgccatctgcggcgtcggcctcgtcaaggcgttccagagcgcctacttcaacaggtacggcggcggcgccaacaccctcgccgccggctactccaagggcaccggcctcgccgccgagatcatcggcaccttcgtgctcgtctacaccgtcttctccgccaccgaccccaagcgcaacgcccgcgactcacatgtcccggtcttggcgccgctgccaatcggcttcgccgtgttcatggtccacctggcgacgatcccgatcaccggcaccggcatcaacccggccaggagcatcggagcggccgtcatcttcaacaacgagaaggcgtggcacaaccattggatcttctgggtcggcccgttcgtcggcgccgccatcgcggcgttctaccaccagtacatcctccgggccggcgccatcaaagccctcggctccttcaggagcaacgcgtgatatcaaaggagttcgagcagccattgttgggggataatggctggaaggcgttgatgaagcaattggccatgatgatgagttctaccgtgttatgattctccctttttcaaaaaaattaagttcgccgctggtcgttttgtttcagcagctgctcctcctcctgcttgtcgtgtgtgtgaagtgaacatccatgtgtttgtaatctgtttttaaatcgagggatgtctcatgtgtttaaaaaaaaaaaaaaaaaaaaaaaaaaaaaaaaaaaaaatcacaacaaacaagtagtactacacagccaagtgatatttcttgatctcctggctactactacctgtgctaagctgcttgattacacattgctcttacaatgtccaatattagcagcgtcatttccggcatcatcagccggcggtgctacggcgtgtacgcgcgggcggtggtgaccacgcgcgcctccgacgcagcggcggccggccggcgaacggacgtcgcttcggcggcgacggcggcgacggcgaagagagacgtggcctggatgcgggacccgaagacggggtgctgggccccggagaaccgggtggatgaggtggacgccgtcgacctccgcaacctgctgctcaactacaagtgactatatatatatagctaattgaaagtgagaaaaccaaattaatgatcgatcgatgggtggatcagagtgatcgtagttacgcatatatacttgcatggagctagttttagaataaccagtgcataatttactctcatctacgtggcaagccactagcatgcatggtaccacaacatatttactgcaagatctagtgcaagttacagcattggatctgatctatatatacgtgtgttcagt

SEQ ID NO: 8177 - DNA, 2078 bp, Oryza sativa
  ref <308>: DATABASE ACCESSION NUMBER: AK105525
  ref <309>: DATABASE ENTRY DATE: 2002-08-28
gatattatcaattggtatgcaggtgttgggaggaggtggcttgattttttctgctgttgtcggaatttcaagatggtcaaaactgttgttagttaccacttgaggttctcctgcttcttgacattggctgagaagcatgaatgcaccaagaggcaagcaattagccattactcaaaggatttgaaggtgacaaatgacgatggagtggctgaagtgcacttcccaacagagcgcgagatcaggatgatgggtgataagaatctatctgatccaaagcctgtggatggagccttgacaatgatctttgtcagattagctgttgatgacaccacctatccatgtgtggcacatttttgtgctgaaacagacactgtgatttatcgaatacgtttactccagaatcgtctaaatgtagatcctctgaatgagaagaagtgggtccaagggctaagtgccattcacgagagtttaaacaagaaatgcctccctttgtgccccatgcatgcaagtgatcttcttcttggcaagattactcttcaagatattgactgtactcgatttgttgatgtggagtaaaacacacttgcataatacctcttgggaacacatgtatcatgcatttatttgtggttcttgccaagtgcatctagtgttgattgcccttggtggagtgcgtcatggttagatccattacagtcctgtcatgtagtagaagaaatgctggctttcttttccagaggaatgttgctacttactagtgttagcgtaaattgtatgcggaacaacttcatatcaatgctgctcagttggttgattctgttattgatttggcaagaaatctcgtgataccaaccgaactgattgttatggtcaggatgtatcatcatgatgaggtgctgtcatccatggtcaaagtggtttcctgcttctatctcacatggccatgtagggatatcagcatgctaaacaggaagctgttcatgattgttgtcatggtcttcttgacatgatagttttccagacactccatgatctcacagtagctaccgaagctgccgcagcatgcatctaacaaccatcttcaggtacgtcacatcagcccattgtgcaaacgtgctgcgtcctgcatgagacgcctaattgactgtttatctgctttagatgttatatcaccgattattaacaggatacatgggccctagtagcagagccagacgttgatgttgcatttgcagttggacatatcacaagatcatatccatcgttttgagaacagggtgataatctctgccggcaacgatgattttacatgattgctgatctacgcaggctggcattggcttccatgaaatggacgacaaggcaacaggtccatgccgacggtggaacatatttggtggtgtccggagcacagcggccgtcgacacctcgtatgcacaggacctcgatcaaagcctcaaaggcaggcagattgcgactgcacggggcgcgacgtttcacgtcatcattgggaggaggcaccgggcgagtacagcatccggatttcgaactgatttagtggtgggcgcacgtgaacttcagcgcatgccccacgctcgctgcgctacaccccattctccccaatgaccaagaaatataaacagatcatgccatattgcaagccaaccataaaatattcgagagcgtggcatcctcgacctccaccaggacgtgcagacctgcgggtacgaggacgtgcaggtgatgtggaacatgctcagctcggagaaggaggcggcgccgccgccgccgcggaagcgtgcgttgtggcggctgcggctgccggtctggcccgccgccgtctggtcgccgcgcggccgaggcatgcagcagcgtgaaccgaatcctactgccgattgcaacttcgccatgtaaaacggagagaggggcatctcttcctctgcctgactgcctctgcaattgagatgttgcaagatactgtgccaaattgctcaatggctcgtgatggcctgatctattgtgtacaaagactctgtatatagttcagggcaatgtgttgctttctctgctaaaaaaag

SEQ ID NO: 8178 - DNA, 1669 bp, Oryza sativa
  ref <308>: DATABASE ACCESSION NUMBER: AK105526
  ref <309>: DATABASE ENTRY DATE: 2002-08-28
accgtcgtccacctccacggcgccgcccaggcccccgattccgacggccacgccttcgcctggttcacccgggacttcgccgagaacggcagcacatggacgcagaagacctacacctaccccaacgtgcagccggcggccggcaacatctggtaccacgaccacgccctcggcctcactcgcgccagcctcctcgccggcctcctcgccgcctacatcgtcgagtggcccgagctcgagatgcccttcaacctcccctccggcgagttcgacctccacctcgtcatcgccgaccgcaagttcaacgtcgacggcaccatcttcatggacaccgtcggcgccgtgccatccgtccacccgcagtggcagccggagtacttcggcgaggtcatcaccgtcaacggcaaggcgtggccgttccaagccgtccagcgccgccgctaccgcctccgcatcctcaacgccagcaacgcgaggtacctcaacatcaggttctccaatggtctccccctcaccgtcatcgcctccgacgcgacgtacctctcccgcccggtcaccgtctccaacctcctcctctccccggccgagatcttcgacgtcatcgtcgacttctccctcgtggtgaaccccaacgccaccgacatcgagttgctcaactcggcgccctacccgttccccaccggcactccggcgaacgcgacactcgacggcaaggtgatggcgttcaatgtctccgccaagtggcaggtcggcgacgacatgccgatgcaggagccggaaaactcgacggtggtgccggagatcggtgtgccgttcgcgaaggtgacggcgctgccgccgacgatgaagacgaggtacatcgtcctgtacgagaacatgacgagcaacgacccgaacaccgccaagacgatgaacctctacatcaacgggctccggctggaggatccgccgacggagacgccgatatcggggacgacggagctgtggcacgtgatcaacctcacccccgacaaccacccgctgcacctccacctcgccgagttccaggccgtccagatgctgcagctcgtcgacccggacaccttcaagagctgcatgctgaagcacaacgacaccttcgcctgcaacctcgaccagcacgccgtcggggccctgcagccggtgccggaggaggagaagacgtggaagaacgtcgtgaagatcccgccggcgtacgtcacgtcggtggtggtggcgttcaggctcgtccacaacaacatgccctaccccttcgacgccacggcggcgccgggatacgtctatcactgccacatcctggatcacgaagacaacgccatgatcaggccactcacgctgcttccatgaacaagactgcacactgtacgtggtggttgatgcatgaggagatcaagatgcctcaccaggattaaaaattatgagcatttctgtttgggtgaaagttaattatcgcgttatccaagttattttactatagttgtcaacccgtgcatttgtatgggggtatttgttacatgttggtggccatgcatggttgtctccattcggataggatagcctatgctttgtgcctttgttgtacgtttgccttgtgatcccttcccttaataaaatttggccggagttcctccgccggccgacctgccgattc

SEQ ID NO: 8179 - DNA, 1324 bp, Oryza sativa
  ref <308>: DATABASE ACCESSION NUMBER: AK105527
  ref <309>: DATABASE ENTRY DATE: 2002-08-28
aatactgggccttgctttttcatattttgttgcctctacatctcacctttcccttgtgctgcagttgtgtatagtaggagaagctgatttctatatctctcttcccctctctcctaaagatcactaccagaaagaagtcatgctctcctgcttgatccttggatatcagtggatcttggaagaaacaagcagcaactaagaaaatctgccacatattgctgttgtctttcttcgtcagatcatcagatctatcctcttcgaccacaaataggtgtagctagctagctcgccggaaatggcatcctcgtcgagcaccagcaactccgccatctcctcggtggtcgcgtcggcggtggccacgacgacgccgggcgccggatcgccgtgcgcggcgtgcaagttcctgcggcggaagtgcctgccgggctgcgtgttcgctccttacttcccgccggaggagccgcagaagttcgccaacgtccacaaggtgttcggcgccagtaacgtcaccaagctcctcaacgagctgctgccgcaccagcgggaggacgccgtgagctcgctcgcgtacgaggccgaggcccgcgtcaaggaccccgtctacggctgcgtcggcgccatctccgtcctccagcgccaggtccaccgcctccagaaggagctcgacaccgcgcacgccgagctcctccgctacgcctgcggcgaggtcggcatccccaccgcgctccccgtcaccgccgccccgaggctcgccgcggcaatgccggcaccaggccagctcgccgccgccgtcagtgccgggatgtacggcggcggccggaggctcggggtcatcgacggcggcgggatagcgccgccttccccccacacggccgggtgctactacgcccgcaacaacaacgccgggagcatcggcgctgacgtggcgcccgtcctaccttacgcttccgtggctaattggacagtgaacgccattagcaccaccaccaccaactcaggatcagagagcattgggatggatcacaaggaaggaggagacagcagcatgtgaattgaagcgcggcaaataatgtggagatctgcgctttggccttgatgagagaggatcggagaggcttcaggaagatggcagcccattcatcccaggttaattaagagttaagaagcaacctatctatctatctatatatagccagcatgaattatatatatcatctccccgtccctttttgcatgttgtgcaaaaccatactttggagttctatatgtaatcgaatcgagatcttgatctctcgtcttttcatgattaattcgcgtttttcgc

SEQ ID NO: 8180 - DNA, 2041 bp, Oryza sativa
  ref <308>: DATABASE ACCESSION NUMBER: AK105528
  ref <309>: DATABASE ENTRY DATE: 2002-08-28
tgataaatcttcattgagcactatactgaaagttcaacagccaaatttgtttccgaatgaagccagcaacagtgaaactcgcagagtaagtagtaagaaaattaaaaatgtagatacgcgtcggcagcagcaaagtcctcttcaatcaaataagaagaaaaagggtagacaaggtctaccggagcctgaggaggctgaagttccgcttagggttgatcctcctacaatatcgaatgacattccaaatcatctgagaactccaaccagtcaatttcttgcaacaagccatataatgcaggcaccgtatattgcacagcaattcggacttagctctcttcagggatttcctggcatatcaccatttgggcagttgcaggaaccagcacctgctcctctccagcaacctcatctacagcaaccaccctttcatagcggtccacaaatcccccaggccccacctccggacatccagtcattgcagtttcttagcagcaatcctcaactgggtcaccaagccacggatcaaagccagtacaccattccagtctgggatttcctgtgatgtacgctgtgatatactagcatgtaccatagtactagcaatctagctgtaaattatgtaatggcaataatgtagaaactaaattatgccagcttgagcagcttttctatgttagtggaacaattgagcgcggctaagtctcggattcagccttgtgcgcaggtcaaaagagtgccatcaagaatgtcagcagctggatactcgaatggacttgtgtagtcaagttgtagtgttgtacaggatatgtcaaatgcaagagaaaggaggaagcaaaacaaggctgaactgaagtttatattcctctgaaacgaacattctttaagcttagcagaaacaaatcagtctactgagtacaacatcaaaacacaatcctttcacgagcaagtgacaggttaacaagaagcgtatttctcacggtggtcgtcagctcccaacaaccaagcaacagagaaccgtgcaggttgttggatgaaatgccattgttcagttaactaagtacggcaagggatttctgatcaaggtacagttgccactcatcgccattgccttcttcttgaagctgacgtccaccttcagagcaaacattctttggcccgttgtagttcagtatgtctgagttagcatctgcgcgcttccaattggaagggagcttcagataattgtcatacaaggccaatgttattgccaacctaatttgatccctgaaaaatggaaagtccacagacaaacagtgcgctatttgaatgagtttgagtgcatggtgatctggcaatggtggatgttgcccaatacagaatgtgagtcactgaccttggattggctagactgaaagccctgaaccacaccatgatagaatcaataaggtccttccgtagtttgcgtggctccaccacaagcacatcaaaatcaagtaagcatgcatccttgtcataaggttcggtatacaccaaatttttcggagctgttttctgaacggcattcagaacatctatactaacatagtcaccaatgcgcttggtacaatcttcaacagcagcaatagcataagtgcctaaatcgatgcgaccaagatcttcaatttttccctgggaggagattgacgattaacataagttaacccaaacatatgtatggtttttgtatgtttgagttggatacacaacatttcaatgctcaaaagcttctatgtccttcatcaaagaacacagccatggcaatatactcaattactactcacttacatatgcagggttttgtttcctaattgactatttgaagcaactgttgcaccagtcatggaatcacagatttagttccatactcttgactttttttataaaaaaaacttctgataatgctagccaagcaaagtgatgtctttgaagaaacttggtagatttgtattcaatgtattccacataaaaatcagaattatggttcactatcacaagttgaaatgattgaaaaaggtgaacaagc

SEQ ID NO: 8181 - DNA, 1804 bp, Oryza sativa
  ref <308>: DATABASE ACCESSION NUMBER: AK105529
  ref <309>: DATABASE ENTRY DATE: 2002-08-28
attttcgcattccatcagctcgactgtttcgttgcgaaatcgtctgtgttgcgtaagcaaaccacgggataggatcataggaaggagaggtgacgacaaagcgccacaccgccgcggcggaccaaccaccagtccaacactactacgatctccgatccaccaccaaacagttttgttcatccatggatcccgcgaccgtcggcggcggcggcggcgagccggaggcggcagccgagtggcgcgcccgcgcggtgggcgggatggagtacggctggtaccgcgccgtgccgggcggaaccggcacgacgctgctcgcgctccgcctcgcgcgcggcgcagaggcggcggtggcggcggcgaccgtccaggcggcgctgcgggccatcctggacgctcaccccgtcctccgcgcgcgcctccgcgggtccgcttccggcagcccaaccctcgccttcccctccgccgccgcgccgcctccgcccccgctagcgctcgagctcctccccgtgcccgaatccgccaccgacttcccttccctcctcgagcacgagctcaaccgcaacccatggaccgccgccgccgcaaccgcaaccgcgtccgaacacgagcccgacgcgccaccggtgctcttcgccacgctctacgagctgccgccgccagcgggtggggggtcggcgctgttcgtccggatccacacggccgcgtgcgaccgcgcggcgtcggcctcgctggtgagggagctcctcgcgcagctggccggcgatggcgccgccgccgcggcagcgagcgaacccgaggacgcggcggtgcgcgcgtcgctggaggagaggataccgcagagggactcgtggaagccgttctgggcgcgggggctcgacatggtgggctactccatcaacggcctacgcacgtcgacgctgccgttcgaggtgaccggcacggagaggtccacgcagatgctgcgcctcggcttcgaccgcgacgagacgacgaggctgctcgatgcgtgcaagcagaacggagtgaagctttgtgcagccatggcggccgcgacgctgctcgctgcacggcagtcgaagctgcagctggcgagcaaccagcaggagacgtactccattgcgacccttatcaattgccgcaagtttctcgaaccggccctggatgatcacaacgttgggttctaccattctgctatcaccaacacgcacgcaatccatggcggagaagagctatgggagctggccaagaggtgccaagattcgtataccaacgccaagaacaacaagaagcacctcactgacattgccgacctcaacttcctcatgtgccgggcaatcgagaacccgcagctgacgacgggctctgcgctccggacggcggtcgtctccgtgttcgaggagccggtggtgtacgacctctccgatctgcagagcaaggccggcgtggaggaattcgtgtgctgcgccaccgtgcatggcgtcgggccatccatcggattgtttgactccatcagagatggtcagctggagttcgcgtgcatgtacccttgccctctccattccagaaagcagatgcaggagatcttgaacaaggtgaatcagatcttacacgaagggagcatcggagatgatgaaagctttgaagattgtacctgaaagatcgtcgaaccgtggtacgaggctatgacttatgatttatgaccattttcgcctttttgggtaaataaactatcggcatgttgtcccatgtagtaattgatgttgcacgttttggtgcaatatgtagtgtcctgaaattgaatagt

SEQ ID NO: 8182 - DNA, 1939 bp, Oryza sativa
  ref <308>: DATABASE ACCESSION NUMBER: AK105530
  ref <309>: DATABASE ENTRY DATE: 2002-08-28
agacgacaaaccacatggcgcttccgcttcgcctcctcggccgcctcgccggcggcggcggcggcggcggtcggcgcctcccgcggccgctggccgtgctccaccaccaccacctctccgcctcggatccaagccccaccacccgcgcgccgctgctcccgtcaccccctcgcttgccgccgctgctagtccctttcgctgccgtccccgcgcgaagcttctcctggtacccccgctcgccgccgccggccggccccgccgcggcggagaaggctcccgaggaggacgtgcgcgccgagggggaaggcgcgtacctgcacgacgcgggtggtgctgatttcggggaagtggtcgccaccagcgcggcgtcggcggatgcagccggagtagccgccgcaggagatggcggaagcgcgtcggggttcgctgtcagctcgctgattgacatcctcgacggatttcataacctcaccgggatcccatggtggataacaatttctctgtcaactgtggccatgagactgttgatacttccagtacttataacacaaattaagaaggctgctaaaattggcaaactattaccagaatgaaggagctttcgtgaccagttctctctctatcagaagaaaaggcgagaacttggttgcccttcctttctttggaactgggcctacttttcaatccagttcccgtgctttatactgtggatgtcaacaataaggactatgtgtttgagcaatcaccctggactagataatgtatgtacaagggtggtattctgtggtttcataacttgaccgagtttccacatggttcttcgggccttgtttttcctaccctagttgcaggtctccattacttaaatattcagattgcctttcatggaacccataccaagcattatccaggtatttttggcgtactggcaaagtactacagggtataccttgaaatcctgactatccctttgtttcttattgggtatgtgattcctcagggtagcctggtctactggactacaaatggtttaattactgtagctcagcaattgtccctcaaaaatgacgctgtcaagaaggtgttgggattgcctgatactagagctcaccagaagtttcctcgtgtgggtcataagatgatgcaggaacggcctcttgaagatgctcacatgcacactaatttgacatcaacaaataatgaaaccgccaataacattatggaaggaaaagtatctgcgtccagttcacctgaggaactacttgaacaagcattacaacatttggaaactggaaaccaggatcaagctattccactgatcagaacagcaatagagaaagactctagtctttatgtagcactgattggtatgggacagacattgttctcaaacaggttgtttcctgaagccacagtgtgttttgaacatgctataccaaagattgaagagcaggatccacttcttgtgcttgcatgctacggtgcagggctttcacgtatgcggcagggtgatagcaaaatggcgatcgaaaacctccaaagattagcagagctcaaggaaccagaaaaacccattaacaaaaaatgctattaccaaggattggttgctctaggaagtatactaattaatgagggacggaaatctgaggctgtcaaattcgtgcaacgagcggttgcttatgatccaaattgtgagatatatctgaaagaatgtgatgacacaacagaagataagccgaaatctgcagaacactgaattgccacaactgaagatcagagtcaggcatcatggatgacgtgttccattcttcgttttttttttttttttacaaacaatacaattttgtgcgatttgtacacatgtagcatgttccatcaaatctgtagaatgcactcacaagatttataccaatataatgccggaacgcacaatttgttc

SEQ ID NO: 8183 - DNA, 1447 bp, Oryza sativa
  ref <308>: DATABASE ACCESSION NUMBER: AK105531
  ref <309>: DATABASE ENTRY DATE: 2002-08-28
tctccccgacaccttctcccacctcaggctcctccacgagctcgacatcagcaacaaccgcttcgtcggcggcttcccggaggtggtgctctcgctgccgtcgctcaggtacctcgacctcaggttcaacgacttcgagggcgccatcccgcccaagctgttcgaccgcccgctcgacgccatcttcctcaactccaaccgcctcacgcgccccatcccgcccaacctcgggagctcgccggcgtccgtcgtcgtgctcgcgcacaaccgcctcgggggttgcatcccgccgtccatcgggaggatggccgagacgctcaacgaaatcgtgctcatcgacgacgagctcaccggatgcatcccgccgcaggtcgggctgctcaggaaggtgacggtgttcgacgtcagcggcaaccacctccagggcccgcttcccgggagcgtcgccggcttggccgccgtcgagcagctcgacgtcgccgggaacctcgtcgaaggcccggtgccggcgaccatctgctcgctgcagagcctcaagaacttcacctacgaggacaacttcttctcctcgcggccgggttgcccggcggcgacggccgacgggcggtggaactgcatccctggagctccggctcagcggccgccggcgcagtgcgccgccgcggccgcccacccgttcgactgcagcaaggcgcaatgccaggcgacgccgccgacgactcgccgcccaggtggccgcacgccgctggctcctcatagatcgcctttgccacaccacatgcctccgagacggacgccgccgacgccgccgccgccgagctcgcccaccccatctcacctgccgccgccgccgccaacctacagcgagagccccaaatcctcaatgccgccatcaacctcaccaccatcctctcacggcgcctcgccgccatcctcatcctcgtcgccgcccacagagcacccgggatacgtgttgccgccgctcacgccgccgccgccgacgacgacgccaccaggacaccacgctccggtcccgggaacaccatcctcgccgccaagctcttcttggtcgccacctcaaggaggcggagggaagctgccgttcccgccggtgcacggggtggcgtactcgtcgccgccgccgccgccatcgggagacaagctgccgttcccgccggtgtacggggtggcgtactcatcgccgccgccgccatcgaagccgtacaactaggtagtgtcactgtctgctgctgatctgacggtggatatgggatcggtcgccgcctcctcggccggtcgccgccgtcgtacggactcctcgtcgttgttcatcatcatgagtacatctttcactgtagtcgttggttggggttgattagcttccatttttctcttttttttgaggttgtttggtcagattgaattcaaaggctctgtggattctttc

SEQ ID NO: 8184 - DNA, 1854 bp, Oryza sativa
  ref <308>: DATABASE ACCESSION NUMBER: AK105532
  ref <309>: DATABASE ENTRY DATE: 2002-08-28
acatcaccacctcaccatctccatccatctcacccgttaacccgctaagctctctctccaagatccgcttcggtttcctctccggcgatctcgccggcgaccatgccggcgaccgactaccagggctcctcctcgacccactcccacccgtcgcccttctcctcgttcggccgctccctcctctcgctccgccgcgacagccccgccgccgccgccggcgcgtccccggccatggcgtccggcgaggaggccgacctggaggcgttccagcggcacgtggcggcgcacctcgccgatctcaggggcggggaggacgagctcctgtccatcgagtggatccggcggctgctcgaggcgttcctgctgtgccaggaggagttccgggtggtggtggcgctggcgcgccgccgcggggcgctgtcggcggcggcggagaagatggtgggggatttctacgagcgcgcggtgaaggcgctcgacgtgtgcaacgccgcacgcgacggcgtcgaccaggtcaggcggtgggagcggctcgccggcatcgcggcgtccgtgctgctcgccccaggggagatccacgagggccagctccgccgcgcgcggaaggcgctctccgacctctcggtgctcctcatcgacgacgccgcggccgccgcgggtggcggcggcgtcgcctccttcctctcctcccaccgcaaccgctccttcggccgcgcccgcgcgtcgccctcccgctccgcgacgctcgcctcctcctcatcctcctcgtcgtcgtcctcctcctcctcccacttccgctcgctctcgtggagcgtctcccgcaactggtcggcggctaggcagctgcaggccatcgggtccggcctggcggcgccgcgcgcgcacgaggggggactcgtggcgccggtgtactccatgggctgcctgctccacctcgccgcgtgggccctcgtcgccgccgtgccgtgcccggaccgcgccgccgcgctccaggcgcaccacctccccgccgcgccgccgcgcgccgcgttcccatgggcgccgccgctgctcgcgctccaggagcgcctcaccgaggaggggaagcgcaaggacaggcgcaactcctgcggcctcctcaaggaaatccacgcgctggagaaatgcacgcagcggctcgccgaggcgatcgacgccgcacccgtcccgctctccggtgagcgcgaggccgaggtacgggaggccgccgccgagctggctgccgtgtgcgccgccatgagggccggccttgagcctctcgaaaggcaggtcagggaggtgttccaccgcattgttcgcagccgcatggaggggctcgattcgccgatgctcaacgccgattgaaacatggagaattcacatttgatcgcgcaatgtggtggtgataggtaatgccgatcgaaccgtcgagaatttggatttgatcgcgcaaatgtggtggttataggtagctctcctgttcttggtttttttcctcacttgtggtggtctagtagtaattataaaatgtgtgccgttctgtaaaggaaggggggaaaggaaaggaaccatctttatgtaaagatgattccttcttcccatgttttgatgctgcatttggtgtatatcatggcatttttgttagtcctccatgtgtgcgcggctaattctgggagtaacttatagttgaaaaatctgtgaggtcgctatgaaatgtggcctgttgtcgagaatgtcgacaaaaaaattaaacaagaaaaaaaaatctactgtggtttagttcgattgtgttgtgtcataattcatgtttggtcctgatatttggatggtttaatcaaaaggtcaaatcttgaaact

SEQ ID NO: 8185 - DNA, 1726 bp, Oryza sativa
  ref <308>: DATABASE ACCESSION NUMBER: AK105533
  ref <309>: DATABASE ENTRY DATE: 2002-08-28
acttcctccctttcccaccgccgccgccgccgccgaaaaagaagaagaagccgacgaggaggcgaccatgagggccaagtggaagaagaagcgcatgaggaggctgagaggaagcgccgaaagatgaagcagagatctaagtaggcgaaggagatgggcgatcatggtgatggcgtgtcgcagtgatccatgtcttcggctgccaagctcgttgatatgtcaagctgcttggcgtggtgccaccattcgactgttgaatggcttatttacctgtgctgttatcatcttatatccctagttttaccaagagttttgcaccaagacatgtcggttcagttatgtgaacttgttatggagccgtatttgctgctaaattccatcatccgcaccaacaccattagttatattacccacacatcgccacgcattgccggccatgtctgccgccgcctgcatctcctccttccctccaccgccaatggccgccgcggcggcgccggcgccggagaccaccatcgacgtcttcgtcgtcgccaaccacacgccggtgaccgccgccgccgacaaaagctgcgagggggacgtcgtcgccggcggcgggaggacggtgaggaggccgcgggcggtggcgcggacgctggagtgcgagcggcgggtggtcggcgaggggttcgcggtgaggaggggcatcgggaggaaggagctcgacagcctcgatcctttcatctccctcgacgagttcgagttttctccaccagccggcttccatgatcatccccacagaggattcgagaatgttacctacatgctcgagggaggcttcagttaccatgacttttcaggccacaagggcaccatcaacacaggagatgttcagtggatgacggcggggcgcggcgtggtgcacgcggagatgcccggcggccatggcgtccagaggggcatcaacctctggatcaacctctcctccaaggacaaaatggtggagccgaggtaccaggagctggcgagccacgacatccccgccgcggagcgcgacggcgtgtccgtcaaggtgatcgccggcgaggccctgggcgcgcgctcgccgctccagacgcgcaccccggcgctctgcctcgacgtcgccatgcggcccggcgcgcgcctgcgagcgcccgtcccgcccgggtggagcgcgtgctcgtacgtcatcgacggcgaggccgtcttcggggacgaggccgcggcggcgggcgcgcacacctgcgtcgtgttcggcggcggcggcgacggcgtggccgcgcgggcgacggagcgctccgcggcgaggttcctgctggtggcggcgcggccgcacggcgaggccgtggtgaaggacgggccgttcgtgatgaacacccgggaggaggtggagcaggccagggaagactaccggaaccgccgcaacggcttcgagatggccgccggctggagctccgaccacgttgccaccgccgccgcggcgcactgatggtcaccggcgacggcgaggccggtgaccatggtgtcatcagctcatccaggtcgcaggtgaacgctgcgtttgcgcgggaggataggaattttagggaatttcgttgcaaagttgatgtaagataaaatggaggattaggtgtgccgtgtgaaactcctgtaaaataaccttatgcgaatattgaatttcgttcaatttttgtgtttgaaacgatgttaaaacttactgatc

SEQ ID NO: 8186 - DNA, 1939 bp, Oryza sativa
  ref <308>: DATABASE ACCESSION NUMBER: AK105534
  ref <309>: DATABASE ENTRY DATE: 2002-08-28
cttcttggcttctccccctcgcacgcgtgtgcgccgtgggcccgcgctttccctccccctccgcgcgcctcgcttctccttctccctcgcgcacacgcgcacgccagctgcgccgctgtcccgccagccggcgcactcgcttctcctccccgcgtcgcactgcctcccgccctcccccatcccccacgcgccagccatgccgcggagctgcctccggcctctcccaattctttcggcggcggcggcggcggcggcggctggacgtgcgagcccatcgccatggcgggcgggaagatccagaagaagcggcacggcggcggaggaggaggaggaggcggcgggggtgatggcgcgcggctgcagggagggatctcgttcgacaagtccaaggggcaacacatcctgcggaatccggcgctggtggactccatcgtcgagaaggccggcctcaagcccaccgacaccgtcctcgagatcggctcggcacggggaacctcaccaagcggctcctccaggccggcgtcaaggccgtcgtcgctaccccgcatggttctcgcgctcaaccgctgcatggttccagttctttaatcgttttctaaaatatattacaagcctaactaatactaccattctaggtcccgctaattttacattacctttttactccagcatatgagaggtaaattcccttaagcaattcacaattcccaactgaatggtttacggaactttgctgagatagcaaattgaaggtatgcatatatgtcaaaatcacgtctttgcctcttgcgatggcatttgttttgctgtgatctttgaaggaagttattcttttaatatatgcgttcgtcagtatccaaattaaatccaaaaatagttcataaatttgatagatttggagaaaagaatattgatgccttctgtttttttagtatttctttatttctattactgatgttttcttccaagcttcacgccaacatatataggaactatgtcagtcagtcacaaaagtaccgattttgaaacaatactgcagtcagatatgcgctctccatgctgatctccttcagatttcagtagccagaattgatctgttccccttctcctgatcggctgttgagctaccgatcatctccctctaggagcaaaagcatttactcaccaacaatgagccgtccattaccggtgattaattccatttatttccctcttaagcctttttcagttcctctataaaccacactccgtcgttgtcaacttttaggactctgaattcatccccaatgctagcagggtgatcatcagcactggacaccaatggcggagcgccagagcctattggttagaccagagcaagccaagccgagcaggcgccactggctggagctgatggaattactttggtccgatccccccacaggtatgatgcgccatgttcttgacctgcgtagcctcatccagaaaccaggctactatttctgctgctactactactactccagtaagagtagacgatgctactactgatgatcttgctgttgccattgcagtataggagctgtataccacactgttcaaatactacgcagcctagattctccctgctcttaagcatcgtgggttaatctaatccacgatccatttttatttttagtcctgataaaaccaacaaatattatatgccattgcagtataagtggttttctttgactaaattcttttacagggctattgctttatttttaacactacacgctatactttattcactttcaatttgatgacagtgtcaagaaatccatttagttcccattcatccacatgacaatgttgaaaattgagttaatttatgaactctgctaggagtcattcaagcgtattggatgtggcttctaaaaactgaggtatgtataccaaaaaatttcagcatttctgt

SEQ ID NO: 8187 - DNA, 1576 bp, Oryza sativa
  ref <308>: DATABASE ACCESSION NUMBER: AK105535
  ref <309>: DATABASE ENTRY DATE: 2002-08-28
ctgaaacctgggatgcgcaaggaagctgacgagcgggaggccctcacgggccgcaccgctggccgaccctgatcttctgtgaagggttcgagttggagcacgcctgtcgggacccgaaagatggtgaactatgcctgagcggggcgaagccagaggaaactctggtggaggctcgaagcgatactgacgtgcaaatcgttcgtctgacttgggtataggggcgaaagactaatcgaaccatctagtagctggttccctccgaagtttccctcaggatagctggagcccattacgagttctatcgggtaaagccaatgattagaggcatcgggggcgcaacgccctcgacctattctcaaactttaaataggtaggacggcgcggctgctccggtgagccgcgccacggaatcgggagctccaccagtagctaccctgaaatgtggttaggagctagcacaagcagtgctagctacgtcaatgaactgtcctctctagttgagatgggcggcgttggcacttctaaccaccacgaatccgcaaggctacaggtcgagatcgctgacatggaggtgttcaaggacgagaagaagcgggtggagaaccttagaggagtcaagttggtgaacaatgaccttggggagattgttgtagaaggagatgaaagcaatccaacagaagacatcatcgcgcagtaccctataaaagtcactgcagataattcaggagaagccggtcatcgcatgaccgatcccactgacgtaggcggcatcgacactgccccgatcttctcgcaatctcaacctgacgactttgctgctggtttcgacgacgtcaaccctaatgcatctttcgatctgtacgagaaggttgacgtcaaccacaggctattcgtttcaagggtcgctgcggcgaagacattcttccaccgcattgagccatcgaagaaggtcagcttccactcgaacccggcagcaaccgccgtcagtaaggcgaccgagaagttccatttccccgttacgaccaaagttagtggtagggtttccatttttagcaagttcaaggcactcataagggacaagttcttgatgatgaggccatcacattcataccaaaggttgggcagcaaagaaaccacagtgaatgagctgctgcagattgtgtcactccttttagcaccgaagcaaatcaatggctgccctactgagcaagagctggtcaagaagaaggcgaaagaagtgatgaagccgggatggggtcgtgaagggagcaacaaattgtggcttccgctctccaaagggaagggcatttccagcatgtttttgagtgggaaatggacgtttctaacctccgcgttggccatcagcactccagctgagtgcgatcactaaaaggtcttttccatgactgtcaattaatgacactactgttatataatctgctataacctcagtagcgcgagcctagctagtgcatgaagagaaggttaacattaattaactgtcttcgtgtctctgttattaactggtgtataactggagaatgtatgtcaattaattattatttgttcgtcgtcc

SEQ ID NO: 8188 - DNA, 1495 bp, Oryza sativa
  ref <308>: DATABASE ACCESSION NUMBER: AK105536
  ref <309>: DATABASE ENTRY DATE: 2002-08-28
agcgcacatgaatgcccgtgcgatgggcatgtgccccatcccgccgagctggagcgccgcgacgcctcgcctccacctccaccacctgctcaccacctgctcctcctcctcgccctcgcctccgacatggaagacgcccaccaccaccactggacaatggtggagcgccgcggaactcagctctgggcctccggccgccccttcatcatccacggcttcaacacctactggctcatgtcattcgctgctgaccaagccacgcgcctgcgggtcaccgccgccatcgccgaggccggcctcaacgtctgctgcacctgggccttcagtgacggcggttaccgcgcgctgcagacggcacccttccactacgacgaggatgtcttccgggccttagactttgtggtcagcgaggcaagaaggcataacatgaggttgatactgtcactttgtaacaactgggaagattatggagggaaggcacagtatgtgagatggggaaaagaggctggtctagatcttacttctgaagatgacttcttctctgacccaacaattaagagctactacaaagcttttgttgaggctgttgtgacaagaataaacacggttacgaatgaaacctacaaagatgatcctactattcttgcctgggagctaattaatgagccacgctgcccttcagatccatctggagatactttgcaggtcttcattacatatgtgttttttgggtaaaaattcgggtcttctatattctgtttggctgcaacgcattttgaggacaaggatttattgtaggcatggatggaagagatggcatcttatgtgaagagtatagaccctgtgcatctcttggagattggtatagaaggcttttatggcccatccattccagaacttttgcctgttaacccagatgagtattcagggcatgccggaatagacttcatcaggaaccatcaagcacctggaattgacctggcgtctattcatgtttattctgacatttggctgcctcaatcgataaaggaaaatcaccttcaatttgtggataaatggatgcaacaacatattgatgatgcagccaatttacttgggatgccaattgtggttggggagtttggggtatcagttaaggacgggaagtttggtaatgaattccgtgaagatttcatgaagacaatttacagaattttcttgagttcttggaaggaaggagtgattggaggaggttgccttctttggcagcttttccctgaaggagcagagcacatggatgatggttatgcagttatttttgcaaaatcaccatccacattaagcttacttgcaaatcacttaaggtgtctggaatgctgagactcaaagtggtgtttcccttctttgtatatgatagtgtctgttttactatatttgtaaagcaaagaccattctgtaaagtcgaacaaatgttttaattttaacgtgtaaggccctaatgccggtcttccatttt

SEQ ID NO: 8189 - DNA, 1679 bp, Oryza sativa
  ref <308>: DATABASE ACCESSION NUMBER: AK105537
  ref <309>: DATABASE ENTRY DATE: 2002-08-28
atccatcccccatctgatctcttgagaaacacgctcatatcgtttacccaaccaagttaacgagtactcacaaattattgattcatggaaggaaggaaggaggaagaagttaccggaatcaagtatagtaaatcaagaagatggagggtttggaggtgagctggacaggacagggagggaggcgatggcgatgacgatggcgatgcgttccttttccttgtgctcgactccactcgatcgttggcctgcgactgcgctcccacggattgggatttgggaacaacgggaagaagcgtttctccttccctgtgatgtccaccgtgccgtgccccgccggccgccgcgccgctttctttcttccagagtccagacttttctggtcttccatctatttgggctggccgggcctagaatcatcatcacttcacacagtgagtaaaatgagactttttttctacaatgatgactcaagcaatgagcgtcgcatggctaccgccttatttagttggggaaaaaattttaggtttagttatcatatcggatatacggatacacatttaatagtttaataataaaataaattacagattccgttagaaaactacgagacgaatttattaagcctaactaatatatcattagcaaatgtttactgtagcaccatattaccaaatcatgacataattaggcttaaaagattcatctcaccatttacacgtaatctgtataattgtttttttcctacatttaatactccatgtatgtgtccaaacatttaatgtgacaacgtgaaaatttttgttttggacctaaaccagacctgtacctatctaatccaacaacaagctgcatgcatgccttcaatgattacaggtttccccaggaaattctcccagatttagggtgtgtttagttcacactataattgaaagtttggttaaaattggaacgatgtgacagaaaagttgaaagtttgtgtgtgtagaaaagttttgatgtgatagaaaaattgaaagtttgaagaaaaattttggaactaaactcggccttaataattcattcttcttactcctacacttctccttcagtgatcatatcgagttacaggtctaacagctgaggctgggaatacaattcatcagcatactaacaccaaaagttctctcacatatagccagcccaacaggaaacatcacagccagctcaagcgctagcccatacatcatcttatctctagttactacccatatttgtaccccgagcatagattctatctcccgtcttcatccctttcttcctccacctcttccttctcatactcgggatcagaaccgtctagctctgaaaatggattctcgctattggaatcatcatcctcatcctctgacaactcttcaggataatcatataatgggttatcctccgctgcatattcaagatcgacaagttaagaaaatcagataataaggactcactggttcaccatggaagcaggtggatggttgtacaattaccatttgaatcatctgtaccataaggatcgtcatcatcataacatacatcatcgtcattgtccacttgtaatctgatgtaaaaaagagaatgttcagaaaatatccccacagaagaatataccatagtaaacacacatcaatcagattacagtgggtatggagctg

SEQ ID NO: 8190 - DNA, 1693 bp, Oryza sativa
  ref <308>: DATABASE ACCESSION NUMBER: AK105538
  ref <309>: DATABASE ENTRY DATE: 2002-08-28
gtcggtcgaaaatttgataatcccgaggacgtataccgaacactgcgcacacggaacacttctgtcgcttggctccctcctaacccaagctcctaactcagggacaagtcaagacgtaggcctactatcaagactcagaacggatcggacatactgcaacattttgtccgtaacacatcaatatgcgcgaggtgatctcaatccacgtgggtcaggccggcgtccagatggggcagtcgtgttggcagttgtactgcttggagcacggcatccagcccgacggcaccatgccctccgacaagcagcccggcgacgagagcttcaccaccttcttcagcgagacgggcaccgggcagtacgtgccccgcagcgtcatggttgacctggagcccaccgtcgtggacgagatccgcaccgggacgtatcgccagctgttccatccggcggggctcatcagcggcaaggaggacgccgccaacaactacgcccggggccactacaccgtcggcaaggagaacgtggacaccgtggtggaccgcctaggcaagatcgctgagaacagcagcggcctccagggcttcctgttcttcaactcgatcggcggcggcacgggctcaggcttcacctctctgctgatggagaggctctctgtcgattacggcaagaagatgaagctccagtttgcggtttatcccgctccagaggtggcaacggcagtggtggagccgtacaacgccgtgctgacgtcgcacaccaccatggagcactcggactgcgccttcatggtggacaacgaggccatctacgcgctgtgccagaagaagctggacgtgccccggccctcttacctgaacctgaaccggctggtgagccaggcggtgtcgtccatcacggcgtcgctgcgcttcgacggcgccctcaacgtggacctgaacgagttccagaccaacctggtgccgtacccgcgcatccacttcccgctcgtgacgtacgcgcccatcatctctgccgagaaggcgcaccacgagaatctgaccgtcggcgagctgaccaactcgtgcttcgaggccaccaaccagatggtcaagtgcgacccccgcatgggcaagtacatggcgtgctgcctgctgttccggggcgacgtggtgcccaaagacgtcaacaacgccatcgccgtgataaagaacaagaggagcatccagttcgtggactggtgtcccactggcttcaaggtgggcatcaactaccagccgcccaccgtggtacccaacggcgacctggccaaggtcaaccgggcggtttgcatgctgtccaacacgacggcgatagcggaggcgtgggccagggtgaatcacaagttcgacctcatgtacgcgaagcgcgcctttgttcattggtacgtcggcgaagggatggaggagggcgagttcaccgaggcgcgagaggacttggctgccctagagaaggactacgaagaggtcggaatggattctggggacggagatgagctcgccgacgaagaagaatactgattggctccagaaatcaatcagtattcgttggctccagaaatcaatcagtattcgttggctccagaaatcaaagtgattttactcgtactgtgatttgaaatttttatcggatgtgttattttacggtatgtttttaaattaaagtatctgaatgttctagt

SEQ ID NO: 8191 - DNA, 1302 bp, Oryza sativa
  ref <308>: DATABASE ACCESSION NUMBER: AK105539
  ref <309>: DATABASE ENTRY DATE: 2002-08-28
cactcgggtcactcatggaccacagcaacagcaaggcctcatcggcggcgacgcccacggcggcggcggcgccggtgccggaccgggcgctcctcgccgacatcgaggcggcggtggagcggtacaccgccggcggcggcggcggggatgatgagaggcacgtgcatgagatactgttcctggtgtcgaacgcgcccggcgcgatcacgttcctgtcgcggcggatcacggcgaggctggaggcggcgcgcgcgccgccggccgccgcgctccggtcgctgctgctcgtccaccgcctcctccgcgccggcgaccggtacttcgagcaggacctccgcggcctctgggcgtcccgcgacctccgcatcgacgcgccacggtgcagctgctcgccgcacgccggcggcggcggcggcagcggcgagtacgccaccgccacgggcacctgctccttcctccatggctactcggcctacctcgaggagcggatgcagtgggccatcaaccagtccggcaacctggagcccacccggccgcgtcctccgccgcacgacggcggcgacgaccacgccgcgggcgccgccgccgcggaggcgccgctcgtcttcaagctggccatgagccagaggctgctcgacctcgccatccagctcctccccgacaacaacacgagcgcgacgagcgccgccgcccggtcggccttcggcattgtgctccgcgagagcttcaaggtctacgacgccttcaaggacggcctcgacgcgctcctccgttctctcgccgccgccggcggcggcggcaaggcgtcgagggcgtcgtcgtcggcccacgagatcctcaagaaggcgcgcgcccagacgccggagctcaaggagttctaccacaagtgcaagaagagcagcaatgtcagcagcaagagcctcgactaccccgtcgtcagggtcgtcacgtcggcaatggagctcgtcatgccgccgccggtcaccgacgacgaagacgacgacggcggcggcgccgccaccaccgaagaggcggcgggggtggcggcgcaggaggcgagccatccccaaccgtttgccaccaagctggagacgacgatcagcacggtgtgggtggagttcgacgacggcgacggcgacggcggcggcggcgaccattcgttgcagggcgtgcagagtagctatctatagctagctttgctagtttgtagaagctgatcatcgtcatgaaatgcaacatgtttgggagtatattaattttgagggcaggattatattgcttgttaattaattttcctctctc

SEQ ID NO: 8192 - DNA, 1388 bp, Oryza sativa
  ref <308>: DATABASE ACCESSION NUMBER: AK105540
  ref <309>: DATABASE ENTRY DATE: 2002-08-28
aagcaccatggctaggaggattattttcctactgttcctcatagcgtgtgtagtcgacagaagcgtcaacgtgcattgcgagaagcaacttgtgtcatcgttcgacaaacatgacaacgcatcgtcttcgctagctgagctgttctctgggaaaaggataccccttttccgatatatcaccaacaaaacatcaaggctatcaactaaagctgtacaggtcggatgggatcgagggctacaaacatccctatatgtcatatcagttgggcttggcacaccagccaagacacagatcgtagagatagacaccgggagctccacatcctgggtcttctgcgagtgcgacggctgccacaccaacccccgaacatttctgcagtcaaggtctaccacatgtgccaaggtgtcctgtggcacttccatgtgcttgcttggaggcagtgatccccactgccaagattcagagaactatcctgactgcccattccgtgtttcatatcaagatggatcggcctcctatggcattctgtaccaggacaccctgacattctctgatgttcagaagatccccggcttctcgttcggctgcagcatggacagcttcggcgccaacgaattcggcaatgtggatgggttactcgggatgggtgctggcccaatgtccgtgctgaagcaaagctcaccgacattcgactgcttctcctactgcctgccgctgcagaagagcgagaggggattcttcagcaagaccacaggctatttcagcttgggcaaagtcgcaacaagaacagatgtcaggtacacgaagatggtcgcacgcaagaaaaacacagaattgttcttcgttgatctcaccgcgatctctgtcgatggagagaggctcggcttgtcgccgagcgtcttcagtcgaaagggcgtcgtgttcgactcaggttcagagctgtcctacatcccagaccgtgcgttgtccgtgctgagccagcggattcgcgagctgctgctgaaacgcggggcggcggaggaggagagcgagcgcaactgctacgacatgaggagtgttgatgagggggacatgccagccatatccctgcacttcgatgatggagctcggttcgatctcggcagccatggcgtgttcgtcgagagatcggtgcaggagcaggacgtgtggtgcctggcgtttgcgccgactgaatctgtctccattataggaagcctgatgcagacttccaaggaggttgtgtatgacttgaaaaggcagctgattggcattggaccatcaggagcttgttagttagttattgggttgtgtgtgtgtatatatatatatatagagtagctctattgtacacccctcccttagaataactattctacacctccaaaac

SEQ ID NO: 8193 - DNA, 1567 bp, Oryza sativa
  ref <308>: DATABASE ACCESSION NUMBER: AK105541
  ref <309>: DATABASE ENTRY DATE: 2002-08-28
attttggcgtctctcccttactgcctaacacgtcgccgcgtcgtttcttgtttccctctgtttattattggtgttcggattcgttggcattttcgaacggacgaggagcatcgagcttggtggtggtggtggtggcgaggcgatgacgaccgcgcggcaatggtggcggcgggcggcggcggcggcgaaggacaggaggagcctgtacctgacgcgcgtggcggcgctgcggccggcctccccggcggcggcggcggcgctgaggaacgcggagctggaggcggtggtgatccgggcgacgagccacgacgagcggtcggtggactacaggagcgcggcgcgggtgttcgcgctggcgcgcgcgtcgcccgcggtgctgcagccgctcatgtgggcgctcgcgcggcgggcggggcggacgcggtgctgggcggtggcgctcaaggcgctcatgctcgcgcacggcctgctgctgcggtccgacctcgccccgcgcgcggcgcgcctcggccgcgtccccttcgacctcgccgacttccgcggccgctcgtcgtcgccgaccaagacgtcgggcttctccgccttcgtgcgcgcctacttccacttcctggacacccgctccctcttcgccgcccaggacatggacaacaacgacgacgacgacgccgacgacgaggacgcgcgcctcgacggcgtgtcgaggctgcagcacctgctcgacctgctcatgcaaatccgaccatacggggacggcatggagcagggcctcatcctggaggcgatggactgcgtcgtcatcgagatcttcgaggtgtacagccagatatgcaccggcatcgcccgcttcctcgtcggcgtcctcggatcggcgccgacgacgccgcggccgcggccgggggagaccatggccgccgcgcggcggcggagggggctgcaggggatgcgtgtgctgcggaaggcctcggagcagagcgcgcagctcacgtcgtacttcgagctttgccggagcctcggcgtgctcaacgccgccgagttcccggcggtggagcgcgtccccgacgacgacatcagggacctcgagaagctcatcatgagccacgtggtcgaggaccgcgggaaggagaaggtgagcgaggagaaggcgttggtcgccgtggaggacaccggcgtggcgtcgaggacggtggtgacgagagagtgggtggtgttcgacgacgacgacgaagacgacggcgtcgccggcgcgaggcaagggcattttggtcactacgtgaacccgttctttggcgcgccgtgggaagctgtgacggggagcgggaacttgctagtttagacggtctgaccgacgccgtcaaagttttttttttttccagaaaagaaatcgcagtgtatgtggaatacttgagtacttccgagtttttgttttgcttgtaaatacagatgtgtgttgatctccagggaaaatggatgatcgttttcttttagtttcaaaaccagtgaggaatgaggagtgagttgagctgtagagaacttatatatacataaaaaatttaccacttaccagatc

SEQ ID NO: 8194 - DNA, 1340 bp, Oryza sativa
  ref <308>: DATABASE ACCESSION NUMBER: AK105542
  ref <309>: DATABASE ENTRY DATE: 2002-08-28
gatgcagcagagaatactaagcatggtagcattgcagatatgcacagtgcttgtgaccatacaatgggtggctacatgagacaatgttacaagattccaaacttttgtctacaacactgtccccatggctgtcaattagattcagcagcaagatggttggaacttgaccctgaggataaaatttgttaagcatcttgggaatccagtcgatggatgaccacggcaactgatggtgctaggttccgatggatggcgtggtggacagggacatgcccagctccaggtccagcggagagcaatggtgactagtgccgtatccatgaccttgttgtgcttctgaaactgatggtgtttctgacgaaggccacgcactgtcacctgatttgtggtgcgaaacttggagagacagagaagcagagatgttgttgttgcagcgagtggcaggatcggatgaggcgagagatcttcctccactgtcacaatcctgaacctgccatgacatatcagctcagctcagctcgacttgtatgaacatatgaatgcagtatgtatgcgtgtgagcgtaccatgtcgaagaggctggagcggcgcttgttgttggtcttcttggcggcgctgttgtggcggaggaagaacttctgggcatggctggcgacctgggtgggcgtcctggtggtgacgaagctccgggagatgcctcgccagtcgcccttgcccagcttctccagccccgccaggaacagcctgagctcttgctcgctccatggaactcctgcacgcaccacgtcgtacgttgcatccatcaatttccagttgcaagaatcaaattgacatgcttcaatggataactaattgatttacctttcttcctctcccgcatggttgccgccgcgccgtgaggcccgtcggagaggtagccgtcggcggctggcctctcgcagccctcgtcgatggacagcaacaacgaggacgtcaacggcgacggcgacgacgacgacgactgcaaggaggaaggagaagaaacctgcagccgcaggcaatccatgctgtaactcttgtgcaagtaggacgccggcgagctggccgccgcagcatggagctgcaccccgaacagccgtagcccggcgccgccgccgccgccgccctcctcgccggctcgttggcctgcagtcgagtagtcaccagagcatcgcctcgccatgatggcgtgcatgcgtcaatgcgtttgtgtgtgtgttgtgtgtgtcgcggctgcagattagcaggctagttaagggagggagaatgacctgcgcatttgcattgcattgcacaatcgaatgggatacaaatatggtaat

SEQ ID NO: 8195 - DNA, 1391 bp, Oryza sativa
  ref <308>: DATABASE ACCESSION NUMBER: AK105543
  ref <309>: DATABASE ENTRY DATE: 2002-08-28
aaaggcttcactctaacactgaggagtgcaaccgactcgatatccagcagccatgtcggcgccggctggtctgcggcagcactgcgcattgggccgcgccatagccgtcgtcgccatctgcctcctcgtcatcgtcggcacgtaccttctatcttctccggccgccggcgacggcgacacggaggaggagttcttcagcgtgaggcgccgccgtcgttcatcggtcgacgccggcgacgacgatctggaggcggcggtgcgcggggcggcgtacgcgaacgggacgctgatcgtgagcgtgctgaacagggcgtacgccgacgaggacggcggcctgctcgacctcttcctccggagcatgagggaaggggagggcaccgagcagctcatcgcccacgtcctcctcgtcgccatggaccggccggccttcctccgctgcaggcgcctcggcggcgtccggtgctaccagctcccggcggcgcaggacggcgccgacgacctctcgtcggagcagctctacatgtccgacggcttcatacgcatgatgtggcgacgcattcgcctcctcggcgacgtcctcaagctcggctacagcttcatcttcaccgatttggatgtgatgtggctgaggaacccgttgtcgaggctggagtacagggcggaggaggaggacctcctgatcagctccgaccagttcaacggccgccccggcgacatcgccggcaacgagctcaacaccggcttcttcttcgtggcctccaacaaccgcacggcggcgctgttcgacgagtggcacgcggcgcgggaccgctcggcgggaatgaaggagcaggacgtgctcaacgacatgaagcgccgcggcgcgctccgccgcctcggcgtccgcgcccgcgtcctcgacacggcgcgcttcagcggcttctgccaggacagccgcgacgcccgcgaggtcgccaccgtgcacgccaactgctgccggaccatgcgcgccaaggtcgccgacctcgcggccgtcctcgccgcggcgcggcggcgcctcgacggcgacggcgcgtcgccggtgctcaggtggccgccgcactcccagtgtgtcaagtcatgggagtgaggcgacacacacacgcacagaatggtcgtgagctaacagctgctactactgattattttttttttgttcaaaagctgaagaacaatactactacagtatgaaagttgcagagagaaatggaattttataacaacatatgtggcatatcaagattggttctgaacttaatgttatacatagggaaccctgcatttcttgtacttgccatatatatacagggagtcctgcatttgagctctatcaaatagtactagctaacaaattgggtgatatttataccgag

SEQ ID NO: 8196 - DNA, 1428 bp, Oryza sativa
  ref <308>: DATABASE ACCESSION NUMBER: AK105544
  ref <309>: DATABASE ENTRY DATE: 2002-08-28
aagttttgagttgagttaagttgagttgagtagtcgagtgggcggcaatggcgagcacgaggaggcgacgcgcgggcggcgtgccaatggcggtgatccggctcggagtggcggccatcgtcgtcctcggcgccggcgtgatcggcggcgcgcgcgcgcagctcaggatggggttctacgacgagagctgccccgcggcggagcggatcgtcggggagtacgtccggcagcacgtcggccgcgtccccaccgtcgccgccgcgctcctccggctgcactaccacgactgcttcgtcaggggctgcgacgcgtccatcctcctcaactcgaccggcaatggcggcgcggcggagaaggacgcggcgccgaaccagacgctgcgagggttcgacctcatcgaccgcgtcaagggcctcgtggaggcggcctgcccgggcgtcgtctcctgcgccgacgtcctcgcgctcgccgcccgcgacgccgtcgccgccatcggagggccgtcgtggcgcgtgccgacggggaggagggatggcacggtgtcgagcatgcaggaggcgctcgcggagatcccctcgccggcgatgagcttcccggagctcgccggcttgttcgccaccaagggcctcagcgtgcgtgaccttgtctggctgtcaggcgcgcacaccatcggcatcgcccactgctcgtccttcgccgaccgcctctacaacggcggcggcggcgccggcaatgccaacggcaacaacaccgatccgccgccgctggacgccgcctacgccgccaacctgcgtgagcgcaagtgcaggacggccggcgacggcgtggtggagatggaccccggcagccacctgacgttcgatctcggctactaccgcgcggtgctcaggcaccgcggcctgctccggtccgacgccgcgctagtcaccgacgcggcggcgcgggccgacatcgccggcgccgtggcgagcccgccggaggtgttcttccaggtgttcggccggtcgatggcgacgctgggcgcggtgcaggtcaagaccggctccgatggggagatcaggaggaactgcgctgtcgtgaacagcggccactgatcaaaaggggagttgatttgcaattcttcctgggatagcgtgattttgttcttacgatttcttcacttttgtcatttgaatttggtgaaattctagtagaaattttgctgcgcgtgttcttgttgtgttcagtgtcgttgctgcaaccggcaaagctgtgttcttttgctttgaagtgtgctgtagtaatttatagctgatgagaaaaaaaaaaacagaatacatacagtttacagtatgaacagaaaataagacaaaattctccgaattagcgtcaaatgaagtctgtatgcatgcacaggtaataacaaagcttgcaaatacatcaaaagac

SEQ ID NO: 8197 - DNA, 1593 bp, Oryza sativa
  ref <308>: DATABASE ACCESSION NUMBER: AK105545
  ref <309>: DATABASE ENTRY DATE: 2002-08-28
gaattttcctgccctgttttctactgtttggcacgcacattttcatgcatgctcccctgcttttttggcatggctgggtgaaaatcgatgggccaacaactgctcatgtgaaagccaagatattgacgctagcaaacgctgcatctcaatgccttggcacggctctggtgcgaaacgactgttggtccttcctcaagggtggtttcaccctcaactccgcttcagaaacctccgtcctctatttccagactgcaagcccaaatgcttcaacgatctcgatcagaagtgcctctttgcaaccattttcacctgaacaatggaatcagcacagggaggaccgtattcagctgaaccggaagcgctctgtcaatgtccacgtggcggacagcaacgggagtcgcgtggttggtgccaaggtcgcggtgcatcagatcaccagggatttcccattcggctctgccatcagcaggacaatccttgggaacaaactttatcaggaatggttcaacaagaggttcaatgcggcggtgttcgagaacgagctcaagtggtatgcaacggagccatacccggggaaggaggactatacggtggcggaccagctgttgcagtttgtgcaggccaacgacgcagtggcgcgcgggcataatatcttctgggaggacccaaagtacacgccagcatgggtgaagaatctgacggggtcacagctacgtgctgccgtctctggccgcatcgagagcctcctctctcggtacaagggcgactttgtgcattgggacgtcagcaacgagatgctgcacttcgacttctatgagaaccgccttggcggcaacgccaccgtcgacttcttcgacacagccaagcgcgccgacccgctagccacgctcttcctcaacgacttcaacgtcgtcgaggtctgcgatgacctcagctccagtgccgactcctacgtctcccgcctccgccaactcgccgatggcggcgtcaccttcgaaggcatcggccttgagggacacttcggcaagcccaacatcccctacgtccgcgccgtgctcgataagctcggcaccctgcgtctccccatttggcttaccgagatcgacatcagtagctccttcgaccccaaaacgcaggctgcatacttggaagaggtgctccgagaagggtttgcccatccatccgtggatggcataatgctgtggacggcaatggacaccaatgctagctgctaccagatgtgcctgaccaaccagaacttcaccaaccttcctgcgggagatgtggtggacaagctgctgggggagtggcaaaccaaggagaccctgggaaccaccaatgaccgcggctccttcaacttttctgccttcttgggagaatacaagctctcggtcacctatctcaacctcactgccgagggaaccttctcgctggcccatagcgacgacaccaagcatatcaacatccgtctatcaccatcatgttgaaattgaattgattcttgtgttatatagaaggatgtgatgatgaaaacttggtagtgtaccttaattagagggagactccatacgtttgtgttgatacaatggattc

SEQ ID NO: 8198 - DNA, 1837 bp, Oryza sativa
  ref <308>: DATABASE ACCESSION NUMBER: AK105546
  ref <309>: DATABASE ENTRY DATE: 2002-08-28
gaaaagaggagaaagaagaagaagaagctgctgatgtgtggctgtgcatctggagaggacgcaatggagaccaggcgtcctctgcatccgctgctcctcttcttctcgccatggcttctgctgctgctgcttcttgttgttcaaggcgtgaggtcgctgcagttcacgcgagacgatttccctgacggattcacgtttggagccgggactgcggctttccagtatgagggtgcagctgcagaggatgggaggacaccaagcatctgggacacctacgctcactcatggaggaatccgggaggagaaacaggtgatgtggcatgtgatggctatcacaagtacaaggaagatgtaatgctaatgaatgagacaggcctggaggctataggttcaccatttcttggtcgaggctcattccgagtgggagaggagcggttaatccaaaaggcttgcagttttacaatagtatgataaatgagctagtaaaagcaggtattcagattcatgctgttctgtaccatatagatcttccacagagccttcaagatgagtacggtggatgggttagccccaaagttgtggatgacttcgcagcatacgctgatgtgtgcttccgcgagttcggtgacagagtcgcgcattggacaacttccattgagccaaatgtcatggctcaatctggctatgacgatgggtatctcccgccaaatcgttgctcgtatccgtttggcagaagcaactgcacactaggaaattccacggttgagccatacttgttcatacaccacaccctgctagctcatgcttcagctgttagactttacagggaaaagcaccaagctgcacagaagggcgttgtcggcatgaacatatactccatgtggttctacccactcacagagtcaactgaagatattgctgccactgaaagagtaaaggatttcatgtatggatggatcttgcatcctttggtgtttggagattacccagagaccatgaagaaggccgccggttcccgtcttccattattctctgactacgaatctgagctggttactaatgcgttcgacttcattgggttgaatcattatacctcaaattatgtgagcgataatagtaacgcagtaaaggcgccgctacaggatgtcactgacgatatttcttccttgttctgggccagcaagaatagcacacctactcgagagtttctaccagggacctcattagatcctcgggggctagagctcgcgcttgaatatcttcaggaaaagtatggaaatttgctgttttatatccaggaaaacggtagtggatcaaatgcaaccctggatgatgtggggaggattgactgcttgacacaatacattgcagccacgctgcgatccatcaggaatggcgccaacgtgaagggatactgcgtgtggtcattcatggatcagtacgagatgtttggcgattacaaggcgcatttcggcattgttgccgtcgattttggcagcgaagaactgacaaggcagcccaggcgctctgctagatggtactcggacttcttgaagaacaatgctgtcatcaaggtggatgatggttctgtctccacagccttccatgctcagctttgagtgatgggtgctactactctgaacaccatcctgtatgctctcctgcaagaacaattctgttttagtggcatatcatcatgtatctaccaattttcagagttggaagtcgtcaataggtacattggtaaaattatcacgaaacctgagattgaggccattcgcatggtttcgggtgtgcactctggtgtatacccttcctcgatagccaactgtcgatg

SEQ ID NO: 8199 - DNA, 1636 bp, Oryza sativa
  ref <308>: DATABASE ACCESSION NUMBER: AK105547
  ref <309>: DATABASE ENTRY DATE: 2002-08-28
aaaactgcatgcagaagggaggggtgcagacgacacgattctcccacagctcatgtcaacctgaagtaagtagtaagcaccgactgggaaggcgatcccatcccgatcttggttgaactcgcctaacatgaagtagatgatatgttcctctagcgagctcaggatggggtacattggtgtcatactcatcggcagcagcagcctccataatgtcacatagcgatccccgggattgatgtactcaaggaatccatcgatggagatgaatcggatggatcccccagcataacccatggtgcgataaacttctggtgctgccacctgccctgtgtaccggacatcagcttgatatcccataggaagattgatgaagctgaagtccacccgatcaaccttgtcggagagtaggtcatcacaagagcaaaacagtacgccgcacaggagatccgcccaaaaaccatgtccctcaaacgagaaagtcaggtcggctacgaacgagctctcatcgtccagccactggttgggtaggttggccgtcttggtcagctcccacggcgaagaggacgacgaaggccacaggagaaggacatcttgccagttgatgtcgttgtcgccgtcgtcttctccaccggcgaactccaccttcttggccttgcccaggaagacgtcttctccggtgagaacgtcttcctcgtctccagtgagaacgtcttcctcagcgaactccggcatcttccccttgcccttggcgtcgtccccgccggaacttggcgtcgtcctcgccggcgaacttgggcatcttggccatgagaaccagtgcgtacgactggtcattatagccggggtggcggcgcgcgatgagaagtcgtgtggtacggctgacctcacagcaggaaggttcacaagggatcatggagagcaccttgccaattgtgtcatagatgatgtaggcgctacaaggagcttgaggcaggtcagatgtgaaaaccacaatgttcttgtcgacggcgtggacgaagggaaacaatctctctccactgctgctctctcctcctctcagggagaaagaggagagttttggggcatcggcgatgcgcgcttccagatccagacaccacaccaacgattcggcgtcgaagccggcttggacgttgtcgcccaaggcatcgaacccccacgcgtgacggcttttggtagccaagcgcaggcaccgcaagggtggtctctgatctgcgtaggcggcggcgtcacggctcgcgtcgccgtccagcacggaccaggaagggaaaagcggagacatggtggtggaggaggcggcggaggggagggagaaggcggcggcgaacgcaagggcaaggggggattgggaagagggatcgatctcgtcgtctcgatctgtaagcgccgtcggaatcgtcggatgaaggacgacacggatcgatgtgattaattagacggcggatgcgtagctacaacaaacacaatgcgagaatacggcgtggattgcctgttttggttcgagaacggcactccagagactccgcgggtgccacgctggtgggtgcgggtcagattgtataagttagcgtgggaatttttttaaacaaatttcttatacgattcattctgtattatc

SEQ ID NO: 8200 - DNA, 1759 bp, Oryza sativa
  ref <308>: DATABASE ACCESSION NUMBER: AK105548
  ref <309>: DATABASE ENTRY DATE: 2002-08-28
ctttcttcctcccttgtctgttctcccatgagctgagctctctcctaattttctccttcccgaatcttcttgaaaatgcaagaatcaagccctgcatgtcacaccactagatccttgtgattctaagctttccatccatccaaatggcttgcacatgcatagatttgtgagggagatcgagaagaaaagagaaggagcttgctgcttggtgcagtagcagtaacacttcgttttcctccacttgattcggagaatttggaatacgtggagcaagactcagaggttgagtgtgtttccgcacagcagcaaggcaagcgtctatggatattgaacctatgatttcacaaaacttatttgcttgcaaaaactatatatatgcataagttgaattgccttaaaatgtcggtaacgggtagagttgtttatatccaagttcatgcatttcccttcctttaatatattgttgccatgtaaccttgtcaccttcaattgtaaatggttaggatggtttattctatcatcgaatgcttagccatgcttaggtctactgttgttagaaatcgatggatggagccatcggatgaacttattcaccacccgcgatttatgggcattaaaatctgattacctcactcaatgattaatatggaaacatgctttagcttggacgtgtgatagggcgatgacgggatggtcattttccctgatgcaagtagccttgtctgggttgttaaggaccgaacatgttgacgtctattcaagcaccatacgtacttccacacaccttatttgggaccggcttgtcttagtactatgttgcactgtgctcatctacgtcttgctggtcattcgtgagggtggttttccctttggattgccccgggtgtgcctgattttggcagggggtttctcccgcgatggtgagctggccacatcacacgcacgtggctaagtcgacgggggcctaggcgtggtttaggtggttggggtgtcactaggaaaggacatgttatgagcttgtatcacttgtaggtcacacctgtgtgcgtgtgaagcatttgatccttgttcatttcgtgtgggtaaagttgtacacctctgatcagagtaaaactattcgaatagccgtgtccacggttataggacgatcgcttgatgtgttagtcagtctatgttagcatcaaacttgggttaaatggctggtttagtcatggatatggtgatagttatgtttggaatccatggttgggcaacggtagcccatggatggtgatgagagcaccggttgtgctcatttgtgattcaatttcagatttacttgcttgctgtcctaaatttcggattatgctattttgtacaaatgttatatttgcaacttactacttgctcaacaaaattagctctatgcaaaatctgaaccacttagccatttcctttgatgtagaaatttgcatactcctttgtactatcatatatggtgtaagtcttgcggagtacctttcgtactcatgttgctattttcaggtgaggatgccggcgttgatgttgtgccctactactatcccaccaagggtggcgagggtagcgagtagttgaagttcgctcttgccccgattggttgcccttgtggggttgttggcacaccacaggtttttcttttgcttatgagaaattatgaaacttccgctgctatattttgtgttgtatgatgggcttgtgaaccccgttatgaaatatgtaccttgctgtccttgtatct

SEQ ID NO: 8201 - DNA, 2141 bp, Oryza sativa
  ref <308>: DATABASE ACCESSION NUMBER: AK105549
  ref <309>: DATABASE ENTRY DATE: 2002-08-28
attcaggagacggaacacccgtatcgtatcgcaccggggcagagcaaccagccaacccgcgaagtagtactgagtactgaatggaaggtctggataggcaggccacgcgcgcacacccgtcccttcctgggcggcagccggcaggcacccgtcccccacccacgctaccagagttcgccggagaggcggccacctgtcgagagggagcttctccacacggccaccgcagcggcaaccacccccaccacctgtcctgctcccctcctcgtgccgcctcgtcctctttttaacgggtttctgacgcacggggggccgccgtcatgtgcctcgccgccgccatcgcgtccgcgtccgcctcacccgcccgctgcctgtcgccctcctccgccgcgctcccccgccgcttcctccaccacctcctcctcgccgcgactcctccccggccaacaccgcccccgccgccgctgcgctgcatcccgttccaccggatggcggtaagcgttggtgctcctcccctcccctatcgattttctcctgtggcaatcccgattccgtggaaatttgtgcccggcgatgcccaaccggaacctgctccggatggctcctcgtgtgacctgttagggtaaagttgcgtggctaattttggggaatcacttgaaagcgcagatgtccaaaccagtgaatttcggaggtgtgctggattgctcagctgtttgctttgcccttgtgactaaaaatgttcaccttttggcgacctaacttcatatatagggactaccttaaagtgaaatccatgctgtaaatgaatcccgtatcttaccatgtccatgtaaatgtgaatttacattttaggtcttgtgaattcgtggttgctttccaaatgatccatgtactatagaattatgatgagtgaacatttaacttttgagctctgtcgttcccccccaaaaaaaaagtttcagcattgtggatttggttgttttccagatgcatgcactactttcaagaacaccccatgtattagtttcaagctatgatcatacctgcgatggatgctttcatctgaccattgcttgcttgccatccagcaattctggactcaaggatcactggacaagaacaaagctcttgtcgaatacctgaagcaatatggtgctgttagaactgataaagtggctgaagtaatggaaagcattgacagagcattgttcgtagcagagggccttactccttacactgacagccctatgcctattggttataacgcgacgatatctgctcctcacatgcatgcgacctgcttggagctactgaaggatcacttgcagccaggaatgcatgctctagatgttggatcaggcagcggttacttgacagcttgttttgcaatgatggttggaccagaaggccgtgcagtggggatagaacatattcctgagcttgtcgctgcttcgactgagaatgtccaaagaagtgccgcagcacaattactgaaggatggatctctttctttccatgttgcaggtatgctaagctgctaactggtctgatactggcactagaattagtgtattactgaacgcatgctttgcttccatcttggcgaaatctaaaatgcaaaatcactatgcgcataatatttcttgccgttctcaacgctgcagatggcaggcttggttggcctgacgatgcaccatacgacgccattcatgtgggcgccgcggcaccggagattcctcagcctctggtcgatcagctgaagaccggcggccggatggtcatacccgtcggcagctacttccaggagctgcaggtggtcgacaagaacgccgacggctcggtgaccgtccagaacgacgcgtccgtccgctacgtccctctgaccagccgctccgctcagctgcaggattcctaaggtcgacggctctaggaggtcatgaaaacacatgtaaatatctcgacgctcagtctacttgggtagttgggtagtttgattagtgctaattagtttcttctaacgaggttgagtagatggtttggtctgagacgttcagtcatggtcatctgtcagatgctgtagatcgagcgtgagctctgagcaatactcgataataaccaataaaagtacttcttagcctttc

SEQ ID NO: 8202 - DNA, 1834 bp, Oryza sativa
  ref <308>: DATABASE ACCESSION NUMBER: AK105550
  ref <309>: DATABASE ENTRY DATE: 2002-08-28
actgcgccatggagcactctcttgttgctgaggctgaagcacaagtgttcttcaaggccaaggccaagggtggtttcagagccctcccttttatcatctcaaacgagatactggagaaggttgctggattcgggctcaacatcaacttcatcacgtacctcaacatgcagtaccacctgagccatgccaacgccggaagcctcctcttcgtgtggggcgcagtatcaaacttcgcgcccatccccggcgccgtcattgccgacatgtacctcggccgcttcatcgtcgtcgcgatcggctccatcgcctgcttcgttgggatggttttcctgtggctgagcgccatgatacccggagcgaggccgccaccgtgcgacatgagtgcctcgccggagctgtgcgcgccgccggaggcgaggcacatggcctggctgctggccggcttcgtgttcctgtccgtcggcgccggcggcgtccggccgtgctcgatggcgttcggggccgaccagttctccaggcaccccaaggagaggaggtccaggatcctgcaggtgtacttcaacgcctactacggctccatcggcgtggcgttcatggtcgccgtcacggtggtcgtgtacgtgcaggacaacctcgggtggaaggtggggctcgccgtgccgacgtgcctcatgctgctctccgctgcgagcttcctcctcggctccggcctatacatcaaggacaggggctccaagcggatgttcgccgggataggcgccgccgtcgccgcggcggtcaggaaccgtagggcgtggctgccggcgaagaccgaggacggcgtgtaccatcacctcaaggactgcaagctcaccgttccgacggacaggctgaggttcttgaacaaggcgtgcatgatcagcaacacgaaggaggacaagtctggtagtggcggcgcggacggcatcagcgacagagggcggctgtgcacggtggaccaggtggagcagctcaagtcggcgatccgcgtgatgccgatctggtcgtccaccatcttcctcgcgcaggccatgaaccagtacttcgcggtgccgcaggccgacgcgatggaccggcgcgtcggcgccggcgggttccgcgtgcccagtggcacgttcgccgtgttcaacatgctcaccatgtcgctctggtcgggctgctacgaccggtggaccgcgccggcgctgcggcggctgacgggcaacccgcgggggctgaccatgaagcagcggatcggcgggggcctggtgttcggcaccgcggcgatggccgcggccgccgtggtggaggccgcgcggcgcaggcaggcgctgggcggcggcggcatgtcggcgttctggctcgtgccgcagtacgcgctggcggggctcgccgaggcgttcggcgtgatcggggtgatcgagttcttctacaccgagctgcccaagagcatggccagcttcagcatggctctgctctacatggccctgggggcggggagcctggtggggagcttgatcatcaagttggtccacgaggtgagcgggcggagagggaggacgagctggctggcggaggacttgaacgccggccgctacgactactactactggcttctcgccggccttggcgccgtcaacttcgtctacttcctctggtgcggctgggcgtacggcgaggaggggcagaacgtggagtgggaagacgaaggtgagggagagacgactatagcttagtagttttgtgctgaagcatgcatgtggattgctgggaacttgtgacaatgtggaacctttcctatggttatgctaatatgaagcctatggtttggttgccc

SEQ ID NO: 8203 - DNA, 1509 bp, Oryza sativa
  ref <308>: DATABASE ACCESSION NUMBER: AK105551
  ref <309>: DATABASE ENTRY DATE: 2002-08-28
ctttgtggattaaactctcgtcgttagcgatggatcattccgccgccgccatggcgaacaagccgtcgctcgccgtcgcggcggcgtcgcggcagaggtgggcgctggccacctcgctctgcgcgctcctctgcctctccctcgtcgtctccgccggcctcctcctcctcggctcgacgcgcccgttccgccggccgctcttcgcggcgccgcagcagcagcgggaggtggtcggggaggcgccgtgggagaggtacgtcaagctggcgcaagcggcgtcgccgggcggtgcccgtgatcgcgcgcctgatcttggcggggatgagggggcggagggggacgacgatgatgccatcagcaccgcaccggcgccggcgccttcgccggccgccgaggagggaggagatgaggagagctgcgacctgttccaggggcggtgggtgcgcgacggcgcggcggcggggggctacccgctgtacgaggcggcggagtgcccgttcctgagcgaccaggtgacgtgccggcggaacgggcggccggacgccgagtacgagcagtggcgatgggagccgcgagggtgcggcggcggcggcggcggcggcggcgggagtagggaggcggcgctggcgctagcgctggagcagtgccggaaccggagggtggtgttcgtcggcgactcgctgaaccgcaacatgtgggagtcgctcgcctgcctcctctacaccgccgtgcccgaccgctcgcggtcgcgcgtcctcgacgtcgcctccgactacaggatcttccgcgccatggactacaactgctcggtggagttcttctggagcccgttcctggtgacgctcgagacgaagcaggaccggacgagggcgctcaagcttgaccagctcccggctacgctggagaagctgcgcggcgccgacgtcctcgtcttcaacaccggccactggtggacccacaccggcaacctcagagcgtgggaccatctggaggcggacgggaagccggtcgagatgggaggcgaggaggcgttcaaccaggcacttgggacatgggcgagctgggtcgaccaaaacgtggactcggccaggaccagggtcttcttccgaagcatctccccagaacacaagagcgaaaactggtgctacaaccagacgtccccaatcacggacgagacgaagatcgtcccatggttcccgaggggcctggtgtccatcgtcgagaggaacatccggagcacgaggacgcccgtcacgtacctcaacatcacccgcctctccgagctccgggtcgacgcgcatccgtcggtgtacaccatcaccagggaagggaagcccctgagcacggagcagcggcaacagccgctggtgtacgctgactgtagccactggtgcttaccggggctgcctgatacctggaacctgctcttgcttgcctccttggcgaggtctccagttaatgtacactagcttaggataaaagagataatacacagttttgcagctttgc

SEQ ID NO: 8204 - DNA, 1407 bp, Oryza sativa
  ref <308>: DATABASE ACCESSION NUMBER: AK105552
  ref <309>: DATABASE ENTRY DATE: 2002-08-28
tgaattctcgctcgtgagtcgtgacagtagaagagctatcagagtatcagtagaaaaatcttagcatcgatcatggcatcgccaccctcgctgctgcccagcgccggcgaggacgacgaatcccagcgagaagtttacgagcagctccgccagctcgtgtcgacctacccgaccgtgccgagcggcctcgacaccccgtactaccgccaccccgacggctggtacacgttcttgccggcgatggtcagcgtcatggtggcgcagcgccacttcaccgcccgcgacaccgacatcatcatcgccaccttccccaagtgtggcaccacctggctcaaggcgctcctcttcgcgaccgtccaccgcgacggcggcggcgccggcggcgtggaggacgacgcggcgctcgcgcagctcagggcgcggaacccgcaccagctcgtcccgttcctcgagatccaggtgtacgtgcgcgacagggcgcccgacctgagctccctcccggcgccacggctcctcgcgacgcacatcccgcgcccgtccctgccggcctccgtcgccatctccggctgcaaggtggtgtacatgtgccgcgaccccaaggactgccccgtgtcgctgtggcacttcctggacgcgcagcggccggagccacgcggcgacgtcggcgaggacttccgcctcttctgcgacggcgtgtcgctggtcgggccgtactgggaccacgtgctggcttactggcggtggcacgtcgagcggccggggcaggtgctgttcatgacgtacgaggagctgagcggcgacacgctggggcagctgcgccgcctcgcggagttcgtcggccggccgttcaccggcgaggagcgggcggcccgggtggacgaggcgatcgtgaaggcgtgcagcttcgagagcctagcgggcgcggaggtgaacaggtcagggacgattgagctgatggaggagccgatgcggaacgccgagttcttccggcgaggcgtcgtcgggggctggccgaactacctgtcgccggagatggccacaaggatcgacgagattaccgagagcaagttcagaggctctggactggtgttgcccacgatgatgaccatgtaataagtacagtacattttgcaatattgttacaaccactggtggagaaatatttttagtcacggttcgcaaccccctgtagtcccggttaaccaggactaccaatccgggactaaaaatcgctatctttattcccggttcaaatacccggaactaaaaatagatctttagtcccggttagcaacaccaatcgggactaaagagaggggccaacgggactaaagagagggttgcggtagtgagatgatcccctttttcttttttattttctcccaaatcaagtgggagacatatctc

SEQ ID NO: 8205 - DNA, 1395 bp, Oryza sativa
  ref <308>: DATABASE ACCESSION NUMBER: AK105553
  ref <309>: DATABASE ENTRY DATE: 2002-08-28
ttatttgtaggagctttttgcttggaggcttgcgccatcatcattgccatggtttcaccgagagcgtgggcatccatggaagctcgaggtggaggatgcaacagcagtttgctcacccgagcaacctgtaggtcatcatgttcatctatgttgccgagtatccatccagagaaaaggctatggtggtcaaactcattagggcagtataactttatgagctcccgcctggctgatggcaagtcgaggataaccgaggagatgatggccattgttggagctaaggaggtgtggagtaactttcggcacactaggcatggtccagtcaccgatgaaatgaaggagcttatccaccaagaaattgataataacaagtagaagaaacctctaaacttgtctcctcaattgttttttgcgcaagctgcttcctcctttgaggaaaccttgttcatgatgcacctctacactgacatgtacttgtacaaggtaagcatataactagatacaattaggagcagcgggagggatgatgatattcaagagaaagaggtacattccctgatgcatacatgcgaggtgatatctgactacatgttcttcctgctggtcacgcagcctgccatgctgcctgttcaacgcaatgtgtatgatttgttagcattggttttgaacgatgccggctatgcacgtacctccagcaaggagcagtttcttgagacagtggctagcggtgagtactcgtgggaccaaccattcatggacttcagggcagcacctcctgatgacatgttgcagcagggttggaagggtttgcatgcagcgctgcaagtaatgttgcagatctgggtgcggctgctgatctacgcggcgggcaagtcccagcacgcacggcggctgagcatgggaggggagctgctcaccttcgtttggctcctcatggcgcatcgggagcttggagacatctataatatccagttccagcttgtggaaaaagagaaagacgggtcagtccgtactggtcctaattcaacaataaccaccgacatatatactcttttccgtttaggtcatccgatcgacatgatcaaatagtactggtggccggtgatcgatggtctctttggactctgattatcttaagccatcaagggcatgtatgcccgcaccatctcgatcgtttccttcatgtggatcataatataatcgatcaccctcggttattttttttctttcttttctttttggttgtgtgctatctgctattatctaataatgtcatttgtattagttgctggttaattttgctgtaattaaatatattgtttttaattattcaatatgcatgtaacggactatatatgtatgtataattaatccatgcacatatttttgtaagct

SEQ ID NO: 8206 - DNA, 1727 bp, Oryza sativa
  ref <308>: DATABASE ACCESSION NUMBER: AK105554
  ref <309>: DATABASE ENTRY DATE: 2002-08-28
aacgttgatcggcatcaccggatcgatctcaacgaggttccattcgtccatgccgccgccgtagtcctcttcttcttcttcttgacgctgctcctccgaatctgatccatcaaaatactccttggtagtcgtgtcgtcctctccaccgtcaatggtagcggagttgcttgaatcatgttcgttttcacggtcgccggcagcaggggaactcgaatcttcttccaccttatggttaaaggtagcatggttgctcaattcctcagaattactaacgtattcaggcagcagttcaacgtctccggcgacgtcagcatcccctgcactggcgtccaccggggtggacacgtccggcaagctgccggccgccttgttcaacaggaaggcaatcacgctgcagagaaacgcgaatctcaacgcgcccaggcggaagtcgagcacgaagcacacgacaaacaccttggcgatgcccatcgcgcacaccgccacggcgtggcctcggcgcctgatcacgcccgcggagccgatggcctcgacctgactggccactttgagcgtcgcgaggttgcaggcggccaggaacgcgagcgccacaggccgcgaggcccgggagtccagcatgatgcacagcaagcaggcgtcgacgaggtaggtgacgagggtgatctcagaccagagtaacccccaagcgtgcggtacctcggccatgacagcgttcctgccggcagcgtcgcgggaactccacaggtgaaccttgttggcttgcattagagcgaagcagcacatcgtggcgaagcatgcgaagcacgcagcgagcgacgccatgccgctggtgacggcgcattggaagaacactggcgtgctgtacgtgaaggtcgcggtgatccagacgacgaacaatgtggcgtcaagcttggagctcgaggttgtcattgcttccgagttcggcgtcgtcctgatcccgtgcgcgccgctgcgcctgaggcccgaggctgcccggcgttcggacatggtgatcagaacggccactgccagattgatcgcgccggcgatcaggcggagccagcgcaatgccgcggctgatgcgtccgtcatgtcgcgccacttcgattctgcggccctcgtttccaatctatcgaccgcgtccgtgacgagcgcgcgggcgcggcgggcgcccccttcggccctggcgtagagaaacgcaagcgccggatggcatcgcgccgggtccctcaggcgccgcgtctcggcctcgacggcggccctggcgtagcaagcccctttctgcaggcaggcgtccacggcggcgaagacgccgtcgatgtgctccggcgacagctcgcgcgccacgaaggggagggagacggcgaacgtggcgcagaacgcgaggcccgacgacacgcacgcggaggcgccgacgcagaggcacgacgcgacgacgacggaggcagggacggccatggcgcggtcaggacaaaagtggttgatcgcgcgcgatgccggcggaaggaaaaaaaaaagttggggttttgcatggataaagcagttcgttcgtcgaaaccagactcctctcccccatacagattaggctacctacacgcatgtttcaaattccaattcggtttggtttgcattgcaaacatgtaaaagaacaatcaaattccaattcggtttggtttgcattgcaaacatgtaaaagaacaatcaaattccaattcgttttggtttgc

SEQ ID NO: 8207 - DNA, 1647 bp, Oryza sativa
  ref <308>: DATABASE ACCESSION NUMBER: AK105555
  ref <309>: DATABASE ENTRY DATE: 2002-08-28
tatctggaaagccattgtatgtcgcatttgcacaacgtaaagaagacaggaaggcgatgttgcaggcacaattttctcaggtgcgccctgtaccgatgacaccttccatggctccacgtcttcccatgtaccctcctatggctcctcttgggcagcaactcttctacggacaagctccacctgctatcatgcccccacagcctggatttggtttccagcaacagcttgttccaggcatgaggcctgggggtgcccatatgccaaattactttgttccagttgtccaacaaggtcaacagggtccacgtccaggtatccggcgttctggtgctggttctgcccagggacagcaatctgctcagccatttcagcaacagatgcttccaagaggacgtgtgtaccgttacccacctgcgcataacatgcctgatgttccaccaatgccgggggttgctggtggtatgattcaatcgtatgatatgggaggcttcccagtacgagatgctggtttgtcacctgctccaattggaacgctgacttctgcccttgcaaatgctaatccagaacagcaaagaacgatacttggtgaaagcctgtatccactggttgagcttctggaacagaaccatgcggccaaggtcaccggaatgcttctggagatggatcagacggaggtcctgcatctgctcgagtctccagaggctctgaagtccaaggttgctgaggcgatggatgtcctccgcaatgtggcccagcagcacaatgcgaacaccccgaccagtcaacttgctgcgctgtcactgggcgacgccattatctcctaatttacagtcgtagctatctttttagcttgcagttgtgtgtgatcttgcatgaggttaccggcaacatggcactttttccctcgtatggtttgacttgagtggttcgagttcccgggttggatgttaggcgttatacttctcggcctggtatccttgccattaaggccagctgatgctctgcctcttgggcgacggcggcgcgcaggggaggggcatggccatggttgcctaggctcttcctggagagagtggaggcagtgagggcgatcggtggccgtgaacgtgatgacgttcatgagggtgatggaggggttcctgagtacgttggagttgacgccccggagagcaggggaggttgtggtgccggggagagacggtatcgtcggacacgctcatcgtcgtcatctggtggctgggaaactcgtcgctgtcgacctgtcgtctaagggtgtcgtataagggcgatgggattaagatctgcggtaactgtaccatgtctttatcactaacatgtgagctcgataatctctagacccatatgtcaatgacaaaagcacggtgcagtcaattacaaagcatctcatccaggacgatggtgggagatcactggccataccaacagtttcttccgctgcacctctcgtcgtcactaccaccaccgtcgtcgggcctgttcactttgatgctattttcaatcttaccaaattttgataaagttactaaaaaagtggctacatttagtttgctgccaaattttggtaactatataagaaatcctgcttttgataatgccaaattttggtaatgttttttttttcgcatc

SEQ ID NO: 8208 - DNA, 923 bp, Oryza sativa
  ref <308>: DATABASE ACCESSION NUMBER: AK105556
  ref <309>: DATABASE ENTRY DATE: 2002-08-28
attcttcctcgcgacggcggctgtcccgagccgggatggctcggccacggcgggacggcgacggcgacgcatcgccggggttcatcgccgacagccacctccgtctgccagctcaccccgtccccacctctcctccctgccgtcctcgcttcctgcaacggccggcgcgggccgctggggcgcagacggaggtgtcgtgctcctgctgtggctgcgatcctaccagtgcttcccgacgacgcggaggagtgtgccggcgcagatcatcatcaaacacgaccacaccagcagcagcagccagggaggacgcaaagcaacaccacggcgcaaagacgtaatgcttttgctccattctttagtttttacccatcaaggatggagcttcgtcatggcagcctagcgaggctggttgatgacacggggcgcgccgccgctccttgggctaccggcgtacttggtgggcttctcggagtgtcggggcttctcccggagccccctcgggccgcggcgcgtcgccacccttgggagagactaggctcagtgccttgagcaccgcatctgcacacacacatggaaacatggcgatgaattcaccgcactccacgacggcggcgtgtcttccccgcgctcgcgccgccaacgtcgcagctggaagcgaacgggatgacgacagcgtgcgccggcggggagggcagcgaggaggctggagagggagtgctcgcggaacggcgacgacgcacgacggctcggccatggcggagctcggcggcagcgcaacgagaaaaagatgaacagagagagaggaagaagaagaacaaagagagattaacaagtgggactatggtcaaacttgtctttaaccaaagtttctctcttcatttagaccggaaataataaaataatggaatgagtgtccagcagct

SEQ ID NO: 8209 - DNA, 1861 bp, Oryza sativa
  ref <308>: DATABASE ACCESSION NUMBER: AK105557
  ref <309>: DATABASE ENTRY DATE: 2002-08-28
acgtggccccacatgtcatcctcattccctcctcctttctctctcccctcttctcgacgccgacgcttcccatccacgcattcctcgccgcggtggccgccgacgccgacccacctcgcgtcgtcctcgtcttcggcggcgggtccagccgcggcgtacaggtcgccaacgccggcggggtctactccaccgatgtcgccgactacgctgtcggcctcctgttcgacgttctcggccacgtctccgtcggagaccgctacgtccggcgtggcctctggccggagcgcggtgatttcgtccccctcggatccaagatcggcgggaagcgagtcggcatcatcgggctgggcaacatcggctcggcgattgcgaggagactggaggcgttcggctgcgtcgtctcctaccacaaccgccggtgaagggaggacgtggtctacacctacttcccgaccgccaccgacctcgccgcgagctccgacgtgctcgtcgtggcgtgcacgctgacggcggagacacggcacatcgtggaccggggcgtgctagacgcgctgggggagcttggcgtggtcgcccgcttctgctatggggagcagttggatctccatcaggttgcaggcttgcagctgcagatgcagatgcagatgcagataaaaagatcgaggtgcgctcgggcctggttgagtatttcccagcccgggccgcaaacgaccgctgggcaactgggtggtcgcagtgctggttctacctcgatgtcggggtggactccgggctggcttccaccaacaagatctacttccgccacctcccggaggtcaatgcggacgacgaagacctcgacccgctgcaccagtctctccgcaggatggcgaagtggctcagcatgccggacctgacggaggaattcgtcatgcttcggatcattccgctctggaatggctgggtccacgaccttacttcgggagacgaagacaaggccggggcctatgtgggcccggtgacctcctcaactttgctgacgccggtctctacggccattacggaggccgagaagatccttgggaagccggtcgtaaaggagaagcaagagcggaccgaacggaccagctcttgggagaggaccaaccgggtggcagcccggttcaacttgcaacttccggccctcccgtccttgagcgaggccgaggtggaggccgaggtggcagaggccgccaagtccactggcaagcggaaaggttcacgaggcggtggcggaggctggcgcactaagcggaccaggggaaatgattccccaatcccggcaattcctctccgggctgtggctcccaactatctgcactcgtaggcttctagcagcccgacggcggctgcagacgtggtttcttcctccgccgaccccatcgtgattcccgcagactccgagggctcgggggagtctgcctggacaaccgcgtttcccggtatttggctctctttcttttttctccttttcttaacttatgtctgacacaggtgggggttcgggagttgctccgggcgcggaggaatcatccccgcctactccggtgactgttcctggctccgatgggggaaaccagggggcggtgaacaccggcgctacggccgctccggagagccacgggggtgagctctggacacctgcggcctcagacgcccctgctgcccaagtggttttagggccgagcccaacacatggagcgcgcaccgaagcgcactacaggatgtatgtcatttaaaggcattttgtggaaggcatttctttaaaactgcctcaaatcatctctttcaaaggcaattttcataaaatgccacaaaaagtatctctatacatggcaaattt

SEQ ID NO: 8210 - DNA, 1770 bp, Oryza sativa
  ref <308>: DATABASE ACCESSION NUMBER: AK105558
  ref <309>: DATABASE ENTRY DATE: 2002-08-28
gaaaagtcaaaagtatatgtttgtcctttatcaatttgtaatgaaaggcactaaattggataaaagaaatcgccttgaaatgtacaatttgctattcttttgacatttattctgttaagaggattatgccagattgacaatgttttaatcttgttaaccttctgcataacttgttaaggtggcaaaagacataaaatttgtctctttcccttttatgttctggcatttctcttggaatctcatagaatccttttactttttaagattggagtcctctctctgtgcgccctgtttcttaggaacgggctcttttttgggctggataattttcctttggtgataggcagtactgttattttgtgtagtagtcccaagtttgttggtatttttgtcagtatatgatgggagcttaactattacagttctccagcttcttgtactccagtcattactcgctacctgcgtgcctgcaggccacattctgtgtgccatgtttctgattaagatgactttgacaggtgttccttggactgaagaagaacaccggaggtttttgcttggattgcaaaagcttggcaaaggtgattggcgaggaatctctcgtaatttcgtggtctcaagaacacctactcaagtagccagtcatgctcagaaatattttatacgccaatccaatatgaccagaaggaaaagaaggtctagcctttttgacatggtgccagatgaggtagcttgcttgatcttatttcgattattgtgctgatattggcatgtagcataataagcctgcctgggtctattcttatattgagacgaggagattgctcatttgtgtggtgatagatatcatattgctaaaacttatctttttgaacaaattgtgtagtttatttatgtattgcatgaagacttgagaacacttttatccttgttcgaattagaaaggttgtactgttttctctgtactctaatgggggaactgaactgtgttttggtggttttacagtctatggaccttccaccacttcctggaggtcaagaaccagagacccaagtattaaatcaaccagcactacctccaccgagggaggaggaggaggtagattctatggagtcagatacttctgccgttgcagagagctcttccgcttctgctatcatgccagataatttgcagtcgacctatccagtgattgttccagcttatttctcgccctttttgcaattctcggttcctttctggcaaaatcagaaagatgaagatggtcctgtgcaagaaacacatgagattgtcaagcctgttccagttcattgcgcacaggaggaaactatcaacgcataggggaaagcagcggcggtggcgcgggtgcggattgagagtcgacggcgcgacggcgacgcggcactctccccggaggcggcgctctcccctccgccgaccgtcccctccgctggccactttctcaccgattgcatgtccaccaattagagttggagaagaccagcctcctccttcttgggaccctatacccttggcctggtagtactggattgattttaagaccaattttcagtactgggttgatttctgaactttatagatgggaacactggagctgggtgactgaagcgcatggtggcattagtgctaagcttaaacacttgcattcaatttgtagtttagctcttagctggctacttctatttattctaagaaaaacaactgaattgtacccattttgattaatctgtgaccttttcatgtccttc

SEQ ID NO: 8211 - DNA, 1417 bp, Oryza sativa
  ref <308>: DATABASE ACCESSION NUMBER: AK105559
  ref <309>: DATABASE ENTRY DATE: 2002-08-28
aaatattccagttggtcaggatggatagggaattcaggatggtagttggtaatctcctgcagtcttcttggtagatgtggcgttaggattgtgctcccactcacactcacactcagaggcatattgcctaggtctacagtctactccaaaccacatagttcaattcctccgcgttttagaattgcagatcaatgatgcatggcaaggtcagagcgccaatgaagtactaaaatggtaaaagaagctcctgctcctgtaatttcttagtatctctatgcaacaatggatgccctgatatactttgatacaggatgatctgttgattaccatatccgaaccatttgttctgactgtttatatatattgtagatcaagcaactactgatcatgccatttgtagagtttatgtgcttatcgttgcaaggtcaacaaaggctacaaacaacctacaaaccttttgctccttggggctactaaagcgctcttcctttggtgaaatggcaagactctgtttcgaagagtatatttggttgcttctagaagtaatactttttgcatatagttttgttcctttaaccttttaggatcaactaattttgttctccagcactgatttgatcttaatgactcattgcttccaattccataaggcacatgctagatggttattgacagccacaacaccggcgccgaggcggtctgccctttcgccattgacgcggcccaacagtcacgctgctcgactgcgccggtgtgcccccaacctcttgtccttgaagccacgtcttgctgaaacgttgccccaggcacgattagggcgcttgtggcactaattcggaaagatggaagataggctggtggaccttagctgtggacgactgggatcttgatggcaccgatccaagcctccgaggagagggatggctgtggaagggcacatcactgacaagatccatagatgtttggccatggatggattacgatctcgcgttctccaatgtggcaaagttcgctcacttttgcaatgtggaagttgcttacccttgactaaatcaggtttggagaagtttggactgaatcaatgcaatggacaattcatagaagatttcaagcagtggaaaaaggagacttctacaactgccacaggattaaaatttggtctaagatacagatcttgatggcatggtggtgctgagtgtatgccataattctggtgagagttggatgtaatttgcttgccttcaggataaattggatgtattttttgctgaccaactggatgtatgctttcttaaccggttttatttatatataactttagtcagcttgtgaaattatgtaaaattcagttcctgaagtactggtacttactgttgatttatttgtgcgtgcacttactgatataagatcatttgtt

SEQ ID NO: 8212 - DNA, 1362 bp, Oryza sativa
  ref <308>: DATABASE ACCESSION NUMBER: AK105560
  ref <309>: DATABASE ENTRY DATE: 2002-08-28
gacaacgaatttggagaattttttttctcttcttttccatcaaagttcgttgtcctctcaacatttcttcgcttcctcaagcttgttcctcgcatgcgtgtaaactgagaatttaccaagtttttgttcttctcacgatcgattgataatataattgcatgacgcgcatggaggagtcgagttcttgatcgatcgagcgagcgatcggtcaaaacattcggaagaaatcgttgacgaggcaaagcgatccaggagaagccattcgatcggatttgcgagagagatcatgcacaagcgatccaaatcctgcgagccgtccagcgagatggacgagcgccgccgccgcggcggcgtcggcggcaatggcgcgacgacctgcgacgactcggcgtgcggcgccagggcggcggcgtcgtcggcgtcgtcgtcgtcgtcctcggcgacgacgtcgcactgctccagcgtctccgtctaccgcgccaagatcaacggcgccccgcgccacgtgaccgccgtgtggcaccggaccctcatcaaccagtccttcaccatctccatcgacggcggcggcggcggcggcgccggagccggggacgacggggcgctcagccacaaggtggagctgaagccgtggccgttctggagcaagaggggcgccaagacgctcgacgtcgacggcgaccggctcgacatcgtctgggacctccggtcggccaagttcccggcgagcagcccggagcccgccgccggctactacgtggcgctggtgagccgcgacgaggtcgtcctcctcctcggcgacggcaagaaggacgcgttcaagcggaccaggtcccgcccgtcgctcgacgacgccgtgctcgtgtcgcgccgcgagagcgtctccggcaggcgcaccttcgccgcccgcgcgccgctcgccgccggcagaaaggaccacgagatcgtcgtggacagcgccatcgccgggccgagggagccggagatgcggatcacggtggacggcgtcgtgctggtgcacgtcaggagcctgcagtggaagttcaggggcaacgagacggtgatcgtcgaccagtcgccggtgcaggtgctctgggacgtccacgactggatcttcgccggcggcccggcggcgcaggccgtcttcgtcttcaagcccggcgcgccgccgccgggcggggacaggtgcggccgccgcggcggcgccggcgccggcggcatcggcgacgaaggtggctacagcttcttcctccaggcgtggaagacggagtgaggtcatgggcatgagacagggtttaatttgcaggatgtttggaccgatttgtttacatgaaatcaaaaaagcttattcgttttttttgc

SEQ ID NO: 8213 - DNA, 2389 bp, Oryza sativa
  ref <308>: DATABASE ACCESSION NUMBER: AK105561
  ref <309>: DATABASE ENTRY DATE: 2002-08-28
catgcactttctcaagcatgtgcacctggagtcattttgatgccgcttgatctttgtgatgcaatgactccaaacccggatgcactttctattggttactcgggatctcatgcaagtggtttaatgcttccaaaccatcccagttccattggccccacccttcctactggtaatatgaatactaggctaccagggactcccggtatggttttaggcaatactttgccatcaccttcaacaccaaatactcctagggattctcagaggtacggaatgcctagacctacctctctgcagggtgatgagcaacaaagaatccagtacaatcagatgctcaacagcagaagtcttcagcaacctggggtgcctgttcctggtgcgcctgctggagttgatcgtggtgttcggatgatgcctggtgctcatggtatgggggtgatgactggactaaatcgtggtactccagtgaccaggccgccctttccaaggcttggttcctcaggaatgctaaatatggtttcacctggaaacatgcttcccaacaatgggcaaggcatgcaaaacacggtgaatgttcatcctggtaccatacctggccatggaaatactatgttgaggccacgcgatccaatgcagatgcttcggcctggccagaacatggaagaacataggcagatgatgcaggagtttcagatgcaagtatcgcagggaaataaccagtccattcatttcagtggtactccattttccaatgtcggagcatcttcacctggtcaaccttttccagttcagtcatcccaaccacatcagatgccacaacaatcacacgtgcttggaaatacacatcacccccatattcaaggaacaacccagtcaagcccacagcagcaggcttatgctatgcgcttggctaaagatagacacatgcaacaatgcatgatgacccaacaacagcacccactttctggagccagtgcagtgtcgactgtacagaatggttcacaaatgcaacagcagagccaagggccagcttccagtgctatcccatcttcgcagtcacaacataaacagcagcatccggcacaaaattcactagatagctcagtgcctcccaaccagcctgttaatacatcgcataagcagaagaagcaacagggtcagcagcagtctagacaaaaccagcagcaaagaaatcaaggtagccagcaagctaagcttatgaagagcttaggccgagggaatatgatgcaccagagttcaccagttgatgccactcaagcaagcggtatttctacaacctctaaaaaccaagtttctgataaaagtatggtgcaacagggcccggggtattttgctggtaataagggcttggttccatcagtggttcaacctggtaatcaacccaagatatatgggtctcagatgcctcattcaccaatacaaacatcagatgtaggtagtcaaagctcaatgcagggttctcctaaccagactatgttaacttctcaacaagctccacttcattcgtcatctccattggcacagcagcagcaacaacggtacatgaatccatcacataacaacatccagagattggtgatgcaacaaaaccgtcatatgaacactgatggtaggatagaatcacctgttgaccaagttcaacataatcaggcaattccctccacatccattgcaaagagtacagattcaggtagcccaggtggtgtttcatctataaaccagcggagacaagagtcatctcatgatccaactacagttccatcaacctcgcagttagctagctcgcctcaagatacctttgttggaaatgaaatgctgttgtcagtgtctagccaaggcatgttgcaaaggcaaatgtcaggtggcgtgcctatacatgggcatggtattggtgggcagaggcagcagctgcaatctcggcagcaacagcagcagaagcctgctgttcaaggcagtgtgtatgctcatccttcaaattcaggaccaggatgatgttgaaattaggctggtagcttttgcagaaaattcttacccctttgtaaagttactgtacaggtgttcgtgctgtggaagcggcgcgggtagcggtttcttcatttccccaaactttgagctaattgtagtctcaatgccaggtagataattatttccgcgccattttggctccacctctcagcttggttagattctagattgctgagggagtggttcttgtaacggcaaatttcttttgttgtcaaaatgttaccccagtgtgggcccggttgtatattttgtccgcgaggtccacgttgttggcagccgtccttttgtataagcctgtatatttatctcacgagttggtgaatgcaaaagccattgttcacgt

SEQ ID NO: 8214 - DNA, 1797 bp, Oryza sativa
  ref <308>: DATABASE ACCESSION NUMBER: AK105562
  ref <309>: DATABASE ENTRY DATE: 2002-08-28
agaggaaagcggaggaggcgctcagctgcatcacctgcaacctgcgctcagcgacgagattaatttcctccgtggggcagagaggacggtagcggaggcggtgctcgctccctcccggttcccccacgacctgagcgactgatgcgacctccttcccactcgttcagatccctcccctgcaacttggtttggacggattgcatctctctctctctctctctctctctctctctcccctattcctcttttccccaaatttctctctattttctaccttcctgagattcataccggagcatcctgtcagcggcacccacgaccttgcccagccgccgctgcatcaaacacttccggctccagcgcagccgcgcctccaacgtgtgtgctgacttcctcggagacaagagctttactctttactctttattattattattattattattattattattattattattattattattattattattattattattattattattgttcgttcctttacagattttgcaagttttccctttcatcgcacaatcagttgatctcagtcagtaacatgcttgttggttgtccacacagtttgtcaatataagccttcttaaattttttgaaagttcactggtcagaggcttttcactgactaattaggttaggaacagcaaggtacagaaattactaaatggagttagattcagccagtgcccactgcctagtgtttattgatcaattaatctaccacctcctctttgtgacctcttgtttgctattcacattcacccatatggtcacttactcacaaatctgccagcagctgatctcccaaaataactggtgcatactatactagctagttaaagaagaatacttttgttggcattgaccactctgatgatctcattagtacattccttgttgaggatctcgattcatatatgattcttgttgataacttctatcaactttttgctgacatcatagtaatttttaaaattttcaggttcagcagagtacttacttgctaggctaacattttgctgaattttcaggctcactagagcagcacaaacgattttctttttatcggtactggatcagatagctgtcactttgattttcatacataagtacatacttttgtgatctttttcccatgtacaattcaacatatctagttagaacttaattacaaggacgtgtcttacacatatgtatgtcatcattaattaaaacctgtatgttctgtctctgatgatatgcactggagacatataccgatcacataggacattgattttgatttttacttacatgccttatgatatttcattttggtagataccatgtgggataatatcaatttggaaacgacattttttttccgagatatcattctacaaatatcatttgtgttgtggctgggagattcacctccttcaatatataactaaattccatatagaggatggtgaaagccacagcttcccctcaatcccttataatggttgatcctactgcacacagttcttcaggctgctgtcatcaagtaatgctgggttgtgtaatagaacagtggaaaatgtatctagtatatgatccaaatgtactatgaggaaaatgtttgttgtatatataagtatatacatgtattttgcgtccaagatgtgtatcggagcttagacggttgtcagccatttttctagtctagggatgatatgtgtaatttttgtggcaatccctacgtgtgggtagagattgaactggagagatattttcaaagtttgcatt

SEQ ID NO: 8215 - DNA, 1694 bp, Oryza sativa
  ref <308>: DATABASE ACCESSION NUMBER: AK105563
  ref <309>: DATABASE ENTRY DATE: 2002-08-28
atgaacagaaacagacaccacaccgtctgcaataactcgagacgatggagcccttcaccagcgcagcagtggagccagcgccgcccaccgccgacgaccagcgggacgcgccgcggccgcacgtcgtgctgttggcgagccccggcgccggccacctcatcccgctggccgagctggcgcggcggctcgccgaccaccacggcgtcgcgcccacgctcgtcaccttcgccgacctcgacaacccggacgcgcgctccgccgtgctgtcctcgctcccggcctccgtcgccaccgccacgctgccggcggtgcccctcgacgacatccccgccgacgccggactggagaggatgctgttcgaggtcgtccaccgctccctcccgcacctccgcgtgctgctccggtccatcggctccacggccgcgctggtcccggacttcttctgcgccgctgcgctgtccgtcgccgccgagctcggagtcccgggctacatcttcttccccactagcatcaccgcgctgtatctcatgcgccgcaccgtggagctgcacgactttgctgccgccggcgagtaccacgccctcccggaccctctcgagcttcccggcggtgtgtcgctgcgcaccgcggagttcccggaggcgttcagggacagcaccgcgccggtgtacgggcagctcgtcgagacaggccggctgtaccgcggcgccgccggcttcctagcgaacagtttctacgagctggagccggccgccgtggaggattccaagaaggcggcggagaaagggacgttcccgccggcttacccggtgggcccgttcgtccggtcgagctccgacgaggccggcgagtcggcgtgcttggagtggctggatctccagccggcagggtcggtggtgttcgtctccttcgggagcttcggcgtgctgtccgtggagcagacgcgcgagctcgccgccgggctggagatgagcggccacaggttcctctgggtcgtgcgcatgccaagcctcaacgacgcccaccggaacggcggccatgacgaagacccactggcatgggtgcccgatgggttcttggagaggacgagaggccggggcctcgccgtcgcggcgtgggcgccgcaggtgcgcgtgctgtcgcacccggcgacggcggcgttcgtgtcgcactgcgggtggaactcgacgctggagagcgtggccaccggcgtgccgatgatcgcgtggccgctgcactcggagcagaggatgaacgccgtcgtcctggaagagtcagtggggatggccctgcggccacgcgcgcgggaggaggacgtcggcggcacggtggtgaggcgtggggagatcgccgtcgcggtgaaggaggtgatggagggggagaaggggcacggcgtgcggcggcgggcgagggagctgcaacaggcggccggtcgggtgtggtcgccggaagggtcgtcgcggcgggctctggaggtggttgccggcaagtggaaggcggcggcgcagaagtaaggatgcatgcaggtaaactagcaaacccacgggttacccactatttgtaccgtaagtagttatgcgggtctgtctgcttcaatccttgaaaggtttcagcgtgtattttttgtgtggaaactattcaaaactctcgatgggatgtctactcgttgtttacatatcacttaaatagttatt

SEQ ID NO: 8216 - DNA, 1296 bp, Oryza sativa
  ref <308>: DATABASE ACCESSION NUMBER: AK105564
  ref <309>: DATABASE ENTRY DATE: 2002-08-28
gtgcacgaaccctcgagattcgccaagcagatagatggaggccactgcgacggcggcgcagggactacgggactggtcgtctctcccgttggacatgctcgtgctcgtcctggatcggctcgggtggtcgacccacccgagcttcgcattgacgtgccggcactggcgctccgccgtgtcgcccttctacccggcgtggatcacgcctctcctcctgagcgccgccgacatcggcgtcacgaacgtcaggtactacagcccctactaccacaggtgtttcgagatcgccgacacgctcctcaaggtgcccaaaattgcggctaggatctgctgctccagtggacaacacctcacgctgtgtctacctagattgatcctccaagccgatctcgtagccggcaccatgtatgagctgccagagatgcctttctattcattcgagtttattgtctacgatgagcacgcgcggaggatgtattgcgtcaacacgacgtacgcgctacagctcgcccgtgcgacccaacaagacgacggcgagtgggggccctgggaattaacggactttgacgtggaaggaccgcaacttctggcggcgccgatcagcaacccggtgctccatggtggtttgttgtatgttcttggtgaagacgggaagatggcggtgtatgatccatgcaaccacgacaataattttacagttcccgataaacctaagggctttggaatcaaacaccaagttgatagccacctgtttgagtccgaccaaggcgcgctcatggctgtcctcgtcggctacagtggtgcgcctatccatgtcgtcaagctcaacgaagagacgatggagtgggagaagatgcggtcattggaaggacatgcgttgttcaccgggacatacacgacaatgttgaggaagactaagcttagattgatgcaaaacaaggtgttcctcccgaggctgtatgactggcctgagactatccatgtcgacattgttacacgtgatggcgaaacagcatttgtaccaaagtcatccagttcgtctaacaccaaggagatcacctcggacataaatatttggttctacgagtttgggcagcaagacgcaagagagttttggggatcggagagagtagattatagtatttgggttgattttagtactaattgacacaaattgacgttgttagctcttatattttcatatagtgaatcatctcacaatgaagttactcttctttcaggccaaaatcaaaatcgacgcaaatgaaatttgatataatatttctttgttggttg

SEQ ID NO: 8217 - DNA, 1981 bp, Oryza sativa
  ref <308>: DATABASE ACCESSION NUMBER: AK105565
  ref <309>: DATABASE ENTRY DATE: 2002-08-28
ttcatcacccgagtgttgccgcccgaggctttcgccgacagccgtgacatcccggagtatgaggtcgcgttcatcagagtgcccctgtacgagctccgtgaccccgtcgacaagggcctcatgaggaagcgcattgaggagcagcggcggcgggaggcggagagacggcggcagcttgagaaggatatgcggcggtgggaggaggaggaggaggaggaggaggcatggccgtgggaggacgacgacgacgacttcctgaggatgtcacaacagctgtcagtaatctgttcagaaagccgtgggaagagaggggattggcctaatatgaaggcaacaagaagagggagaagaagaacacatgcattaaccccagacaatgaggaggaggaggagaatttgagtgagctggagctagccgtggagaacacacggcgcaggatacatcactgcaactgcaaccacatcccgcgtcacaccctcttcacgagccacgccgatgtggaggagctcttcctccctttcaagctggaagagccttacctctgctttgcctcgcgatgccagaagtctgcgccctcctacgctcacttcttccccgacttcaaccgttcaccgcgtataacgtctgattggctgcgtccttctacgtttgaaggggacctacaatatatcctattctttcacaagctgatggataccgtggagtgtggtaacacagaagatacaattctagccaaagccatcaccattgcaacacaatcttatcagaagatgctgtacttccaaattgaagctgctgtgcaagattgcttggagcttcttaaggaaatggagaggatgaatgatagatacgacttctatcatttcattgcatctgagatcctcttcaacaacaagtcatatgaagatgtgctcaagcttatacgcgatgggcatgtagagttacactacacgcttaaagagttcagcactccccatgctgatcaccacatggatgatttggttcatcgccttgtgggcaggactcgtgcttatatgcccacagatgcacaacgagagtgtggaatgttcaaggactgggtgtgtcagcaggttgataaggagtatggatctcttggttatctttacatgcattttcttgataacaagatgagagcttggtttgccccatttcctgaagacctcaattccagttacatttggcgtgctacagtcacatctataaatcgaaagtaattgcgcacaataactgagccaagggaagagcttattatctagatatgcaaaagtaattggacaaatggtgatacgcagaagcacccataaatttgtttcagggtgccactaatttgaatgtgctgaaggatctgaagtactctgaaactcatgaatgggttagtgttgaaggcgattatgcaacaattgggatttcagatcatgcccaggaccatttgggttatgttgcgtctgtggagctcccagaagttggccaaagtgtatcccagggaaataaatttggtgttgttgtaagtgtgaagggaaccaccaggggtattaactcaccagtatctggagaggttgttgaagtgaatgatcaactaagcgatttacctggattggtaaatgcaaggccatacgagacagggtggattatcgtggtcaagatcagtgattcaggcgagctcaattcgctcatgaatgacgaggattactcaaaattttgcaagggagaaaaagacaagtattgaacaaattgcagtgagtcttgatccttgtcaatgcttgtgatgtgccatatcacttaccaatctgttggtctgtatcatgttggcattcgctaacacgtaacgtgatgctcaaacagactcaggaacatgttggaatcccttccctgtttatgttgtttaggatgaaactgttgtcgcaagtgaacatgcaagtatagcacccctaattaagctataatgatgccaattctgcc

SEQ ID NO: 8218 - DNA, 1464 bp, Oryza sativa
  ref <308>: DATABASE ACCESSION NUMBER: AK105566
  ref <309>: DATABASE ENTRY DATE: 2002-08-28
aaagcggctggccaaactgcggtgcttccgccgccgccgccgccgagcggccaagcccaacgccgccacgccctcgccggcggcgcggcctgccccgacgcctacgccgacgccgccgccgctggcggttctcagcgacgacgtcctgagggagatcttcgtccgcgtcccgtcccccgccgacctcgcccgcgccgccaccgcctgcgccggcttccgccgcgtcatcaccgagccctccttcctccgccgcttccgcgccgccgacaaccagccggcgctgctcggcttcatcgacgtcggcggcggcttcgtccccgcggagccgccccaccccagcgtcgccgcctccgcccagctccacaacctcctcgatttacagcccttcttcgctccgccacgcgacgacgacgacgacggcggcggcggcacgtcattcagggtgatgtacatggcgcgatgccagtccaagctagtcgtgttcaccttctcctcagatacccaacaatggagctccacctcctacgacggatgggggattttggtcgcagcaactccatctcaggaaaccgcattgacccaacgccaccatgctcacggctgcatcttctggttcttgcgttgggcgaagaaactacttgtgctggacaccttcacgatggaactatccaccatcaacctcccatccagtgaactgattgaaatccagcaggttgcaatcgtggagtcagcgagaggcgggattgggatgtttgccatggttgacgagatattggacagcacattcgacatgttctatgtggtttgggatcccgagggcgcgaacaagtggccattggagaggctgatgaagttgccagtggagtttcggtacaacctggtgggagcagctgggggttacctccttgtccaggggatttcagtgcaggggcctgtgcaagatcaggtgtgctttacggtggagctcaagactttcaaggttgagatgttctgtgaaactaggcgtaccttgataggtgctgatctgtttgctggattcgccccatctttgtcgccaccaagcgtatgaaatgggacagatggacgctggcctttctctggatcatccttctggagttctggtgttggtgaagggaccatgatggtgtattggtgttgtacttttgttcggctacaatgctagcaggcagagcctccatcaaacttgtttcctgagtgcgtgtaatcaaaacaagctgtcgctaaacccagtctttgtcaaattagagttgggcgcctcgggaaaaagaaagaatgagagtgttgggtaaaaccgagtgtgtcggatagtgttgggcggtacccagtccgtcggttaagtgttggcccgaaccaatgtcggaataagtgttgtctgtcagagtaagtgttggctgaagttgtggtcttgtggaccatgtcgattgaataagcattggaatttgc

SEQ ID NO: 8219 - DNA, 2145 bp, Oryza sativa
  ref <308>: DATABASE ACCESSION NUMBER: AK105567
  ref <309>: DATABASE ENTRY DATE: 2002-08-28
gtcctgcgccatcatgacgccgccgcgtccgcctcccctcgcgccgccgccgccgccgcgttgacctccgccacggtggccgcatccagccctagccgccgccgccctcacgcactctcctccctctcgtctctccctctccctctccctctccccttcacgccgccgctgcctccgcctcgcgccgtcgccatcgtcgtccccgccgcctccgccttcccctcgctttctcccccaactctatcccccttcgcctcaccccctttgctttctccctcgacaggatgacagccgccggctgcggcgtcgcctcgctcgcctgaggtggaccgcgcatcgtctcctccgccagcaaaccactgctcttttccccctctcctttagctctcaccgcttccatttcttcctccccatcagtgttgtatcagccctgtggtctcgccccaaaccctagcgctgtcatggcggcggggtcgagcccccttgtgccaggtgccgagaaggcgctggggtagcggcctgtctcgtcccaatccgtagtgcggccatggccggcggggatgagctcctgtgcaccggtggcgtacaaggtgttggggcggcagtgagaggaaggtccagcttggaggagctgaggagggagacgcggtcacggaccggtggcggtggccttggatccaagcaacagtggcgcacatcgcaagcagaggagatgttggagccagggtcgagagggacggcaggggcattgcggaggtcggcgcgatggatttcggccacggcacggcgacaacgacgttcccagatgtatatgttgctgacaaagggatagcagcatgcgggttttcctcattatttatggattgcttcaagatcatggaaaatgtactggagaaacaagatgaccattctatttcatctggagttgcataagccttaccatggaaacgatatggccttatgttgaggcccagtattcaagtaagatatgttgcacagacgttctccatgatatgttcagttcagcagctggaggcagagttgccactcgtggagaataactcttgtgatctttgcatacagactacctgtatgttgcttctaacaggggaatttgttggcatttgaattcgaggttagacagtggggttgtgacaaaaggtgacacactcacacactttgtttcattatggactccatcaagcagtgtcatgggcctccaaaattgttcatacgtgacaagtatgacattaggggtgagggagcttgcttgaagagatacacagactcgtccttcaatactggttttgcatgttctaggatgctagagccaataactcaaagagtaagaagacctcttagagctatcgtaacgaaactgaaaataatagatttctttagctgattatttttgtggttgtggatgattcaatccactcagacatagaatcatacctgacctaaccttaaagatcgagtgcttggcatctcttttccatttcttctaggagattaggccgcccctgtagaatcctcagattttcagaccacctaatgcagccaacaatgtctccaagtacccccccctctctatatataatcatctcatactatccagtatcctttcgcttctattttcttcccagaaaaacaatatcttttttgtaggttggagatagatttgtctaggcaccgatgactggagtaccgacaactaagtggatctgtgtttcaaagcttcaaaccacatacgtagaatctgtacatgagaatcttcaccagatgagaacccctgctccatgaaccattcagaagtgtagatatctttcattgcctcacctgacacaaacactgtagaggacatcatgtagacactttcagtaccatgtacaacggcaagtaaaacaagtatgtgtcaatgatttttgctcatctcagcttagtgttatgagttttacatgtggaattttcagcagatgctgtagggcaaggtcttcctttagaagatttactgctcttaggtattttctagagctttaacttttagtcatttgtatcaacattacttagaaattgtatttgtatagcagctaacctgatatttcagttcatcgtcaattagtagataaatttcctaatttgtac

SEQ ID NO: 8220 - DNA, 1721 bp, Oryza sativa
  ref <308>: DATABASE ACCESSION NUMBER: AK105568
  ref <309>: DATABASE ENTRY DATE: 2002-08-28
ttcgccatctttttcgatttcatcagcgacggctgcggcggtggttggtctcgtcgaatcctctccaccggagcatcacctcgatcggctcgaaggtgaagatgacggtggcatatctgaaggagatgccgtccacaccatcaataccaagctgtacgagtgggatgcgatccgtagccgctcggttgctcggtgctgggactggaacccgtccactcagctttgtggggagcaatggtgtcggtggccggtctgcctcggggagctgccatgccggtcaatcgcgagctttggtgaactatgatgatgacaggggcacctacatcatcttcaacattgccgactcactgttcatcagagatctcaactatcgtcgtccggtaaagcgcatttgcttcagtgatatgaaaccactttgtcatgcatttgactcggaggccaaggatggacatgaccttatcgttgggttcttgtcaggagaagtctattcaatgtcattgaggcagcagttgaaggaacctggtcctgagcccattgcacttcaacacttcttcaacaccaacagccggtgtactggtgttgcatgggtacctgggcatgaaggcttttttgttgtcagcaatgctgatggaaatttgtttgtgtatgacaaatccaaggatgtaaatactgattggacatttccaactgtagaggatcaaagtgagatgaagatttcatatgcaaagtctagtaagagcaatccagttgcaagatggcacatctgtcaaggtgcaatcaatgccatttccttttcgccagatggaacttacttggcaaccattggacgagacggttatttacgagtgtttgactttgcaaaggagcaactaatatttggtgggaaaagttattttggggctctattgtgttgctcttggagcacggatggtaaatatctattatcaggcggtgaagatgatcttgtgcaagtgtggagcatgcatgacagaaagatggttgcatggggagaggggcataagtcatgggttagcgcagttgcatttgattcgtactgtccccaccaaaaccgtatgaaagaaaacaaaatagcatgcatcgcttcgcttcaccaaaatcggatgaagcagaagaagatcccatatattccttcgcttcaccaaaatcagatgaaacaaaagaaaataccaatatcatgtatcgcttcgcttctattggtcaggatgcccagctgcttctctgggatctaactaaggatgagcttaatgtgtcactaacccatgcttccagctgctcagaatcatctagcagtggaagctgctcagcgtcatctagcagtggaagctcttctacagaagacagggacaaagaattcccccttggcttccttcacccttctccacggctgcaagaagtaccaaagctctcacctgaggttgctcatctggtcggcgtggaacccctcttcacactggaattcaccagcgaatcggttatcaccgtatgtcgcagggggcgaatcaccaccaggccaagagaagaaatcgacaatgaaactgaaaccgaccagcagcatcctggttcttccaagctggtcataggcaatggcacgggaaactattctaatccttcgaggggatgttccctcgtttgctcaaaaaccatctaaatggttatgaaaaatttgacaacattcatacaacacatatatacaacttcac

SEQ ID NO: 8221 - DNA, 1740 bp, Oryza sativa
  ref <308>: DATABASE ACCESSION NUMBER: AK105569
  ref <309>: DATABASE ENTRY DATE: 2002-08-28
gcacctttgcactgaacaccccccaacctctctctctctctctctctctctctctctctctctctctctctcttcccccgtcttcttccatcgctgccgcaacggcgcgcgcttgcgcgtcaggaggagaagtcggcggcggccatggggagctgcttctcatcggagggcggcaacgagagcaggaaggagtccgcggagaggccacagatcacaccggacgagacggccgcctcagagatggatgtgaatttaaataccacaaatgctgattccatctcgaaccatggtatggagaggcttattcatggccagtcattcacctacggggagctgtatgcggcgacagggggcttcagtgacgatcgctttctaggagagggcgggtttggccaggtgtataggggcgtgctggataactcccaggaggtggctataaagattcttaatctacaaggcaatcaaggagacagggagttcatcaccgaagcttcagtgttgagtaaactacatcacacaaatcttgtcaagcttattggctgttgtcaggatggtgatcagaggcttttagtttatgaatacatgcctttgggttccctgaaaagtcatctccatgatctttcccctgataagaagcctcttgactggaacacaaggatcaagatacttgtcggggcagctaaaggcctgcagcacttgcatgtcaatgttgaccctcccgtcataaaccgcgacgtgaaatctgaaaacattttgcttggagatggatatcatccaaagctttctgactttggcttggcaaagatgggtccaactggtgatgacactcatatttcgactagagtgatgggcacacttggatattgtgctcctgattatcttgagagtggtaaactgaccgtccagtcagatatttacagctttggtgtggtcatgttggaggtcatcacaggacaaaaggttatagatgacagtcgagctaagcctgagcgaaatattgttgaatgggccatccccaagatcaacaaaaaggattttcccaaattagcagacccggtgcttaacggtcagtaccacatgaggtccttgttccgggcccttactgttgctgctctgtgtgttgacagaacagccaaccggaggccagatatcacagcagtagttgatgctcttactcagatctcagagtcacaatccagcagaaagcggtggtcatctcgtctgcaatcatctgtaggttccagtgcatcgactgaaccgaggatagaagattggaaccaagccaaggatcagggagaaggcagctaggaagcccaattgcagaacagcaacatggtttccctgtcactattagtctcaagccttgctctttgtgtcgtgagccgtgatggttactgcctgagagtagtagaaactgaagaacagcgctgttccatttcggaacatatggttgaatttctggagggaacttctgttccttttcttctgtacatggatgaggcttgtcattttgttgtctttcgacatagagctccatactccgaaagcatctccagatggtttcatggcattgctcctatgttgaaatcaggatgagatgggtctcacgtttgcttccctttgttgtatggatgtacttaaaagggattaaagttttttttgtgtttggatacaactttgttttaaggttacaccgaagtgtcagttcaacctctgtccatttgttgtatggatggactt

SEQ ID NO: 8222 - DNA, 1470 bp, Oryza sativa
  ref <308>: DATABASE ACCESSION NUMBER: AK105570
  ref <309>: DATABASE ENTRY DATE: 2002-08-28
taatggatactacagaccctaccggaacactcagacctaatgaagtctgcgtgatacttgaaaatggccagttttctggagatgttcttgtttataaacattctgggttacattttggtgatatacatgtcttgaaagcaacatatattagggatctagaaaaggagtatgtgggatatgctaaatatgctatactcttccctatttctgggccgcggtctttggctgatgagatggccaacagtgattttgacggtgacatttattgggtctcaaaaaacccaaagttattagaacacttcaaaccttctgaaccgtgggtacaagctattaaaccaaaaaagaccaagcaaaagaaacctcaggattgtaatgaatccaaacttgaaaggctgctatttcatgagttcttgaaaacaagatttactcccagttttgcacttggtacggcagctgatagctggttagcatatatggaccgactattgacagattcacttgacgaaattgaaaagaaactaatagaggaaaagatgctaaagttagttgacctgtattatttggctttggatgctccgaagactgggaacaaggtcaatattccaagtgatctgatggtaaaacaatacccccacttcatgggccgcagtttttcgtaccattcatcatccatacttggacaaatctatgataaagcagaagatgtagaatctctgcgatcttgtaatgttcaaccaatcggggtatcattgctcccatgtttcatggaaagagaagcacctccagcagccaggcacctctggcaacaccgctacgaggagtacttgactgacagtacaatgctctatcgcgcaatggtagataaagaagaaaggaacatgaagttccaagaactctacgagaagtacaagcatatgctctacgatgcatctgaattcgagcagacacagagggaccccgacgacgtgttctcggaagcctgcgtgatctaccagattgtgtatgagaaagcacggtggagcaacgacgccagcaggtgtggcttcgcctggaaggtcgccggccgcgcgctgtgccacttctacgcgctcaagaacgagggtgacaccgcgctctgctcgcttccacttcttcgcaagatcatcaagaaggatcatcgcaggtagagtgtcgtgtttatggactactaccaccaaattaactatctattgtatcaagtatgtgtgtactgtagcagtaatgttaggagcagactttttaagctggtgatttagcacttctcatgaacatgtgggacaaagtactactagaaaaattattatgggccatgtttataccggcatggctgcttcaagtgaacctgctgtagtgaactagtgattatctgtaagcgcagtgtccagtgtgacaatgggcacaagtatgcatcactgttggtgtgcaaaatggacagcatggattctgtatggt

SEQ ID NO: 8223 - DNA, 1520 bp, Oryza sativa
  ref <308>: DATABASE ACCESSION NUMBER: AK105571
  ref <309>: DATABASE ENTRY DATE: 2002-08-28
aggccggggcacaacctcctgccggacccgaacgggatgtactcgtagtctttccctcgcaattccagcggaggtgatgaggactcctccttgtgcaagaagcgctccggtaggaattggtcggggctctcccacgccgccgggtcgcgcatgatcgcccacgcgttgaagatcaccgtggtgcccttgggcacggcgtagccaccgatctcgacgccgtcctgcaccgccaggtgagggaccagtatcgagcccacggggtgcagccgcatcgcctccttgaacacgcactggaggtacgtgaggctcgccgcgtcgccctcgtcgaagctctccctgccgccgagcgcgtccgtcacctccgcccgcaccttggccatcacgcggggattgcgaagcagctcggccatcgcccactccacggtggtcgtcatcgtgtcggcgccagccgcaaagacgtcgaacagaaggtacgtgatgtggtagcgtgggatcttgccggcggaggcgaggctgatgagcgcgtccaggaagtcgccgtgccgctgcttgtcagggtggtcacgggtttcggccatgcggcgatcgattatgtcgtccaacaacccgaaaacgatgccaagatggctgcccgtttgtcgacgcaagccctgcaggtcgagctgccggaggaaagggaaaaagtcggacacgttggggcccgcgacggttgcgatgatgtcctctatcagcccgcgtagcccgcgcgccgactccgagcgcacgtcagccatgtccatggagaagaaggaggtggatatgaggttgagcacgccgttgtgcacgacctcgcggacacacatctcctccccggcgaccgtgcggatgtagccgacgatatcccgcaccttgcgctcgcggatgccgcgcagcgccgcgagggctctaggggagaagatgtgcgtcgcgtggatgccccgcaggttcttccactgcggatcggagctcggcgagaacacgatggaccgctcggagaagccgttcgcgcggaaggcgtccgggaccggccgcgcggcgagccgctggtcgtgcttcgtgtaggcctccctcgcggcctcggccgacgacacgaccacggccgtggtgaggcctagcttcagcgtcatgacagggccatggacgcgcgccagtttcgcgagggtttggtggaagatgccgccaaggcagagtaggttgccgatgagcgggagtggcgttggccccggcggcaatgctagtgatctgccgccgctcgcgtggcgccgtctcaggatggtgaggtacaacaagagcgacatgcaggtggccaccgctgtcatccatagctcgctcttcagcttctccattggtcgatgactatttaatttcctgctggctggtgtacgttcttggttgccgcgttcgtgcctgcgggcctccgcatttatacagggcatgcaggaatatattgtattaattaatttgcagctgttgaatatatttatttcctagctttactaatt

SEQ ID NO: 8224 - DNA, 1707 bp, Oryza sativa
  ref <308>: DATABASE ACCESSION NUMBER: AK105572
  ref <309>: DATABASE ENTRY DATE: 2002-08-28
aaacgcatctgatctgaaggaacagaacgagaagcagaagcgatgacgagcagcagcagcagcagggtgtgcgtcacaggagccagcggctacatcgcgacgtgcctcatcaagaagctgctgcagcgaggctgcgtcgtgcatgcgaccttgagaaatctcggagatgagaagaagacggcgccgttgagagagctccctggcgcggcggagcggctggtgctgttcgaggcggacatgtacgacgccgacaccttcgagccggccatcgccggctgcgagttcgtcttcctcctcgccaccccgctgcagcacgaccctcgcagtaccaagtacaagaacaccactgaagccgcggtggacgcgatgcgcatcatcctgcagcaatgcgagcggtcaaagacggtgcggcgcgtcatccacacggcctccgtcaccgccgcgtcgccgctccgggaggacggcggcgaggggtacaaggacttcatcaacgagtcatgctggactcctctcgatcactcccacagctacaacaacaccatggtggatgtactatctccgtttcacagtgtaagccattttagcatttcccatatttatgttaatgttaataaatctagacatatatacatcaatataaatgtgaaaaatactagaatgacttacattgtgaaacagagaaagtatgtaattaatcaactacgcatttcatgttgacaaagtaatgagcaaatataaaaatttatctctccttcaatataaaatttatatagtttaaaatttatcttaaatatattatagcttctctgtctgttttcatgtttaaactaatcacagtaatccctcatttgatttctctacaaactttctcatctaattaaatcaataccaactaccccttttaatttcatatctatagcattgagaaactagatctaaaagtatgtatattttaggatggaaggagtatatatatcatctatatagatattaaaagaattcaacagcataatatatcattatactagtacaatcaattaaacagtacacccaaattcgcaatcatcgtcaggaatatttctttcgtttaaccgagtgaaaatggcatttcaacatatgttagtaattctcagacttctgattggtgatttattagataccatagagcaaattaacaatggtacatgcagtacgttttttttttgatacttcaaatggctttataggattattcttcatccaagacgctcacagagaagctgctgctaaggtacaacgagtccgagagcagggcgttcgaggtggtcaccctggcgtgcgcgctcgtcggcggcgacgccgacaccacccagctctaccactcgctcagcgtgccggtgatcgtgtcgccgctcaccggcgacgagtcatgccacaacaccctcaagttcttgcaggccctgataggttcggtgccactggcacacatcgaggacatctgcgaggcgcatatcttctgcgcggagcagccgtccatcgccggccgcttcctctgcgccgttgggtaccccaatatgcaggattacgtcgatcacttcgtcaccaaatacccagagatcacgataaaactcaaagagtacgtgtctttgaccagtgatttatttgttatttttcgttctttagataaaattgtactcgcttcgttataaaatataagcattttaaact

SEQ ID NO: 8225 - DNA, 1548 bp, Oryza sativa
  ref <308>: DATABASE ACCESSION NUMBER: AK105573
  ref <309>: DATABASE ENTRY DATE: 2002-08-28
cttacagcatccagcagctcatccaaatttaaatcttcatatccctatatggattattatagaaaacgattctctctgcatattcctcttcactccaacagatcatccatataccttcatatcacaattttctatatgttgttaatatcttctgaccatccatatatttgtattattttttataaccatatttgtaaacctagctgaaaaatccaaatttattgtattctaagacaactaagggtgtgttcggatatcccttttcccaactcctctcctctcgttttccgctcacactcttttcgaactgctaaacggtgtgtttttttgtaaaaagtttctatacgaaagttgcttgaaaaaaatcaaattaatccattttaaaaaaaatctagctaatacttgattaatcatgcactaatggatcgctccgttttccgtgcttactgtgctgatgggaaccagaaccagcgaactcaccctaatactaactctatccaagcatatttctctccctctctcctctgtacctgccaatagccaggagagtgacagaagaggggaaggatgagtggaaggacgaaggaggagggctaatggcagacagcggacaacacggccaaaggtgcaagtggatgatgggtggcacaagcggagagatgcgagcggctgggatggcgatgcgagtgtgggtagcggggacgacaggagttgtgggcagagaagcttcggatagcgcaggcagtggcatggcacgagcggcggggtgctccagcgatctctctaccagatccagcgcttctctgtcttcactctggcaaatttccaccaccaaatccggtatgcagctcctctctactgttactcccctcatggtatgcagtccggatggtggcgtgagtttgattgggagctcgacacttggggtatggcgtgaggtttctgctcggataacacccaagctatttttggttgcccggatggagtatctgttggagactgactttcatttccaatatgccattttcaggatgatgggatggagtatttggtgaggatgctcttatggtctcaaaaccattccgtccctcaactgtagaactgtttgattgcaagcgcgcccctcgccggcgccgcggcagcgccgtcggtggtggtgcggttgaggagctcgcggttctccttccagacctcaccgtcgtcgtacacctccttcttccagatgggcacggacgccttgactcgtcgatgacgtagcggcacgcctccatcgcgtcggcgcggtgcaccgcggacgccgccacgaacacgctcgcctcccccgcggggaccgccccgagccggtgcgccacggcgagccgccgcagcagcagggggcggcgggcggcgcgggcctcgcggacgatggcggatagccggcgccgtcgtggcacgcttttcaaagtgctaaacgatacgtttcgtgtaaaaattttttatatgaaagttgttctaaaatatcaaattaatccatttttcaagtttgtaataattaaaaccaaattagtc

SEQ ID NO: 8226 - DNA, 2203 bp, Oryza sativa
  ref <308>: DATABASE ACCESSION NUMBER: AK105574
  ref <309>: DATABASE ENTRY DATE: 2002-08-28
accgtgcctcctccctcctcttccaccactttggcgagacaatagtgagcttgaggttcactgcttcctcttccttggcgagacattggtatccctttcttcctcctcatcctcagccaccaacccgcgcctcatccccaacgatacgacacaaggtcatcgttgtgcacatttttcttcttcagatctagccgcaggtgagatatataccctctttcatcggcttttgcaaattgcacttctattgaaaattcttgtagaaacttttagagatttgacttgaaagtttaaagtcaacaagatttttttttgatgtattgagataaaatttcttaattcgaaggaatggttatgtgaaaggtaaagttttgaacataaaactttttttttaagaaagtttcaataatatttggcaaaacgctttgatattaagagtagaaagttttatagatttgtgttcaaagtctaaagtagaaagttttgattgaagatttctaaaagggaaagaatatgaatgggaaaaacaataaatatttaaatttgtatagcattcgagaggaagcgggctatccatggtgatttttgcaccatgaacaactatgcatataggcttttcgtggcaattgctgtcatgatagctcgttgccttatgacctagtagagcacgattatggctaaataagttttagagaacgcttgttttcatcagaattcactctgttattagccctaccaaatgaggagctggtctgttatatatataactgtcacatatttatctttttaatacaaaagtataaattctagcctctatcacgtaggagtactagtttggtaatataaattttagccaatcataaagttttgtcttgtgcgccaacgccacactacgcgtttatttgttaacttggttttattgtagggctcttttatcataatatattttctaggcgtttctaaaccaaatagaatatttactcataaattatttttaatttcttcttttattttctatgacttatcatctctaactaaccgatcatggtagtgaagcctctcctactgaaaagaggtaacaaaagatggcagaaatcccgtcaaagtctggagtatcaggcatatctttctcccacactcttccttttgtaaccgaccaatcctccgttgttcctccggcgactcgcaaaagctagataaagttcggcacagagcaaggatttcttagcgcagcgtttcagcagttcatcgcccatttgttaccctcttttgggccgaaaaggcttctctcttttaagaaccttcacgcggcgacgcgctcccgcggctgcgaggaaactgtgccttcccttactgaatgtgaaacgacctaaatcagcaagtctgcatttgatcataactgctagtaatatagtctcgccattaagaatgacatagtgtgtgtgtgcgtgtcttatctgtttcgttaagaaatgatgcactgaaaatcttctataagaagcaccgaagcatagctaatgagcacggaacagtacaccctataagttcatagcagaaagtagttgaattgcaaatttgcagtggtagctcaccatttcaaatgtcagacgaggtcgagatgaggcaagccaagtgccggcaagactacatggcaattgttaagcagagccggcagctgatagaaaagctggacgcaaagaatgaaccaaagaagaggcagaagcgatcaaaggtatgaattactgtaattctcgtgcgtatacccgtatttcttgtggtcgttcttttcttcagaagaaaccagccattctggttcagggtgaacggtaagattttagatttgtcacttccgttctgtagcatcacaatgtgtacaagcagagcttctccaacgccgtgtagcctaaaagtatttggatttgaattagtaactgattaagcagggatctgcttctgctacctgcagaactctgaaaaagaaaaggcggtcgccccgagctcgtctaagaaaatggaccgcgaagagctcgagaagaccatcaggggtttcctgaaggagctcgattcgactgaagctgctccaatgagaacaactggatgtacgagtgcaatgcgacctagtactatcgatcaggacttcaatactcaatagttacccccaacatttcaggattttgcacaagaagatgaatcattctaacaaaag

SEQ ID NO: 8227 - DNA, 1528 bp, Oryza sativa
  ref <308>: DATABASE ACCESSION NUMBER: AK105575
  ref <309>: DATABASE ENTRY DATE: 2002-08-28
gcacaagtttgcgaaaggagaaacagaaaagagaaaacccagagtggtcaggttcagaagccgacgaggcagccgttgcatgcatcgatctcaacttctctcaagttcagaagcggccgaaatgtccgcggacacgtacgtacacagtacacgacaagccggccgggcctcctgtgacaacggtggtgggttacaccgtttgcggggccttgcggccaccacatgcatgtgccgcctgccgcgcagaagcaatctatggcaaaccgcccggccgaccggccgtgctaccgattcatcataagcctggagtccctggaccttgttgtaagctcgcgcgtgaccacggaagtatctagaagcggccattcatcgtcacgggcgagctcacaggtaacaaggtaggaggagaacaagctttcatcaacagattttgatgaactattgaaaaatctgtagtgcagtatatacagcaatcaatcatggaccgtatgttcgacgatttctcgtcagcaacgattctttcaggtttcttcacagaatcaaatccgtgaaagtcttggtggcctttgtgataaccaaaacaaacccgcatttgcataaacaaacaagccatgatcgaagcgatgtctcgagatgtcaaaaatgtggacaaaaataccatcaatatggctactacagttgctcccacccacggtcacgggtgccagagacaaacactacactatcagccaccgcatataactgcttcctccaatcccaaaccacaatttcgttgcaaacacagcgaccaataggagatcgaagccatgaagctgctcgtggctctgctcgtttccacccttctcgtccactcgctgctcgccgacggcagccgccgagggaaggaggcggcagcggcggcgctcgggtacagcaacgcgacggtgtacgacatgtccgtggcgaagtgcgccgggtgcggcgcgctgggcgcgtgggcggagtcgctggagttcctctactaccacaacctggtgcggctggcgcggtgggagctgccgctggcgtggtcgccgcggctggagtcgtacgcgcggtggtgggcggcgcagcggcgcggcgactgcgcgctgcgccactcgttcccggaggggcagttcgcgctcggggagaacatcttctggggcggggccggcggcgcgtggcgccccggcgacgccgtcaaggactgggccgccgagggcgtcgactactcgtacgccgccaacgcgtgcgcggccgggcgcgagtgcggccactacacccagatcgtgtggcgcggcaccacctccgtcggctgcgcccgcgtcgcctgcgacgacggcggcgtcttcatgacctgcaactactacccgccgggtaacgtcgtcggcgagaggccgtactgaatgagcagtacactaggataccacagagtttgtcaggattgtcctggatggaaatgatggaatgagatgtgcatgtacagctgctgaataaaagtttcaggaatcaggtgtgtgcaatctgc

SEQ ID NO: 8228 - DNA, 1432 bp, Oryza sativa
  ref <308>: DATABASE ACCESSION NUMBER: AK105576
  ref <309>: DATABASE ENTRY DATE: 2002-08-28
gatcagcttttaataaatcaacagctatattttaatacagtttgtaaagaaagcctcagtgaaatcaattataagttgcaaccataaaacaatctgaagcattgtgtgtcatcgttttgattatcatagctcatagatgggcactccgccactccgtagttcagttgtaccatacagattcctcatgaatgacccactggcccagacggctccccaagaaatcaatcgcctgggccatgaccatgacactgccaagcatgcatagcatagtactccttttgcagattaaggaaagtgacaatgctgcaccctagattttcgtgagaacaatgcatccaacattcccactatcagattcgatcatttactgttgcacatacaaaaagaaatggagtgattatctttacaggtcacaaagcagtcaaaatgactccatgtctctctcaaggctctatcaacatccctccccttacatacagtgatacagataaggagttcagaattcagaagaagcccatacatatatgaacaggggtgtactgcaaaagtttgctcgagatcagggccagaatgcaaaccaaaggtcttctgcagcgctgcatgtgccatgtccgtccccaaatcaacaaaagaaagagagaaaagaaagcagcagcagcaaaagataaagaagcctgtgaaaagaagcaaaagagaaaccggagaggaggagcccctttttctttacatctttctcggggaaagggcctctctttgatcagacagaaactacacactgtggtctaaaactaaaaagcatctcaatcactttgaaactactcgtactactccagctagcaacaaatccaatcccttccctctgtaatatatttttcttctcttttttttcctgaagtactctccctgaatatctgattctctgaatttctttttcagtgctctgaatgctctgctgcattctgctgctaccttggccctgacagctccatctcctctaccatgtcgatggaccgcacctcgtcgctgctaaggctgctgtcgttgtcgtggaagtcgttgaagaagacggagccgttggagtcgttgcggtggtcgtagccgagctcatggggcgccgccgccgccgccatcgccgccggccggtggttggcctcccatttctcggcgggcccgtctccctccagcatccggaccacctccgacatcctcggccggtgagacggctggaactgggtgcagagcagcgccacctgcaccatctccgccacctctatcctgtcgtagtgaggccccaaatcttggtccactagcaagtcatgcagcttctcttggtgcaccttcctcaccttcattttgataacacgatcgaacgaaaacaaaaaagaagaaaattttcagatcatttacacatggagattaagtagttgaagac

SEQ ID NO: 8229 - DNA, 1396 bp, Oryza sativa
  ref <308>: DATABASE ACCESSION NUMBER: AK105577
  ref <309>: DATABASE ENTRY DATE: 2002-08-28
accagccagtctaaccggcccgtcgccttccttaccgggtccggggcgcacccgccaaggatccgacacctcgcggcgccggttcgctcgccggagaagggaagctggtcaccgccgccccccggtggttataagagtcgcctccctatccccttctctcctcttcttcttcttcctcctcctcccgccgcctgcttcgatctgaggattgaggaggaaaggtagactttgccaagaatcaagattgtgaggtgaagagagaggtggggaaggtcgacggcctcgcggtgcgtgagggcgtggagttctacagcaacggcgactgctacgagggggagttccacagggcgcggtgcagcggcagcggcgtctacaacttcttcggcaagggcaagtacgagggcgactgggtcgacggcaagtacgacggccatggcgtcgagagctgggcgcgcggcagccgctaccgtggccagtacaggcaaggcctccgccacggccacggcgtctaccgcttctacagcggcgactgctacgccggcgagtgggccgccggccagagccatggcatcggcgcccagacctgctccgacggcagctcctacgccggcgagttcaagggcggcgtcaagcacggcctcggctgctaccatttcaggaatggtgatcgatactcgggggagtacttcgcggacaggatccacggctttggcgtgtacagcttcgccaatggccattgctacgagggctcctggcacgaaggcaagaagcaggggttagggatgtacacgtttcgcaacggcgacaggcggtccggcgaatgggacgccggtgctctcaagaacccattgccgctctccgatcaggccgtgcagcgtgccgtgctggcggcgcaaagggcggcggataacgccttccacctcccgagggtggaagagcaggtgaaccgggcggtcatggccgccaatagagcggccacggctgcccgggttgcggcaatcaaggcagttcagaacagaatcgacggcaaattctgccacacagaagtgtgagatgtacaatagcgtagcgaaagagagatgcaatggctgatcgatcgccgaggttcgcgaccggggcggcacaagccgcttgcaccgtgtcggagaggtcagtaattcatttgagtatgaacggcagccaccaaagggctgagctgccgcttgtttccactgaatgatggtcacgcactcacgctgtaaagctgtagatagctccgtttatatccatgttggggggttgatctttcagctcgatgtgtatcaatggaagctttgagctgatctttcaatggaggtgagtaatgtgcattgtacatgtatgtatgtgtgcgccatcttcctcgtatccgtgcttc

SEQ ID NO: 8230 - DNA, 1782 bp, Oryza sativa
  ref <308>: DATABASE ACCESSION NUMBER: AK105578
  ref <309>: DATABASE ENTRY DATE: 2002-08-28
ctagcatcagcccaagaaacgtctcacagttggtgattcgatcgacatggacgagccaaccgtggaggagccactgctcgccatccgacgcggcggagatggcgaggacgaagccatggcgtcgacggcggcggcggccgcggcggaggtgaagaggttgctgcgtctcgccgggcctctgatggccagcttcgtgctgcggaactcggtccagatggtgtccgtcatgttcgtcggccacctcggcgagctccagctcgccggctcctccctcgccgcgtcgctcgccaacgtcaccggcttcagctttctcgtacgcacctgtcgtcgaacaccttgctcgcatgcaagaactgcttcatctctccgatttcttggtcaaatttgtgactgatttctcggtgggatgatctgatcagttcggcatgtcgagcgcgctggacacgctgtgcgggcaggcgtacggcgcggggcagcaccggctgctcggcgtctacgcgcagcgcgccatgctggtgctcgcggcggccgccgtccccatcgcgctcgtctgggccagcgccggcgaaatcctcctcctcttcgggcaggacccggccatcgccgccgaggccggcgcgtacgcgcggtggatgatcccgtcgctcgcggcctacgtgccgctcgcctgcgccctccggttcctgcaggcgcagggcatcgtcgtgccggtgatggcgagctccggcgtggcggcggtcggccacgtcgccgtgtgctgggcgctggtgcacaaggccggcatggggagcaagggcgccgcgctgagcggcgccgtcacgtactggaccaacctcgccgtcctcgctctctacgtgcggctgtccggcgcctgcgagacgacgtggaccgggttctccatagacgccttccgcgagctccgccggttcaccgagctcgccgtgccgtccgccatgatggtctgcttggagtggtggtcgtttgagatacttgtgctgctctcgggcattctgccgaatcctcagcttgaaacttctgttctgtcaatctgcttgagcacttcttctctcctgttcatggtgccacgtggcattggctcatctttaagcacgcgcgtctcgaacgaactaggtggcgggcatcctcgagcagcaaggatggcagcgcgagtcgccatagccatgaccgtgcttgtatgcctcgtgctagtgatagccatgatttttctgcgcaatgtctggggaaatgcctatagcagcgaggaggaagtggtggcatatattgcaagtatgctccccgtccttgcggtctccttcttcatagatggcatcaatggtgctctttcaggagttttgacaggatgtggtaagcagaacattggcgctcatgtgaatcttgctgcgttttacttggttggtattccgacggctgtgctgcttgcatttgtcctccatctcaatggagagggtctttggcttggccttgtgtgtggcagtatcagtaaagtagggatgctcctcttcatcacactgcgtacagattggggaaaagaagtgcgaaaaccttcaccctacaaacacttcggttagtattatgtattcagtggaacttcagttaactgtgtttcgttgtccaattttcaggctatcatggcaaaagaaagggtcttcagttcaagtcttccaactcgatgaagaattcgagaaatgttggtgtagtattctccaatgaagatgtattcaacgtggttctttaataagggtcagcgtgttgcaagcggtt

SEQ ID NO: 8231 - DNA, 1452 bp, Oryza sativa
  ref <308>: DATABASE ACCESSION NUMBER: AK105579
  ref <309>: DATABASE ENTRY DATE: 2002-08-28
ttcaagctcatttcaacggaattcgacaaattagtgtccaaaaggatcctgtgttttgtttctattgttttatgtttaagaaatcgacacatccccataaattaactttagttcttcgacgttgagcctatcctctatttcagtcctggattcaccactgcctccttgtcaccatcatgccgtaggcgagcctagctagctacttcctccatcccaaaatgtagcaactcaggataggatgagacccatcctaggagtacgaatctgtacattttgggacggagggagtacatatatgcagcagtacgtgtgtactcatctactttgcagcgggttgtgaccagtcgaggttccacctatggccgaggctgatcatgccgacgagcccagtgaccaccacgctagatgcgttagctcagcctgacatcaccatcttgcgctggcccagcctacttcaccccgtgctgctccgcgatgaccgcgtgctggccagtcccacgctgtgcgctcctcgctctcgcctctcgctcgcccgcgtgcaccaccgtcgctagctagggttagggattaggagggagggaggttggaaaggggatcgggagcattttgtaagtcattttttattctgttcaacccatttaatctagttccacctaatagatatctaaagtaggggcagacaaaccatttagtttcaaaaaaaaaaaaaaaatgcaggcagatgtgtatagcaaatccctaaattttaatattgttgaataaattgatgatgaaatttctacagtaaatgatagctaaaaaaagatgattccaaaacataaatcattaattcattagatgagttaacatgagtctacaggaatcaacaaacacattccaaagctccgccactcatgttagcttcgaaactacatgccaaagcaaaacacaaccggtgaatcgtagaaagaaatatacaaaaataaaataaaagttacaaacatatgttagtttctggacctatctctttaacttattccattattcgttacagaaaaaaattttagctgaaatatagcactgggaatctgggatcaatagaccctttgattcacaagataagaaaaacacatgaattgaagttgtatgcttctcaaaatttacatgaatcaacaaacacatgaaagttacacacgagtcatttgatagtgtcatgggaaaaacaaagaaaaattcaaaaaaaaatcacacctcttgctatttttcctactaaatgtgaattataggaatatataatcctatggaaagttttctttctttcctatgaatcaaagggacacgtatgaaacaatctataagaagttgaatcctatggaaatcctttaccaatcatatgaatcaaaggtccacttattttcgttcctatgaatcagaacgttcatggttctttaataattttatgtatagaaaact

SEQ ID NO: 8232 - DNA, 1605 bp, Oryza sativa
  ref <308>: DATABASE ACCESSION NUMBER: AK105580
  ref <309>: DATABASE ENTRY DATE: 2002-08-28
ccatggccttcaccgtcaccatgctctcctggggcgccatcgacttcgccgccgacatcgccgccgccggcgagtggcgccacgccctcgaggccatcaagtggggcaccgactacttcgtcaaggcccacacccaccccttcgtctactgggccgaggtgggcgacggcgacacggaccactactgctggcagcggccggaggacatgacgacgtcgaggcaggcctaccgcgtggacagggacaacccggggtcggacctcgccggcgagacggcggcggcgctcgcggcggcgtccatcgtgttccgccgctccgacccgcactactcccacctcctcctccaccacgcccagcagctgttcgagttcggggacacctacaggggcagctacgacagcagcatcgaggaggtccggagctactacgcgtcggtcagcggctaccacgacgagctcctgtgggcggcgctctggctccaccgcgccacgggcaaggaggagtacctccgctacgccgtcgacaacgccgactccttcggcggcgtcggctgggccatcaccgagttcagctgggacgtcaagtacgccggcctccaggtcctcgccgccaagctgctgctggacggcgacccgcaggcggcggcgcaccgcggcgtgctggagaagtacagggagaaggcggagcactacctgtgcgcgtgcctcggccgcaacatcaacggcgccgacaacgtcgaccggagccccggcgggatgctctacgtccgccaatggaacaacctccagtacgcctccagcgccgccttcctcctcaccgcctactcccactacctctcctcctcctccgcctccgcctccgcggccctccgctgccccggtggcgcggcggcggcggcggagatggtgtcgctggcgaggtcgcaggcggactacatcctggggcggaacccgctgcggctgagctacatggtggggtacggccgccggtaccccgcccgggtgcaccaccgcggcgcctccatcgtgtcccacaaggaggacggccgcttcatcgggtgcgtgcaggggttcgacgactggttcggccgcggccgcgccaaccccaacgtgctcgccggcgccatcgtcggcgggcccagccgccgcgacgagttccgcgacgaccgcgccaactacatgcagaccgaggcctgcacctacaacaccgcccccatggtcgccgtcttcgccaggctacaccgcctcaccaccgccatcaccacggcggccgcggcggaggatcccgacggcggctcgccggatcggaggagtgtagatagaaggtagtggtggtggtggtggttttaatttgggcgggaaaaattcttttttcttttctcgtatactttgccttcttttctgcttaaaaacttcactaaatttttttgaagtgttaatatgagagagagagaggtaaagagaggggatttgattattattattattattagtgaaaaagaaacaagaaaaagatagtggatgggtgttataattaaggaggagatgaaggtgaaaattagttacttgtatttttgaggttaggtctaagaagtcagaactgaac

SEQ ID NO: 8233 - DNA, 1568 bp, Oryza sativa
  ref <308>: DATABASE ACCESSION NUMBER: AK105581
  ref <309>: DATABASE ENTRY DATE: 2002-08-28
ttaatcaagaacgaaagttgggggctcgaagacgatcagataccgtcctagtctcaaccataaacgatgccgactgctcgtcgctgtggcgcgtccggctcgaggcgaaccggctctccggcgagattccagcggggttcggcgcgatacggaatctgacgtacatggacttgagctccaactcgctcaccggcggcggcattccggccgacctggtcgcttctcccagccttgagtacttcaacgtctccggcaacctggtcggcggcgcgctgccggacatggcgtggcgggggccgaagctgcaggtgttcgcggcgagcagatgcggtctggtcggcgagctcccggcgttcggcgccaccgggtgcgcgaacctgtaccggctagagttggccgggaacgcgctgggcggcgggatccccggcgacattggcagctgcaagcggctggtgagcttgaggctgcagcacaacgagctcaccggagagataccggcggcgatcgccgcgctgccgtcgatcaccgaggtcgacctgtcctggaacgcgctcaccggcaccgtcccgccggggttcaccaactgcacgacgctggagacgttcgacgtgtcgttcaaccacctggcgccggccgagccgtcgtcggacgccggcgaacgcggcagccccgcgcggcacacggcggcggcggcaagaggacggtggccgaggtggaggtgctcggccacctccgccaccgcaacatcgtccggctgctggggtggtgcaccaacggcgagtccacgatgctgctctacgagtacatgcccaacggcagcctcgacgagctcctccacggcgccgccgccaaggcgcggccgggctgggacgcccggtacaagatcgccgtcggcgtcgcgcagggcgtcagctacctccaccacgactgcctccccgccatcgcgcaccgcgacatcaagcccagcaacatcctcctcgacgacgacatggaggcacgcgtcgccgacttcggcgtcgccaaggcgctccagagcgccgcccccatgtccgtcgtcgccggctcatgcggctacattgcaccagagtacacgtacactctaaaagtgaacgagaagagcgatgtgtacagcttcggtgtggtactattggagatcctgacgggacggcggtcggcggaggcggagtacggggaggggaacaacatcgtggactgggtgcggcggaaggtggccggaggcggggtgggcgacgtgatcgacgctgcggcgtgggccgacaatgatgtcggtggcacgcgggacgagatggcgctggcgcttagggtggcgctgctgtgcaccagccggtgcccgcaggagcggccgtcgatgagggaggtgctgtccatgctgcaggaggccaggccgaaacggaagaactcggccaagaagcaggttaagtaaaatgggtgatggttaagtctttagcagaaagaagaactaatatatatggtgtgctcttcgtgtgcagtgtgtgttgtgtatgtataattaacttatttagttactgtcatgaatgggcttgcat

SEQ ID NO: 8234 - DNA, 1347 bp, Oryza sativa
  ref <308>: DATABASE ACCESSION NUMBER: AK105582
  ref <309>: DATABASE ENTRY DATE: 2002-08-28
agccgaggcgggatcgatcttccaccgtgccgttgccagtgccaccgggggtgggtgagcaccgtcacggcgtcacctcccctcccctccctccggccggcatgacgatcgagggaaccatatatggcgggcgcggcggcgatggccctgttgctctcgaccagcgtgctgctcgtcctgtgccttctccccgtcgacccggctgccccgccggtcgccgccatcccgcaccgccgatcggggcgccacgacgtgccgttcggccgtcacgccgcgttcggcccgttcgccaccgaggtcgagctgctgctccacggcggcggcgccgtcccggacatcaggacgtgccgcgacacgctcgaccgcctccccgactggtcccacttcgacgccgagctcggccccctggaacggtacttcgggtcggacggggagctgaacgtgaaggagcggctgctgtacctgttcccgatgctggaccgggcgcccaaggacggcggcgtcagctgcggcgagctggaggcctggctgcgccggcaggcggcggaccgtctcgacgccgtcgcgcggagggagctcaagaggcacgacaaggacggagacggcgtcgtcacgctgcgcgaatacctcgccgtcgaccacgatcaacacattgattggaccgacacggagcacggcgaaccaggatggtggctgcataagttcataagcgcggatagagatcatagcggcgccatggacttcatagagctcaacgacttcttgcatccagaagatagcagccaggagaaagtgaaattatggctgttgaaggataaattaagtggaatggatcacgatagagacgggaaattaagtttggatgagtttatcagtcagtttcacatgatcgaccacaactccattgtagagcatagtgctgatgatgatactagttgtgctgaagctgagaagaagtttcgagagctcgattctaacaatgacggctatttgacagtggaagaagcacgtccagtaatccagagcctcatctcgggagagttttcatatgctaaatcacatgcaaagcttttgatgaaggctgatgataacaaggacaacaagttgtcactagaagagatgctgaaccactacctatctttctacaatattgtttacatggatgatcactatgactacgatgacattggcaacaatatccacgatgagcttaggtgacaaatttagccaagacggtatatataaactgttccctatgacaaacaaattatcatgataaaagctgtaaattatgacaaacaatatgaacgtgtacatatgggtaactacacgcgtaagtaatctgac

SEQ ID NO: 8235 - DNA, 1792 bp, Oryza sativa
  ref <308>: DATABASE ACCESSION NUMBER: AK105583
  ref <309>: DATABASE ENTRY DATE: 2002-08-28
ctgcgtactactttagctccccgtttgctccatggatcctctcctcctcctcctcctccagctagcttgctgctagcttgaccgcttcttcaatcttgatccgtccctctcactagctcgattgccttttcatcattcacattgttcttcttcttcttgatctgatcgagtattcgacttctctcgctggttggttggtttcttgatccgccatggacgacgacgatgtggtggtgcttagtagtgctagtgcgacgcggcacagctgcaaggtgtgcgggaaggggttcgcctgtggccgctcgctcggcggccacatgcgctcccactcgctcacggaggtggacgcggtggcggcggcggtggcgccggcttacgagcgagccgatgacgatgagggcggcgacgggaagacggtgcggcggtggatgcagagcggcggcggatatgggttaagggagaatcccaagaagacgcgccggctctcggcgggctccggcggcggcggcggcggcggcgacaacgacgatggagacgcgtgccatcaccgcggcggcgatctcctgtcgtcgtcgtcgtgccggccggtgctcggccgcgtgcgcagccatgcgccaccggcaggcggggcggcgtacgccgacgactccgaagatgtcggcgtggacgtggacggcggcggcggcgacgatcgttaccgggaccgggagatgctggtgatggcggctccgaggcggcggccgcggtcgatgcgcgtgccggcgcccgtgcgcgacgagttcgtcgtcgacgaggagccggaggacgtcgccctctgcctcgtgatgctgtcgcgcgacaccggccggccatggaactcgagaccaagcgacgagtactcatctctcatgtacaacagcagctaccaccaccaccacgacgccgtctccgacgacgatttggagttgtccctctcctccccgtacgcggacaccgagatcaggaccaagaagaggaggaagacgacgggtgcggcgagcaccgccggcggcgagaagcggggccggtacgagtgccacggctgcggccgggctttcctgtcctaccaagctctcggcggccaccgcgctagccacaaacgtataaacagcaattgcagccttgtcaaacctccggccgatcagccggagccgagcatcgaaacatcgttcagctctgcctcgacgtcggtgtcaccagctgacaccatgatcagcgcggccaccatctcgaagacggtgaagaaagcaactaaattcgtgtgcccaatctgctccaaggagttcggctccggtcaggctctcggcgggcacaagcggtcgcactcgatcgcaggcgagctctacgagcgcggccacgccgacggcattgtcaagctggagcaacctttgctcgccgacaggtttcttgatctcaatctgccagctccaggaggagatgatggctgaagcttaattaggaggagatgatggctgaagcttaattttggttcctccaagttttgacattttttggggagagcatgggtatgtacagattcagattcaattcattcttttggagtttcagcttagttgatcatgagggattaaataattatattgttaggtctttagttaattactccagatttttcgaccagttttgttttgaatttagtgctttttgttagctctgttctgtttttgctccacattgggaggaaaataagaacatcatatgatctcaattgagaactggtacaatgaaatgcttccagaaaagatttcagttg

SEQ ID NO: 8236 - DNA, 1492 bp, Oryza sativa
  ref <308>: DATABASE ACCESSION NUMBER: AK105584
  ref <309>: DATABASE ENTRY DATE: 2002-08-28
acacattttacggccagttctttcttctccgtcgaccaagaagaactctccctcctctctcgccgcctctgccccggagatcgccggcgccgccgggattgattcccactgattttcttccacaagtcggccacaggaagggtgaagaggattcggttcgccgattcgcaaaccgcgtgtgaagttgtgttccacaggccatggtcagcggcgcaacttcttcatcaatggctggagatgaagcaacacataggaagccaaaaaggaagcggcgggctaagtcggccgatgaagacgcatcaggcgatgagccacccgaatcaaaggggcccaacctgacatgttgcagcgccacgttagcgtcggaggcttgtcgtgtgctgtccaatacacaccacgagaaattgggggaaatcgggctagacgccgtggcttgcatgacacttgaaagtctcaagaagaccaaccccgacacaatgtgtccttccattgatggtgaacggaagattcagatcacccctcgcaccgtgaagcttgtgatggggaccccattaggcggacatgatattgtaatcccacctaacaaggttgtgcgaagcgtgcacgacaggatcacacaagaattgggaattgcacggaatggtcggatctcagctaaaatgctgattgaagtgatcaagaaccagaaagacaacccctcggcagttcgtttcttagtcatggttcttatgtccaagctcctactcccaacaaccgacttttacatacccaagagtgatgtatgggttgccgctgacctcgatcgggtcgctgccatcgattggtcgaaggcagtgttccaagcactgagcgataccatcagatgttggcgacaaaagcccacatcgtcaatcacatcttgtgttgtatttttggtggtaagctattccgttaatttcatctattttacttctgtttctaacaattttattcattttatgcatacaaacctaggtttatacttccgtcatgaattttttttattctccatcatgatacttctttttgtacaggttcggttctgtatcttgacaacatcctcgacgtccgaatcaggtgggttgaggtcatcaatgtccgatggtggagatgggcgtggagttgacatgtacccaaaatcttcagcgaacatcgtgtcatctgcttccatcgagggcgacagcaggaatgggtctggggaaggcggtggtggctccgacacacgaaactcttcgggggagttcacatacctcctcacggtgctccgacgtggtattaacggacggagctggaacatgttcttcggaattagtcgctttggcggtagatgtttgggcaatctcatccatgggatgagttgggtctgtgttgggcacttgtgcagaagccgtgatagtcaagtttataaaagggaatgcaaaccttgcaaacagaaatcacgggatctgatccgtgctaatccagggagtaatcg

SEQ ID NO: 8237 - DNA, 1815 bp, Oryza sativa
  ref <308>: DATABASE ACCESSION NUMBER: AK105585
  ref <309>: DATABASE ENTRY DATE: 2002-08-28
aaaagcaaaagagaaagggaaaaagggaaaagaagaagcagcagcagctcaagactcaactcaagtagaagaagaagaatagggagagagagagaccatcgatcgatctgtctcttttgcctgctctgctcctcttgttttcttttgccttgtttgcctcctctgcaacgaacgcagacctagcagcatgcatattcagtcaagagtttaattgcaagaagaagaagaagaagaagaaatctactactagtccagttgcagttgcagaggcatattgtggttggataatggagacggtgtcggtgtgcgggctccacccgggcgtggcggtgacggggttctgcccggcctgcctccgcgaccgcctcgccggcctccacccgccatccgacctccgccgctgcaagtccttctcctactacgcccgctcctcatcctacttggagccgcacccgcagcaggatgctctagtcctgcccgatgctgctgatgctccaaccaacaccaagctcgccttgggctccctgggcaagcgctggcaggaatggcgtcgcaagtccaagctcaagcaccaccacccgccccccgccaccgccaccgaccccgcgctgctggcccgccgctcctgcgacgctttctccacccgcaccatgctggacgagccccgcgcgtcctaccatcccacgctcttcgttccacgctccgacgaccagatccccgtggaggaggaggagcgagcttacgtgcccggcggctccgcccagacaagggactactacctcgactcctccagctccagcaggaggcgccggagcgtcgaccgcaagtcctcctccgacgccggcgaccaaatccccaggatggtggccgcggctgccaatgccagggtttcaccggccacagagctgtaccaccagccccacacgttccactatcaccagccaagcttcgagccgccgccattattggcccgggaacgacaagaggcaaagagcaagcctaagaacaaggggatcaaggggtggagcatctggggcctcctgcacaagaagagcagcaccaccaacagtgtgggtgccactgccagtgcgttcgccggcgaggcacgggcggcgccaccggagctccgggcaaggggttacgacggccagatgctccggtgcaacagcagcgtcagcgcaagaagctcattcagtggaattggaagctcattcaatggcggcaggttggggatgaggagggcagatgaagttttgcttgagaggaatttcagcgccaggtactcttcgtcttcctcctgcgggtatcagtttcacaaggatgattactccaactccattgccaacaattctggagctggagctggaagcaggcctcctcgttcctccaccttgccgaggacctcacttggactctactactactgaactcaattttattattattacccttggccgccctaaatctcatcaatcaaaaattattagtgtgcatagcatagcagcttatatatacttgttgcagttttacaactcaactggtgattgcctccaccacgtacgggtgcattataccttacttaatttacactagtacacccttttgtttattaatctcctccaaccacgacatatgcatgtttcttctttcatccattcagtcccagactcaagcctgtctcataatctcatatgcttcaaatcagccatgtgttggattgaaaagaaaaacgcttttcccttcatcagtttgtaaggctccttttctttcatatactgatatacaactatgcaatgaagctcatggtttagtgcc

SEQ ID NO: 8238 - DNA, 596 bp, Oryza sativa
  ref <308>: DATABASE ACCESSION NUMBER: AK105586
  ref <309>: DATABASE ENTRY DATE: 2002-08-28
aaactcgaacgcacggcaaagtcgccaagcccagtagcaggaagagatcagatttctttttcgcctccgtctccgatcaggaagaggatgggcggattcgatctgcaggtgaaggagagggccaaggagctgaagcacctcaagggggcggtgatgaagggcgtcaaggtggtcggcgactcgtgcaagaaggcgtggaacaaggtcaagagcatcaagcactgaagcgatcgaagcgtcgacgaaccatccgatccgacatattgtttgagtagattcatctagtatgattattagtacttgattgccctgtgcgatcggggtggttttgtagtagttccttctatttgagatagaatttcgtgtgagatcgcctgtaaggatggctttatagtattggtctattttccccttgatggattggtgttctttgatcttttttggtgaaatctgtggtgatagggatctgcctgtcaatattcgatactccttgcttaggacaactataattcggtgtgtgtttttttttttcttgaaagaacaattcggcgtgttgacgtgataatacaaggcgaggaatttttttagaactggat

SEQ ID NO: 8239 - DNA, 904 bp, Oryza sativa
  ref <308>: DATABASE ACCESSION NUMBER: AK105587
  ref <309>: DATABASE ENTRY DATE: 2002-08-28
tctggttgaacatgacaaggcactgggattgtggactataaagttaccttctgcagacacagtggttgtgaagagaaccctatcaacagtgacacagcatcctgagggccttcctggggtggaagaatccacggatttcgctgagcataggaagagcttctggtcttctgttaaaccagcgcatttcggagtgaagctcacctccaaatccttgctgggcattgcgcagttcatcttcactggactctgcatcggcctgctgggaggtttctcctttggcaggtccctcctactaaaattcccctcattcttctccgctggttggttcaggaagagcggaccgacggaggaacaggtgagcagcgcctcgttcaagatgtggttcgtcgggcgtggctacagcgacgcggctcgtgcatcggaccgcgggagcaagcctgacaaggagatcatcacgagggtttcgggaccagagatcggctacatcacaaccccgatcgtcctggtccaatgcgccctcgtcctgctgagccagcgagggaacctacctaagggcggggtgtacacaccgggtgccgttttcggccctaccgatatccagcagcgcctccaggagaatggcctgtcgttcgaccttgtctcaactaggacactgtgatcagaacttcagaagctgagcatctaccggtttgttcctgaacctgttgcccttttcctggaacctgcctcttgttgctaccttacactgaagaaacgtactgtagtagtctcttgctacgtgtgttgtgtttgtgtgaagtaacagtgtgtttctacatgtcgaaactcgaaactatgtgttgtccttgtgtgtagtacaagttgttatactgttccatctgaaatgaaaatgacgttcctgtgt

SEQ ID NO: 8240 - DNA, 625 bp, Oryza sativa
  ref <308>: DATABASE ACCESSION NUMBER: AK105588
  ref <309>: DATABASE ENTRY DATE: 2002-08-28
catgacttgaataaacctccatcaccagattattctgcttcaccaagttgttttagttcctcttttgacaatactagaaactttacacaagtcgaccatgccagcctcccagcaccgaatccgtcagataaactatacaatggtggttggttccctcccaagtgacttccctagaaggaaaaaagtgcagcactacgatgtacctgctaagatgctaaagaggaaagcccaagtctggtacttattgttagaactatgttgtaattcatgatctaatctggtatatgctgtaaaactgttgtatgattgtatcttgctctaacttgtagacaaaatgtacatccgactagagttaccttgtagggttaacatagcttcaagaacagaatgtcgagtagagggatcaatgttgtttctgtctttttttggttgcgtgcagttgctgggatattcataccatatactgtcagagctagctcactgatgtgccatcacatggagtgtcttaattatttgagataaattcttccatgcggatgatgagccctttaattttgcttttaaggccaacatgtattgaattgtgtttcgatgggatagtaaaagtgccagtgcattcaagtgc

SEQ ID NO: 8241 - DNA, 691 bp, Oryza sativa
  ref <308>: DATABASE ACCESSION NUMBER: AK105589
  ref <309>: DATABASE ENTRY DATE: 2002-08-28
aacagccactcaaatcttatcctctcctctctccctctccctctcctctcaccctccccctccctctccgagcctgcaaagaggagagctggcgatccgggcgaggaggaggtggtccggcagtggcggcggttcggcggggagggccagcaacgacggggtgacgagagatgatccggcggcgggctcggcaaggaggggtctagcggcgggggctcggcaaggcggagtgatggccgtggggtcagagcggctcggcgaggaggccgcccggcggcagctcggcgaggcaaggaaggccagaggcggctgctcggcgacgagggacggcgccgatgatgagggccggcggcagataaaccctccctccccggtgtggtcgtcccctccctcactccctcttcctctcagatctgcccggagggggacgggtggaggccggcggcctcccttccctctttcctctcagatccgcccggtggggagaggccaccggcggcagcggcatggccctcccctctgcagcagtagagggcggcagggaggaggccacagagctgtgtttttttatttgtttttattttgattgatgttgcaatgcaaatcggtgttgtggggatttgaatccgctgtatctgtgttcatgtatagattgtgttgatgaatggatgtttgtgattgtattttgttg

SEQ ID NO: 8242 - DNA, 1311 bp, Oryza sativa
  ref <308>: DATABASE ACCESSION NUMBER: AK105590
  ref <309>: DATABASE ENTRY DATE: 2002-08-28
atcggactcggagcaaaacacaatagaggagcagagcagagcacagtgagctagtagcagaggccacactagcgttgagatggcgcgcgaggcggagaaggacgcggcggcggcggcggagatcccgctgctgacgccgtacaagatggggcggttcgagctctcccaccgtgtggtgctcgcgccgctcacgcggaaccgctcctacggcaacgtgccgcggccgcacgcggtgctgtactacacgcagcgcgccaccagcggcggcctcctcgtcacggaggccaccggcgtctccgacaccgcgcagggctacccggacacccccggcatctggacgcagcagcaggtcgaggcgtggaagcccatcgtcgacgccgtccaccgcaagggcgccctcttcatctgccagctctggcacgtcggcagggtctccaccaacgaataccaacctgacgggcaggcgcccatctcaagcacagacaggcagatcacaccggacgattcaggcatcgtctactcgaaaccccgacggctgaggacggaggagatccctcagatcatcgacgacttcaggcgagccgcgcggaacgccatcgaggccgggttcgacggcgtggagatccacggcgcgcacggctacctcctggagcagttcatgaaggacagcgccaacgaccgcagcgacgagtacggtggcagcctcgagaaccggtgccgcttcgttgtcgaggtgatcgacgccatcgtcgccgaggttggagcgcaccgtgtggggatcaggctgtcaccgttcatcgactatatggactgcgtcgactccgacccggtggctctcggctcgtacatggtgcagcagctcaacaagcacccggggtttctctactgccacatggtggagccaagaatggccatcgtggaaggacgcaggaagatcacccatggcctcctgccattccggaagctgttcaatggcactttcatcgctgccggaggatacgatcgggaggaaggaaacaaggtgatagccgatggatatgctgacctcgtcgcctacgggaggcacttcttggccaatccggacttgcccaagaggttcgcgatcaacgcaccattgaacaagtataataggtccaccttttacatacaggatcctgttgttggctacacggactatcctttccttgatgagaaagacgagggcgctgctacttatgcttaatcctcaattaaattgtcaaattgaaatgttcggtttagtaatgtgcactatatttgtgatacactcataagtgaccctcacttccatcc

SEQ ID NO: 8243 - DNA, 1635 bp, Oryza sativa
  ref <308>: DATABASE ACCESSION NUMBER: AK105591
  ref <309>: DATABASE ENTRY DATE: 2002-08-28
attttcttgcccctgctacctccactgcgccacccatcaccagccatgcacagcctcgctctgcctccgcctccggcgtcgttctcgttctgaccctgtcacgttgagttaggctcctcggaggacgccacgacggcgaccgggaagaagatgaacccgctccctgctctggccagccggctgtgggaggcgagcatccgcaagctcaagtactccaccatccttcgcggctccgtcgttccctccggcggcaccttcgacggaccggcggccgccaccggcaatgccgctggaggtgaccccatcacgctcaccccaagcctctccgtcagctcctccacctccaacaccatctaccagtacgacgacggcgacgaagacatcgactccgtcctcgacgacgttgacaccgacgacgacgacgtcgacgaggcgtcgctcggcgagcccagccactccgaccagctgctgcccagcggagacttctaccagggcgacctacgctgtgacctcccccacggcgccggcaagtatctctggacggacggcagcatgtacgaggggtcgtggcgcggcggccgcgcggccggccgcggcaagttctcgtggtcgtcgggcgccatctacgagggcgacctcgccggcgggtacatgcacggacaggggacgtacatcggcgagctcggggacacgttcgccgggctgtgggcgaacaacctccggcacggccgcggcacgcaggcgtacgtcaacggcgacgtgtacgacggccactggcgcgacgggctgcaggacgggcacggccagtacatctggcgcggcggccacgagtacatcgggacgtggaaggccggcgagatgcacggccgcgggacggtgatatgggcggacggcgaccggtacgacggcgcgtgggaggacgccaagcccaaggggcagggcacgttccggtggtccgacggcgggatgtacattggcctgtggtgccaggagtccggcgagacgcagggcaagggcgtgtactacccgccgtccggtggcccggcggtgccgttgccccgggaacccaagggggtgatcacgaagctgctcgaggagctggagatgtccgaggggaagacggtgtcgctgctgccgtcacagaaggtgctgacatggcctggggtggagcccgtgacgaagaagccggtatggctgccgccggaggtcgccgctgaccaagggatgtggcggccgccggaggttggagctgaccaagggaggaggtcgagcaggaggaacaacatgtcgtccgacattgacagcctggttgagggggaggacggcggcgaggagagtcgcaacgacaggtcatgggtgcggacaccgtcgtgtatgcgcgcgccgacgatgccgaagccggggaagaagcagggggagaccatctccaaggggcacaagaactacgaactgatgctcaacttgcagctgggaataatattagatgtacctatcatgtatgaattaataatatggataaaattagatgtacctatcatttatttgtatttggtttttactgtacattaccagcgtgttttttttttccaaatcacactcaaattcctagcctttgatagacataaagattcgtgc

SEQ ID NO: 8244 - DNA, 1280 bp, Oryza sativa
  ref <308>: DATABASE ACCESSION NUMBER: AK105592
  ref <309>: DATABASE ENTRY DATE: 2002-08-28
aaaataaatcctcctaccaccttcctgacgaaggcaacgcccgcacgagtcgctcaccgcgcgcgaaccttcctcggactcggggcgtctgtcccctgccgccggcgattcgatcgcgcgggcggggctgtcgcgtctcgccgccgccgccgcagctaagccagcgcggcgatggattcgtctcggcccaggagggatcccatcaagtcccgccgccgtcccgactggagagaggagcttaggagcaattgtctgaaaagaattaaagaggagagagtccagtttctttggaagaaaaggatcgatgggccacttcctgctagtgacatgataaaagtcgaatctgcagtcagggatattatctctgatgaattacagaaactcaaacagcatggagatggaaaagcggaggaagaagctgatatgatatgggaatatcaaggaccacagacagctaaacctgttgagactgaaagtgaagatatattacttgaaatggaaagacttctttatgaagatatgagagatgaagccattcagatagaagtggaggccctcgatgaggaagatgaatacttagctcaggcttttcttgaacatatgcagttaactgataaggaggcaaatgctaagctctggtgcccagtttgcaaacaaggggaactacgagaaacacataatctcgtatattgtaccatgtgtaagctacgcctagaccttggagaagataagattaacctggaattcttgcgagaaagattggctaatgtgcatatggatcacttggatagaggatgcaaatcagcacccaagttctgtttgcagactatgtttgagttgactgcgctctacatacaatgcgaagaatgtaacacttttgatgtcgtgatataaatagctacaatgctgatgaagaccatattacggagagaagggaggatgtccatactttcagaagttctttctccccgtttactgttagatcaacggcgaacttatccttggaagaggatgtacatcaactaggtagggctctgtccactttttgcgttgaggtgatcaaactgtgactcttccatgtatctcttttttgtttgatgtctttcttcacgtaaaggtagagtgcagtgtaattaaccagatgagcttggtcaatattttgttgccaacttacatgaaagtcagtgaactcgctgaaccgatatggatatgggctagattatccgtatcctatgatgctgtgagttcaatatggttttatggattttcttattcctttg

SEQ ID NO: 8245 - DNA, 1808 bp, Oryza sativa
  ref <308>: DATABASE ACCESSION NUMBER: AK105593
  ref <309>: DATABASE ENTRY DATE: 2002-08-28
acgccactccacccccctccccctcctcctctctcccacccctcctcgcgtagtagtagtagtagtattagtctattcgagtcctaccagtagctagctaagcagccgagacggtggcggtggaggaggtggtggtggtggtagtagtagtacgccggggagagagagccgttgctgctgctgtgaggtgagggcgagatctaggagggaggcgtccatgggagctcgctgctccaagctctccgtgtgctggtggccgccgcacttcaagtcgccgctgcttgagaatggcgccgccgcggacgacggcagcggcgtgccggtgttcgccgagtacagcctcgacgagctacgggtggcgaccgacgggttctctcccgagcgcatcgtgtcggagcacggcgagaaggcgcccaacgtcgtctaccgcggcaccctcttcagcaccggccgcaccgtggccatcaagcgcttcggccgctctgcctggcccgactcccgccagttcttggaggaggcgagggctgtcgggcagctgcggagtgtccggctggccaacctgatcggctgctgctgcgagaatggcgagcggctgctcgtcgcggagttcatgccgcacgagaccttggcaaagcatctcttccactgggagacaaagccattgagctgggcaatgagggtacgagctgcattctatgtggctcaggcattggagtactgcagtagcaaagggagagctctctaccatgatctgcatgcatacagggttctctttgatgtggatggtaaccccagactgtcgtgcttcggtctgatgaagaacagcagggatgggaagagctatagtaccaatttggctttcacgcctcctgagtaccttaagactggcagagtaattccagagagtgtggtgtacagttttggtactatcttgcttgatctcctaagtggaaaacatatcccaccaagccatgcgcttgaccttataagaggaaaaaattacctggtgttgatggactcttgcttagaaggccatgtctccagctctgatgaggttcatgagatgctggagaatgatggatattgtgaggatgaaagagcaacattcgaggtatctttccattcctggactggccaacaagtatctgatagtattcttgtcaagaaacatggagacagtgcttttcaatccaaggattttgcgactgcagttgagtgctactcaaggttcattgacactggtgtaatggtgtctccgactatgctggcacgacgaagtttcgtatacatggtgctcggcaagctgcaagaaggccttgcggatgcaaagaaagcagcagacatatctcctgagtggcctactgcacactaccttcaagggatggcatatctcgccatgggaatggagcctgaagggcatgaagaactcaagcaaggcgccgctttggaagctgaaaggaatgctagatagagatgaactgtatagccctcaaacatgatgtgatgcctcctctcttctgtacctagatcgcctgcattttgggtgtcctccagtgctttgccaccaatagggctgttttttggtcttccctaacttgtattggtatttccagtggttttacaactcctaggttggctgttatgacacctccaatatattcataagtacaaaaaatgggcaactagcattcaaatagcaaaccgtggatgtgagattgtaaagctttaatgttatttcgtcacaattcatgtatatacacaacttgcagacttttctgaggcgtcaagagttaaagactgttgtgagt

SEQ ID NO: 8246 - DNA, 1353 bp, Oryza sativa
  ref <308>: DATABASE ACCESSION NUMBER: AK105594
  ref <309>: DATABASE ENTRY DATE: 2002-08-28
aaaaaaaaaaaacatggagtggcttaatggattttctttataatttttcattatagtgttgtaagttcatcatgccccgtaaaagaagttcatcgtgcatagtgacagttttttgaggcatttcgttttgaaaaaaaatcaacatggatttataaaatgtggacacatggaatgtccaaattgggacaacgatagggcatttcacttttcatatgctccacacttagtccaatggagcgaaagttaaacagtatagcatagcgtagtaaggaactaagaggcgcaataaacatgaactgaattctgatatgtttaccttcatgatctcacaatcatatcaaatatgtttagatacttttcttttttgcgaggagctaattaatttttatggacataagaataatggcttatttctcttgatagcctcatttgtttggttctatacaggatttccaattgacaaggtggctatgttagaccaggaaacccgtaactatgttggctgtaaattgcttgagcttacaataaaggagttgtttgtcttccgatttatgcagactgatccaaattggagcaacttccttttcgatgaacctacaaggaagttcaatctgattgactttggcgcagctcgtgattttccaaaacgttttgtggacgactaccttcgtatggtagttgcctgtgcgaacaaggatagagctggtgtcttagaaatgtcccgcagactaggatttctcacaggtgaggaaccggaagtcatgctggatgctcatgtccaagctgccttcattgttggtgtgccattcgcaaaaccaggtggtcacgatttccgtgcaaacaacatcacacatagtgtttccaacctcggagctaccatgttgaagcacaggctgacgccaccacccgacgaagtttacagcctccacagaaagttgtcaggtgcattcctagcctgcatcaagataggggcagttgtaccctgtagggagatgctgttcaaggtttatgagcaatacaatttcagcgatgatcgtccggaagtattgtccagcaccggatagaaatatgaaaggccaaccttttgcccacttcccttttggggaactttaaatagttacaggtcggttgcagctcattttttcgagagccacacaatcggctgctccatttgttgttaggctgaaagaatgctctgacaaattgtattattgatagcttgaaaagtgaggatattctgtttagggatgagctctacaaaaactgtataatgctcttatacttaagatgatgaaagttactctgcatatttttgagcacaagaaaataaatgcatcagaatgatgtttctgt

SEQ ID NO: 8247 - DNA, 2173 bp, Oryza sativa
  ref <308>: DATABASE ACCESSION NUMBER: AK105595
  ref <309>: DATABASE ENTRY DATE: 2002-08-28
tgttatttctcttatgcagaagcctggtgccacaggaggtgggacaccggtggttgatatggagagcttctttacatctgtgatcgtgcctgagctgcaggcccctgattgggaatctgaaccaatgctgaaggcaactgtgctgaggttcttgaaggaattcaaggatcaaatccccaaagccactgcactggcactgcttccaagtgtaataaggttcctgatacacgagtcaaatgttgtccattcatatgctgcgacctttattgagaaccttctgatcatcaaggatatggtaccagtaccaagtgcaaatgtgattaccagggctccacgctatgttgctgctgatatcaacccatatgcccagccgattgttcagaacctgtccaaggcactaagttttcctgaatcatatgagaacccctatctgatgaagtgcctgatgagagtgcttgggattgctaatattgctgggcaaattgttcatgaggttactgctcgccttgtgggtattcttatggaagtgtgcaataaccccaagaaccctgattttaaccattacttgtttgaagccctggcagcagtgattggtcgggctggtgagcaggacccagcactacttcctgtgtttgaggcaagcctcttcccggtgcttcagaggatattggttgaggacatctcagagttctggccatatgctttccagatatttgcacaacttgtcaatttgagccgaccacctctctcgcagaactacatgcagctgtttggtgtcctgctcagtaatgctacctgggaccgtccaccgtgtgtccctgccttggttcggttgctgagagcattccttcggaaaattccaaatgagcttaaccaagagggcaggctaccgaatatcttagtgatattccgcagtctcctttcgcggagcagtactgaagattctgccttctacatgcttaacacacttgtggaaaatgtgagttttgacatcatgaatcctcacataaatgagatatggagtgctttgtttactcgactacagacaaggcaggcagtgaagtttgtgaattctcttgtggtcttcatgtccttggtggtggttaaatatggaccaggtgttcttgtcagttctgtcgatgcaattcagccaaatattttcatgacaatccttcagcgcttttggattcccaatcttaaattcatcaaagggactgttgaagttaagctgacatcagttgcatcaacgaagttgatctgtgaatctgcactgctgttggatggtgcagcagcccaaacttggggcaaattgcttgacagtattgttgcattgctgtccagaacggatcaagatggggcacaacaagatcagaatgatggtgctgatgcagatagtcagaggacatcaggttattctgtctcatttgtacgtcttcaatatgctggaaagagtgaagatgatctgttgaaagaggtaaatgatccaaagcagtttctggtcacctccttggctactctttctgcgcaatctccagggagatttggtcctatcattgagcagaacgtggatcctgcaaacaaaggcgctcttattcaactttgtgcagcttacaataccaacattgtctaggagccaatggctttgctgtaaggcatttgcattgtttccatggggttttgtcaaaggatgtctcaggggagtctatcggtcggtcggtctatcgggtcaagctggtcttcggtttcatccttgcaatatttctggcatgtgtaggttggtcttgggagaggaaggatgtcgaaatcatatagtggtggaaaaacatgaacattgtggtggaggatgtctctttgattggaatttggaattttcttttttggtgtggaagaggtttgtttcccccggaaaacatgaacattgtggaggataccccgagaatattgccagcgtaggcatgtgccatcctggtggaactttgctgtaatttttttgcccttgttggctgaatgccttgctctggcgtaggaaatggtatatggcgtgggagtatattgtcatcggtcatcaccctttgttaggtcgggttacaaaaaatattgcgaacctcgattggagctcgcgatcctgctgccatttgctctgttttttgaatgcattgagccgttgcaagct

SEQ ID NO: 8248 - DNA, 1779 bp, Oryza sativa
  ref <308>: DATABASE ACCESSION NUMBER: AK105596
  ref <309>: DATABASE ENTRY DATE: 2002-08-28
agatagggggaaatgaaaagattgattggttgctgtaggtgtttctgtttgctacagtgagaatgcctgtcaaagaattcactgtcagattatacatgttcagaaagctctgttacaaatagaaaaaaaaacagcttttaggggaaaaaagatgatgctgagtttcttttcttttttctgttttgttttcacaaactgtcatgaactttattaaaagatagggggaaatgaaaagattgattggttgctgtagatgtttctgtttgctacagtgagaatacctgtctcactgtcagattatacatgtttagaaagctctgttacaaatagaaaaaaaaaatcagcttttaggggaaaaaattaggctttttttattgtcatgttgctacctccagtgagctcatcatcatctgttgtgtcatcatatgcgtgttgccgtcacctaccatggcaattggcaaagcctgaattttgtaacaatatggtctctaactgttcgttttcaggctaactcgatgcttctctcaacattctttcctgataaactagctgcaagttgccagggctctagttttagttggatgaccctacaaaaagtttagtcttcttttgatccagtccatagttgttcagctggctccatcagattactgagctagattaatgtcataaacattccctccaaaaggatttgactgtcttatcgtggttgtttactccaagtcgacacttaaaacattcaggcttccatgattgctaactcatcaagcaactatataacttgccaacaatgatttcctcatgcaacttgctgcagagtctgttatgttggttgcatcagcattatccatcgtgctaataagttaatgaaatttgaagtcttcttgtccttaaccactacatatgacctgaaaatgatttgattctctacagaataatgttcagttacagttattacttattacaattttaacctttcatagatcatttgcacttaataccatgttaaacatgaacatcacctaattacacgaaaacaaaatacaggaggactgggtgctatgcagggtgttctacaagaccagacaaacaattccaagcccatcatctgaagaggccgtcacactgcccaatgagctagacctgcctgccacgccttcgctcccgcccctcatcgatgcctacatcgccttcgatagcgcaccgacgacgacgccatcgatggtcgggagctacgagcaagtgtcctgcttctccggcctgccggcattgccaatgaagggctccatcagctttggggacctgctggccatggacacctctgcagagaagaaggccatcagggtactgcacaacagcaacactgcaaagctggagctctccccagattggggacaggagagtggcctgtcacagatgtggaacccccaataatgatcttgatcttgatattgatattgatattgatattgatattgatattgatgatgtttgtgttgctacttgctagatagcgattactactgaatgcagtgtggcaaataacttgtaaagaggtgacatattctttcctctgctggagtagtagctgtgcatacattttgtatttgattggaaaatttgattaggggtgtgacatacacagtagagtagtgaaaatggcttggtgtagaatctgtacataggattgcagaaaagggttatccctttctctttactctctagatgtatttgtcattgcagatgaataaagatttcagagacaggcattgtgtggat

SEQ ID NO: 8249 - DNA, 1466 bp, Oryza sativa
  ref <308>: DATABASE ACCESSION NUMBER: AK105597
  ref <309>: DATABASE ENTRY DATE: 2002-08-28
gcatagaagcggctgaggccgaccttggtgccgacggccttgatgtcggcctgcacctgctcgcggaattccctgtaggagaagggcctgtagacgccgccgccgatgccgctgggggcctcgacgacggcgtcctcctgcgggaaggcgaagtagcagcacgacaccctctccgtggaggggcggctcgcgagcaccctgtggcgcacgctctggtacgagccgccgctgatggccgtcatcatgtcgcccaggttgacgaggagctcgccgggcgcgggggcgacgtcgcgccacgcgccgtcgcggatcacctgcaggccgccgacgtggtcctggccgaggatgatggagagcacggagctgtcggtgtggggctccatcccgaggcaggaggcggaggaagggcagggcgggtagcggtacaggcggaggaagccctggcgctcggcgaggtaggacgccgcctggtgatgatccaggcccagctcggcggccagggcgtcgaacagcttgcgggcgatgcgcgccatgtggtcgccgtactccgccatcagcgccctgatccgcatccagccatcatcatcatcatcatcgccatcgccgacctgcgacgacgacgacgacgagccggggacgagatcgacatggagtccctccagccagttgacctccttgacgcggagcgacttcagcgcagccgtgccccagaagtagcccggccgcgccttcttcagctcgaaggtgttgcgacccagcagctgcttccccagctccagcagccgccgccggagctcgccgggggcgccgtggttcaccacgcggaacgcgcccagatcccggcaggccgccaccagcgccgcccggtcctcgccgccgacgcgctccaggtccagcgtcggcagctccagcctgggcagacccggctgcagctgcagctgcagcggcagcggtggcgcctccggctgcgggaacggcgggcacgacgggtccatctgcgtggtcctcgtcgtcgtcgttgacgacgactcgcccccacctcctcctggttgaagcctgccgcacgtggcggcagctgaggcccagcccatcagaagcctacggcctccatctcagcccattagtgagatggcggccaggcccggcccgtagtcgtttctgccctactcgttttgcagtgtgataggatctgccaaaaggccattcaattgctgccaaaagtgaaatttcggacggtgcggtacagatgtaaaccgagcttgaaaaattgatgatgtagagcagatcagcagattctacggacttctccattcagcaaagggaatgatgctgagaatttcagtgtagttaatgatgtatagcacaatgttcttgaagggagtagaaaaggaggggtgggaagccaaagggaactcttgagaagaaaagagaaacccaattcataagggcacccgcaatggttatct

SEQ ID NO: 8250 - DNA, 1114 bp, Oryza sativa
  ref <308>: DATABASE ACCESSION NUMBER: AK105598
  ref <309>: DATABASE ENTRY DATE: 2002-08-28
atctcattgcactaaactgctcactgcatttgcatgcacgtggccaagaagagtttggcatccatggcggcttcggcgacgacgaccatcctcgtggcggcgatgttggtggtgatggcggtggagtctccggtggcgaacgggcaggcggcggcggctgcgccggcgccggcgccggcggcgccgaagacgatcacggcgatcctgaccaaggccggtcagttcaccaagttcctccagctactgcagtcgacgcaggccggcgagcagatcaacaaccagatcaaggggaaggcgtcgtcctccggcgggctcaccgtgttcgcgccgccggacaacgcgttcgcggcgctccccaccggcaccctcaacaagctctccgaccagcagaagacgtcgctggtgcagttccacgtcgtgtccgcgctgctccccatggcgcagttcgacaccgtcagcaacccgctccggacgcaggccggcgagaccgccgccggcaagtacccgctcaacgtcaccgccgagggctcccgcgtgaacatctccaccggcgtcgtcaacgccaccgtcgacaacacgctctactccggcgaccgcctcgtcgtctaccaggtcgacaaggtgctgctgccgtgggcgctctacggcccgcccgtgcccgcgccggcgccgtcgccggcggacaaggccaagaagaaggccggccccgtcggcgtggccgacgcgccggcggccgacacggctgccgggacgacgacgacgacggtggcgacggcgtcggaggcggcggcgcggggcacggtgcggcggggcttggtcggcgtggccgtcgccgtggctgtcgcgtggtgtggcatgtgacagtaaaggagaatgttggagattgccaattcaccatgggatttttttttcttttaattttgtggaaaggtgttaaaattgttttgttgttttggtttttcttgttctttttgtatgatttggtaggattttgttttgtccgtgtcctatgttgatcttttagagtttttcactgtgtgttgtatgtcttttcgtggttgttatatatgtaataagaagtgtttgtatattgtggtatctaatttgttacttg

SEQ ID NO: 8251 - DNA, 955 bp, Oryza sativa
  ref <308>: DATABASE ACCESSION NUMBER: AK105599
  ref <309>: DATABASE ENTRY DATE: 2002-08-28
aaaaaaaaaaaaaaaaaaaaaaaaaaaaaaaaaaaatcgccattaccacactcgagcagagcaaatacagttcaggaatcaggagcaagcagaaacacacacacaaatccgaagatgtgcgggatcaagcaggagatgagcggcgagtcgtcggggtcgccgtgcagctcggcgtcggcggagcggcagcaccagacggtgtggacggcgccgccgaagaggccggcggggcggaccaagttcagggagacgaggcacccggtgttccgcggcgtgcggcggaggggcaatgccgggaggtgggtgtgcgaggtgcgggtgcccgggcggcgcggctgcaggctctggctcggcacgttcgacaccgccgagggcgcggcgcgcgcgcacgacgccgccatgctcgccatcaacgccggcggcggcggcggcgggggagcatgctgcctcaacttcgccgactccgcgtggctcctcgccgtgccgcgctcctaccgcaccctcgccgacgtccgccacgccgtcgccgaggccgtcgaggacttcttccggcgccgcctcgccgacgacgcgctgtccgccacgtcgtcgtcctcgacgacgccgtccaccccacgcaccgacgacgacgaggagtccgccgccaccgacggcgacgagccctcctccccggccagcgacctggcgttcgaactggacgtcctgagtgacatgggctgggacctgtactacgcgagcttggcgcaggggatgctcatggagccaccatcggcggcgctcggcgacgacggtgacgccatcctcgccgacgtcccactctggagctactagagctcaatcaactgtacaattttgcctcttttttctctcttttctggcttccgatgccaaaattttggtactgtacggacactactttcggtaatgtgatggaacaagttgcaaaacacagagc

SEQ ID NO: 8252 - DNA, 2485 bp, Oryza sativa
  ref <308>: DATABASE ACCESSION NUMBER: AK105600
  ref <309>: DATABASE ENTRY DATE: 2002-08-28
gagtagaccctgtcgttgtgagaattcttaattcatgagttgtagggagggacgtatgtcaccacaaacagaaactaaagcaagtgttggatttaaagctggtgttaaggattataaattgacttactacaccccggagtacgaaaccaaggacactgatatcttggcagcattccgagtaactcctcagccgggggttccgcccgaagaagcaggggctgcagtagctgccgaatcttctactggtacatggacaactgtttggactgatggacttaccagtcttgatcgttacaaaggccgatgctatcacatcgagcccgttgttggggaggataatcaatatatcgcttatgtagcttatccattagacctatttgaagagggttctgttactaacatgtttacttccattgtgggtaacgtatttggtttcaaagccctacgcgctctacgtctggaggatctgcgaattccccctacttattcaaaaactttccaaggtccgcctcatggtatccaagttgaaagggataagttgaacaaatacggtcgtcctttattgggatgtactattaaaccaaaattgggattatctgcaaaaaattatggtagagcatgttatgagtgtctacgcggtggacttgattttaccaaagatgatgaaaacgtaaactcacaaccatttatgcgttggagggaccgttttgtcttttgtgccgaagctatttataaatcacaggccgaaaccggtgaaattaaggggcattacttgaatgcgactgcaggtacatgcgaagaaatgattaaaagagctgtatttgcgagggaattaggggttcctattgtaatgcatgactacttaaccggggggttcaccgcaaatactagtttggctcattattgccgcgacaacggcctacttcttcacattcaccgagcaatgcatgcagttattgatagacagaaaaatcatggtatgcatttccgtgtattagctaaagcattgcgtatgtctgggggagatcatatccacgctggtacagtagtaggtaagttagaaggggaacgcgaaatgactttaggttttgttgatttattgcgcgatgattttattgaaaaagatcgtgctcgcggtatctttttcactcaggactgggtatccatgccaggtgttataccggtggcttcagggggtattcatgtttggcatatgccagctctgaccgaaatctttggagatgattctgtattgcaatttggtggaggaactttaggacatccttggggtaatgcacctggtgcagcagctaatcgggtggctttagaagcctgtgtacaagctcgtaacgaagggcgcgatcttgctcgtgaaggtaatgaaattatccgatcagcttgcaaatggagtcctgaactagccgcagcttgtgaaatatggaaagcgatcaaattcgagttcgagccggtagataaactagatagctagactaagtggataaaattagatagaaaaaaggtctaaataaaaaagaagagaaatagaaagatcaaaaatcagttacgaaaatgcagtaattcttcttttttcttctaattgattgcaattaaactcggctcaatctgaaaaaagattgagccgagtttaaaaagctagtcaccaatggcgatagcgagattggacagatggtgatattatcattaatcctgaaaagggccagaataaaagcattagtgaaggacaggcgatccactgaagaagcatttggaacttacgtggagtgcatggttggtaatatggaagataagtccttcacaaagaaagcactaaggggtgttcgtgctataatttgtccagctgatgatggtttcttctctgacttggacctcaagggtgtgcaacacattgttctgctatcccagctctctgtctacagaggtagcggtggtctccaagctattatgaacagcaaactgcggaaacttgctgagagggatgaagaagtggttcttgcatctgggatcccatccacgataatcaggactggctcgatgcaaagcactcctggtggtgatagaggtttcgattttacagagggtgcagcagccaagggaagaatgagcaaagaagatgctgctacaatctgtgtggaggccctggactccattccccagacaacactcatttttgaggtggccaatggtgacgaaaaggttactgactggaaggcatggtttgctgagcggacgaaaacggtgacaagttaagtatgattgaaatgcagtaatttttttgttgggaaagaaaggattgcggtattcccaccacgaagtcgtgtggcaacgcagttgcgctgaatctgaagctcattttggttgtggttctctgagtttgcattctgaactctgaaatggtgctatgtacagactcacctctcaaaacctgtgaatattatgtaaatcgcacacggtcgatcatggtact

SEQ ID NO: 8253 - DNA, 1630 bp, Oryza sativa
  ref <308>: DATABASE ACCESSION NUMBER: AK105601
  ref <309>: DATABASE ENTRY DATE: 2002-08-28
cctcgtaatcatcttctcttctctcttccccggcggcgacgcggcggcgccggtcaaaccactcctcgccggcgaggggagcgcggatcgggctcgggaggaggctaggggtttggctcgctcgctcgctttcggcgtgcagctgaggcggtggacttggcggctgtggcggaggtggggaggtggaggtggaggggagatggaggggttcctgcagaagctgaaggggctggacgcgtaccccaaggtgaacgaggacttctacaagcggacgctctccggcggcgtcgtcacggtcgtcgcctccgtcgtcatgctgctgctgttcgtctccgagacccggtcatatttttattcagcaacagagactaagctagtggttgacacatcaagaggggaaaggctacgagttaattttgacgtaacttttccgagtgttccctgcacccttctcagtgttgataccatggatattagtggagagcagcatcatgacattaggcatgatatagaaaagaggcgattagacgcacatggtaatgtcattgaggctagaaaagaaggcattggtggagcaaagatagagagtccattgcaaaaacatggaggaagactcagcaaaggtgaagaatactgtggcacgtgttatggtgctgaggagtcggatgaacaatgctgtaattcttgtgaagaagttagggaagcatataagaagaaaggatgggcccttacaaatcctgatctgattgaccagtgcaccagagaagattttgtggaaagagttaaaactcaacaaggtgaaggttgtaatgtacatggctttttagatgtcagcaaagttgcagggaacttacactttgctccaggcaaaggattttatgagtcaaatataaatgtgcctgagctgtcggcacttgagcatggtttcaacatcacacacaaaataaataaactgtcttttgggacagaattccctggtgttgttaatccacctgatggtgctcagtggacacaaccagcatcagatgggacataccaacacttcataaaagttgttcctacaatttacactgatctaagagggcgcaagattcattccaaccaattctcagtaacagagcattttagagatgggaatattcgccccaaaccccagcctggagtatttttcttctatgatttctcacccataaaggtaatatttacagaagaaaatagttccctgctccactatctgacgaacctatgtgctatagtgggaggggttttcaccgtctccggcatcattgactcgttcatatatcacgggcagaaggcactcaagaaaaaaatggagctaggcaagtacagatgatttacctgaaacatggactggccctcatgttccccaagttcccaagttccgtggcttgtaaaggatccattgcttaagacctgaagacgttgctttgctggaaggttttgctaaggccatcagaattgacgatattgcacattagttgatcaaaaactcgtttacatgtaaaaaaagacaatatcatagcgttgggcctgggggagtgctttgatgtctcagtgagactctttttgagtggccaaaactggcgaaatgagatggatagattaaatc

SEQ ID NO: 8254 - DNA, 2514 bp, Oryza sativa
  ref <308>: DATABASE ACCESSION NUMBER: AK105602
  ref <309>: DATABASE ENTRY DATE: 2002-08-28
cgcttcaccacgctcctccatccgccaactccggccacgccgccgccgcctgccatgccgcgccatctccccgccgccgccgccagccgccgcctcctctgcaccacgacccacctcctcgccctgccgcccgtcgagccgtccccggccgccgacgagctcgcccgcctcctccttgcgcaccacaaccccttccacccggccgagtcgccgctccagctcctctccggcgggggggtctccctcacgggggacctcctcgtccagctcctcctccgcctccgcggcgcctccaagctcgcgctgtcgctcctccacgccgcgcgcctccaccctccccccgccgcctcttcccgcgccgccgacgcctacgacgccgtcgtggacgcgctcggccgcgcgcgccagttcgacgccgcgtggaggctcgtcgtcgaggccgcggcggacggcgccgccacgccccgcacgttcgcggtgctcgcgaggaggtacgtcgccgccgggatgacgcggcaggcggtgcgcgcgttcgacgacatggaggcgttcgtcgggagggagcccgacgccgccgagttcaccacgctgctcgacaccctctgcaagtacaagtatccaaaggttgcagcggaagtattcaacaaaagaaaatacaagtatgaaccaaacgaaaagatgtacactgttctaatttatggttggtgcaaggtaaaccgaaatgacatggctcagaagttcctaaaagatatgatttatcatgggatagaacccaacatagttacatacaacattctcctcaatggtatctgtaggcatgcaagcttgcaccctgattaccggtttgatagaacagttcgtgcagctgaggatctcttgaaagaaatgcatcaaaggggaatcgaacccaatgttacaagctactctgtcatcctgcatgtttacagtcgtgcgcataaacctgaactatgtctctgtatgttccgctcaatgaaagagagaggcatttgtcccacggtggcaacctacacttctgtgatcaagtgccttgcttcctgtgggagattggatgatgctgagagcttgcttgatgagatggcaagtgagggagtatgcccctcgccggccacatacaattgtttcttcaaagagtatcgagggagaaaagatgtgaatggtgccctacagctgtacaataagatgaaggcccctggttcaccagccacacctgatattcacacttacaacatactgcttggaatgtttatcaagttgaaccaacatgacaccgttatgcaagtttggaatgatatgtgtgagagcactgttggtcctgatctcaattcgtataccttgttggttcatggtttatgtgacaataagaaatggagggaagcatgccagtttttcatggaaatgatagagagaggttttcttccccagaagatcacctttgagacactatatcgtggtttaatacaagcagacatgttgaggacctggagaaggctgaagaaaagggttgatgaagaagcagcaaaatttggtgaagaattcaaaccatatcacattaagccttacaagaggtgatccgccaccattggcaagatatgatatgttcattcttttgattggttcaagttgtaccatagcctccaaattatgttgatccgccaccattggcaagatattccatttgactttcccttgagtagagctcgaatggaatatccatcctggtaattgagcaattgaaaagagtgcgtcttaccagaaggacacgcgagaaaaggttgaagaactaagtcgcattgttgccagattttgtaaaggcacgatcgcttaaagatgtgggccataatactaggtacatcaatttaacatgagtaaattgtaattctttggtgtgtttggagaaacttgaagttgaaggtaagctacttcttcctactgcagttcagatattcactttgaagttcacatgagtgaaaaagattctatgaagccagttgtgaataatttctgcatctcttttactctccttttttaccagtcgaggtatggctatgtcccaggttcaaaggcttgcattggctacttggagaaactgcacggctgaaatttctcgcgaaccaatcgagcttctggagatggatatggttgttggcttcatttgcatgatgatgctcaagactttgtttatattgtcccagcacagggcatctgatagggttaagtttgagtctgtcttcgtagaacagcgatatctcttgttatattgtcccagcacagggcatctgatagggttcaggtttgagtctgtctttgtagaacagcgatatctcttgactgtcagtactttatttcacagaaactagtgtaggtttgttcctacaagatccaagttttttttttattacaaataggtttaagcaacatcaaaatgaatatgtttaaatgtaagatattagtaaaatgcttttgattcgaatctaattatacaactttgttggt

SEQ ID NO: 8255 - DNA, 1040 bp, Oryza sativa
  ref <308>: DATABASE ACCESSION NUMBER: AK105603
  ref <309>: DATABASE ENTRY DATE: 2002-08-28
acacacactacacacactacgcttctacgctacacaccactactctcacaacaatggcgaggagcgtagccgtggtggtgttgctggcgatggcggcggtggcggcggcgcaggcgccgggtcccgctgcgacgccggcggcgggcgccacggggccgccgaacgtgacggcggtcctggagaagggagggcagtacacgacgttcatccggctgatgaaggagacgcagcaggacacgcagctgaacagccagctgaacaactccttcaacggcaacggctacaccgtgttcgcgcctaccgacaacgccttcaacaacctcaagccgggcaccctcaacagcctgacgcagcagcagcaggtggcgctcgtccagggccacgtcctcccgcagttctactccatggactccttccagacggccagcaaccccgtccgcacccaggcgtccggcaccgacggcccctacaccctcaacatcacctccaccaccaacaacaacgtcaacgtctccaccggcgtcgtcgaggtcaccgtcaccaacgcgctcagcgcggtcaagccgctcgccgtctactccgtcgacaaggtgctcctccccttcgagctcttcggcgtcaaggcccccgccgccgcgcccaccgcgtcgaccgccaagcccaagaagggtggctccacggaggccgcctccggccccgccggcgcggaggacgccgagcccacgggcgccgccagcgccagggccgtcggctggggcgtcgccgggctcgccgccgttgttggctgcctcttgtaagacggtgtacggacacgatggtcgaggaagctagccatgtgcatgcatttcttttcttttctttttttttcctttttttccttttctttcattcttcctctctccatgtttaaatttatttgattttgactagtttgttctttacattattcttgttcttggtggtttgtaatattgggctgtgtgattggagttttctgtctgaggccgggatgttaataatgcattagtacattttgagtc

SEQ ID NO: 8256 - DNA, 446 bp, Oryza sativa
  ref <308>: DATABASE ACCESSION NUMBER: AK105604
  ref <309>: DATABASE ENTRY DATE: 2002-08-28
tcgactgaattccgtgacatggttgctgccgcattttcgacatatgatccaaatagaactgtgatccaaatagaccccaggaacaccgaggaaatgggattctgggagagcaacaacgccatcatcgcgcagatggcacgtagcagcccaccggagaagccagcggtggcgcacgtctgccaggacttcaagtgcagccctccggtgacctctgcagacgctctccgcgtgctgctcaacaagacagtggcagctgctacttcgtctgctgctgcctgaagcgtctttccctcctacggctatggagctcctctggaaagtacataagtaacaaatcggcagagtttttagcctgcagaaggtttagctttcgggttcccaaagctctttgagccgcctcggttgtgtgtagatatttttctcttaataaaagcactgttttcatc

SEQ ID NO: 8257 - DNA, 2191 bp, Oryza sativa
  ref <308>: DATABASE ACCESSION NUMBER: AK105605
  ref <309>: DATABASE ENTRY DATE: 2002-08-28
agtgtagcatagctcacttccaagagcctcgtgacacacaccactcactatactggcccctcctcctcctcggagatcgagccggccagccatggcggccgccgtgcagctgctcgtcgtcgccgccgccgccgccatggcggcggcgtgctgcgccggcatgacggcggcggcggcgacggtggaggtgacgtgggacgtggagtacgtactgtgggcgccggactgccagcagcgggtgatgatcgggataaacggcaggttcccggggcccaacatcaccgcgcgcgccggcgacgtgatcagcgtcaccatgaacaacaagatgcacaccgagggcgtcgtcatccactggcacggcatcagacagtttggcacgccgtgggcggacgggacggcatcgatatcccagtgcgcagtgaacccgggcgagacgttcgtctacaagttcgtcgccgacaagccgggcacctacttctaccacggccacttcgggatgcagcgcgccgcgggcctgtacggttccctcatcgtcctcgactcgccggagcagcccgagccgttccgccaccagtacgacgacggcggcgagctccccatgatgctcctcagcgactggtggcaccagaacgtctacgcccaggccgccggactcgacggcaaggacaggcacttcgagtggatcggcgagccccagacgatcttgatcaatgggagaggacagttcgagtgcacgctggggccagcgaggaagagctttgagaagctcctcaacgagaacgtggagacctgcgtcgacgaccagaagatgtgcagcgaccaggagaagtgcctgaggaggagcgagtgcgggccgtactgccccaggagccagtgcgcccctgtcgtgttcaatgtcgagcaggggaagacttaccgccttaggatcgccagcaccacctccctttctctcctcaacgtcaagattcaagggcacaagatgacggtggtggaggccgacgggaaccacgtggagccgttcgtggtcgacgacatcgacatctactccggcgagagctactccgtcctcctcaaggccgaccagaagccggcgagctactggatctccgtcggcgtcagggggcgccaccccaagacggtgccggcgctcgccatcctcagctacggcaacggcaacgcggcgccgccgccgctccagctgcccgccggcgagccccccgtgacgccggcgtggaacgacacacagcgcagcaaggccttcacctacagcatcagggcgcgcaaggacaccaaccggccgccgccggcggccgccgaccggcagatcgtcctgctcaacacgcagaacctcatggacgggcgctacaggtggtccatcaacaacgtgtccctgacgctgccggcgacgccgtacctgggcgccttccaccacggcctccaggacagcgcgttcgacgcgtccggcgagccgccggcggcgttcccggaggactacgacgtgatgaggccgccggcgaacaacgcgacgacggcgagcgacagggtgttccggctgcgacacggcggcgtggtggacgtggtgctccagaacgccaacatgctgagggaggaggtgagcgagacgcacccgtggcacctccacggccacgacttctgggtgctcggctacggcgacggccggtacgacccggcggcgcacgcggcggggctcaacgccgccgacccgccgctgcggaacacggcggtggtcttcccgcacgggtggacggcgcttcggttcgtcgccaacaacaccggcgcgtgggcgttccactgccacatcgagccgcacctccacatgggcatgggcgtcgtcttcgtcgagggggaggacaggatgcacgagctcgacgtgcccaaggacgccatggcgtgcggcctcgtcgccaggacggccgccacgccgctcaccccggcaacgccgctgcctccgtcgccggcgccggcgccatgagctcctcctcagcatgcccattccagttaaatgccatttttgccgtaacattgtgattggccactgcgaaataagatcactcactgatgaagagtggtttagattgtttggtcatatgcatgctcaataatctcatgtaactaagaaataatgtccatgtttgctaattaagatgattgtgtaatattgttgcaatgt

SEQ ID NO: 8258 - DNA, 2167 bp, Oryza sativa
  ref <308>: DATABASE ACCESSION NUMBER: AK105606
  ref <309>: DATABASE ENTRY DATE: 2002-08-28
ctcggatgctggccttgtaccaaacctccccatgtacaatgccatgatcgacctctgttgcagtgttggtgataccgactacgccctccgcatgctcgacgaaatgcccttcaatggcgtctttgcagattttatcacgtacaatgccatacttgaagggctcatcaagcagcgcaaggctcgtgaggctgaggctttcctcgcagagatgagcaagaacgagcagctgccctccccaaccaattgtgctgctgctatcagcatgttctctaaggagtttaacccgtcagcagcaatcgatgtgtggcactgcattgtggagcaccagattactccggccgatgagtcagccagagaactaatagttgggttgcttgattttggcaggtttgctgaggtgaagaaatatactgatgaaatgcttgacatgggaattgagttacctcagtcaaccattgataatatgaagcgcacatttgataaggttggcaagcaccacacatatgaccatattgctagaaggccaaagcggtgttagctatacatcaccaatttaatcataataggtatgccttctttcatatgggtgtttttggctgtgtcagtgaatgccatgaattgcatgaattcatctatcatcttgaccttatgccattcactaataagtcctcatgacttgctagtaagctacttggagtgaatgtcatcagttgcgtgaattcaccaattatcttgaccttatgacattcactaattagtcctcatgacttgcaattaagctacttggaattggaggttttatcctggactactagtttggttccctatgttcttgcatgagccaattccttgttcctcttggctgtcttgctctccttgtcttgttaatattggagtaccttttcttggcacggtgcacaaggccactaaaaatgactattccactgactatttatgtgcgctacttttatgcattttgataactttccttgcccctttggaagacactggacatctatgattccatcttcctttacaataggattcatagtgatgttgtatggaaatgtagctgtttggtgctcttcaatggaggaagaactcctaactcatatcttgggtatctagcggacatgcacttctatcacaacaactcatatcttgggttatctagcggacatgcacttctcttacaacaactccttgtcgatgtctacactactcaccccactttaagatagatatcttgtggtggctgtcggggtttacagacttatgtgccctcgcactaaagttgatgcaacccataagtcctgattgcagatggacacattgcattgactatcgtctatcttccaggacctaactattacacattggctatatgtctaggctgtggtctcccctcatctaattattgagtgagtcccttgtcccaaattacaatggccttacagatgtgttttgtgcttaacctttttctctctgatcacttccatcattgtaggtgtcgtgggcttcttagtgtttaagccaagtaaaatgtgattcaatcttctttgctcaaatctttgattcctggtacaacatagtcgagataaaacataatgttgttcactttagcctgtttgggttttgcaaaactccatagatatgcagaagagaaatgctatcccactccatcatggcttgacacttcttagtctgaactctgtagaattttaaggattgccttctaattttggcatattatggactcgagttcaggatgtggtgtactgcgtgtcatcttttttcccttaccaagttacccctgctatatagcttctccaaatgcttttgatcactctttgagaaaggcatgttggaaaacagaaacatgtggtcagtactgatcacacattgcacaagatggtactgtttcttcttcgttgaacctagattatcttctttagtgtttctctggaacaacaaacctcttgaattgttaaagattcagtagcattgagtaaaactacaacaggttatgtctactgttaccactgtttgatgcacttccatcctatagaaatcaatagctaatgtttctattcatgacgtgtctaccagggaggatttacataattagagtcggggacttttttggggccttttgtgggttgactcc

SEQ ID NO: 8259 - DNA, 1786 bp, Oryza sativa
  ref <308>: DATABASE ACCESSION NUMBER: AK105607
  ref <309>: DATABASE ENTRY DATE: 2002-08-28
ggtaacattcggtgtggtagtgggtatactcgtcctcctcttcgtgctcgtcctcgtcgtcaccatcgagggcgtctgcaagcgccgctcctcctcctgattccgccgcggtcgctagccctaatgcgcgggggcctcctcgtcctgctcctcctcaccgcggccgtcgccggcggcggcggccacgagggctcctcctcctgccccttccacgcccacgacaagccccacgatgatcaccaccacggccacggccacggccacggccacagctgcggcggcggcggggacgactcccacctcgtgcaccatcatcaccatgggcatgggcatggccatgacggcgggatccagcggcggcttctccccgaggagctcgcggaggaggcggatctcgagctcgactccttcggcgatcaccaccaccaccaccaccatcaccatgaacaccaccaccacgaccaccaccatggccacggcgacttccaggccgagttatcacccttgggtatgtggctgagtgccatgggatgctcgcttctggtcagcatggcgtcgctcgtctgcctcgtcctgctcccagtaatcttcttccaggggaagccgtccaagaccatggtggattgccttgccatcttcggggcaggtgcgatgcttggggattcatttcttcatcaactgccacatgcctttggtggagggcattctcatacacatgatcatcagaatcataatcattctcatgagcattcacatgcacactctctggaagatctttctattggtttgtctgttctatttggcattgtgtttttctttattgttgagaagattgtgaggtatgtggaagacaattctcagaaaggggctcatggcatgggccaccgtcatcaccatcataaacgacacgataggagcgacaaggccaagttgaatcacgcagaaaaggatcatgaggataaaggcgtaaatcaagcagaaaaggaaccttcgcatgatggtgcaattgagaaaacagatggtgtaactcgtgctgattcaaaatctgcaatccgtaagaggggcttatcttctggttccaattccgctgatagagagcctgtcaattctgaaagtgaccctgcccctaacaaagcattatcaagtgaagattcctctgtttccaattcgaatatggtgttcggctacctcaaccttttctcagatggtgttcataactttactgatgggatggccctagggagtgcttttctgctacatggttctgttggaggatggtcgagaactctatttctgcttgcacatgaacttcctcaagaggtcggagattttggtatcctggtgcgctcaggattcactgtaactaaagccctatttttcaattttctctctgcgttggttgctcttgctggaacagcactggcattgtctttgggaaaagatccagggcattcttctttgattgagggattcactgctggtggctttatttatattgctgttgctggagtcctcccagagatgaatgatcagaaaacaaccgtcaaaagctcgatgattcagttggtttccctgacaatgggaatgctggttgccctcggcatatctctagtagaatgatgacggaatttctggttgcagctttagggcctattgtacttaagccaagcgggtaattcttgaacagctccagcctgtaagatcaattcttctcgatagtttcaccgactgtgttacagaaattttgacaattttcaaaaaaaaagagagagaaaatttggttctt

SEQ ID NO: 8260 - DNA, 1743 bp, Oryza sativa
  ref <308>: DATABASE ACCESSION NUMBER: AK105608
  ref <309>: DATABASE ENTRY DATE: 2002-08-28
atcgccgcctcttcgcttcttcatctccccactcatccctcccattcccacctcctctccagttcagtttgcccctctgatcgatctgttccctagccaagaagcatcgatcagctgagtgagctggcaagcgagagatactagctaggatgtacgacgtggccggggagcggtggagcggcggctgcggcgggcaccaccgccggctgatgggcgcgtcgtcgtcgtcggctccggcgccggcgggggaggacgacgcagggaaaagcgggtcgagcaaggacgcgatgaagatcatggtgtccgtgctggtggtcgtcatcttctgcacgctgctctactgcgtctactgctggcgatggcgcaagcgcaacgctgtgaggagggcgcagatggagaggcttcggccgatgtcgagctccgacctgccgctcatggacctcgcctccatccacgccgccaccgacagcttctccaaggccaacaagctcggcgagggcggcttcggccccgtctacaggggcgttctccccggcggcggcgcggagatcgcggtgaagcggctgtcggcgaggtcgaggcagggcgcggcggagttcaggaacgaggtggagctcatcgccaagctgcagcaccgcaacctggtccgcctcctcggctggtgcgccgagcgcgacgagaagctcctcgtctacgagttcctccccaacggcagcctcgacgccttcctcttcaacgaggggaagagcgcgcagctggggtgggcgacgaggcacaacatcatcgtggggatcgcgaggggattgttgtacctgcacgaggactcgttgctgaaggtggtgcaccgagacctcaaggccagcaatgtcctcctcgacgacaagatgagccccaagatctccgacttcggcatggccaagatcttcgaggacgagtgtaacgaggtcaacaccggccgcgtggtcggcacctatgggtacatggcgccggagttcgcgctggagggcgtctactcggtgaagtctgacgtgttcagcttcggcgtgctgctgctagagatcctcagcggccagcgcaacggcgcgctctacctcgaggagcaccagcaatccctcatccaagacgcgtggaagctgtggacggaggggttggcggcggagttcatggacccggcgctggggcgggggtacgcggcggaggaggcgtggcggtgctaccacgtggggctcctgtgcgtgcaggaggacgcggacgcgcggcccaccatgtccaacgtcctcctcgccctcatcagcgaccacatgaacctccccgagccctccaggccgcccatgttcaccaggctccggagggcgctcctcctcgccccgccgctcatgaccaccaagaccgactccaccgcctcgccggtgtccgtcaacgacgtctccatcaccgtcatcgagccacgatgaggtcgtcgtcctcctcgtcgccgccgccgattaattgtctggggctagcttctttttttgtacatatagtggtagtagctaagtgtttagcagttaggtaagtcttttccttttactcctctgaatgttgtcgatggcttttctgaagctctcaagtctcaaccatcactgcaggcacttatctggtagtaggaggagagttagtgaagagatccacgaggaaaatgtaattaagtattatccttccacaagagggttaattaattaataaatcaaaagggtttgggtt

SEQ ID NO: 8261 - DNA, 3169 bp, Oryza sativa
  ref <308>: DATABASE ACCESSION NUMBER: AK105609
  ref <309>: DATABASE ENTRY DATE: 2002-08-28
acacccagcggcggcggcggcgcccgcggatttctcgctcgcgcctccgaaaccctagctctcgcccgtagtagccatggcgccgcccgagaaccccaacggcgcgggccccgcggcgccgtccgaccccgcgcagccgcagccgcagccgccggccaagtccaagtggaagaagaaggacgagaagaaggatgacgatctgtcggaggaggatttggcgctcaaggagcagctcgagctctacgtggttcgggcgcaggacgcggatcccggcgtgcagaagctcgcgcttgagagtatgaggcaggagattcgttccgccacaagctcaatgacatctgtaccaaagccactgaaattcctccggccacactatggaacactcaagtcttactttgaaaccatgccagaatcttctgatttgaagaggtacatggccgacattttatcagtgttagctttgacaatgtccgctgaaggagaaagagaaagccttaagtaccgtttgttgggctctgaaggtgatatcggttcatggggtcatgaatacgtaagaaatttggcaggcgaaattgcacaagaattccaaaagcgtcaggatgatgacatgccgattgacgctcttatggaactagtgcagcaaattgtttcattccatatgaagcataatgctgaacctgaagcagttgatcttctgatggaggtggaagatcttgatttgctagttgagcatgttgactctacgaactacaaaagaacttgcttgtaccttacaagttcatcgaaatacctccctgctcctgatgacatgttggcgcttgacattgcttataccatttacatgaagtttgaagaccttacaagtgctttgcggattgctctgctccttgacaacaagtcaatgcagtatgtgaagcaggtctacaccgcaactgaggatcttcagctcaaaaagcagttctcattcatcattgcacgccatggtttggccatggagattgacgacgagatagctgccgatggcaatgataaggagggtttgcaagaaatcgttaataatagtaagctgagtgaggggtacctcacccttgctcgagatatcgaagtgatggaagcaaaatctccagaggatatatataaggtccatttaattgatgggcgtggtgccagctccagtcttgattctgcaagacaaaatttagctgcaacatttgtaaatgcattcgtaaatgctggatttggtcaggataagttgatgactgctccatctgattcttccagtagcggagcttctggaaactggttattcaagaacaaggaacatgggaaagccagcgcagcagctagcctgggaatgattctcttgtgggatactgattctggacttgctcagcttgacaagtacttacatagtaatgatgctcatgttgttgctggagctttgctaggtattggtattgtcacatgtggtgtgaagaatgattgtgatccagcacttgctattctcatggagtacattaacaaggatgacacaaacattcggattggggcaatcttgggtcttggtattgcatatgcgggttctcagaaagaggagcttaaatcttatctatcaactgtgttgggggactctgagaaatcaactcttgaggtcctgatattctccgccatcgctctgggattggtgtttgttggttcttgcaatgaagagattgctcaatctatcatatttgccttgatggagcgcagtgaggctgagctggcagaacccattatacgcctgcttcctgttgcgcttggtcttctgtatcttggaaagcaggagagtgtagaggctacggcagaagtttctaaaacatttgatgagaagataagaaagtactgtgatgtaacacttatgtcactagcatatgctggaacaggaaatgtgctcaaggttcaaaagctccttgggatttgctcacagcatcttgagaaaggtgaaacccaccaggggccagctgtcctaggaattgcgcttattgcaatggctgaagaattaggagctgagatggctgtacggtcacttgagcgtcttttacagtatggcgagcagaatattagacgggcagttcctcttgctcttggcatactctgcatatctaatccgaaggtaaatgttatggacacgcttagcagactgagtcatgatgcggatgctgatgtgtcaatggctgcaatcatttcattgggtttcattggtgctggtacaaacaatgctagaatagctggtatgcttcgcaatctttcaagttactattacaaagaagctgcgcatctgttttgtgtaagaattgctcaaggacttgttcaccttgggaagggtttgttgactctctctccataccattctgaccggtttctactttccccaatggcccttggaggccttgttactgtattgcatgcttgcctcgatatgaaatccaccattctagggaaataccactacattctttacattatcgtcttggcgatgcagcctagaatgcttttaacggtggatgaggatctaaagcccctatctgttccagtacgggttgggcaagctgttgatgtggttggtcaggctggaaggcccaagacaattactggtttccaaacacattcgacacccgtattgcttgcagcaggggaacgggctgaattagcaaccgaaaaatacattccgctgacttcggtattggagggctttgtaattctgaagaagaacccggaatataacgaggagtgagggacatttccaggcttgatacaatgctgatttctggggctcacaggcgtggcatactagggaaccatgctgcaacatgggacaggatctttgcctattgggttccctcctcggcgcctcctggtgctaatcggataggtcttttatctcttctaccggagtctcgagtgttggagcagagctctttgaattctgaaatcctttttggttgtgcaatgactgacgtgacgtatcacttgtacccaaacatgggcatctaggagttgaactgtttccttttacctccagtttatttatctgtatgtagcaaagtatgtactggaaatttgaggtcgaagtattattcttgatttccacaagatctcatcaaggaagctgacatattggtttcatgct

SEQ ID NO: 8262 - DNA, 1309 bp, Oryza sativa
  ref <308>: DATABASE ACCESSION NUMBER: AK105610
  ref <309>: DATABASE ENTRY DATE: 2002-08-28
aatgagtacaatctaaatcccttaacgaggatccattggagggcaagtctggtgccagcagccgcggtaattccagctccaatagcgtatatttcacaagtagatggaaagatctcaatcccaagttcgtgctacaggtttacagagatttcgcggcaacaggtgacatgtcatttggcaaggatgtctggcctgcggtttgtactgctatggagtacatggaacagtttgaccatgacgatgatggtatgattgagaatgatggctttcctgatcaaacatatgatgcttggacagttcgtggagtaagtgcctactgtggtcgcctttggcttgctgcccttcaaactgcagcagcgctggcccgcacccttggacaccatgattatgctgagaggtgcatgttgaagtttgcaaaagctaagcccgtatttgaagcaaagttatggaatggttcatattttaattatgacagcggaacaagttacaacagtcgctccatccatgcggatcaactggctggacaatggtatactgcatcgtcaggtttgccgcctctgtttgatgagggtaggataaaatgcacccttcagaaaatatttgactataatgtgatgagggtaaaaggagggcgtatgggagctgtgaacggtatgcatccaaatggtaaggtagacgagacttgtatgcagtcaagagaaatctggacaggagtaacgtacagtttagctgctactatgctgctccatggaatggacgatcaggctttcactactgcagaaggcattttcaccgcaggatggtccgaagaaggctatgggtactggttccaaacccctgaagcatggacgatcgacggccactacaggtcgctgatatacatgcggccccttgcaatctgggcaatgcagtatgcattgtctcctccaagaaccatactcgaggcgccgaaggtgaacaccatggacaggacctcctacatctcgcccagcacgctccagttcctgcaggacagcgtcaggaagatgacgcccaagaacagctgcttcgggagcagctcgtctaactgcgaatgctgatgtgatgattattagaggaatggtgttttaactgtgatcactgatgttcctagtgaatttcctgtacatgttcgaagaagaaaggcactgctccgtcttctcttatttgtggtgccccctgcatgcagttgtgagtgatcataatcttgtattataatactgtacagatttatatatgtatatagttactacatatgttgggcaatgtcaaatatcagaatttttactat

SEQ ID NO: 8263 - DNA, 1800 bp, Oryza sativa
  ref <308>: DATABASE ACCESSION NUMBER: AK105611
  ref <309>: DATABASE ENTRY DATE: 2002-08-28
accatcactcccaccaaccgccacccatggccgccgccgcctccgactccgactcccccgccgccgccgccgctcgccaccacgacgaccccaccctccccgcattcgcctccttctcgctctccctctccctccgcacccccgcctccccctccccggcggcgctcgcctccgtcccttccaccatccacctccccacccaaatctccacgctcgccgtctgcctccacccctccgcctccgcctccgcgtcaccctcctcccgccgccgcctcaacgccgccgccgccgcgtcgtcgctcctcgccccgctcccggcctccacgccgggcctctcccgctccttcccttcgggcgcgcccgcggcggccgggcggcgccgcacgctcgtgtggttccgcgccgacctccgcctccacgaccacgagcccctccacgccgccgtcggggcgtcgtcgtcgctgcccccggtcttcgtcttcgacccgcgcgacttcggcaagtccccctcgggcttcgaccgcacggggccctaccgcgcaggcttcctgctggactccgtcgccgacctgcgccggggcctccgcgcgcgcggcggcgacctggtggtgcgcgtggggaggcccgaggtggtgatccccgagctcgcgcgcgccgccggtgcggaggccgtgttcgcgcacggcgaggtgtcgcgcgacgagtgccgcgccgaggagaaggtgagcaaggccgttgagaaggagggaatcgaggtcaagtacttctggggcagcacgctgtaccacctggatgacctgcccttccgcctcgaggacatgccgtccaactacggtggattcagggaggctgtgaaggggttggatgtcaggaaggttctcgacgcgccggaggaggtcaagtgtgttcccatgaagaatgtgcttgagcccggtgagatccccacgcttgccgagctcggcctcaccgcgccaccggccatggcacatggctcaaaagctgctgttggttctactctcattggtggtgaagctgaagctctggagaggttgaagaagtttgcttcagaatgttgtatgcagccaaacaaaggggacaaggacagcactcgagatagcatatatggtgctaatttctcctgcaaaatttcaccatggcttgctacaggttgcctctcaccgcgcttcatgtatgaggagttgaagaagcatgcttcaagagcaattccatcgggatcaacacccaagaatggtgatggcacatctgatgctggtacaaattggttaatgttcgaattgctatggagagatttcttcaggttcatcacaaagaagtacagttctgcacagaagacctctgaagttgctcctgccactggttgcacccctaccccagcgcttgcataaactagatagtcaatctgagaggcgtctgccattttccccccaccttctgttttggccaaattatgcagatatctgatggtgtgttttttccgcaataaatgtaactagtgaagatgtcctgagtaagctgttcctgcattttggactaatttgatctcagaagagatccttttgtatctgtcgacattcctgcaaagacaattcaagggcactgtgacccaatcaagtgcttggttcagttttgttcatgagtgtcgatattctctgccatcattttagttgtaacattgcattgaggagacgaggcactgatgttaccacaattcaatcagctttctgttgagctgagtaactgtcacgtctagcttcattgatgaacggctgtcgtgcgttc

SEQ ID NO: 8264 - DNA, 1351 bp, Oryza sativa
  ref <308>: DATABASE ACCESSION NUMBER: AK105612
  ref <309>: DATABASE ENTRY DATE: 2002-08-28
agtagtggtcgtcgtggcggcggcggcggtagccgtggccgtcgtcgtgctgctgggcgcggcggcgccggcggcgagcgcgatggagttcggcgacaaggacgtggcgtcggaggaggcgctgtgggagctgtacgagcggtggcgcgggcagcaccgggtggcgcgggacctcggcgagaaggcgcggcggttcaacgtgttcaaggacaacgtccgcctcatccacgagttcaaccgccgcgacgagccctacaagctccgcctcaaccgcttcggcgacatgaccgccgacgagttccgccgcgcctacgcctcctcccgcgtctcccaccaccgcatgttccgcggccgcggcgagaggcgcagcggcttcatgtacgccggcgcccgcgacctgccggcggcggtggactggcgcgagaagggcgccgtcggggcggtcaaggaccagggccagtgcggcagctgctgggcgttctcgaccatcgccgccgtggaagggatcaacgccatccgcaccagcaacctcaccgcgctgtcggagcagcagctcgtcgactgcgacaccaagaccggcaacgccggctgcgacggcggcctcatggacaacgcgttccagtacatcgccaagcacggcggcgtcgccgcctcctccgcctacccgtaccgcgcccgccagagctcctgcaagagctccgcggcgtcgtcccccgccgtcaccatcgacggctacgaggacgtgccggcgaactcggagtcggcgctgaagaaggcggtggcgaaccagccggtgtcggtggcgatcgaggcggggggctcgcacttccagttctactcggagggggtgttcgccgggaaatgcgggacggagctcgaccatggcgtggcggcggtgggctacggcacgacggtggacggcaccaagtactggatcgtcaggaactcgtggggcgcagactggggtgagaagggctacatccggatgaagcgcgacgtgtccgccaaggagggactctgcggcatcgccatggaagcatcctaccccatcaagacctcgccgaacccggcgcccaagaagatcaagaaggtcaccgacgacgacgaagatgatgatgacgaggagcaccgccaccacgacgaactctaagctcatttaattgtgtgttttacaacagtaactggctaccgtttggaggcgattgatcgacgtcgtaacaaaataagcagttcgttaatttaatcacctgtagttgatttgattgcatgctcgtattttttgcaatctagctcgattatgtttacgctgtgtaatgattattgattattaatttgaaaaagattgttaagt

SEQ ID NO: 8265 - DNA, 2614 bp, Oryza sativa
  ref <308>: DATABASE ACCESSION NUMBER: AK105613
  ref <309>: DATABASE ENTRY DATE: 2002-08-28
tcaaatttccctgagcagatggcgccaaaagaggccagatctacagcactgaatcgagatcctcccagcagccctgctttgctagtcctctcgagtaaagattgtcctctttactctgccgtactgaagaacgacgcacaaccacccgcggctcaactcgtccagttgcatccgccatctccgaggactaaagttaagtctctggatccaaacaccaccttaatccgccgctccttggccaagttccaagacagcagaggcagatccgggggaaagggagcaatcaagctttgcagcatcgcctacacttcccagatcatacagagcagctagaagttaaggcatggcaggttgtcaaaccaaagtactagtagaggaaatgtgatgtaacaaatcctaccgtcttcaagcccgccaacaacttgcaggaatagcattcaaggaagttgcgttaccttaatcacataagaggtaaatgcttccgttgtctgagttcaaagcacaaggtgcaggattgcagagagcctctccgttgctggttttgttttggttttggccaccaatccacaacctgcaagtcgaggctctataaatcccagaaacagcaagctgatgcacccaactcgcttgacttcccacccctcccagccagcagaaataaaccccctgaagctcccttggttcccaacatctctaccccgcccgacatggctggcgtccctagtgacctggtctcaaggccagaattgagctactgcatggtggctggtactgtcgaagtcgagaggctccatgtgctttacacggtgcgctcggtggtggcctggacaggtgaagggcaacatgttgatctcaacaccattgcagatgatgtccactcggcttaccgcattcatcgcaacgacatccaagtcaccaagtaccatctggaaaatttcttcctcacgttcaccatccatggtgatagggaggcagtcctgcaggagccaaggttggtgaccagaagtggacgggagtacttcttccggccatgggatgagaagaagaatgcagaagcagcggatatcattgaaggtgtcccaatgcacgcacgaacagaggattcagtggccaagctcattggtccttggtgctcggtgcactacattgaagaagacacgcgtcgccgcaactacaatcgcacctttgatgtctgggtgtggacgtcggacccaagctccatcccgaaggttttgcgtctcactgtcactagaccagatgaagaaggtcacccgatgaacactccttttcctgatcttgaaccagagcagccagcaccaagggagccgaagaagggtcttacttatccggtcatcatccacgtcgactaggtccaagaccaggctgcgcggcattacaggggctaccaatggcgatacggggaggtcgacaatgcagcaagggcacggatggtctccaggccgcttgagccctgcagggctcttacagcgcctgagagacgttcggatgatgaagatgaccacggcgatgtctgctcaagaaggaggcatagaagcagatctctctgggaccagcttggtggtcgctcctccagtaggagcagggagccggagtgccaagggagcagaaggtacaatgaggaaaacagaggaagacagaggatgcgtgaagaggatatcaacataagtcacagccggaacctctctcgttcagtggagcctggagagacgaggattagaagacaatctgcgtgacagctgatcagcgaggctctccctcagcgcctgctattcaagctccaacaaaggtcacctctccttgcaagccacatagatgcaatagaagcgagagtcctgacgcaggctacacgcctgacctctccatcactccagttgttccttcctcacctgattgggttccattcatgcatgtctcgggtgctgttctcgatctgctggagaaacacctggacccaatggttcatgaagctgagatggctcactccatgtactcccctgacactactatcccacgccctgtttcccctgtctttatcctttcagctgcagggcaaggctctcaggcgacaactagaggaaaaggggagcagactgctgatgttttctttgctgaactctcgacgccggtgctgcagcctctgttgccggtgcctggacacaaacagcaccgcccttgtcgcaacaagtagaagaagcctctttctcctgcagctgtgaagaccatcgcagccctggtcgagaaaggtggctgcaaatcagtccgcctgcgtggaggaaggaagctggcggctgtctcgccggcgtgaagaacctcccacagtgaaacagttgtgcttcgctgaccatgcagtggagaagatattccatcccaatggaagctctcagcacgctgtctctttgtgtttctaccaaatgtttttggctatgtttcggagacagtcgtctatgccttcctccaccaatttttctcctaaaaactgcatgtatctccagtagatgtgtcttttgcttatgtctcaacaatcatgtttcatcctgtattggaacataagagggctcaacaatccagcaaagaaagacagtgttaagttgct

SEQ ID NO: 8266 - DNA, 2305 bp, Oryza sativa
  ref <308>: DATABASE ACCESSION NUMBER: AK105614
  ref <309>: DATABASE ENTRY DATE: 2002-08-28
ctcccttctcttctgcttccgatctgcagcgccttccgcctcgccggcgaaggtcgcagaggaggagagagagagaaggagatcaagaagcacggcaatggcgaggaggctcgccgccgcgctgtgtctcgcggtggccgcggtgagcgtggccgtggcgacggcgaggttcgtggtggagaagaacagcgtgaaggtgctgtcgccgcggtcgctgcgggggcggcacgaggcggcgatcgccaactacggcgtgccggactacggcggcacgctcaccggcgtggtggtgtacccggcggacgcgaggctggccgacgggtgcaggccgttcggcgaggcggcggcgaaggcgctcagttcgcggtcgcgccgccccgtcgtgctcctcgtcgaccgcggcggctgctacttcgcgctcaagacgtggcacgcgcagctcgccggcgcggcggccgtgctggtggcggacggcgtcgacgagccgctgctcacgatggacagccccgaggaggagacccccgacatggcgttcctcgccaacatcaccgtcccgtcggcgctcgtcaccaagcagttcggcgacgccctccgcgccgccgcctccgccgccgacgacgaggtggtggtgcggctggactggcgcgagtcgatgccgcaccccgacgagcgcgtcgagtacgagctctggacgaacagcaacgacgagtgcgggccgcggtgcgacgagcaggcggcgttcgtcggcgcgttccgcggccacgcgcagctgctggagaagcgcggctacgcgctgttcacgccgcactacatcacctggttctgccccgacgcgttcctggagacgacgcagtgcaaggcgcagtgcgtcaaccgcggccgctactgcgcccccgaccccgacggcgacctcgccgccggctactccggccgcgacgtcgtgcttgagaacctcaggcagctctgcgtccaccgcgtcgccaacgcgcgcaacgcctcctggctctggtgggactacgtcgccgactaccacctccgctgctccatgaagggcgaccactacacccgccgctgcgccgacgacgtcgccaagtcgctcggtttgccgatggatttgatcgacgagtgcatgggggatcccgacgccgacgtcgagaacgacgtgctcaagacggagcagattgttcagattggacatggcaccagaggggatgtgacgatcttgccgacgctggtgatcaacaatgtgcagtaccggggcaaattggagagcacttcggttctcaaggcgatttgtgctggattcaaggagtccactgagcctgatgtctgcctgacaccagaaatggagactgacgagtgcctgaacaacaatggcggctgctggcgagacgagaagaccaacatcactgcctgcaaggacactttcaggggaagaatttgccagtgccctgtagttgatggtgttcagtaccaaggagacggctacacccactgcaaagcggtcggaccagggcggtgcgcgatgaacaacggtggctgctggaaggggacgagagacggcaagacgttctctgcttgctcggattcagacttgagtgggtgcaagtgcccacctgggttcaagggcgacgggctccattgcgaagacgtcgacgagtgcagcgagaagctggcgtgctcctgccctcactgctcctgcaagaacacatggggttcgttcgactgcagctgccatggcaacaacctgatgtacatcaaagctgaagatacctgcattgcgaagaacatgtcggcgtttgggtggctggtgacgacgctggtgctgtcctgcctcgccggcgccggcgtcgccggatacgtgttctacaagtacaggctcaggaggtacatggattcagaggtgatggcgatcatgtcgcagtacatgcctctcgagggccagaacggcgagaggctgccgctgagagaggaggcccaggttgagcatgcttagctaggcagttgcagaggttgaacattttggcaatgtccattcgttttgagacgccaagacacatgacagcgacgaatgccgcgatgtacatggcgaagttcagacatcatacttgatgacaggggttcttgcagtttctgcttggtgcttttgtagagaactgaaccagataggttcagagtttctggtagaagaacgggataagtctatgtcaagccggtgcaccgcaaagtgcagactagacaagtatagctgctgtaatgcagatttgttagaatatattgtgaataatagatcaacaatcttcct

SEQ ID NO: 8267 - DNA, 2184 bp, Oryza sativa
  ref <308>: DATABASE ACCESSION NUMBER: AK105615
  ref <309>: DATABASE ENTRY DATE: 2002-08-28
taatttcgtcgccgccgtctcgcgcagctgccaggccaccactgtgcgcgcgatgctctttgccccccgcgaagacgagcagcggcagcagcttccatgcttggcgattcgatgccatgtaggaagacgaagatgatgaagctagcgtagcctagtgatggctcaacccgccatggaagggacggtgcagggtggaggaggaggaggaggaggagcacaagaacctcgcggacagtacggcggaggcggcaagaacggcggcgacgcctccccgcgcaagcatgccgctgccgctgccgctgccgccttgccgcgacaccggcgatccaagagtgcttcttccgatcggagcctggagccatgcaagcacgcggcgttgcacgatcagcgctgcacccaagcagcacaggcgacgccgagctctcatcaccaaccggacgcgacgacgaggaaatcccacgccgccgccgccgccgccgccgagggctcctccatccaccatgtactgacgagagatcgcagcagggcgagcgcgtcgccgagccatcgcgtctcgctggagaatgatatcaggcagctgcagcttaacctgcatcaggagaggtcgatccggatcatgcttgaccgggcgattggccgcgcatccagcactctgtctcctggccacatgcatttcccagctcagacaaaggaactgattgcagagattgaattgcttgaagaggaaatcgcaaaccgtgagcagcatgttcttaccctctacagaagcatcttcgatcaatctgcgtctggagcatcctcagggcagagttctggtctttcttccccagcgcataccaagagtatcagctctagaacaagacggcatccgagcataatatcgagtgcattttgctcatctaagaagctcccgctccaacctttccaaatcatgacatcggtatcggagtcggggagatcgaagagtatgctgaaaaccaagattaagcatgaatctttctcaagtgaaacattggatattcaccctgcaaccttcccaccagatccaaggaagcttccttattcaggaagtagttctttgactcggaccctgaaagatcacctctaccaatgtccaagcaaaatatccgaagaaatggttagatgcatggcctccatatactgtcttcttcgcaccgagtgtcccgaaaaccctgaaaaggtccgttcaccattcttgtcgaggtcatcaacaaatgtcattattcctcggagaggaaacggagaggacactaatttgtcaaacaccaaatgtacggtggaagtatcttcaatatcagctgataagaatcacatgccagatgtctcttatgcaattacgcactacaggttgcttgtggagcagcttgaaagggttgatctgagtatgtcagaaaccaatattaaattggccttctggatcaatgtgtataattctcttgtcatgcatgcatatctagcatatggcattccaaacagttctctgagaagaatggctctatttcacaaggctgcctacaatattggaggccatgcagtcacggccaattccatcgaacacgctctactatgctgcagatctccacggattggtcgttggtttgaatccatactgtcgacggcgatgcggaagaaatgcgcagatgagaagcaactcgtccagctcaaattcggcctgccggactgccagcctctcgccctgttcgctctgtgcacaggagcttcatctgatcccatgctgaaggtgtacacggcgaagaacatcagtgaggagctggagcgtgcgaagcgggagttcctgcaggcgagcgtggtggtgaggaagtccaagaaggtgttcctgccgcgcctcgtcgagcggtacgcccgggaggccggcctcgccggcgccgacgagctcctcgcgtgggcgcgcgacaacgccgacgcccgcgccacccaggacgccatccagcggctgtgcgtcgacgccggcggcggccggaggaaggcagcgcaggccgtcgagtggctcccctacaacgccaggttccgctacgccttcccccggaccatggtcgacaagccactcttctgagcaagaaacaagcgtacattctgatgctccaatgtttcgcgctgcattgttgttttgtgatcttgagatgaagaattgaagatgagatg

SEQ ID NO: 8268 - DNA, 1780 bp, Oryza sativa
  ref <308>: DATABASE ACCESSION NUMBER: AK105616
  ref <309>: DATABASE ENTRY DATE: 2002-08-28
aagcaaatcgcgagccaaaccaagaagacatccacatgacgacgcctcgcgccaccaccaccacgtcgcccttctcctctctcctcctcctcccgatctccccctccgccgcgactcctccgcgccgcgccaggacgccgccgccggcggtggcacatggcggcgtgcggtggacggctggcgggaggcggcgacggcgagggtgccgggcggcggcggcggtggtcgaggacggcgtgcttctccccaaagaacaggaggacgacgcgtcggcggcgagatacgactggagggaggagtggtacccgctgtacctcgccaaggaggtgcccgacgacgccgcgctgccgctcacggtgttcgaccggcagctggtgctgtaccgcgacgccgccggcgtgctccgctgccacgaggatcggtgcccgcacaggctagccaagctatccgagggccagctcgtggatggcaagctggagtgcctgtaccacgggtggcagttcgacggcgagggcaagtgcgtcaagatcccgcagctccccgacggcgccaagatcccgcgcaacgcgtgcgcgcgcagctacgaggtgcgggactcgcagggcgtggtgtgggcgtggatgtcggggaccaacccgccggacgagcggaagctgccgtggttcgagccgtacgcgcggccggggttcaccgacctgtccacggtgcacgagctcccctacgaccactccatcctcctcgagaacctcatggatcccgcgcacgtccccatctcccacgaccgcaccgactggacggcgaagcgggaggacgcgcagccgctcttcttcgaggtcaccgagcggacgccgcgcgggttcgccggatactgggggaagcaaaggacgccacaccttcgcaacctgctccggttcgaggcgccgtgcgtgcttaccaacacgctggagttcgtcgacaaggacggcaaggagcagtgcttctcggcgcacttcctctgccgccccgcggggcaggggaagtcgatgctgctcgttcggttcggatccacccagacgtcgccgctggtgaaggtgctcccgaggtggtacttccaccagaacgcgtgcaaggtgttcgagcaggacatggggttcctgtcgtcgcagaacgaggtgctgctccgggagaaggtgccgaccaaggagctctacctcaacctccggtcgtcggacacgtgggtggcggagtaccggaggtggatggacagggcggggcacggcatgccgtactacttcgggcacagcacgctgtcgccgccgccggtgccggccgttgtcgagcaggcgccggcgggggcggtcgccgggatgtccgcgtcgttcccggccaagggcggcgtcggcgccacgcacgcgcccaacccgaccaacaggtacttccgccatgtcgtgcactgcaaggggtgcagggacagcgtcaagaggtacgcctcgctcaagaacgccttcgccgcgctcgccgcggcggcggtggcggcggccatcctggcggcgaccaggcaattgaaggccgtcctgctggcgtccgcggccgcgctcgccgcggcgtcgtacgcgtgtaactgggtgctgtctctcatcacgaccaattttattaggacacacaggagactgtaaccgtggcaatggctgtcatgctttggcacatactaatagcaaggtagaatggtacagctatttcattatttttgcccttgtatatttgtatcactacatgagtaaacgacgtttagttaaaaaag

SEQ ID NO: 8269 - DNA, 2221 bp, Oryza sativa
  ref <308>: DATABASE ACCESSION NUMBER: AK105617
  ref <309>: DATABASE ENTRY DATE: 2002-08-28
agtaaaattgcatgcttcatttttcagagagaaagtactgaagaagtcaaattcaagtgtgcttttctggttatctcagccaaggtccaacaacaatagccatgagcagttctcaagtatttttcagcttgctaacagtgagaacatcgaagtcttttttgatactttgtgggaaatatctgctcatcctgtggatatctgcactgcttttgtggatgaaggaatgaattgctttcctttaaacagcattagtttaacacgatcctggaaggctatgacagaagctacattagttgagtctgaaaataattttgctcaaagaagtgaagaaaatcgtgacaatttaagttccaagaacaacgagaaaatacagagatcaattgacaataccccttatggtgtggaagtcactcttgaacctaaaaggaaaggtttaattgcagattttgaaagacccagagtacttgtaaggagaaatggtgaacttcttgaggcaatatgtctcaactctatcaatgagcaacaaggtgctatcgccaccaatcggaagggccttgttttcttcaactggaatgacaagcaagataacaaaaatttagcagagtatatatgggcaggatctgattggcccttggatgggtgggctggttgcgaatctacacctacttcaacttctttttctcctagtgttggtcttggcagaagaaaaggatcccatcttagttcaggtggaccagctattagtttaggttcattggcaaaacctggaagggacttaactggtggtggagcatttggaattccaggttatgctggtatcggcgcatctggatttgggtggggggaacctgacgaattcgaagatttcgttgatcttccagcaacactcgagaacatccattcaagagcattgtctcgccacccatctttgccattgttgctagttgggtcaagcaatactcatgtttatttatgggagtttggcaaagacagtgccatggctacctatggtgttctccctgctgctaatatcccaccaccttatgcccttgcttccatatcagctgttcaatttgattattatgggcagcagtttgctactgctgcattagatggtacagtttgtacatggcaagttgaggtgggtggaagaagcaatgtgcatcctaccgagtcatccctgtgctttaacacccacgcatcggatgtcgcatttctaactgcaagtggatcagttcttgctgcagctggatgcagttcaaatggtgcaaatgttgttatttgggatacattggcgccaccatccacttgtcaaacttctattatgtgtcatgaaggaggagttcgttctctttctgtgttcgatagaaatataggctgtggatctatctcaccgctgattgtaactggtgggaaaagtggagatgtaactttgcatgattttcggttcatctctactggaaagactaagcatcacagaagttccaacgagcatgatgttaaggcatcttcaacttcaatgcatgacactaagtctggaacttccaacggtgttagcaacagtgggatgatctggcatataccaaaggcgcatacaggtagtgtcagcagtgtatcaaccatcccaaataccagtttgttcttaactggaagcaaagatggagatgtgaagctttgggatgccaaaagttctcagctagtcttccattggcaaaagttgcacgagcggcacaccttttttcaaccaacttctaggggctttggtggtgttgttagggctgctgtaacagacatccaagtcttacctaatggttttgtctcgtgcggtggggatggttctgtgaaacttgtgcaggtaaaaaatgattttgcagatgtacgcccacattagaacaaacagaagggaggagatatgctagcgatggttttgttgtggtgggttcagattgttcctttgatcaattgatcttattctgcaattttgttttcccatgagatgttttgctgttgcaagggatggcatagcaagaatgtagccataaagtaagagctgggcagaatctgaacagtttaatgggatttgtatacaaaggtactcctgttagctgtctggatgtggggcatggaactcgcgtcttgtatgcggtaggtcatgtaggtgtcgatttttgtttgtccatgcatgtccattatatatacaaggaattgcaaaattttccat

SEQ ID NO: 8270 - DNA, 2251 bp, Oryza sativa
  ref <308>: DATABASE ACCESSION NUMBER: AK105618
  ref <309>: DATABASE ENTRY DATE: 2002-08-28
atcaacagggtgatactgccagcttcttctcaactcgacataagagctccctggcttctctgtaggggggtcactttggtcgatggggggggggacgaagaaagttttcacagttcaggtggaggatggaaagcccaggaaggacggccggccggcggtagggccagtgttcaggagtgcactgtcaaaggatggattcccgccacttgagcctgacatgaaaacatcatgggacgtgttcagggtcgcagcaggcaagtacccagataatcggatgctcggatggcgtcctgtaaaagatggagtgatagggccatacatatggaaatcatacagggaagtgtatgaagaagtcctgcaagttggatctgctttgcagcagctgggggtgaagccaggttcccggattggaatatatggatcaaactgccctcagtggatagtagcaatgcaggcttgcaatggttacagcttaatctgtgtcccactctacgatacgttaggtgcaggagctgttgacttcattattgaccatgctgaaatcgatgttatctttgttcaggacaagaaaataaaagaaatactgtccgcaaattgcaagtctgctaagagagtgaaaggactggtggcatttacttcgggaacaagcgaagaaatcacaagtgctgatcagattgggatgaagttgtactcgtggaaagatttcttaaaaatgggaaaggaaaatccagcccaaccttgtgctccaaaaccaaatgatacatgcaccatcatgtacacaagtgggacaagtggagagcccaaaggtgtcatgcttagccatgagagtcatgccatatatgtgaaaggtgtggacctcttcatggagcagtttgacgataagatgacaacagatgatgtgtttctttcctttctaccgcttgctcacatccttgaccgcatgatcgaggagtttttctttcacaaaggagcctcagttggctattatcatggggatttgaatgccttgagagatgatctcatggagctaaagccaactctactagttggggtgcctcgagtgtatgaaaaaatttatgaaggtatcttgaaggccttatcagaactcagaccactcagaagattaattttcaatgctctgtataaccgcaaactggcaaacatgaaagcaggctgcacgcacaaaactgcttcaccttttgcagatatgttggctttccgcaaggtcaaagcaaggcttggtggtcgtcttcgcctattaatctcgggtggggctccattaagtaatgagatcgaagagttcttgagagtaaccagctgcgcatactttatccaaggctatggtttaacagaaacactgggacctagcacggtctgttaccctgatgacatgtccctggttggaactgttggcgtggctgctacctatacggaattgcgattggaagaagtgcctgagatgggttacaatccacttggtactccttcccgtggtgaaatatgcgtccgaggaaacttcttcaccggatactataaaaatcctgagctcacgaatgaggtcatggctgatggatggtttcacacaggtgacattggagagatgaactcagatggaatcctgaaggtaattgaccgaaagaaaaatatattcaagttgtcacaaggggagtatgttgcagttgaatacctggagaaagtatatgttttccctccaaccgttgaagatgtctgggtatatggggacagcttcagatcaatgttagtggcagtagttaatccacatgaagagaacaccatgaagtgggcagaatcaaatggctgcaagggttcttttgctgaaatatgcaagtctgaaggccttaaagagcatatcctgaaagagctgcaatctgttgcagcaaagaacaagctacggggatttgagtatgtcaaaggtgtaatattggaccctattccttttgaccttgaaagggatttggtgactgcaacaatgaaaaagaaaagaaacaacatgctaaaatattacaagcctgagattgagaaagtataccaaaaactggaggaacagagggttgccgccaaatcaaagtaaagaaatatgttccctttgaacactaaatgaaaagctagaatgccattgtaaatttttcaatttttagataatggatatcgttccggcctctacatgtaaattttcagttgaactttggtactcaagattacatgaatgcaataaaatgtatatcgtgtg

SEQ ID NO: 8271 - DNA, 1695 bp, Oryza sativa
  ref <308>: DATABASE ACCESSION NUMBER: AK105619
  ref <309>: DATABASE ENTRY DATE: 2002-08-28
cctgacgaaccttcacaaggccatcaagcaggccgagacggcgctcgttgccggcgacccgaccgtccagaacatcggcaactacgagaaggcatacgtgttcaggtcgagcagcggcgactgcgcggcgttcctgtccaacttccacacgagcgcggcggcgagggtggcgttcaacgggcggcggtacgacctcccggcgtggtccatcagcgtgctgccggactgcaggaccgccgtgtacaacaccgcgacggtgacggcggcgtcgtcgccggcgaagatgaacccggcgggcgggttcacctggcagtcgtacggcgaggccaccaactcgctggacgagacggccttcaccaaggacggcctcgtcgagcagctcagcatgacgtgggacaagtccgactacctgtggtacaccacctacgtcaacatcgactccggcgagcagttcttgaagtccggccagtggccgcagctgaccgtctactccgccgggcacagcgtgcaggtgttcgtcaacgggcaatacttcggcaatgcgtatggtggctacgacgggccgaagctgacgtacagtgggtacgtcaagatgtggcagggcagtaacaagatctccatcctcagctccgccgtcggcctcccgaacgtcggcacgcattatgagacgtggaacatcggcgtgctcggcccggtgacgctgtccggcctcaacgaggggaagagagacctcagcaaacagaaatggacataccagattggcctgaagggggagaagctgggggtgcactccgtcagcgggagctcctccgtggagtggggcggcgccgccggcaagcagccggtgacgtggcacagagcctacttcaacgcgccggccggcggcgcgccggtggcgctggacctcggcagcatggggaagggccaggcgtgggtgaacggccacctcatcggccgctactggtcctacaaggcctccggcaactgcggcggctgcagctacgccggcacctactccgagaagaagtgccaggccaactgcggcgacgcctcccagagatggtaccatgtcccaagatcatggctgaatcctagcgggaacctggtggtgctgctggaagagttcggcggcgacttgtccggggtcacgttgatgacgaggacgacatgaacaggaggaagaattgaagtggagatgatttgaattgtggataatttagcagggggaattgcagaattggggatttgggagcgaaggaaagtgggggcgtatagcaattatctatacatacggcgtagatacggatacggctgggtatacgtacatacgtatacgtatatgaactggtagagtactgttatttattgatggctgccgcgctggccggccgtacgccggagcggctgcaggaactgcggctccggtcacggctgccggcggccggtgtacggtcgccgtcgattatttattattttactagttatttattctgagccgtggatgatggctttgagatcagtgcataggtgcttggagccttggatcgctttactctctctctctctccaattttcttcagttctatgagaaaatttgcaacgttgagttgtaaatgggaacagcacttagaattatgaatgataaattattgtcacctgatttataccaagagggaataattattcttttgtact

SEQ ID NO: 8272 - DNA, 2798 bp, Oryza sativa
  ref <308>: DATABASE ACCESSION NUMBER: AK105620
  ref <309>: DATABASE ENTRY DATE: 2002-08-28
ctccaccaactcgcaactccaccaagcaaaccaaaaaccccaaatccctcaccccgaattcggaattcccccccaaatccctcgccgcccgccgattcagccccgcggagacgcgattctcgaaggaattctggttcccggaggcggagcaggcggagaatcgtttggtttttcttttgggatgggggagggggtgaaggcgatgctggcgcggccgatccagctggccgacgaggtcgccaagcagtgcggcgcggcgcggtgcttccgcgcggagtgcggcgagctcaaggcgcgggcggacaagctcgcggcgttgctccgacaggcggcgcgcgccgacctgtacgaccgccccgccgtgcgcatcatggccggggcgcagcaggcgctcctcaaggcctcctccctcgccgcgcgctgcgccagcggccacccgcgcctcaggcggctcttcacgctcagccccgccgcggggttcccccgcaccgtcgccctcctcgacaccgcgctcgaggacgtcgcgtggctgctgcgcatctcctcgcctcgctccggtggtggtggtggtggtggtggtggcggcggcgacgacgacggggacggcgacgacggcgacctgagggggctccccaacatcgcgcagaacgagcccatactgttcctcatctgggaccacgtcgcgcgcctccacaccggcgggctcgccgcgcgcgccgactccgccgccaacctcgcctccctcgcccgcgacagccagcacttcgccaagctcatcatcgaggaggacggcgtgccgccgctgcttaggctgctcaaggaaggcaccgacgacggccaggaggccgccgcccgcgcgctcggcttgctcggctgcgacgacgagagcatcgataagctcgtccaggccggggtgtgctccgtcttcgccgcggcgctcaaggatccacccatgcgcgtgcaggctgccgttgccgatgccattggtactctcgctgaccggagcgctacgtgccaggagctctttgcgcagaacaacgccgtccgctatctcgtcggtcacctcgcctcagggaccatccaggagcacagcaggtactccgtcggctccagcagctccaagaacagcgctgctgcacctcagcacatgacgtcgctgcactctgtcgtgcttgccaagacgctcagcatgcgccacggtggtgaccgtggcacctcctcctccaccgatgagcccccaagggtgtccaatgagcaagacacgaaaaggaatcagatgcagtcggtcgtgcaatccgcgatggctgctaagactaagacgaatgggtcgttggttccacccttcaggccacagctgggcacgagtggttctagtggccgtggtgctgtccgggaggtggaggatccggagaccaaggcacggctaaaggccatggcagcgggagctctgtggaagcttgcccgcggtcatctaggtgtctgcaagagcattactgattcgcgtgcactgctctgcttcgcggtgcttcttgagaagggtgatggtggcatgggtactagcgtacagtacttctcagcaatggcaatcatggaaatttcccgtgtcgctgagcacagccttgccctgcgacagtcggctttcaagcctagctctccagcagccaaggctgtcgtcgaccagctgcttcacattgtcagcaagggagactacgatgatctcttgctcccttgcattactgctcttggctgccttgcacgcactttcacagcgagtgagaaccgcgtcatcgctccccttgtggagctgctcgatgagcgtgagccaccagtcattaaggaggccgtgcttgcgctcaccaagttcgcatgcaatgaaaaccacctgcatgtaaaccactgcaaggccatcgtggacagcggtggtgctcgccaccttgtccagctggtgtatctcggtgatgaggtgcagatagaggcactgatactgctctgtttcattgcattgcacgtgccagaaagtgaggagctggctcaagctggtgtgcttgctgtgcttctctgggcatcaaaacaggctcacatgatacaggacatgcgtgtcgatgcactacttccagatgccaagggaaggctggaactcttccagtccagagcctccaggtgattttggcagcaagaccagcagacatggaggagccggcgtgttattgtcagttcttacccaggtgatcagtgtggccaatcaagtgaagcctgctcacctccgcagttcccggggatggcgatgccacactgcttggtgacatagaacaccttatccatgttgatgttgtccctgacgcctgggctgcccaggtaggtgcagacgcagggcacgttgacgcccttcatggaggtgcagcagtcaggtgatggctgcagcttcggcccgtccttctcaacgaacttgtagcaggttgtcttcagcacctcgacatcgttctggcattctgtacctgccgctgctgctgcagtggtgaacactgccaggaggaagatcagcagtgcagccaggctagaagacttgagctgagacatcctggtatgtgttgttctttctgatatcttgaacttctctgattaaaacttggaaacttttgatttgtgcaatgcaaatatttatagagcttttggtgcctgaggttgtcatgctccattcttgcttgggctagttgagcatttcgtcctgcgctggtaaccatagaaatgcaatgcttgtgacttgtgaggtgaatggttcatggctacgtgtttgattt

SEQ ID NO: 8273 - DNA, 2048 bp, Oryza sativa
  ref <308>: DATABASE ACCESSION NUMBER: AK105621
  ref <309>: DATABASE ENTRY DATE: 2002-08-28
gtatttagggcacgggaacttgatactggaaagattgtcgccttgaagaaggtgcggtttgacaattttgagccagaaagtgttagattcatggcaagggagatacaaatattgagaaggctcgatcatccaaatgttatgaagctagaaggtttgattacttctcggctatcatgcagtctctatctagtatttgaatacatggagcatgatcttgctggactttcttcctcccctgacatcaagtttagtgaagcacaggtcaagtgctacatgaaccagttactgtcaggactggagcattgccattcacgtcgtattgtacatcgcgacatcaagggtgccaatctccttgtgaataatgaaggggttctaaaaatagctgattttggccttgctaattactttgaccccaacaaaaaccatccgctgaccagccgtgtcgttactctgtggtatcgaccacctgaactgctactaggttcaactcactatgatgcagctgttgatttgtggagtgctgggtgtgtatttgctgaaatgttccgtgggaaacctatcctgcagggaagaactgaggtggagcaactgcataagatttttaagctatgtggttcccctgctgatgagtactggaagaagtcaaagttgcctcatgcgacaatattcaaaccacattgtccttatcaaagtacccttcaagatgtttttaaagaaatgccagcaaatgcattgagattactagaaactcttctatcagtggagccctacaaacgtggtactgcatctgctgctcttacatctgagtttttcaagacaaagccttacgcatgtgatccctcaagcctgccgaagtatgcacccaacaaggagatggatgcaaaattacgagaagattcacacagacgaaaggctagcagaggtcatgggccagaagcatcaaggaaatcaaggctcagcagagctgcaagagaaacaactacagttaataagcaaactgatggcaaagaggagtccaaaactaaagcaaatggaaccaaggacaactcaatattggatcgtacaaaggtaaatggtgatgctaggttattttcagacatacagccagtttcagtggcccaagtcaaagaaaggtctcgccatgttaagaatgattcacgagaagagatccctttctctggaccattgattgtttcatcatctagtggctttgcttgggctaaaaaaccaccagaagatcgttcattcgctagatctcggaccaaatctagttcaaggggccaatttactgctgagttagatcaggacaataagatgccagctaaagagaaccagaacctcggcttgaaggaacaacctaacagagacatgcatatagcacgtgccaactccaaagttcgagagcctcatgatgcagcaaagcgtgccgttctgaagaaatggtcacagttaggacgtccagattcctttgattcttacgacacttaccactctcagaatttttctaatgcaatgtatcttggggataccctctcgtcaaaaaacagcatcaagggtgatcatgatcaaggagagagggttgaatattctggccctttgttatctcagtcacacaaggttgatgaactattagagaaacatgagcgccacatccggcaagtagttcggaaatcatggttcagtagaggaaaaaaataatacaagtgaggaaaagactggccatttttgcgttggagaagcggcatctaggtatatagcagtgaaggggatatgtcagtttctggtgtcttctgtcaaccggaaactcgcctttggtggtaacattgttgataagattaagacccaactgaaaacattatatgattctcatatcatagtaaaatcaaaactgtgcctcgctgcttctactagataataacttgtcgcttgttgtagattccccaaagactcctgtgtcacaccatagaatggaatggtgtttttttttttctcctctccaccttgtgcctaggaataacagctgacgagagtggttaattcgagtgatc

SEQ ID NO: 8274 - DNA, 1188 bp, Oryza sativa
  ref <308>: DATABASE ACCESSION NUMBER: AK105622
  ref <309>: DATABASE ENTRY DATE: 2002-08-28
accgctccctgcgcggcctgatccggctgcagggcgtggtccgcgggcccagcgtccgtcgccagacggcgcacgccatgcggtgcatgcagatgctcgtccgcgtccagtcccaggtccgcgccagccgcgtcgaggccatggagcgccgcaaccgccaccaccacgccgccatgctccgcgacgccgcccgctggcgcgccgcctcacaggacggcggcatctgggaggacagcttgctgagccgggacgagatggacgcgcggacgaagcggaaggtggaggcggtgatcaagcgggagcgcgcgctcgcctacgcctactcccaccagctgctgaaggcgacgccgatggcggcgcacgcgatcctggcggacctgcagtcgggccggaatccatggtggtggacgccgatcgaacgccggcacgaggcggaggcggcggcggcgctgctatcccggcaacgcgtggagcacgtcgggaacggcggcggcggcggcaggcatgtggctgtgacggcgacgccggcgcggtcggtggtgtcgtcctactcgacggcgacggcgacgacggcggcgaggccgagggcgacgcggccggcgaaggtggcgtcgagctacggcggcggcgggagcatccgggacgacgagagcctgacgagctgcccggcgttcggcggcgcactgcccaactacatgacgccgacgatgtcggcgtcggccaaggcgagggcgcgcgcgcagatgctgcggcagcagcaggagaagcaggcgcaggcggcgcaggagaagctgaggttctcgttcggcctcggccagagcatcggcagctgggccaagagccccttctggaagggcggcgccgccgccgctccgccgtcgatctcgtcgcgggttgccacgccggctgcgtccgtcgccggcaggcaccggccgacgcggtcgtcggtgagcgagctcagcgtcgactccgccgtgtccatgccggccgggatcggccggaggacgttcaagtagtacgatcaaaatcgcttgcgtcgtgtgtttgaattcgtcgtgtcgtcgtcgtcgactcctcgtcgttcgtgctttggttggtttggtgtttaagtgtaaaatggtgtgggtttctcgtcgtcgttgtcgttgcattgcatggtgcgtatgtgcgagcttgatgtgcgtgatt

SEQ ID NO: 8275 - DNA, 2187 bp, Oryza sativa
  ref <308>: DATABASE ACCESSION NUMBER: AK105623
  ref <309>: DATABASE ENTRY DATE: 2002-08-28
ctcactctcggccttccttccacggcagcgccacccactgcgccttcgccggcggcggaggaggagggaggtgcggccatgggtcacggtgtcagctgcgcccgcaccggcgacgagcacgacttcttccgggcggcgcagctcggcgacctcgacgccctggccgccctcctcgccgccgacccttccctcgctcgccgcgccaccctctacgaccgcctccccgtcctccacatcgccgccgccaatggccgcatcgaggtgctctccatgttcttggatcgcggggcgccgccggacgcggtgaatcggcacaagcagacgccgctgatgctcgcggccatgcacggcaagatcgactgcgtgctcaagctcctccaggccgacgcaaatatcttgatgttcgactcggtgcacgcgaggacctgcctccaccacgcggcgtactacggccacgtcgactgcctgcaggccatcctcgccgccgcgcagaccacgccggtggccgactcatggggtttcgcccggttcgtcaacgtcagggacgaccacggcgctactccgctgcatctcgcggccaggcaggggcggccggggtgcgtgcaggtgttgctggagaacggcgccattgtgtcggctttgacaggatcatatggcttccctggaagcacgtcgcttcatttggctgctcgtagcgggaacttggattgcatcaggaagctgcttgcctggggagctgatcggctccaaagggattcggctgggagaattccctattctgtcgcgctgaaacggaaccatggagcatgtgcagctttgctgaaccctacatcagcagagcccatggtgtggccatccccacttaagttcatcagtgagcttgaaccagcagctaaggctctcctggaagcagctctgatggaagccaacagggagagggagaagaaaatcctgaatggcacaaagtactccctgccatccccttcgcccggtgatgacagtgccgatgacgatgcatgctcagaggtgagcgacacggagctttgctgcatctgcttcgaccaggcttgcaccattgaggtgcaagactgtggacatcaaatgtgtgcaccgtgcacgctggcactgtgctgtcacaacaaacccaatccgacgaccctgacaccgccctcaccggcctgcccattctgccggggcagcatctcacggctggtggtggcccaaacaaggtctgcctgtgatcctgacaagccgtcatccctgcagctcacccggaagcggtcgcgtcgatctcacaacctcagtgagggcagcagcagcttcaaagggctaccttcggccatgggctccttctcaaagcttggccgtggctcgagccgcatggcggacagtgacagcagcaacctggacaagcctgagcacgatctatgaaagcagaacaacgcacggacaatcgccgcatcatcctcaaaacatccgttggtatcagaaacccagatgaaaatccaatggctaatttggagcaactttgatccatggaaagttaaatagatagggactaaataagtagaaccctccactccccattgtctgtgtgcccaccctatttttcggcttgccgggttaagcttagcatatgcataggagctctgaaagaccagagagagagtgagtgagtgagtgagagcaattcatcatcaatcacacagtgagtgttggtgtggttaagggatgcatgcagcagagatgtgaaacggggttcatgttcgtcacctctaaagttagcctgccatggcatgtgagctctgcgccggcctgacccctcctcctctgtgtgatgaatcatgcccccatttttggcccttgtctcgtgttataatggtgcgagttcatgtcctggtgatgctgcagccatcagcagggtggtccattggatcgccatgaattcagcagctgcggtctctgcctatgtgatgacattgtatgtaccgtactccagtgtgtaccggttctttgaactgtggtggcgtgtcactgtctctgtcagtgccactgtccatcgtcgtccggctgttacagccggattgttactgctagtaattggcttccttcgttcgttcgtgatggcatcagcatcagattgtttcttttcttcaggctgataaaatgaagactgttgttgcctgt

SEQ ID NO: 8276 - DNA, 1811 bp, Oryza sativa
  ref <308>: DATABASE ACCESSION NUMBER: AK105624
  ref <309>: DATABASE ENTRY DATE: 2002-08-28
actcccctctcctcccgcctcgccgccgcaaccaccgccgcctcgccgcagcatcacccgcagccgccgccgccgccgccatggactccgtcgcgtcgtgggggctgaccccgctcgccgcggccgacccgctcgtccacgacctcctcgagcgggagaagcggcggcagcggagcggcatcgagctcatcgcctcggagaacttcacctccttcgccgtcatggaggccctcggctccgcgctcaccaacaagtactccgaggggatgcccggggcgcgctactacggcgggaacgacgtcatcgacgagatcgagaacctgtgccgcgaccgcgccctcgccgcgttccgcctcgacgccgcgtcgtggggcgtcaacgtgcagccctactccggctcgccggccaacttcgccgcctacacggcgctcctcaacccgcacgaccgcatcatggggctcgacctcccctccggtggccacctcacccatggctactacaccgcgggcgggaagaagatctccgcgacgtcgatctacttcgagagcctcccctacaaggtgagcgccgccacggggtacatcgactacgagaagctggaggagaaggcgctcgacttccgccccaagctcatcatctgcggcggcagcgcgtacccgagggactgggactacgccaagctcagggccgtcgccgacaaggtcggggcgctgctcctctgcgacatggcgcacatcagcggcctcgtcgccgcgcaggaagctgcaaatccttttgagtactgtgatgtggttaccaccaccacgcacaagtccctccgaggaccaagagctggcatgatcttctacaggaagggccctaagcctcccaagaagggccagcctgagggtgctgtctatgactacgaggacaagatcaacttcgcagtgttcccgtcactgcaaggtggtcctcacaaccaccagattgcagcccttgctgttgctctgcagcaaaccatgacacctggattcaaggcctacgcaaagcaggtcaaggccaacgctgtcgccattggcaagtatcttatgagcaagggctacaaaatggtgactgatggaactgagaaccaccttgttctctgggatcttcgccctcttggcttgactggcaacaaggttgagaagatgtgtgacctttgcagcattacacttaacaagaatgctgtctttggtgacagcagtgcattggctcctggcggtgtccgcattggtactcctgcgatgacatccaggggtcttgtcgagaaggactttgagcagatcggcgagttcctccaccaggccgtgaccatctgcctcaacatccagaaggagcacggcaagctcctcaaggacttctccaagggcctggtgaacaacaaggacgtcgagaacctcaagctggaggtcgagaagttcgccacctccttcgacatgcccggcttcaccctcgacagcatgaagtacaaggagtaggaaagcaaaaacacacacaaaccatggtcctaccgccgctaatcgtcgaccagctgtgctctcgtggaccgccgtcgtcgtcatcttcttcctcggcacaagctggccctgtgttacggattttgtctgcccatcgagatgataggtttcataaaacgctctctcccccaccctgctgctgcctctggtttggttgccaacctcatcccccatcggtttttttcctcctcttgtttctaatttctaggagctgtgccttttggaatcatggaatgtcaagtatttgccaataatcaatccgtttgatttctgcct

SEQ ID NO: 8277 - DNA, 1496 bp, Oryza sativa
  ref <308>: DATABASE ACCESSION NUMBER: AK105625
  ref <309>: DATABASE ENTRY DATE: 2002-08-28
acccaccaccaccaccgcctttctcctcctcctccgctccaatccgcgacccttcctccagttcttgttcttgttcttgttcttgttgcaaagattcgagagagagggagagagagttttgtttgttgttgttgttgtacatggggctggacgtgggggagatcgggatggggctggatttgagcctggacctgaagatgttcgcggcgaggagcgccgtgaggatggcggcggcggcggccaaggaggcgacgggggtggaggcgtgcatcaggagcctcgaggaggagcgccgcaagatcgagatgttcaggcgcgagctcccgctctgcgcccgcctcctcgccgacgtgatcgagctgatgaaggaggaggccgggaagaggaggaaggacggcgacgacgcggaggcgaaggcggaggacggcgacaagacgaaatggatgagcaccgcgcagctctgggtggacagccgcggcagcgacgccgattccgagaatgaccgacggagcgggagcacctcgccggcgtcgaggttgctcggcggcgcggaggagtcgtcgtcgagggccgtcgcgccgccgccgtactttaggagggaggaaagggtggttctacgacccgctatgccgttgctgcctccggcttcccacaggtcgcctcctccggcggcggcggcggctgccaccgccgccggcgatgaccaccggcacgttgtcgcgtcaagctttgccaccgccgtgccgtcacccgtcccggcggcgcttagcttgcaggctcaggcgcagcagcagcagcagcaggcgaggaagtcgaggcggtgctggtcgccggagcttcaccggcagttcgtcgccgccttgcagcagctcggtggcccccaagttgctactccaaagcaaatcagggaggtgatgaaggttgatgggctcaccaacgacgaagtgaaaagccatctccagaagtatcggctgcacaaccggaaatcaccaggcacagcttcagcgagccattcgattgtacttgttggtgatctctgggcttctcaggaagtaagctgctctcaatccggatcacctcaaggtccccttcagctctccggctcaggggtggccgtctcggcggccaccgccggcgacagctgctgcgaggatgatgacaagtcggaaggctatgtccgaaaatgatcgaaagatcgtgctcgtggaatcttgctagacagagaggtagattgatggattttcggcttgcgcatcgatgcaaaattgccaataatggattcagaaactctgaggaggatggtagtgttggccatgtatacagggaagattgagctgttgagagctcaagtgatgaactgatcatgagctgggttgttgtggatgtgtagatgaagagctgctaccacccatgaggcttgcaaagtgtcgggcagaccccaaattttcgccctgagatttacatacatattatacataaatatatacaagattcgc

SEQ ID NO: 8278 - DNA, 1441 bp, Oryza sativa
  ref <308>: DATABASE ACCESSION NUMBER: AK105626
  ref <309>: DATABASE ENTRY DATE: 2002-08-28
gcgagtcgtcttctcatctctcctccgccgccgccgcctgctgctgcatctctcgtcgtcgccggtgagggaagggaggggaggggggagggcgtgatggcggcggtgagggaggtggggtcgaaggcggagctggaggcggcggcgggaggggcgcgggccgccgcggtgcacttctgggcggcgtggtgcgaggcgtccaagcagatggacgaggtcttcgcgcacctcgccgtcgacttctcccacgccgtcttcctccgggttgaagctgaggaacaacccgaaatttcagaggcatatggagttacagcagtgccatattttgttttcttgaaggaaggtaaaactgttgatactctggagggtgcaaatccagccagcttggccaataaggttgcaaagttagctgggcctgccagcgttgctgagtctgctgtgcctgctagcctgggtgtggctgctgggcctgctgtacttgaaaaggttcaagagatggcacagcaaaatggagcttctgccactagtagtgcagaagatgcattgaacaagagattggagcagcttgtcaattcccatcccgtcttcttatttatgaagggaacccctgagcaaccaaggtgtggtttcagtcgaaaagtagttgacgttttgaagcaggaaggagttgaatttgggagctttgacatcctaacagataacgatgtacgtgaaggaatgaaaaagttctcaaactggccgacttttcctcagctctactgcaaaggtgagctgcttggcggatgtgatattgtgattgctatgcatgaaagcggtgaactgaaggatgtttttaaggagcacaacattccgctgcagccacagggaagcaaaaacgaggaggcagtgaaagccaagcctgatactgagaagagtggtgcagtttctgaaccagctttgcttactgcagctcagaaggaacgcttggaaagccttgttaatttcagcacagtgatggcatttataaaaggtacacctgaggagcccaagtgtggattcagtggaaaactagtgcatattcttaagcaagagaagatccctttctcaagttttgacattcttacggatgatgaggttaggcagggtctaaagcttctctcaaactggcctagttaccctcaactgtacataaacggtgaactgattggaggctgtgacatcgttcttgagctggagaagagtggagagctgaagtccacgctttcggagtgaggaaaatttaccgtcgtatccgcatcttcctcttcctggtgtttctaccatccgtcgaccatcgagtttgctctattgatggcattttcttgtattcatagatccgtatttcaaacttagatatatgcctgtgccacatcgcttttaactgtgacatctgcagaagaataactaagacgacctgttcagt

SEQ ID NO: 8279 - DNA, 1831 bp, Oryza sativa
  ref <308>: DATABASE ACCESSION NUMBER: AK105627
  ref <309>: DATABASE ENTRY DATE: 2002-08-28
gatagtactagctaaatgctcgtgcgttacaacagaattctaaaagagaacttcatttttctaaaaccattccccattgtcgactcacgagactatagatgcatcaataaaattttattggttagctcgcatgacaaaatgattcctaatcatgatcctaacttaaagttgctattaaattttctaatggattttttgcgatttcgatagcctggttttcttgaatggctgtgatgatttggctgccccctcgagatcatctggtatcttcttggttccttggtaatatgttcagctagctgtcatactaggtggccttgctccccagcaagttaccagttgcagctatttcttgtctgtacatgatgtaacgaatgattctactcatttgttcatgtacggagttacggagggagtactatcaacatgttgcccagaaccataggcatttgtaacaattgggaattgacagttgggctaatctgagccattcaagtatatttcctttgttttcaaccatgttttacctccttactttcttatggctgtgcttgtaatgatctgagtctggtattctggtattgtttctgtttggtgagaaattaatattactatacaaacaatttttttttagattcgttgatctcattttgacttccatttaggccactcagttgtcatttgcatgtcgccctgttcatatacagtagcatatgcgagatgttggaactctttcaagttttgcttttgctgaggcatttaactttttgccacttttaagatgtggcaattaagaatttgttactcacaatctatgacagacattgtggatccagtagcaaatccttaattgccacttgtaaatagttaaatatctcttcatttctatgtagtttattcattcctttttttcttaaggaatggaatgttgactatttattaacttagctgtagtgtgatcattattattgtcctttcatactttaaggatatactcctgttcatccatattttgatgtttgttacttctttagttcttgaatggctgtgatgatttggctaccccttgaagatgatttgacatcttctcgccgtttgttacttctttagttcttgaatggttgtgatgatttggctaccccttgaagatttgacatcttctcgttcttggccatgtacatcagtcttggatgtagaggccatgttttaatccattatctaaaataaatatcttgttggttcattagcagtatgttcagttagctgtcatactaggaggccttgctgcccagcaaggtaccagttgcaggcttgcagccatttcttgatagtacatgctaatctactcatttgttcatgtacagagagacggagggagtatttacattttgccggagccacaggcacattaaactgtttggaattggcaatcgggttaatctgagccattcaagtcatttcctttgttttcatccatgctttgccccaatggtatttgttctttacagttttaccagcaggcgccttaataagcacgaagtcttggcaaaatgtttgttggtaatggccccagggacgaacccatcgacttgtgtgaattgctttgcgaatcttcggcttcagcttattacggatgtaacttcaacatcatctgttagtccctcgttagctttggctaattgtttctttttctggggagggaattttgtggctaaatttggaggttttgctccatgatatgcaaccagttttctgacaaattgttgttgctaatgccacatgatgaaatcagcaggcattgccagtggtgcacgctggaatgaacggttgt

SEQ ID NO: 8280 - DNA, 2181 bp, Oryza sativa
  ref <308>: DATABASE ACCESSION NUMBER: AK105628
  ref <309>: DATABASE ENTRY DATE: 2002-08-28
aatccttgcagataaacaactctactcctctcaccccccgcatccatcgaactccaacctcttcctctcctcttcttccctcccatcgacgcgcagatctatcccccgtcgccgtgcgcttccctccgatcgcgagcagatcggatttatgcggccgtactgcttctgctgctgctgctgcgaggagcgccagccatgtcgtggagcttgagccgtggtgagggggaggaggcgggcggcggcggcggcggcgctggggtcggggttcggcggtcgcaatgtccagcatgtcggactcggggacgggcggccgcgggggcgcggagctgatggtggagcagttccacctcaaggtgctccatgccgtgctcgccgtgcgcgggccgcgcccgctgcagccggccgcgtcggcgtcgttcaggcggcgggacaggtggttccacctcccgctccacgatccgcagcctccgcccgcggcggagggagtggaggcgccggaggcgggggagccgctcgtggtggacatcctcctggctcacgccgcagccggcggcggcggcggcggcggagcgggcggggaggtggtggagagatggacggtggtgtgcgagccctggccggacgccgcggcgggcgaggggatacccgtgaaccgggcgtacaagcgctgcatgacgatgcttcggtcggtgtacgccacgctccgcttcctgccggcgtaccgcgtcttccgcctcctctgcgccaaccaatcctacaactacgagatggtccaccgcgtcggctccttcgccgtgccgctctcccgcgacgaggaggccgccatgcgctcctaccagttcgtccccgtcgagacgcagcacggccgcctcgtcgcctctgtccagtacctccccagcctcgctgccttcaatctcgagatctcctccttgtcgccctccatgctgatcgccgactacgtgggcagccctgctgccgagccaatgcgtgccttcccagcttcgctcacaggagccacaggttccgctttcccgcaggcgctgtccaatcagccgcagcgcccgcacagctgggcgacgccagcgctctggccgcaggcgcctaggcagcaagctagattttcgccacctcatttgctcaacgcatcacccactccatcgccacccaattttcccagcgggtatcttcaatctcgtcctaagggagggtctgcaccaatgagcataccacaggtgggtgacaggaggagcccaattcaccggccgatcacattgccaccaacgtctccgaggagagtaggggagacaggaacatctagtgcacaacagtctccatcagagagatgcccctcgtttgggagggcagatggatttcgaataatggatccctatgcaagcttgtcgccaggacgcaagggcaaggacactaaggacgaatctggcaggttctctgcactctcctcctgtgattcccctcgacaagatgatatagatgatgcagattatccctttgctgtggatgatgttgatacaccgagctcccagcctgggagcagtgatgggaaggaagctagagatcaggcaagttcgtcgtcccataaatcacaagatgccgcagttggctctctggtgcacctgctcaaaactgcacgccctctgcgaaactctaattgtccatctcaagcatcagcggttgaatctagtgaagcagcctcaaccagttctgtcgtgtcccgtaggaaatctgatgcactcgaagagctccaatcatttaaagaaatcaaggagaggttgatgtcccggagtagagcaaaacagcaagagccaccagaaaaaccatagcaccgttctttccttcgtaaacttcacaggtgaagatcccctaccacaaagcgggctatgcggtgagctcagtgacgttatgctaaggaattcgtgtgtatataactgatggactgatgcttttagttaaagagaagatacgagttaccactgatttctgcgagaatccctcgccattcttgaactctagaagaattacgccactgtttatacgcttttatacgtaggtgggagcctcttgacgaatatagcagctccagcgtgtgcgtgtgtaattatgtgactgtactgactactgtgccgagtgttcggtaaattaaagtatctatcttcaaacttc

SEQ ID NO: 8281 - DNA, 2170 bp, Oryza sativa
  ref <308>: DATABASE ACCESSION NUMBER: AK105629
  ref <309>: DATABASE ENTRY DATE: 2002-08-28
aagaaaaaccctcacctccactcccccctcgccggagccacggcgaccctctccaccccctgccttgccgccggcgagtgtccttgcgtgcgccgccggtgagcgggtgtggatcccagcggcggcgcgatcggccttcgaatcgaactgaaagctgaaccctcgttgccactgctgtgaacatgtcccaaattgagaagatcgtatgagctatggggaattattaggattcttggaggcggcggcggcatatggtgttcttcccggaggaggtggtggagcacatccttgggtttctagcgtcgcaccgcgaccgcaacgcggtgtcgctggtgtgccgggagtggtaccgcgtcgagcgcctcagccgccgctcggtgctcgtgcgcaactgctacgcggcgcgcccggagcgcgtgcacgcgcgcttccccggcctgcgctcgctgagcgtgaaggggaggccgcgctttgtccccgcggggtggggtgccgcggcgcggccatgggtggccgcgtgcgtcgccgcgtgccctggcctcgaggagctccggctgaagcggatggttgtcactgatgggtgcctcaagctgctcgcttgctcattccccaatttgaagtcgctcgtccttgttggctgtcaggggttcagcactgatgggcttgctactgtcgctaccaattgcagatttatgaaggaactggacttacaagagagtctggtggaggatcgagactctcgttggcttggatgttttcccaagccttctacattactagaatccttgaatttttcttgcttgaccggggaggtgaatagtcctgcattggaaatactggttgcaaggagtccaaatcttagaaacttgagattgaaccgttcagttccacttgatgttttggccagaattctttgtcgcagacctaggctggtggatttatgtacaggatcttttgtacgaggcaatattgttggtgcatatgctgggctattcaatagttttcaacattgcagtttgctgaagagtttatctgggttttgggatgctacaagcttgtttattccagtgattgctcctgtttgcaagaatctaacgtgcttgaaccttagctctgctccaatggtcaggagtgcttatcttattgaatttatttgtcaatgcaagaaactccaacaattgtgggtgttagatcacattggtgatgaaggattgaaaattgtagcctcatcctgtatacagctccaagagttgagagtatttcctgcgaatgcaaatgccagagcaagcactgtgacagaggaagggctagttgccatatctgcaggctgtaacaagttacagtctgtgctctatttttgccaacggatgacaaactctgcactgattactgtcgcaaagaactgcccacgattcacgtccttcagactgtgtgttcttgatccaggatcagcagacgctgtgacagggcagccattggatgagggttatggggcaatcgtacagtcatgcaaaggccttagacggctatgtttgtctggacttctcacagacacagtgttcctctacattggcatgtatgctgagaggctggagatgctttctgtagcatttgcaggagataccgacgatggcatgacctacgtgctcaatggctgcaaaaatctcaagaagctggaaatcagggacagtccttttggtgacagcgcgcttcttgcaggcatgcatcagtacgaggcaatgcgctcactctggttgtcgtcgtgtaatgtcaccctggggggttgcaagtctcttgcagcaagcatggcaaacctcaacatcgaggtcatgaatagagcagcaagtatcaatgaggcagacaatgctaatgatgcaaagaaggtgaagaagttgtatatttacaggacagttgctggaccgaggggtgatgcgcctgaattcatctcaacgttctaaatccatatatttttgaagttgaaggtttgttcttcgacaaccaccttttgtttatatcatactctgctacgtcgagttgatctacatgttctaaagatctatctatcttcacggtcgaagggatcttctaggattattttgtgtaaattcctttgctatcacctctgctatgtcattatcttccagcagtgctacacttatgattaatctcc

SEQ ID NO: 8282 - DNA, 1778 bp, Oryza sativa
  ref <308>: DATABASE ACCESSION NUMBER: AK105630
  ref <309>: DATABASE ENTRY DATE: 2002-08-28
gtcgaagcttgcaggagaaaaatttccgtgaaataatctaattaagagaaggccctcgtgccgctcagccccagggcggcacgggcggcgaccagacgagcgcgccgccgccaacctcttcctcttctcccctccaccttgccgccgctcgagcgcccgccggcaaagccggggggacgcaatgacagcggcggcgaggctccctacctcctctcgcaggcgcggcggctggggcgatgccatgaccggagagaggtctcgcgggtgcagcggtcgccggcggccagatccggcgtcggtaggaccggatccggtccccacacggctggatcgggcgtctcagccggtggcgacaggaaggaggcgcacgctcaacgaggagcgcggaagaggcggcggaagtggcgacgtgcgaggaggacgacgttcgcgcgcaggccggtgacgctcccgtcaccggcggcccaggttcccgtccagatccgggccgggcgaggcgctgggaggtggcggctagcggcgggggagaggttaacgtcggggctggagagggtgcgaagaccggtggcaggcaggggtggcttcgcggtgggccgcagcggcttgcgccgaggtcgcggtgttgacgggaggtcagcaacggggctggagacgacgcggagatggtggcaggcaggggcggcgtcacggtgggcgggcagcggcggctcgctcgcgccggtcgcggcgtcggcgttggcgtccgtccgcgcggggtcacagcggtggcgatagaggctgtggcggcgtggtggttgcgacgacgacggagctgcagcggcgcggatgtcgagccggcttgcgccgccctggctggatctggccgtccgcgaccagttccgtcgcctccgcgccggagggcctgtctttgccgttatggtcgaggtatgaatgcttgtgagacgtcatggactattctgtggccgtcattgtgggggtgcttgtgtgggtgatacgaagacgtcggcgaaagccttgccgtgcctttggccggttcgacgacgacggcgcccgtgggcgccgttttccttcttggaggcgttgtcatggcgtttctttcatatcccccacaaatctccaggtgaaaaccttgttccggcttcggacgagcggcggcggcggagttacgacgtcgtgtcctcctttggggcgtcgcttcggagaagttccaacacattgacgactgttgatggtccttttcggttcaaaagctctcatacattgtgttcggcgaggccttcgccttcttgggtccgctttgtttctcgtggtgggtgtcacgctctttggttgtttctgcagatgaagtcggagctactcgctgatggggtgcggtgacgcctggcaacgatgacatgttgcagtctcttcctaggagttgtggtgctggccgtgtaaaggaagtggctcctcggtggcttggctgatgtccattgttggatgtcggagctgctttttgctttggcgactttcatggctttagtgtcgctgtggttgtgaagtcggcgctgctgggtcgcttgggcggctagctcggcaacgataacacctcttctgcggtgtgggagctgttgggtggcttttgtgtttagcttggcgacgacgtcctgcatttgggctccgccatcatggttagtagtgtagcggtgggttttagccggttttcctgtaattaaccatgcggatgtatggttttcgggtccggttatccttataaactgggtcaattctcttcttct

SEQ ID NO: 8283 - DNA, 1388 bp, Oryza sativa
  ref <308>: DATABASE ACCESSION NUMBER: AK105631
  ref <309>: DATABASE ENTRY DATE: 2002-08-28
aaaaatcaaccgagaccccgttagtagcggcgagcgagagcggaacaagggttttcatcaaaagaaatccgaagcggtttcattcgatttgttgtggattggatgatggaaaaaccagcaagcagcaagcgtaggctgtgttgccgtagcgcgccctacggagttgtacaaagtcagcaaccgttttggggcgcaagcataggcaacacaggactgatgacggggcggggcgcgcagtgaactggttttctaaaaagattggaagatccggccaaagaaggtgatagccctgttcattcgttcccatggttcgatccttcccagtaaaacgcggcgtgttcgaatgatgatcgcttttacgcgagaaagggggaccaccctctaagcctaagtattcctcaatgaccgatagcgtacaagtaccgtgagggaaaggtgaaaagaaccccaatcggggagtgcaatagagaacctgagatccgatgcgaacaatcagtcgaaggagcggagcgcgggcgcactcactctaacggcgtacctttcgcatgatgggtcagcgaggaaatgggaacagcggcttaagccattaggtgtaggcgctttccagaggtggaagatttacgttcttcctatttgacccgaaaccgatcgatctagccatgagcaggttgaagagagctctaacaggccttggaggaccgaacccacgtatgtggcaaaatacggggatgacttgtggctaggggtgaaaggccaaccaagatcggatatagctggttttccgcgaaatctatttcagtagagcgtatgatgtcgatggcccgaggtagagcactcaatgggctagggtggcccccatttcgctttaccaaccccagggaaactccgaatacaggccgtcatccttagtacagacagactgattgggtgctaagatccaaagtcgagagggaaacagcccagatcgtacgctaaggtccctaagcaatcacttagtggaaaaggaagtgatcgagcgatgacaaccaggaggtgggcttggaagcagccatcctttgaagaaagcgtaatagctcactggtctagctccatggcaccgaaaatgtctcagggctcaagtgattcaccgaagcgacgagaccttgaaagctgctttttcaagtgtcagtagcgggacgttctgtcaatcggggaaggtttttggtgacaagacctggagatatcagaagtgagaatgctgacatgagtaacgagaaatcctgtgaaaaacacgatcgcctgccagtggaaggctttctgcgttcagtcaatctacgcagagtgaatcggtccctaaggaacccccgaaagggctgccgtccgatgggtacacgaaagtgacgaagttg

SEQ ID NO: 8284 - DNA, 1624 bp, Oryza sativa
  ref <308>: DATABASE ACCESSION NUMBER: AK105632
  ref <309>: DATABASE ENTRY DATE: 2002-08-28
aactagtagtagttcttctctcctctcgctcgctgttccttgccccattctcttggcttcttcttcttcttcttcttcttgttgtggttgtgtgttatgataagagttcttcgccgttgagatgggttgctttgggtgcttctcgccggaggtggacgacgacctcaagccatccaagcccaattaccactcttctgacgaatcatcaggcgccgacgcgaggagaaaggtcgcgccgttggcgacggatggggggaacggctacgcgcacagcttcaccttcaaggatctgtcagtggcgaccggctacttcaacgaggcgaatttcatcggagaaggtggctttgggaaggtgtacaaaggcaagatcaatgggcagatggtggcagtgaagcagctcacccgggacggcgtgcaggggaggaacgagttcttggtggaggtgctgatgctgaccgtgctcaaccatccgcatctcgtcagtttggtcggcttctgcgcgcagggtgacgagaggctgctggtgtacgagtacatgccattcggcagcttggagagccatctcttcgatgtgcctcttggcaagcagccactggactggaatacacgcatgaggatagctgttggagtggccgaagggctttcgtatttgcacaatgtggctgatccgcctataatttaccgtgacatgaaagcagctaacattctgttggatgaggactacagaccaaagctctctgatttcggactagcaaaagttggaccagtcggtgacagaacccatgtctccaccagggttatgggaacttatggctactgtgctcctgactatgtggtgagtggtaagcttaccatgaaatctgacatatacagttttggtgttctcctgttggaactgatcaccggcagaaggatctacgatgcttcaaggcctaaaccagagcagagtttactaacatggtcaagaccatttctgcatgacaagaggaaattctacaggctcgctgacccagctctgcacgggtgctatccaacatctgcactaaatcagttggttgtgatcagcatcatgtgcctccaagatcagccccacgtccgcccaatcatctctgatgtcgtaatcggcctgaaccatgtcgcaagccagccatatgtccctgagcgctcctcagtgtcgctgagttccccagcaaggtgcgggtcaccacaatatgccggcacgccatctagaaggcgaggcggcagaagagttgctcagtatgcatagcctagactatatccttgtctcaaaagaacagcaagatctcagtctggtgagacgggtagatagttgaaactgtcaaaaatgccatatagtcaaagccttcttgattcaagaaccggtctttagcaacccgattgacacagtttgctgtgagattggtgatagtttgaagctgaccatgatgactgttgttctttcatgcctttcattgttttcagttccttaattctgttgccagtgtacatagcatcatcggttgtgctctgcttgggcagcagccatcagacatgcatcagtccggcctggaagcatggggacaatgtacttaattgggattttgatcaagttatttaatcatgt

SEQ ID NO: 8285 - DNA, 2330 bp, Oryza sativa
  ref <308>: DATABASE ACCESSION NUMBER: AK105633
  ref <309>: DATABASE ENTRY DATE: 2002-08-28
aagaatacattgaataggattggaagtggagtaaggccagacattggagatgaaagctataatgatgcatttcgttgtgagtccttccttggtcctggcaaggcattgtgggatgagatgtcgagcatgaaaatttcctgcaataatcaagatgagaacagaggtcctcaccatctttcaaagtgcttagttaacaatgactcatatgccaccttgaatgtgcctacacattttcatggagatcacatggtagcatcaagtactgatttgagtctaaaatcgtcctgtttcatccaagagacaccaaatcagtatcctttgttttacctagaagatggcaatggtagcagcgaacagtacttggaccatgaaatggtggaacaggcatcttgttgtacagctgaaacctgccatgcgaatgaagaaccatcaatgcatccacaagtttatccaaacaatacgttacatacattttactcaagtttggccaataatttggaatattccaaatctggtcagtcagacatgacaaattcgagtataaatgttgcccatgaggaaaaacaaaaattttctccctccccattgagcttggtggatctatcaggtgatctagatttgcaattgagatgcctccgccaagttcagtatcacctagaatacatgtttgatggttttttgcagtctgttcaagaagcatcttctgactgtaaggttgcaagggactcgtttgaaattccagctgttaacatcacatcgaattctgatgtggtgctgccaggtctgttatcaccttcatctactgaaactgatgagaggagattatctccagtttcctcttctcatagcaccgaagattcttcacagcagtcacatggtgagagcaactggggtgcgtcttgtcagcagaactttttattaataccctctcaaacaattgctccaaccaatggactgtcaccatgttcttcttatgctaattcagataattctgttcaattgtatgatagctcagatgatatctccaatatgcatgaaacagatcaacatattctccaaaagcacatggtatctttaggacagaacaagacactaatcaatcgacaagtgagagttaaaagcaatcaagcatcagttccaaaaggaaaattttccatttgtaaggagcaaataacacaagacactgcaaccaaggacataaagttaagccggcatttgagagtcaaggacagtgagcatgaatatataagcactgctaagaagatttcgagctataattgtgacacttgcttagaatgtgtcaaacctgaaagtgaagcaatgttaccaaggcattacaagcatgcccgctcaagcaagaactcatttgagcatcggatttatgatattgacatggggtttgcccgatctggtagttcacggaatcaaatgccaaaatatcaatcactgaagaatcaggatatgtcaagcttaaatgtccaaaaagagcatgaaattaactggcccagaaaacaaatgccatccgagctgttgaagctccaaaacagtctacgtggcagggcttgctcaaacaagaaattagctgcaaaacaaattaacaataatcacaaagaacatctatcttttgtaagggatccagaacagatgccatataatcaggttaactcaaacaaagagtttgagactgttggcaaatccagccaattattgccacgggtacagctctctcttcataacgacagaagccttacagcatctacttgtcagtcctcattccctgtgacaaaaggatctactcaattcaacgacttggagatgccttcactagaaaatattgagtttggaactttggggtctttttcattgacacttgtgtcaccaaaatcgaataagaatcccaacacacactcaaccagtaagacatgtgccgatgctgctgcattggcattgcaaagccatccaacacaaagcaggtcaccaggattctacaaagttggagatgaagatcacttcccacctctccgtgctgggactcgctgagactttcggtacatacacagatgatacagttgatcataggtttagagaactaaaaggtaaagagaagagctaacaggttgagcttttttcataacctcaggagagcgcaaatgcgaggattctaatagcatatatattcgtccatgtaaagttctgtcgatctcttgtcctcctcaattgtctatagttaggccaagaaggctaatgggtagcaactaattataccattgtagttcttttaccttaagtttaacttgaaagaagaaaaaatcgggggaatatgttagctt

SEQ ID NO: 8286 - DNA, 1263 bp, Oryza sativa
  ref <308>: DATABASE ACCESSION NUMBER: AK105634
  ref <309>: DATABASE ENTRY DATE: 2002-08-28
ctccgggtggaggaacacacgatccttagcctgaaatcactcccatgttcccgccgttctcccacctccgccgccgcctcctcgccgcgatccctaaccctaacctcctcctccgaccgtcgcgctctctctccacctccaccacgccggcaacccgcgcccccgccaccccggtggccgtcctctgggatttggccgcctcccggcccccctccaccctccccctctacgacgccgccgtgcggctccacctcgccgccacctccttcggccgggtccgcctctccgccgccttcgtccaccccggccaccgcctccctgccccgtctccgtccgccgccgcggccgccgtgcacctctgccgcgtctgcggccgccgcttccgcgcccgcgacacgctgctccgccacttcgacgcgatccacgcccgcgagcacgccaagcgcctcgcgcggatcgactcctcccgcggcgaccgacgcgtgcgcctcgccgccgcgctctccctcaagctctccaagtacgagaaggccgcccgcgagctcaccgccgccgccgacccctgctcccccgccgacgacctccgcagggcccgcgtcgccgtcgagctctccccgaccctgtccgtctccctccttgagcgcgcccacgaggtgctcgacggagggtccgttcggtgcctgatgctggtctcggcccgcgacgagctcgctcctctgctgcgcctcgcgagggagaagggcgtccggtccgtggtcgtcggcggggagtccgggccggcgaggtgggctgacgttgggttcagctgggcagaggtgatcgccggtaaggccaggaaggcggcgccgtctgtgtccggcaagtggcgggacagggacgtgctcaagaggctggaatggaggtacgacgacgacgacgaagaggtggtgttcgaggaggacggtgacgaggatgggatcgatgagctgacgaggaattccaaggggaagccatggtggaagctggaatcggatggcgaggactccagtgcttgccgttgaatggtgaatcggtgatgtcgcacacaaggtgttcgtccatttgctcccgtggatccttccatccaacagagggagtactatcaaccaggttggggacctggtgctttgcctgaccatttcaaaagagtactcttacacacgtaacagtagtaattgtacggaagatatctgttcagattatttggactgccattcgttcgcatgagatgtgctttccaatagc

SEQ ID NO: 8287 - DNA, 1996 bp, Oryza sativa
  ref <308>: DATABASE ACCESSION NUMBER: AK105635
  ref <309>: DATABASE ENTRY DATE: 2002-08-28
tggctgcaacttcaacaaccagatcatcagatcacgtagcaagaatagtttcagaattcagagagagagagagagaggtgattgatgggcagctcatcagggctagtggactggagggggaggccggtggacaccaagaagcatggaggtgtcagagcatccatcttcatccatgcgatggtgctgtagaccaacgcgcccaacatcgccaacatgatgaacatggtgagctacctgcggggcaccatgcacatgggcgtggcgcaggcgtcgacgacggcgagcaactacttcgccgcgctgcagatgttctccatcccggccgccttcctcgccgactcctacctcaagcgcttctacaccgtcctcctcttcgcgcctatcgagatcataggctacatccttctagcagttcaagcgtacaccacctcgctgcacccgccgccgtgcagcccggcggccacggcggcgagcgccaccaccacctgcgagccggtgcgcggcgcgaacctgagcctgctgctgctggggctgtacctgatcccgatcggcgacggcgcggcgagggcgtgcctgccggcgctgggcggggaccagttcgacctgggcgacccggacgagcagcggcaggagacgagcttctacaactggtacaccttcgccgtctccaccggcggcttcgtcggcctcgtcttcatcgtgtgggtgcagaacagcaaggggtggggcgtcggcttcgccgtctccgccgccttcgtcgcgctcggcttgctcgtctgggccgccgccttcccgctctaccggaaccagctgccgatggggagccccatcacaagagtattgcaggtttttgtagcggcattcaagaaaagaaacgtccggttgccggagaatcccagcgaattgaagcaaattaaccaagatgacgatgccaatgcccacgaagttctccccaaaacagatggatttcggtgcttggagaaagcggcagtggaaactggcaatgacgctgggccatggtctctgtgcagcgtgacccaggtggaggagaccaagatcgtgctgcgcatggcgcccatcttcgtggccgctgttctcagctacatcccggtgccgctgctcctcagcctcaccgtgcagcagggcaacaccatggacaccaggctcggcgcagtccacatctcgccggcgacgctgttcctcatcccgaccgtcttccagatggtcatcctcatcatctacgaccgcgccatcgtgccgccgctgcgcaggctcacgggctacgtcggtggagtcacccacctccagcggatcggcatcgggttcgtcgctactatcgttgccaccgcaatcgccgcggtggtggagacgaggaggaagatgaccgccgaggagagcgggctagaggacgccaccactgggatcccgctgtccgtgttctggctgacgccgcagttcttcctcattggcattgtcgacgtcacctccttcgtcgggctcctcgagttcttctgcagcgaggcgtccatggggatgaagtccatcggcagctccatcttctactgtatcctcggtgtatcagcatggctcggcagccttctcatccaggtcacgaaccgtgtcacccagcgaaccaacggcggagggtggctggatggggccaatttgaacaagggcaagctcgaccggttctatgtcgtcctctgcatcatcgaggtggtggcgctggtgatctacgtgttcttcgcgaggaggtatgtatataggaatgaccagagggttgtggcccaagagcagaggaagggtgacacggggaatggtatggctgtgatctaaacttgaaatgaaatgagtcgtgtttatatttacatggatgtaacgatatatatggtagtaatagtaaataatttggtggtacgaggagaaatggaggaacttcattgtgaaatttaataagacactatccaggagaaagaaaatcaatgtagatttccag

SEQ ID NO: 8288 - DNA, 2288 bp, Oryza sativa
  ref <308>: DATABASE ACCESSION NUMBER: AK105636
  ref <309>: DATABASE ENTRY DATE: 2002-08-28
gtctcgtcttcctcctcctgctgctgcgttgctcccctacctaaccccctctctctccctcatctcgctcctcctgctgctagctaatgctgtatttattcccaccacctcctcccactcttcgtgcctcgccggagcaagcagtaccagtgcactgttggttcgctagcaagtcggcattaatccgagagtgtgcatgcaccggaggaagctaggttagctttgttccggccatgatcacggtggcggcaccggaggcgcagccgcaggtggcggcggcggtcgatgaggcgccgccggaggcggtgacggtgttccggtccaagcttccggacatcgacatccccagccacctgcccctgcacgagtactgcttcgccagggcggccgagctccccgacgcgccgtgcctcatcgcggcggccacggggaggacgtacacgttcgccgagacgcgcctgctgtgccgcagggccgccgcggcgctgcaccggctgggcgtcggccacggcgaccgcgtcatggtgctgctccagaactgcgtggagttcgccgtggcgttcttcgccgcgtcgttcctcggcgcggtcaccaccgccgccaacccgttctgcacgccgcaggagatccacaagcagttcaaggcctccggcgtgaagctcatcctcacccagtccgtctacgtcgacaagctccggcagcacgaggcgttcccaaggatcgacgcctgcaccgtcggcgacgacacgctcaccgtgatcaccatcgacgacgacgaggcgacgccggaaggctgcctgccgttctgggacctgatcgcggacgccgacgaggggtccgtcccggaggtggccatctcgccggacgaccccgtggcgctgccgttctcgtcgggcacgacgggcttgcccaagggcgtggtgctgacgcacaggagcgtcgtgtcgggcgtggcgcagcaggtggacggcgagaacccgaacctgcacatgggtgccggcgacgtggcgctgtgcgtgctgccgctgttccacatcttctcgctcaactccgtgctgctgtgcgcggtgcgcgccggcgcggcggtggcgctgatgcccaggttcgagatgggcgccatgctgggggccatcgagcggtggcgcgtgacggtggcggccgtcgtgccgccgctcgtgctcgcgctcgccaagaacccgttcgtggagcgccacgacctcagctccatccgcatcgtgctctccggcgccgccccgctcggcaaggagctcgaggacgccctccgcgcccgcctgcctcaggccatcttcggacagggatacgggatgacggaggcggggccggtgctgtcgatgtgcccggcgttcgccaaggagccgacgccggcgaagtccgggtcgtgcgggacggtggtgcggaacgcggagctcaaggtggtcgacccggacacgggcttctccctcggccgcaacctccccggcgagatctgcatccgcggcccacagatcatgaaaggttacctgaacgatcccgaggcgaccgccgcgacgatcgacgtcgaggggtggctgcacaccggcgacatcggctacgtcgacgacgacgacgaggtcttcatcgtcgaccgtgtcaaggagctcatcaaattcaaggggttccaggtgccgccggccgagctggagtcgctgctcatcgctcacccgtccatcgctgacgccgccgtcgtcccgcaaaaggatgacgtcgccggcgaggtcccggtcgcgttcgtggtccgcgccgccgactccgacatcacggaggagtccatcaaggaattcatatccaagcaggtggtgttctacaagaggctacacaaggtgcacttcatccatgcgatccccaagtcggcgtctgggaagatactgaggagagagctcagagccaagctcgcggcgtgctgaccatgtcaatgatggataatgatggctaggctatacatgcgttctactatgtattactctgaaaatgcagtgaagttctggttgatttgtggtcgtatttgtgacgagatttattttctgagaaaaaaaagtttattctttttgctagccagtatactgctgaatttgatgccaggcgcacatttgcgaaagaaactgcggcaaacttggcaactttttagtatatgatcaaaacaaacgtgtacaatgtagcatttgtacgtgttgttgccagttggggaatacgactaccgtgtattggattcatgatttacatatatcagtattggttcatcatttgtcaac

SEQ ID NO: 8289 - DNA, 2008 bp, Oryza sativa
  ref <308>: DATABASE ACCESSION NUMBER: AK105637
  ref <309>: DATABASE ENTRY DATE: 2002-08-28
gacgcagcccacgggccttgttcccttctcaccacctccaagtacgctttgcgggacactcgcggcagcaagagttcgtatactcgcctctgctgctgctgcactgccgcgcctaaagctgagcaagaagaggagactttgcagcaagagttgctactgtttggtttggttcaggtgagagaggtcaacaatagctgttggcgtggctagttgcttgtgcagaaaaggattctcttttggttttgccctttctgagaagctgatgatgatgtggtggtgggctatggttgtgcaggttggggagctactagaagaaggaggaatagctaggttgtgaatttcttggggggacacaagaatcgtgggatggatggcaatgcgagatcggcggcgaatcagacgaagcaaatcgtgtagagatttcatctgaaacccaagaacggattcgtcttgtgttgttgccgaatggtagtgacctgacctgactctgtgtgcatttgctccaatggcgatttgcagcacggacaacgagctggtggagctgctatggcacaacggcggcgtcgtggcgcagccgcaggcggcgcaggcgagggtcgtctcctcctccggccgcggccagagcgccagcgtgctcaccggcgacgacacggagaccgccgcgtggttcccggacaccctcgacgacgcgctggagaaggacctctacacgcagctctggcgcagcgtcaccggcgacgcgttcccggcggccgcggcggcggggccgagctctcaccacgctccgccgccggacttgccgcccccggcggcgaggccgccgatgaggagcggcatcgggtcgagctggaccggcgacatctgttcggccttctgcggcagcaaccacatcccggagacggcggcgcagcgctgccgggacgccggcgcggcattgccgccggagcggccgcgccggtcgagcacccacgacggcgccggcacgtcgtcgtcgggcggctccggcagcaacttcggcgcttccggcttgcccagcgagagcgccagtgcccacaagaggaaaggcagagaagattcagacagtcgcagtgaggatgctgaatgcgaggcaaccgaagagaccaaatcgtcgtcgcggcgatatggatcaaagaggagaactcgtgcagctgaagttcataacctgtcagagaggagaagaagggatcggatcaacgagaagatgcgcgcattgcaagaactcatacctcattgcaacaagaccgacaaggcatctatattagatgaagcaatcgagtatctgaagtcactccaaatgcaagttcagatcatgtggatgactactgggatggcaccaatgatgttccctggtgctcaccagttcatgccaccaatggccgtgggcatgaattctgcgtgcatgcctgcggcacaaggcctaagtcacatgtcaagattgccatacatgaaccattctatgccaaatcacatccctctaaattcatctccagctatgaacccaatgaatgttgcaaaccagatgcagaacattcaactgagagaggcaagcaatcccttccttcacccagatggctggcaaacagtgccaccacaggtatcaggaccatatgcttctgggcctcaagtagcacagcaaaaccagataccgaaagcgtcagctagcactgttctgccaaattctggggctgaacaaccaccaacctctgatggaatttagaatgaccagaaacatgataaggaattcaatgtaggctttgcacaaagggtcgtctttctggagatagctgaaaatattgacatgatgaacagattgcatccatattgctgttatgtatctcaatcagtatctgtctgacataaatgctacaagtgtctgtaaatgcacatagcatttccccccttccctaagatgctaattcccagtgtatgtactaataatccttataatatgaagtgccagtggcaatctttgcccttctttaaaaac

SEQ ID NO: 8290 - DNA, 1729 bp, Oryza sativa
  ref <308>: DATABASE ACCESSION NUMBER: AK105638
  ref <309>: DATABASE ENTRY DATE: 2002-08-28
acatctccaaacttccaatttctctctccacatctctctgtgtttcttttatttctcctctgctcgcggcgatggcggcggcgaacggcggcgacagcaaggggttcgaggtgccgaagctggagatcaagttcaccaagctcttcatcaatggccgcttcgtcgacgccgtctccggcaagacattcgaaacccgtgacccgcgcaccggcgaggtcatcgccaagatcgccgaaggagacaaggccgacatcgacctcgccgtgaaggccgccagggaggccttcgaccatggcccctggccaagaatgtccggctttgcgaggggaaggatcctgcacaagttcgcggacctggtggagcagcacgtggaggagctggcggcgctggacacggtggacgccggcaagctgttcgcgatggggaagctcgtcgacatccccggcggcgcgaacctgctccggtactacgccggcgcggcggacaaggtgcacggcgagacgctcaagatggcgcggccgtgccacgggtacacgctcaaggagcccgtcggcgtcgtcggccacatcgtgccgtggaactaccccaccaccatgttcttcttcaaggccagcccggcgctcgccgccggctgcaccatggtcgtcaagcccgccgagcagacccccctctccgcgctcttctacgcccacctcgccaagcttgccggcgtccccgacggcgtgctcaacgtcgtccccggcttcggccccaccgccggcgccgctatctcctcccacatggacattgacaaggtgagcttcaccggctcgacggaggtcggccggctggtgatggaggcggcggcgaagagcaacctgaagcccgtctcgctcgagctgggtggcaagtctccggtcatcgtgttcgacgacgccgacctcgacacggccgtgaacctggtccacatggcctcctacaccaacaagggtgagatctgcgtcgccggctcgcgaatctatgtccaggaggggatctacgatgcgttcgtgaagaaggcgaccgagatggccaagaaatcggtggtcggagatccgttcaacccgcgagttcatcaaggccctcagattgacaaggagcaatacgagaagatcctcaagtacatcgacatcggtaagcgcgaaggcgcgacgttggtcaccggagggaagccctgcggcgaaaacgggtactacatcgagcccaccatcttcacggacgtcaaggaagaaatgtcgatcgcgcaagaggaaaccttcgggccggtgatggccctcatgaaattcaagacggttgaggaggcgatccagaaggcgaacagcacccggtacggcctggctgccggcatagtcaccaagaacatcgacgtcgcgaacacggtttcgcggtcgatccgggcaggggcaatctggatcaattgctacctcggcttcgaccccgacgtgccgttcggggggtacaagatgagcggcttcggcaaggacatgggcatggacgcccttgagaagtacctccacaccaaggcggtggtcacccctctctacaacaccccttggctatgatctgatgatgaacagcacagaaagattaattacagtggaaaaaaataacatttctatatatacagctgaaaggttgggttatatttgtggttagttgattgcttgtatcaaatatcaatttgtcggaataaagacagtatatttcagtt

SEQ ID NO: 8291 - DNA, 2027 bp, Oryza sativa
  ref <308>: DATABASE ACCESSION NUMBER: AK105639
  ref <309>: DATABASE ENTRY DATE: 2002-08-28
cgtgtattagagatatgcttcagctcgatccttctattctgatatgattgcatttgattttcctgacagatgtccgagttacttaatcagaaatcttcagtccaagggaaggtgccttcaggctattttaacactcttttcgatttaagtggagcttggatgacagatgctaaagagactaaacatctagcatttgatggatatttcacctcgttgtacaagttgcacctaaaaacttctccattggttcttcgagatgaagttagaagtgctgttccaccgaaatgggaccctgcagcactatcacggtttatcaaaacttatgggacacacataattgttgaaatggcagttgggggtcaggatgtcatttgtgttaagcaaagtccttcttcaaccatttcatcagcggacctaaagctacacctggaagatcttggtgatttcctgttttctgatgggaggaatcattccccgatacatcgcaagaccagggatggcaagagcaaggtgcctgatgtttttgtcaggatggaacagcagcctaataacctacatctttctagctactcagaatcatcaaccaaagatggcctgacaattacatgctcgaaaagaggtggagatgcctctatagccagccattccaaatggttacaaaccgttccaagggttcctgatgctataatgtttaaatttgttcctatcacctctcttcttaccggcattcctggtagtggttacctcagccatgccattaatttgtatcttcgctataaacctgatcctgaagacttgcaacatttcttggagtttcaagtgcccctacaatgggcgcctttgttcaacgagcttatccttgggcctcaaaagagaaaaggctcctatccttcattgcagttcagatttcttggtcccaaacttcaagttagcacttctcaggtatctagttctcataagcctgtagtaggcttacggttatacctggaggggaggaagtgcaaccggctggccatccacgtccagcacctgtccagcgcccccagcatgctcggggactcgctgtcgtcgtccatgtcggagtggcgcgagtcggaggaggtgggcgccgggtacatcgagcccatccagtggaagagctactcctgcgtctgcacgtccaaggtggactacaacccggagtggctcaagcgcgtccccggcggccgcggcgtgttcgtcgtcaccggcgcgcagctggtgaccaaggggacgtggtcgaggaaggtgctccacctccggctgcactacacgcacgtccccgggtgcgccatccagcgcacggagtgggcggcggcgcccgcggcgtcgcagcgggggagcttcctgacgacgatcagcacgacgctgagctcgccgttcacgcagctgcaggccgccgccgcgccggcggcgccgccgaggaacgagccggcgcccgcggcgctgctcaactccggcgtgtacccggacggtccgcccgtgccgctccagtcgaggaagctgctcaagttcgtcgacatgtcggaggtggtgaagggcccccacgacgtgccggggcactggctggtcaccgccgccaagctcgtcaaggacggcggcaagatcgggctcaacgtcaagttcgcgctgctcaactacgacggcacgcagccggcgacggcgacgatggccggtggtgatcaagggcatgggctgctgaattgagattttcgccgtttgtttgtacatatcacagcagttcatcacagctttgctggtctttgttaggtttcatcgatcaggattttggtttgggacttgggagcagataggattaagagaatgaatttgttacagattttttttactttttgggcgtataggaagtgtatagaacaggagatccaggacatacaaacaaaaaaaaccatcgagcagtgtgttggcaatgctccaatttatcttcttttcttgctgtgtaattagagtcttttgcgtgtaaattattatgagttttgtttgcctgt

SEQ ID NO: 8292 - DNA, 2248 bp, Oryza sativa
  ref <308>: DATABASE ACCESSION NUMBER: AK105640
  ref <309>: DATABASE ENTRY DATE: 2002-08-28
tatggctaaatgcaaataaggcagctttaggcgatgctggcgaggtagcttacctgcaatgacgactaggaacatactttgctatattcatgggctacaagatcctcctctagtcctcggttgctctgaaatgctcgtattggtgtgcccttttctgaacagacactgataaccatgatttccaaagaatatatatgttatcaaatgagaatagaaagcatataccagcataatcttatgccttcatctagctagccagggttgtttggaagacaaatgcgcatctctatccagaacaccacaacttgaatagaccatttctgctctctgttgctatcattatgacttgctaattttttcagctctataaacacttggctaaacgaatttctattcttagttatggcctgccattttgataggcccagttttgtggttttgtcaactctgtaacatctttgtctgactggcgtttgtttgtttgcttgcttgcttgcttctttttcttttcgagatgctgactggcctttctgaattttcagtttcagatggaggatttgcaaagggtagcattgaccttggtggtctagaggtgcgccaagtcaccacgtttgccaaggtctggtccaccggccaagacggcggcggcgccaccttcttcaggccggagcaggtccccgccggcttcagcgccctcggccactacgcgcagcgcaacgaccggccgctcttcggccacgtcctcgtcgcccgcgacgtctccggcggcgggctccttgccccgccgctggactacgcgcccgtctggtccagccaggacgacgccgcccacttctggctccccacgcctcccgatggctacagggcgatcggcgtcgcggtcacggcctcgccggacaagccgccgcgcgacgaggtcgcgtgcgtccgcgccgacttcaccgacgcgtgcgaggcggaggcgacggtgtgggacaaggacgggttcagcgtcgtcgccctgaggccggcggttcgcggcgtggacgcccgcggcgtgcacgccggcacgttcgtcctcgccaggagcgacgcgacggcggcgagcgcgtcggcgctggcgtgcctcaagaacaacggcgcggcgtacacgtcctgcatgcccgacctcgcccaggtgaacgcgctcctcgccgcctacgcgccgcagctgttcctccaccccgacgagccctacctgccgtcgtcggtgacgtggttcttccagaacggcgcgctgctgtaccagaagggtagccagaccccgacgccggtcgccgccgacgggtcgaacctcccgcagggcggcggcaacgacggcgggtactggctcgacctgccggtggacaacttccagagggagcgggtcaagaagggcgacctcgccggcgcgaaggtgtacgtgcaggcgaagccgatgctgggcgcgacggcgaccgacctcgccgtgtggttcttctacccgttcaacggcccggcgagggcgaaggtggggcccctcaccatcccgctcggcaagatcggcgagcacgtcggcgactgggagcacgtgaccctccgcgtgagcaacttctccggcgagctcctccgcatgtacttctcgcagcacagcgcgggcgcgtgggtggacgcgccgcagctcgagtacctcgacggcgggaaccggccgtcggcgtactcgtcgctgcacgggcacgcgctgtacccgagggcagggctggtgctgcagggcgacgcgaggctgggcgtcgggatacgcaacgactgcgacagggggagcaggctggacaccggcggcgccgggcggtgcgaggtggtgtcggcggagtacctcggcggcggcggcggcggcgtggccgagccgacgtggctgctgttcgaccgggagtgggggccgagggaggagtacgacatcggccgcgagatcaaccgcgtggcgaagctgctgccgcggtcgacgagggagcggctgcggaagctcgtcgagagcgtcttcgtcggcgagggcccgacggggccgaggatgaagggcagctggagaaacgacgagagggaggccaagtaaaaattttggcggttctcaaatttcagacgacgacacgcggtgatgacgagtgaaaagtttattatatggggtttctcaaattcaaatcagattgttacggagcaattctgaaaaacgatgacagagtgcatggtgaaatatattcttttaagataagatttaatc

SEQ ID NO: 8293 - DNA, 1688 bp, Oryza sativa
  ref <308>: DATABASE ACCESSION NUMBER: AK105641
  ref <309>: DATABASE ENTRY DATE: 2002-08-28
aagttttttcccaattttctctgtctcattctcctcaaacacagtcttagacgagtgaagccccaagaagacgaagatgaagaagaaggtgtgcgtggttggcggcgggctggtgggattggcggcggcacgggagctgcagcgggagggccatgacgtctcggtgctcgagcagcgtggcggcgtcggcgggcagtggctgtacgaccacacggcggcgatcgacggcgccgacccgctcggcgtcgccggcgtgcagagcagcgtctacgcctcgctccgcctcatcaccccgagggaggtgaccgggttctccgacttccccttcagccccaccaccgtcgccggcggcggcgacgcgcggcggttcccctcccacgccgagttcctcaggtacctcagggacttctgcgacgcgttcgggctcatggacgtcgtcaggctcaacaccagggtcctgcgcgtcgccgccgaccgcgacgggtgggcggtgcggagcaggcgcggcgaggtggagacggaggaggtgttcgacgccgtcgtcgtggccgtcggcagctacacccagccaaggctcccgagcatcgacgggatggaggcgtggccggggcggcagctgcacagccactcgtaccgcgtcccggactcgttccgcggcgaggtggtcgtggtcgttggctgcggcttcagcggcaaggacattgccctggagctccgccgcgtcgccagggaggtgcacctcagcgtcaggtcgacggaggaggccatggcctcgccggcgatgtccaagatgctcgccaggtacggcaacctccacctgcgcccgcagatcgcgcggctgtgcgaggaggaggacggcgcggtcgtcgcgttcgccgacggctcgcgcgtcgccgccgacaccgtcgtctactgcaccgggtactcctactcctacccgttcctggacaccggcggcaaggtcaccgtcgacgacgacaaccgcgtcggcccgctgttcgagcacgtgttcccgccggagctcgcgccgtcgctctccttcctgggcatcccgaacatggtgacgacgaggttcttcgaggcgcaggcgaggtgggtggcgcaggtgctgtccgggaggagggcgctgccgccggcgggggacatgctccgcgccgccgaggagcacgcccgcgccatggacgccgccggcgtggcgaggcggcgcgcgcacgacgtgcccgacctgggcgaggagttctgcgagcgcagctgcggcttcccgcggctggaggagtgggagaaggagctcatatggacgtccatcaccgccatgcgcgacgacctcgagtccttccgcgacgacttccgcgtcaccgacctcgtcgccgacggcctgcgccgccacggctggatcctggcgccggcgccggagccggagccactgcgccaggaggacgtcgtcgccggcgacggcgagggagaaggcgtgcagccggtgcaggccaatcaggcggccgtggcctctccactgggctttatcaattcagcgtaatactccactgtgtattgctcgctcggctcgtaaatatttcgcggtttggataaaatttggtcaaatttaactttccaaacatttgttgtataatttctcaaatccttagtttaaaacaattcgtagtttgatattcatgagtatattcgtgttc

SEQ ID NO: 8294 - DNA, 2025 bp, Oryza sativa
  ref <308>: DATABASE ACCESSION NUMBER: AK105642
  ref <309>: DATABASE ENTRY DATE: 2002-08-28
acacacactgcccgccactgcctcctcaccatcctatctcgtctcgtctccttctcatccaatctcaatctcaccaacccgacctacagtagcagaatccattataattccgcagtaatccgcacggctccaactctcgatcgcgagctgttgttgttttggtggaagaatcggtccgtgcgtgatttgatccatggcggtgtcgtcgtcgtcgctgctgctccgccgcggagccaccggcggcgccgggagacggtggggtccgggggaggcgttgcggaggctggtgtcgtcgtcggaggcggcgccggcggagaaggttccggcgcggtcgccgccggtgatgccgccgttcgagcaccggcccaggccgtacgccgggtggagcggcgatgagatcctcgcgaagaggaagcagtttcttggatcgtctgtgttctactactaccagaagccgctgaacattgtggaagggaagatgcagtatctgtacgatgagaatgggaagagatacctcgattgcttcggaggcatcgtgacagtttcatgcggccattgccatccggatatcgtgaacgctgtggtggagcagaccaagctgctccagcacacgaccaccatatatttgaatcaacccatcgtcgagtttgcagaagcgctcgcgtccaagatgccaggaaatctcaaggtggtgtattttgtgaattctgggactgaagcgaatgaactggcgatgctgatggctcggctgtacagtggggatctcaatatgattgcattgagaaatgcttatcatggtggtagtgctggaacaataggattgacgggtttgcagacgtggaagtacccaatccctcagggcgaaatacatcatgtcatgaaccctgatccttaccgtggaactttcggttctgatgctgtagcttatgccaaggaagtcgaagaacaaataaattatggtacctccggaagggttgcgggtttcattgctgaaactttccaaggcgtgggaggtgcagttgaactagctcctggatatttaaagttagcttatgacactgtccggaaggctggtggtgtttgtatagctgatgaagtccagagtggatttggtcgaactggaagtcactattggggatttcagacgcaagatgttattcctgacattgtaacaatggcaaagggaattggaaatggtctaccattgggggcagttgtaacaacacccgagattgcaaatgtgctggcgcaaaaaatccaatttaacacatttggtggaaaccctgtttgctccgttggtggacttgctgtgctcaaggttcttgacaaggagaaacgccaggcacattgtgctgatgttggatctcatttggtgaatcgtctaaaagagctccagcaaaagcatgaaatcattggagatgttagagggaggggattgatgcttggggtggagcttgttaccgataggaaggagaagacacctgccaaggccgagaccaatttattgtttgagaaactcaaggatctcaacattttagttggaaaaggtggtctgcatggtaatgtcttcaggataaaaccaccaatgtgctttacaagggatgatgcagattacctggtggatgccatggactatgcaatgtcagggctctgagagctgcaccctgaataccaaagccgtctgccatcctcaacgcaagaagattcatgtcatgatgctaccggtagcccagccaactctttccatgtacatgcttccagttccagttgatgtgttgtgtaacggtggcagaaccatgtaggtgtggaaatcccaagaataagatggaaggaaaggaccatgtaggtgtggctttcccattgtaaaagtggcagttctgcaacagtgagaaggccatgggtgattgtaagcagtgttggccttaggggcaacatgtgtatccaaaagaaaaactaataaatgtatgcttgttgtgcaccaagatatatgcttgctgtgcaccaagatatggttttgcagactgc

SEQ ID NO: 8295 - DNA, 1731 bp, Oryza sativa
  ref <308>: DATABASE ACCESSION NUMBER: AK105643
  ref <309>: DATABASE ENTRY DATE: 2002-08-28
gaagagataagtcgagagaaccctgcgccgtcgccgacgatggggctcgccggcggggcgcgcgtggtgctcttcgtcgtggcggcggcggcggctgcggctctgactgccgccgccgatcagatcttcaccagttcaggtgcgccgtttgggcggaattcgcgtgagccgaggtaccatgttgagttccatcctgtcgatgcgccatttaatccagagaatggccaggaatctgtaccaatgactagccacgtggggaaacattatacatgcttcctacctgttgaggaaacaaaaaccatgaagtcgataatcccacaaaacgcaaccaatgttatcatagaaagtgaacggagagttaagccaaaggatccagatgaattgctggaaattctcaaggatcagtgcttctacaggcatgaaggttggtggtcttatgaattttgctactacgggaaaatccgacaagtccacgtagagggcgagaaggtaagctgccccatcctgtttattttctttgctcagatcagtcattgtattttatcctctttatgcactatctaaaaaatatctgagatgcgtcaatccaagagttgctagtttttacaggagagacaagttctggccacagttacacactacattatgaaaaataaaatattttatctttgacaataaatgcagccgacagtttctagagcacttgaattgccacgtaaagtttgtgttgtttgcaggttattcaagaatatgttctgggtgaatatgatgctgatgcaactgatgcttactatgaaaatcaaacatctgactctgctgatgaaggtgataacctgatagacacctctaagaggtatcatgtccacctgtacacaaatgggactgtctgcgatctcactgatatgccccgggaaacagaggttagatttgtatgttcagaacccactgtagtgattagttcaattaaggagatctcttcctgcaaatatgttttaacagttcaaagcccaatgctttgcaagaatccgctatttcagcaagaaaaacgtaccctctccattcactgcaacgagttgctagctgaagctgaagccactgtggatgatgactctcttccaaaagaagctcagatcatcatcccagatccagatggattgcataattatgcagcttatgctacttgattatgcatcattgttatagcatcagacagtgaagaaaatcatcttccgggtgcaacggcaatttggcgatgctaacaatggtataggttgttcgcggagcatattatccattcatgtgaagcaggtttgagatcatcagactaacattgatcatgaggaacattacgggcgatgagtgcttctgtactagtgcaaacgaagtactaaatttcagtgtcaaactgtagacagtaacattttcttgatatatgtttatagaagaaaatcttgtgatgcggaaaagtgcatgtgcaaacatcgtttcattgcgagattatggtattgctctgaagtgaagaaatatcatgtgcattgagagcaaaggtgttcccttttttcttgagtgcagatgacggcaagtcggcaacacaagacaggggatttgcttaatgtaagatgttcatactaagtcaagggatttgctttaatgttaagttgtcacactaagccaaaaagcatgtactccaatttcaatgctatgataaagagcaaatttgcttttgcgatt

SEQ ID NO: 8296 - DNA, 1573 bp, Oryza sativa
  ref <308>: DATABASE ACCESSION NUMBER: AK105644
  ref <309>: DATABASE ENTRY DATE: 2002-08-28
agctgtttgccccgtccactgacctctctctctgctctccgcctctcacctccgtcctccaaaggacgaatcggcactctgcccagttcatctccacgatcactgctcgattctcgaagcaggggaggccattgccaccgaccaacaaaagttgaaggggtacacacatctgcatgcaatttctgtcctctggttgctagctgccgcttctttcaagtttcaacactccttgcaaccctccactcgtaggatcatctccatttccaatcctccttcagttttgtaaataatgaagaggcccaccagcagcagccgaaaatccaaaaaacaaggagaggacctggcgttctctgaggagggcagcttgcccgcggtgaccatggagcagaaagatgaagccgagatggaggaggtggacgaggaggaggaggaggaggtcgacgaagacatggccggcgggcacgcggcgcagtcgccgtcgccgtcgtgcgggctgggcgagaagaagcggcggctggcgctggagcaggtgcgcgctctggagcggagcttcgacacggacaacaagctggacccggaccgcaaggcccgcatcgcgcgcgacctcggcctgcagccgcgccaggtcgccgtctggttccagaaccgccgcgcccggtggaagacgaagcagctcgagcgcgacttcgccgccctccgcgcccgccacgacgccctccgcgccgactgcgacgccctgcgccgcgacaaggacgccctcgccgccgagattcgggagctgagggagaagctgcccaccaagccggcggacacggcggcatcggtgaaggtagaagccggcaatgacgcggcggccggcgccgcggccgccacggtgtgcaaggacggctcgtcggacgacagcgactccagcgtggtgttcaacgacgaggcgtcgccgtactccggcgcggccttcattggattcggcccgtcgttcttggtcgacgacgcgtcggcggcaaccgtgggctgctcgtcgtcgctccccgcgctcgagtccaaatggcacggtccgtactccgacgactcgtgcaaaggcggcgtctatggcttcacggaggaatggctcgctgcctgctccggcgagatggccggcaacgacgccgccggcttcttctccgacgagcacgcctccaacctcaacttcggttggtgcgcgagtggtaacgagggttgggaatgagattttgatctccacggttagtgtaaaaaatggcagggttagtagcactgtgcataaccgcattggcgcattgcatgcttggatggagcacgtacttttagtttttttactgtactcatttactaccgcctttggctacctggcgtgcttactgctagtactgtagcaaagtagcaagaagtggaacgagcctagaggacgaaattgatatagggtaattaacgaaggatcaaggatgtaaattttaagccgccaaggggtcgaagaaggatagcacaggacagcaaagcatagctgtctgcgttttactacctgtggtatatatatcatactagtatattataaagc

SEQ ID NO: 8297 - DNA, 1475 bp, Oryza sativa
  ref <308>: DATABASE ACCESSION NUMBER: AK105645
  ref <309>: DATABASE ENTRY DATE: 2002-08-28
tggggagagagcaggagccatgtcggagtcggaggtgtcggtgatcaaccagctggaggaggaggagactcggctggagctgccgccggggttccggttccaccccaccgacgaggaggtggtgacccactacctcacccgcaaggcccaggaccggagcttctcctgcgtcgtcatcgccgacgtgaacctcaacaactgcgagccatgggacctcccaagcaaggcgaagatgggggagaaggagtggttcttcttctgccacaaggaccgcaagtacccgacggggatgaggacgaaccgggcgacggccagcgggtactggaaggccaccgggaaggacaaggagatcttccgcggccgcggcctcctcgtcggcatgaagaagacgctcgtcttctacatgggccgcgccccccgcggcgagaagaccccctgggtcatgcacgaataccgcctcgacggcaagcttccccccaacctcccccgctccgcaaaggaggaatgggcggtttgccgggtgttcaacaaagacttggcggcaaagattgcccaaatgccgccgcctcccttcccgcgcaacgactccttcgacctcgacctcgacgacttcctccacctcgacgccgacctgccgccgctcatcgacgaccccttcgcctccacctccacgctcaagacggagccacctccgccggccaacctgatgcacaaccactacggctacttctccctcccggcgtcagcgaccaattataaccacagctccggcgccatggcggaccaggcgattcggaggttctgcaaggcggaggcgtcgacggcgtgcttctccggcgccgacgctgacgtggatccggtggtggacgagctgctctccttcccggactccatcacggactactcctacatatggaaggcctgaccagattaatttcgtggttaatttgctatgatcgatcagattaatcctgtttaattagttggtttattaacttgattactgtcaaaggtttgggttaactaggagatgatgatgatggagtttgtggtgatgcgagagagagagagattaggtcgcgctgatctggtctgatcaaggtgtgcagagcagatggagcggactaattcattaattagcttaatcaaattagttatataggtttgtttgtcttaattctgtatgtatatagttatctgattggggataatacatagagattactagctagctagctagtttggtgattaggggggtgatgagctagctagagagagatatctcatcaaaattaaggtctcggttggttgattaatctgcagattatatattgccttgtgtgtgataggccatgtggcctctttctgtgtatgtgtgtgtgtggatggaaggagtaaattaactaaaccccttgtacatgtaccatcagttgtgctttacttacatgatcaattcaaccattgatcgattaacc

SEQ ID NO: 8298 - DNA, 1777 bp, Oryza sativa
  ref <308>: DATABASE ACCESSION NUMBER: AK105646
  ref <309>: DATABASE ENTRY DATE: 2002-08-28
ggacatcgcatcgcgtgtatacttaccaattaccgtacccgcggccggtaccgctcgtcctcggccgcgaccgcgcgccatggcgcgtgcgcgtgcgtctgccatgggcgccgctcctcctccgcacctgcgtagccatgacctcgttgtcgtcgtcgccgtcgccgcggcggcgctatgtctcgcgtgccgaggtgcgtcggcgggcggcggcggcggcgtcgacgtgctcgatcgggcgaggcggccggagttcgcggcgtggatggcgggcgtcaggtgggccatccacgagcggccagagctggcgttcgaggagatcgagaccagcaggctggtgagggcggagctcgacgccatgggcgtcgcgtacaggcacccggtcgccggcacgggcgtcgtcgcgaccgtaggcaccgggcgcccgccgttcgtcgcgctgcgcgccgacatggatgcactcccgatgcaggaggaggtgcagtgggagcacaagagtaaggtggccatgaagatgcacgcctgcggccacgacgcacacaccaccatgctcctcggcgccgccaggatcctccaggagcgacgccatgagctgcagggtacggtggtcctcctcttccagccgggggaggaggtgggcaccggggccaggaggatggtggaagccggcgccgtggacaacgtggaggccatcttcgggttccacgtcagcgtggagctccccaccggcgtggtgggatcacggcccggcccgctgctcgccggctgcggcttcttcgaggcggtgatcaccgggaagggcggccacgccgcacacccccacgccagcgtcgaccccatcttggccgcttccaccgtcgtcctcgccctgcagggcctcgtctcgcgggaggccgacccgctggaggcccaggtggtgacggtgacgaggttcctcgccggcgacgcgctcaacgtgatcccggagtcgatcacgatcggcggcacgttccgggtgttctcgaacgagggcttcttgcggctgaagcggtggatcgaggaggtgatcgtggcgcagtcggcggtgtaccggtgcgccgcggcggtggacttccacgcggggggcaggccgctgctgcccccgaccatcaacagcgcggcgctgcacgcgcacttccaggccgtcgcggcggagacgctcggcgcctcggccgcggtcctcggcgcgatggagccgtgcatggggagcgaggacttcgccgtcttctccgaggccgtgccggcgtcccacttctacttcgtcggggtgcgcaacgaggcggaggggctggtgcacctcgcgcactcgccgcacttccgcgtcgacgacgccgcgctcccgtacggcgcggcgttgcacgccagcctcgccatgaggtacctggacgaacgccggcgcgagggcggctcgcaccctcacgaggaactctagtttcgtccagtcgctgcatctgccttgcatccgacttggcgacgtcgagtcgccacggcgccggcggcgtctctgttcagcccacgcgcacggcggttcgcggagctcaagatggtcgaggttaggtatccgcggcggattttgtcatcgacgattacactgtaaggaattctgggctcgaccttggcattctgacgaaaacctaggtaggaatgtagaatgggcgattgcatgttcgatgcggcgccagcggcccagcgcggtgcaaattgtaaagctgataagctgcacgcacgcagaaattatctgagaagaagagttcaggcg

SEQ ID NO: 8299 - DNA, 4917 bp, Oryza sativa
  ref <308>: DATABASE ACCESSION NUMBER: AK105647
  ref <309>: DATABASE ENTRY DATE: 2002-08-28
acgagggtgtgaagtgtgaacagcaccaccgaccgaagcaacgggcaggggaagggctgggccgccgtgtaggctaagcaaacgccgcccccttcgactcgactcccccgaccccgccgccctagcgccgccggagacggcggagatggaggaggaggagcagcccggggccggcgcgccggcgccggagcccttgccgtcgcagctagatattttgaagaacaccattcagtcattacgtgatagcaacagacacgactttgatgcttgggtgtcattaatcaaagctgctggagaaacttcaatgtatgcagcccacaaagcacgactatgcacaaacaaacaggtggaggaggtgtatgaacaagcagtccaagcagtgcctcactctattgatctttgggtcagttattgtggatttgctatgtgcacatatgaagagcctgctcatattagaagattattcgaaagggctttatcccttgttgggaaggattatttgtgctatcacctatgggacaagtacatagaatttgaaaaatctcaaaagcagttaattcagcttgctacaatttatattgacaccctaaaatttcctacaaagaagttgcgtcggtactatgagagcttcagaaagttggtaactttgatggaacatgaggctgctggtgctgaaaggtcatcagaaaacttgcgtactttggaagtgataaaggctgaggattctgaagtggatgcttcaattaagatttctgccttacttgatgaacatagtgggcaccttagggctgatgcagtcaagcagtacttactttctggggaaagtctctaccaaaggtccagtaaaatcgataaagaaatctcttgcttcgaggcatccataaagagaccattttttcatgtcaagccacttgatgatgaccagcttgaaaactggcaccggtatcttgactttgttgagaagaagggcgattttgactgggctgtaaaactttatgagaggtgtttgattccttgtgctaattattctgaattttggatccgctatgcggaatttgtggatgctaagggtggccgagagattgcaagctatgctcttggtcgagcgtcatcatattttgtgaagggagtcccgacattccacatgtattatgcgatgtttaaagagcaaattggtgatgcacaaggtgctcgttctctttttattgaaggaagcaataatctcacttcgaatttctgtgcgaacattaataggctggcaaacatggagaaacgcatgggaaatactaaagcagcttctgaaatatatgagactgcaattcaggatgccatgcagaagaacgttaaaattcttccagacttgtacacaaattttgcacaattcaaatatgcggtaaatcataacattagtgaagctaaagaagtatttgttgaggggataaaacaagcaccctgtaaagctttgatcaagggattcatgcagttcatgagtacacatggaggacccacagaaattcctatacttgattctgttatttctaatgctgtagttcctggatctgatatatcaacagttttaagtcgtgaagaccgtgaagatatttcattgctatttttggagtttgttgacctttacggggatgttagagatctcagaaaggcatgggctcggcacagtaaactattccctcacaacacaaggcacatgttgcagcagtattgtaacagtgagaatagcctgcaagagaataacaagaggagaagaactgaaaattatattgtttctcaagatgattctccaaaagacgcaataacattgaaacagttgtccaaaagtgatacttctctgctagttgataaagtggttgggttgcaagtggacaagagcactgtggattcaggaataggacatacagtagaagagcagaacatattagggaatgttgatgtgcatcatgaggttggtgatacagctcaggaatgcattgacatgactgatagtcaacataacttggacaaatctggaatgcaaaaccaagtgagtgcacacggtactcatgagtcatgcgaacaaaatgatcagacaacagaatctcatccatctgtatgtgagaatgctccacatgcagaatcatttacttgtgattctccttccaaatctaattctttctccaagataagtgctctagacaaagctaacaccattgatgtatctgctagtgttgatcaaggagcaatatgcccaagatctgattctccatctgtggcaagcttacccaaggaagaaacttctcctgatccagttcgaatatctcctgagttggaggaaaagaagcatgataaaatccagggacaactggaaacaaaggatgatatgtctctcagtaacgcaaatatagagaagtctagtgatagtccagatgcaactcaacatgatagggaagtatctgcactcagtcaagagcatgttcaatctgcacagccacaacagctgccagactgtgcaagaccatccagctcagaaatggcaactacaccagctaccacatcttcccaattttcacctagcaccgcagtgacatctcaagctcaacttcagcaccagattgttagttctcaaatgcaccaatccgacaagctttctttggctgaacaaaatacgcagcagcaagggcttgcttatgaaattcctcagaatgtccaggcatcctcgcagagtcaagctcaaatctttgcacagcctaaccagggagaccagcaaagcctccaaacgatgcaggggtatgcatctcagatgtggcaatactaccagcaacagatgtactacctgcaggcccagcacaatcagcagttgcagagcctgcaacagcagcagcttccaactgagcatctccagcaaaattttatgcagcaggtacaacagctgaaccaacagatggtactttggcagcaacaagtacagcagcagcagcagcagcagcagcagcagcagcaacaacagcaacaactacagctacaacagcatgcactgccagttcagcagcagcctgaccaaaaatacagtcagttaccttcctcgggggatactagacatgaacaaaataaaccgcagaaacttgaatctcaaatggatcatcaaagcgaacttgtgcagcagcagcaagtttatttccagcaacagcagcaaatgtatcttatgcagcagcagcagatgtatcaacagcagcaacagctgcagcagcagctacttcaacagcaattattgcagcaacaacagtatctctcgcagatgccacagcagcaacaaaacatgacacagcaacagcagctatttcaacagcaacagcagcaactatttcagcagcaacagcagcaaatggtagttttgcagcagcagcagcagcaacagtttatccaacagcagatgcagcaataccttcaacagcaaacaaaccaacaaggggccaattctcagagttgtgaattaaatcctcaggatgcaaggaacatgaagatggagcatggtcaacaatccgaagcatcacagggtgatggctctaagttacggagtggcgaacaatctgaattatcctatccgtccaccccacaatctcagcactcaaatcgctaattcatgttgtattgcccatgtgcattgttagcaaaggatccgtgaaattccaattaatggtctcggtgccattggatgcatttatccatcaaaatatctcaggaaagggatgttcacgtgttccatgggatgacactggagcagtactgtcagaacagcgatgctcgcacctccatgtaacagatctgaagttcggtgttatctataatgcaatcatgctttttctgtcagcaagtgacatgggctgcggcaagctaatgttctttatctggctaccttgatacgctcgtcaacaagggacttggactttggcaagctatcttgtgctgaatagagggcgtctttggtatgccgaagaacttgattaccgtcacctggtcaagcattcaaatgcgtatcttcattcactgaaaatcgtgagttcaagcagggatatctgaaaagttatgctgtaatgtgatgccttctaccaggtcatcagtatggatatatagtgtatgtacggtatcgcatccacaagatttggaaatatcgcagcagcagcagtatctgcaaccaaggtaatacaaaatgtatacaccaactggaaaatgtgcactactgcccttaacctgatgttacgtagttagaagttagggggccaacctgttgtgcccctggcatgcaaagttccatccacgtctgaacattgcatcgtatgataatgctattggcgttccccggtgatctgagagattgaaatcagatatttttgttgagccggtagtactttcagcgtggtcatttcagcatcgcacgattattaacatatcactatatcagatgctccgtctcaatgtatcgggtggtttgtgcagcatttcagttaagtcagtgttgtaaatggttatcaggtgacaaagataaaaggagatgatcattgcagtaaacatatggcatgcagcaggggagcagtagctgggagctgatcattgcagtaaacatatggcatgcagcaggggagcagtagctgggagctgtgtatttgccgacggagaaattcacgtcggcattggtagcacaaatctgagttaacaatgtgtttggaaagtgaatcccaagttgtgtgttctcaatgaaagcctgatttatgaacgatacagacatggcatccgtttttcaggataggtgtttggtcccagtgttatttgcttggttctcatggctattttactttcgcttaagaacataataattgtaaactgaatttcaatttgaagatctgaacagacctattcttggtgctt

SEQ ID NO: 8300 - DNA, 2166 bp, Oryza sativa
  ref <308>: DATABASE ACCESSION NUMBER: AK105648
  ref <309>: DATABASE ENTRY DATE: 2002-08-28
gtggaaaaaaagcctatcgcaatggagtccatcgccgccgccacgttcacgccctcgcgcctcgccgcccgccccgccactccggcggcggcggcggccccggttagagcgagggcggcggtagcggcaggagggaggaggaggacgagtaggcgcggcggcgtgaggtgctccgcggggaagccagaggcaagcgcggtgatcaacgggagcgcggcggcgcgggcggcggaggaggacaggaggcgcttcttcgaggcggcggagcgtgggagcgggaagggcaacctggtgcccatgtgggagtgcatcgtctccgaccacctcacccccgtgctcgcctaccgctgcctcgtccccgaggacaacatggagacgcccagcttcctcttcgagtccgtcgagcaggggcccgagggcaccaccaacgtcggtcgctatagcatggtgggagcccacccagtgatggaggtcgtggcaaaggagcacaaggtcacaatcatggaccacgagaagggcaaggtgacggagcaggtcgtggatgatcctatgcagatccccaggagcatgatggaaggatggcacccgcagcagatcgatcagctccccgattccttcaccggtggatgggtcgggttcttttcctatgatacagtccgttatgttgaaaagaagaagctgcccttctccggtgctccccaggaggataggaaccttcctgatgttcaccttgggctttatgatgatgttctcgtcttcgacaatgtcgagaagaaagtatatgtcatccattgggtaaatcttgatcggcatgcaaccaccgaggatgcattccaagatggcaagtcccggctgaacctgttgctatctaaagtgcacaattcaaatgtacccaagctttctccaggatttgtaaagttacacactcggcagtttggtacacctttgaacaaatcaaccatgacaagtgatgagtacaagaatgctgttatgcaggctaaggagcatattatggctggtgatattttccagattgttttaagccagaggtttgagaggcgaacatacgccaatccatttgaagtctatcgagctttacgaattgtgaacccaagtccatacatggcatatgtacaggcaagaggctgtgtcctggtagcatctagtccagaaattcttactcgtgtgaggaagggtaaaattattaaccgtccacttgctgggactgttcgaaggggcaagacagagaaggaagatgaaatgcaagagcaacagctactaagtgatgaaaaacagtgtgctgaacatattatgcttgtagatttgggaaggaatgatgttggaaaggtctccaaacctggatctgtgaaggtggagaaattaatgaacattgaacgctactcccatgtcatgcacatcagttccacggtgagtggagagttggatgatcatctccaaagttgggatgccctgcgagccgcgttgcctgttggaacagttagtggagcaccaaaggtgaaagccatggagctgatagacgagctagaggtcacaagacgaggaccatacagtggcggccttggagggatatcatttgacggagacatgcttatcgctcttgcactccgcaccattgtgttctcaacagcgccaagccacaacacgatgtactcatacaaagacaccgagaggcgccgggagtgggtcgctcaccttcaggctggtgctggcattgtcgctgatagcagcccagacgacgagcaacgtgaatgcgagaacaaggcagccgctctggctcgagccatcgatcttgctgaatcagctttcgtagacaaggaatagagtctctctcaagagagttgattttgttagttcttgttcatggttcttctcgctgcatgtttagcaggaaaggtatcatcagtgagttgagagaagcaataagcctatgttgtcatgtgaatcgaataaactggaggttatggtcgtgagctattattagctgtgttcattagaaaggtatatgcttttagattgttttgtttggtggaggcatgtatagtgcgctctctggctaaatcaagcaagggcttaacaggggtattgtcatcctctttggtgcacggttgtgcaagttcttctccctatcatcttcagttaatttgc

SEQ ID NO: 8301 - DNA, 1469 bp, Oryza sativa
  ref <308>: DATABASE ACCESSION NUMBER: AK105649
  ref <309>: DATABASE ENTRY DATE: 2002-08-28
gcgaactatcaatgatttggtaaagtaaggcctactgatagtctgatatcgatgcatataaaccgtatcatctctgatgtacctatacatagtcagatccaattaatactgtcgaaattttcagaaaatttcaggtaaagatcaggagaggagaaattcgccatggagttagagctggtgtatctgtatccggtgaccttggtgccggcagtcgtcggccggttcagcatccttgcctcgccgttgctgaaggaattcgaggaacacaacctgcaattcgccagcataatcccgctcttcttcttctactcctacatcagcaagttcctctccgacctgcagggtcagccactgcctctagtcaagctctatgcccgggcgctgcaccggtttaccagctgcagcagcagcaaaagccgtgctagcttgaggatctacatggacactgccgtcgtcgtggtgctgtcctacctgtctctgctcaagatcaacctgagctacatctggctcgccgtcttccccaccctcacgctcgccttcatcgccgctctgttcaacgaggagctccgcggtgacaggagagccgccgttgctgaggaagacgatgcaggaggaggaaagatcactcgctcgagctcaaggcgatggtggttgtgccctactgggtgctatgcgcgatggggcagtttcatggaggtgacagctttgcggtgtcccagtttcttctcttcctcggctccacgctgggggcgctggcgctaatggcggcgcggctgtcgcagctcgccggagcagcaccgggcttagcgccggcgtcggaacttctccgcagggccacgctcgtggtgatgctggtgacggcgcacgctgcggccgccgagctgctgggcgaggccacgatagcgctgctctgcctgccggagctcgcgccggcgctcttctggttcacccttcacctcgacggtgaaagctcgccggccgccaccatcgacggcaccaaatcgcacaggaatgtgctgtccgttctcgctgccgcagccgtcgccagtgttgcgtacctcgcggccgccatgggtgagcgtggcctgtccgtgagcaccatcacgatggtgtcttgcggcgtctcagggcttctggtccgctgcgctgtggtcgtgctcggtcagtggccggggcaagctgagacggccggtagtactgctgcctctttgatggaagttgtcctagtgctcaagttttgggggaacactttgctggcagtggcagctatgctgctgctgcttgcgttgctgactgctttccggttatgccttcaagaaccaatgttcgcgacagttgctaaatgtttcagcgactacattgacaaggtcccccaaatgacagtttagctgaaggggcacgttcatgtatttcctgtgttgacatatctgtgacttctcaagacaaacaaaaccgcatgttcataacac

SEQ ID NO: 8302 - DNA, 1746 bp, Oryza sativa
  ref <308>: DATABASE ACCESSION NUMBER: AK105650
  ref <309>: DATABASE ENTRY DATE: 2002-08-28
accccactccattctctcatctcatccgtgaccacactccactctcatccagagcaatggcgttgcaaacgcagccggtaccaaatgcgtcacctcttcatgttcttcggtccgtatgcgtcctcctcctggccgcgtcggcgacggtggcggcgcggcgccacggcccggcggcgcccatcgccgggcagagcatgtgcctggcgccgagctgccgcgcgcacacggcgtcgctgacggacttcggcggcgtgggcgacggcacgacgtcgaacacggcggctttcaagtcggcggtggaccacctgtcgcagtactccggcgagggcggcggcggggcgatgctgtacgtgccggcggggaagtggctcactgggccgttcaacctgacgagccacttcaccctgttcctccacagcgacgccgtcatcctggggtcccaggacatgggcgagtggcccatcatcgatcccctcccgtcgtacggccgcggccgcgacaaggccggcggccggtacgcgagcctgatcggcgggtccaacctgacggacgtggtgatcaccggcgcgaacgggacgatcgacgggcagggggcgatgtggtggtccaagttccattcgaacaagctcaagtacacgcgtgggtacctgatcgaggtgatgcactcggacacggtggtgatatcgaacgtgacgctggtgaactcgccggcgtggaacatccacccggtgtacagcagcaacatcgtggtgcagggggtgacgatcctggcaccgacgcactcgcccaacaccgacggcatcaacccggactcgtgctcccacgtccgcatcgaggactgctacatcgtgtccggcgacgactgcgtggcgatcaagtccgggtgggacgagtacgggatcgcgtacgggatgcccagccagcacatcgtggtgcggaggctgacgtgcgtgtcgccgacgagcgcggtgatcgcgctgggcagcgagatgtcgggcgggatcagcgacgtgcgggcggaggacataacggcggtgaactcggagtcggcggtgcggatcaagacggcggtggggcgtggggcgtacgtgcgcgacgtgttcgtccgggggatgtcgctggacaccatgaagtgggtgttctggatgacggggaactacaagtcccacccggacgacggctacgaccccaacgccatccccgtcgtggacaacatcagctaccaggacgtggtggccacgggggtgtacaaggaggccgccaggctggagggcatccagggcgcccccttccgcggcatctgcatcgccaacgtcaccgccacgctctccaagtcgcgcaagtacccgtggacctgcaccgacatcgagggggtgtccaccggcgtcacgccggcgccgtgccagccgctgcagggggcgcacgatggcgcctgcccgttccccacggacacgctgcccatcgaccagctcgtcatgcagcagtgcgcctactccgtcccggcctccatctagctgatctggctgcagcctgcagcgctgtagctgtagctgtgaccgtcgttactactacaacactagcctctgcgtgcggtcttctgaaacaaaaacaataacccagagtgacctttctgactgtgctgcttcacagcgctcgctctgcgtcatgtcagtgctgcctctccttgctctgcaattatgtaacttaaacttcagttcgtgaaatacaaatgagaaattagtcgtc

SEQ ID NO: 8303 - DNA, 1680 bp, Oryza sativa
  ref <308>: DATABASE ACCESSION NUMBER: AK105651
  ref <309>: DATABASE ENTRY DATE: 2002-08-28
aaaaaaaaggctctctcccctccggcggcgacaggacgggttctcgatcagggttgccagcgaacacgtctacgatggcggatgaaagcgagcggagcggtatggtaatcgacgacgtcggcggcggactgaatcttccaataattgttgcaggcaagcgtaagcgggagctcacatgggaagagaaggcgttgacagttcttgatattgtcgggtcccaacagcaccccgcatgccaacctgccgagcgtgattgcagcctcatagactcggagaaagattactcatctatggccggctgccaggccggagaacacgctagtatatttggcattgacaagaatggggatgattctgatgaaccgtgtgctaaggatgatgccaagcaaagtgatgtggctcctctgaaggaggaggagaattgggagctggacagtgaaccagagctcacatgggatgagagggtggttgaagttctaaacatagttcgacgccgagagatcaccgaatataaccccaagcagttttgctcaattcctactcgattttgtgcctacaacatagccttctttgacctggacaaagagtcaaagcttgcacgtggaccacctatcaagtcactagctttccccgactactggtgggagatggactctgtcaatgtgattgcaatcaaggtggccgagtctgatgtgggttaccctatcagggtatttggcactgtgctggccagggatgagtacgatttcaggtgtgtctatttgttcaggcgtgacaggaacaatccacagatcatcacctcgccggaggacacactaactctgacaggacctaatcgagcgctgggtgcaatagacaaaatgtatttcgagttcaatttgaagattagagacggtgatgtcgacaaagatttctgcaaaggtgtgcgagaacacaatgccatctgctatacaaagcagccgatgactttatcgctagagagctgcctgagtagaattgattttgtgtatagtcctgttcaattagctgtggaagcttctgttgcagtcaaaattaagggggttgtatccaagtttttcactggcaaagtgactgcttggactactggagatgatcagaacaaaatcatcctgtatgacagtgaagtggaaggcaggaacagagttcttggagctgatggatcagtcgatctgactcgctgtttcgtagccgtcaatttggatgatgaactggtgctcaatgtctgtgtttctgaaggagctggctcaatctttgagctcgttcttggacacaatgatgaagaatgtgtccttgagcaaggtccctatgaactgcaggtgaatgttgtttggacagctgccttgaagcatcgacagcgcagaaaattgtttgagcgtatcggtgacttccgcgtgttaaggtgatatgtagtatgaagatttatatgggggaagctgttacatctcaagcagttctttcttgttatatagattataatttttttgttcagctgagttgaactcgtgcttaactgaaaatctgcctgcaagacttatttagttatatgtactggtagactggtgatctataagattactgatgtctagtagggagtatggatctgtctggtagtctgtataaccttttctgaacctaccaaagtttattttgcgttcttgg

SEQ ID NO: 8304 - DNA, 2149 bp, Oryza sativa
  ref <308>: DATABASE ACCESSION NUMBER: AK105652
  ref <309>: DATABASE ENTRY DATE: 2002-08-28
attttccgtcttcttcctcctctctatctctctcctcttggatttgtcaggttctttaccacggcggtttgatcggatccccaatcctgggttccggtggctctcgagcacagcggcggtcgggaccggcgaagaagcggcttttcgctgcggagggagtgcgcagggaagaaaatcacctccactgattttatagaagacgttgaatatatagtctacaaaatgatggctgctgagttaattaagcagttttcaaacatcaccctgggagaagaacaggagttatgtgatattgagcatgcactcaaggcactgcggaagaagattcttactttggattttgaaaattccatgcgtgttcatgatccgcaaaactcatttcagtacttggaagtgctgtacaaaattcggcagctgactgaaaggttagggagcttacaccctggtggggaagccaaagagcataatgagctcatagtatatgctggcgacctttttgatatggcaatggcaaggcttgaagaggaatttgtttatcttcttacgcattacaaacaaccaatagaacaaggacttgtttctttccggtctacagaggatggcagtgtggatgatttttcaagcagctcattcaatgaggaacaatgtgacggtaagacaacacagactgaaactactggaggatcagaatattttgcgactgatttgattcaacatggtgcactctctgctgtcaagtccattgccaacttcatgtttctgagtgaatatgataaggagtgttcccaggcttacataagcacacgacagagtgcagtagatgagaaccttgggtctcttcgtattgacaagctcagcatggaagaacttttgagcaccaactggaccaagttaagttcattgataaagaggtggaatcgtgcaatgaaggtctttgtccaagtctaccttacaagtgagaagcgccttagcaatcatgtctttggtgaactttcagaatcaaccgcagacttgtgtttttatgagatttcattgagctcagtcatgcaacttctgaccttttatgaatccgtagcaatcggacctcctaaaccagaaaagcttttccgtctgcttgatatgtatgaggtcttaaatgatttactccctgaagtagaattcttgtttcaagaaggatgtgatgatatagttttgactgaatataatgaagtcctgctacagctgggagaatcagtaagaaaaacaattacagaattcaagtatgctgtccagtcctacacttcatccaatgcaatggcccgtggtgaagtgcatccccttacaaagtatgttatgaactatataaaagctctcacagcttatagcaaaactcttgattcgcttctaaaggacacagatcgaagatgccagcatttctccactgacattcagtctatggcaaaccaatgtcctcattttactgtcagtgcattgcatttgcagtcagttactgcaattctagaagaaaatcttgaagctgggtccagattatatagagatgatcgattacgaaacatctttatgatgaacaacatctactacatggtccagaaagtgaaaaactcagagcttaaaatctttcttggtgatgactggatccgggtgcacaatcggaagtttcagcagcaagcgatgagctacgagagggcatcgtggagtcatgttctctcttttctgagtgatgatggcttgtgtgctgctggggatggtgcttctcgtaaaatcattaaagagaaattcaaaaatttcaatctgtcatttgaagatgcttatcgaactcaaacaggatggtctatcccagatgaccaactccgtgaagatgtcaggatttcgatatccctgaaaattatacaggcctatcgtactttcacgggacgatactatagccgccttgatggcactaggcacctagagcgatacataaagtataagcctgaggatttggagaaacttttgctcgatctttttgaaggagctcaaaaaacattgtagcttgcagagtgtagaacttaaaacacagttattcttgatgaaatgtgcagttgtaatatttggtttgtattaagtaaaatggtatagttggtgattatttttatatgctgttttcctg

SEQ ID NO: 8305 - DNA, 1144 bp, Oryza sativa
  ref <308>: DATABASE ACCESSION NUMBER: AK105653
  ref <309>: DATABASE ENTRY DATE: 2002-08-28
aaccccaaccctaaccctaactccaatggcgttcgccccgcgcctcctcctaccttcccggtgccccccgccggcctcctcccccgcgcgccacggcggccgcaccgcgcctgagctgtccggtcccaccccgcgcgtggtggtggtcacctccggcaagggcggcgtgggtaagaccaccaccacggccaatctcgccgcctccctcgcacgcctctccctctccgccgtcgccgtcgacgccgacgcgggcctgcgcaatctggacctcctcctcggcctcgagaaccgcgtccacctcaccgccgccgacgtgctcgctggggactgccgcctcgaccaggccctcgtccgccaccgcgcgctccatgacctgcagctgctctgcctctccaagccccgctccaagctgcccctcgccttcggctccaagaccctcacctgggtcgctgacgcgcttcgccgcgccgccaacccacccgctttcatcctcatcgactgccctgcaggtgttgatgcagggtttgtcactgctattgcccctgcagaagaggccgtgcttgttactacccctgacattacggctctccgtgatgctgaccgtgttgcagggctattggagtgtgacggcatcaaagacattaagattattgtcaaccgagtacgcccagacctggtgaagggagaggatatgatgtcagcacttgatgttcaagaaatgcttggcttgcctttgctaggtgttgtgccagaggacgcggaggtgatccggagtacaaatagaggtgtgccgttggttctgaacgacccacccacaccagctggtcttgctctggagcaggcgacttggcggttggtggaaagagatgcaatgacagcagttatggtagaggagcaggagaggcccaagaagaaagctgggttcttttcattctttggtgggtaatttgctgtgagattaatgagctcagtgtaggcagtgtgtacagatttgcgttttggagctacgattgtttttcccatttcttttgctttgttatagtgtagaatgattcatccgttgtgcttaaatccatagactggagtattttgccttgtttgctcagttcataagtaatttacgaagatatgttttggtgcttct

SEQ ID NO: 8306 - DNA, 1965 bp, Oryza sativa
  ref <308>: DATABASE ACCESSION NUMBER: AK105654
  ref <309>: DATABASE ENTRY DATE: 2002-08-28
gtctctcacgcacgcgcaccgtgcagagcgaagaggagagggggctagctccgggtgccgtcgccatggccaaccggcgcaagttctcgcaggcggggggcggcggcggcggcggggtgttcgacccgttcggcacgaaacaggccgtgtcgtcgctgcggaagggcgggcggctgccggtgtacgtggctggcgtcttcttcgtcatcttcgtcatcatcatgtacggcgaggacatccggtcgctcacgctggacccgatcgcgcgcgcggggacaacgccggcgcggatcgtggagccggtagtgacggaggagcgccacgtcgcccgggtcaaccctcctcggcgcgaggtctcgtccgcggagaaggccgccgcgttgccgctcgacgtcgacgagaggccgaagctggcgacgccgacgccgacggaggcggcgaaggaggtcccgaaggtcgagaagatcaggaagccgaagaaacccaagacgacgaagaagaagccgaggaagccgcggccggcgaagaagacggtggcggcggcagccgggggcctgctcggcgtgccggagacgtgcgacctgtccaagggcgagtgggtgttcgacaacaccagctaccctctgtaccgggaggagcagtgcgagttcctcacgtcgcaggtgacgtgcatgaggaacggccgccgcgacgacacctaccagaagtggcggtggcagcccaaagactgctccatgcccaggttcgacgcgaagctgttcatggagaggctccgagggaagcggttcatgttcgtgggggactcgctgaaccggaaccagtgggagtccatggtgtgcctggtgcagtcggtgatgtcgccggggaagaaatacgtcacctgggaggaccagcgggtcgtcttccacgccgtggagtacaacgcgacggtggagttctactgggcgccgttcctggtggagtccaactccgacgaccccaagatccacagcatccagcaccggatcatcaaggcggacgcgatcgcggcgcacgcacagaactggcgcggcgtcgactacctcgtcttcaacacctacatctggtggatgaacaccctcaacatgaagatcatgagaccgggcgggcagagctgggaggagcatgacgaggtcgtgaggatcgaggcgtatcggaaggtgctgacgacgtgggcgagctgggtgaacgacaacatcgacccggcgcgcacgtccgtcttcttcatgagcatctcccctcttcacatcagcccggaggtgtgggggaacccgggcgggatccggtgcgccaaggagacgatgccgctgctcaactggcacgggccgatctggctgggcacggactgggacatgttccacgcggcggccaacgtgtcccgcacggcggcgacgcgggtgcccatcaccttcgtcgacgtgaccaccatgtcggagcggcgcaaggacgggcacacctccgtgcacaccatccggcagggcaaggtgctgacgccggagcagcaggccgaccctggcacctacgccgactgcatccactggtgcctccccggcgtccctgacatctggaacctcatcctctacaccaggataatgtccaggccgcagctggtatagcaaattccaagaatttacggagaccggattactcataggcagagctggttggttatacacaatcatcgtactgaaaagagatttttcttcttcttttcttcacattcttttctggccgtttcacctgctgtcagaagatgtctttcatttgttctttttcttcaggggttaggttaagtgggaagagatcgatacagtatatggttatatatatggctaatgggatggccatgcttgcgtacgttacgtgcctgcgtgcacagatgcgctgtaaggttcctgaccaaactgtacattggggaagaaaaggattaaagcgaaagagatgaac

SEQ ID NO: 8307 - DNA, 2115 bp, Oryza sativa
  ref <308>: DATABASE ACCESSION NUMBER: AK105655
  ref <309>: DATABASE ENTRY DATE: 2002-08-28
tcatgatttaactttgttaggttagcaattgttgacagcatcttctttggagtgtcagtattttctacgtagctcagttcttaattacgtataaatgcatttcagtattaatttcgtttcttattgcagtcctcaaaattttcagtgggtatttaagcaccaataccaggggttttagagcaacaacatttttagatcagattggagttacaatttaacgggagttccatgaatggaaatagttttgtatgcaagaatctaattagtagtaatactgcactgtcttttcggttacatctgtatttaaaattttcaaaaagaacactttatggctataaaggaaactaaaataaatccttatctactaagcatgttatgtaataattgattttatcaactcttgctaggaaaggatgttctgttttgcggtagtataggttatgctaatttaatttcctttgtagttttgttagcaacaatggatgcctgctccttgtctttctgatctttttcttttccagggactcttgtccaaatttttttaactctcctcttttggattttgtggagcatgagaactagaattaagatccagattttcttttctgctcaacctgaatacatttgttcctgatttgcatcctcttcccacaaccattttgcggaggactttttctttgtattgttcaggggggatgtgggttacatgcaggtacaaatttgtataaagagtttattagtttagttttatctttactagctggaatatattgaaatgaaatctgcctagttctgaatttggcctagtgtagttgtagagggtaattccgatgaggaattgggtatgccccacaaggaggttggtattgtcctgacgatggcatgtagccttgtggagggcactgttggttaggaggatacccattgttgctctcaccatgcatgtccttgcttgcaaagtaatatattaattttgtcagccattagttagataaagctatatagttttaactaaatttggtaaaactacaatatttctgttgggtgatctactagtgtgttgggtgatcactagtgtgcattagttctgttatagttaggtaaaaggtatgattgcatttaacaaacatagttttgtaagaaaagagattagttttgtttgctattagaatttatagttttgttagttcagtcagaaatactttaacctctactttcaagttctgtcagaaatacaacaattagaagttttgttagccattagaattcctagttttgctagttcagtcataaatactttaacctctactttcaagttttgtcagaaatattgcaattagtagttttgtttgccattagaattcctagttttgttagttcagtcagaaatactttaacctctactttcaagttctgtcagaaatacaacaattagtagttttgttagccattagaattcctagttttgctagttcaatcagaaatactttaacctctactttcaagttttgtcagaaatattgcaattagtagttttgtttgccattagaattcctagttttgttagttcaaaatgggtattagttctgctttgtcagcaattagttttgcggagttcttctgcttgcttcttctatctatcttgttggactacatacatagttagttagctgaaatgacatttggttagctttgtcttgatcccttctttgctagaaaagacatgtttctacaaatctatagtgatttatgtatgcacactataggtctgttctgtaattttaatattctcactgatatactgacagctagaacctttcctttttttccagcaaataatcaatccgcaatggggggcagggtgatcaatgatgtgttcagctttttgactagtgacagaagtacatatatatgtattcagatataggtcctacaacatgctaacaattttagatatctgtgcacttagttttgttaaaagctcagatagcagaggcacagatctcacattcagatgtcactatgtttaattactgctcttactctagtcaagatgcaggggcaagattaaatgtttcataccaagcaaatgcaagttttgttgtgacatcctgc

SEQ ID NO: 8308 - DNA, 1999 bp, Oryza sativa
  ref <308>: DATABASE ACCESSION NUMBER: AK105656
  ref <309>: DATABASE ENTRY DATE: 2002-08-28
accacaccacacacggtcacacgtctcactcgccgcgacctcccctccaactccaacctcgcccttctcctctcccccgcgcgcgcgcaagcgagcaagcgaagcgccgcaatgacctggaacaaggccccggctgcggacgccgaagccggcggcggcggcgacaccggccacgcgcgcctccgggagctcggctacaagcaggagctcaagcgcgacctctcagtgctgtccaacttcgccttctcgttctccatcatctcggtgctgacggggatcacgacgctgtacaacacggggctcagcttcggcgggccggccaccatgacgttcggctggttcgtcgccggcgccttcaccatgaccgtcggcctctccatggccgagatctgctcctccttccccacctccggtggcctctactactggagcgcccgcctctccggcaagcgttgggcgcccttcgcctcctggatcaccggatggtttaacattgtcggacagtgggcggtgacgaccagcgtggacttctcactggcccagctgattcaggtgatcatcctgctcagcactgggggcaacaacggaggagggtacatggcgtccaagtacgtcgtgatcgccttccacgccgccatcctgctgagccacgccgccatcaacagcctccccatcacctggctttccttctttgggcagttcgcggctgcctggaacatgctaggtgtctttgtcctcatgattgctgtgccgacggttgctaccgagagggccagtgccaagtttgtgttcacccatttcaacactgaaaacaacgctgggattcacagtaacttttacatcttcgtgctggggctcctgatgagccagtacacgctgacaggatatgacgcgtctgcgcacatgaccgaggagacgaagaatgctgacaggaatggcccgatcggcatcatcagcgcgattgggatatcgataatagtaggatggggatacattcttggcatcacctttgcagtgaaggacataccttacctgctgaaccccgagaacgatgctggagggtatgccattgctgaggtgttctacctcgccttcaagagccggtacgggagcggcatcggcgggatcatctgcctagggatcgtcgccgtcgcgatatacttctgtggcatgagctcggtaacaagcaactcaaggatggcgtacgcgttctcgagagacggcgcgatgccattgtcgtccgtctggcacaaggtcaacaagcacgaggtgccgaccaacgccgtctggctctcggccctcatctccctctgcatggcattgccgtcgctggggagcttggtggcgttccaggcgatggtgtcgatcgcgacgatcgggctgtacgtggcgtacgcgctgccgatcctgttcagggtgacgctggcgcggaagcacttcgtgccggggcccttcaacctggggcggtgcggcgccgccgtcggctgggcggcggtgctgtgggtggccaccatcaccgtgctcttctcgctgccggtgtcgtacccggtcatcaaggacaccctcaactacacccccgtcgccgtcggcggcctcttcctcctcgtcctctcctcctgactcctcagcgccaggcactggttcaaaggccccatcaccaacctcgatggctagctaagccaagattgaggttttggttttggttttcgccggtggatatggaaatgcagtgggagatggaagaatcgtcgtcgatgatcggaggcgtttcaggtgggaggagaagtataactgaagaacaggtaagaagatgatctggaagggaaacgggagcatatcatgtcatggtggtggtgttgtgattagttgttgatttgttcagcgaaattatattacgtggaaggggattatacattttatacactggttgtagattgacaatatgtactaagaaattgacgattcaattgaaggctaaaagcagctgaaacagttgtgg

SEQ ID NO: 8309 - DNA, 1405 bp, Oryza sativa
  ref <308>: DATABASE ACCESSION NUMBER: AK105657
  ref <309>: DATABASE ENTRY DATE: 2002-08-28
aaggagattgataaggaaaaaagagagagaagaacaggaagttgccagaagagaagatcaattaagaaatgaaaatgctgaaagtgaagcaacaaaacagagtaatggcaatcaggaaggtgatgagaataagacaggagagaggattttcgtgcgctgttttgacgagtataacaggtatacctgggaggagataaaagcatcgactttgtcactgtctgaggatcttatgattggcaggggatcatatggtacagtgtacaaggctaagtttcatcatacagttgcagcagtaaaagttctgaactcccctgaaggctgtggaactcagcaatcacaacaggagcttgaggtcctaggtaaaatccggcaccctcacttgctcctgatgctaggtgcatgccctgagcatggttgcttggtctacgaattcatggaaaatggcagcttggatgacatgctgcaacggagaaataatacaccgccattgacctggtttgaccgtttcagaattgcttgggaggttgcaactgctcttatgttccttcacagttccaaaccagagcctatcatacaccgggatctgaagcccgcaaacatattgcttgacaggaacttggttagcaagataggtgatgtaggtctatcaactttgcttccaagtatggatcagtacctgtccacaatgatcaagaacactgctccagtgggcactttctgttacatagacccagagtatcagagaagtggcgtggtctccatgaagtccgatgtttatgctctagggatcgtgatcttgcaattgctgacagcgaagtcaccaatggggattgcccatgttgtggagactgcactagaagatggacacttcgtggacattctggatgcagctgctgggcagtggcctttgaatgaggcacaagaattggctttcctagccctaaagtgtgccgaaatgaggcgcagagaccggcccgacttgagcgatcatgttcttccagcattggagcggctgaaggatgttgcaaccaaggccagagaaatggcttttaatggccaccaaacagcacctccaagtcacttcatttgccccatacttcaggaagtggtggctgatccatatgtcgcatcggatgggtacacatatgaccggaaggcgatcgagctgtggctaagtatgaatgacaagtcccctatgacaaatctgagattgcctcacaagagccttataccaaatcactcgcttcgttctgcaatcatcgactggagaacaaagagttagtagctggtacacattctggcctgcattctccagaatgtagcagttgatgattgattttcttctcaaggtgtaaattttttgcagatctcatgtagaagtagtcttcatgttggttccaaaaat

SEQ ID NO: 8310 - DNA, 1822 bp, Oryza sativa
  ref <308>: DATABASE ACCESSION NUMBER: AK105658
  ref <309>: DATABASE ENTRY DATE: 2002-08-28
gagagctctaacaggccttggaggaccgaacccacgtatgtggcaaaatacggggatgacttgtggctaggggtgaaaggccaaccaagatcggatatagctggttttccgcgaaatctatttcagtagagcgtatgatgtcgatggcccgaggtagagcactcaatgggctagggtggcccccatttcgctttaccaaccccagggaaactccggatacaggccgtcatccttagtacagacagactgattgggtgctaagatccaaagtcgagagggaaacagcccagatcgtacgctaaggtccctaagcaatcacttagtggaaaaggaagtgatcgagcgatgacaaccaggaggtgggcttggaagcagccatcctttgaagaaagcgtaatagctcactggtctagctccatggcaccgaaaatgtctcagggctcaagtgattcaccgaagcgacgagaccttgaaagctgctttttcaagtgtcagtagcgggacgttctgtcaatcggggaaggtttttggtgacaagacctggagatatcagaagtgagaatgctgacatgagtaacgagaaatcctgtgaaaaacacgatcgcctgccagtggaaggctttctgcgttcagtcaatctacgcagagtgaatcggtccctaaggaacccccgaaagggctgccgtccgatgggtacacgaaagtgacgaagttgctttgactactgaaccatgcctggatcgtcggagcgaattggatgatcgggccgagggctgccccctcttcccctcgctctcctttccttaatattcaccgtcgagtcatcaaagccgtcaactaattcagaggggctcggctggcccggtcgccctacgctactggcgcttccaaaggcgaagctctcgtctttggcgaccagcaaactctgggctaaaacctgtagttttgaagcaagggatgagcgcgaaagccgttgcgcttccgtacacgcgcatacgttttcttgctccgtcgcgcgttagtacaataacgcgcagccgttttcttgctggggcggacacggatttctctctaaaggcgaggactcagaagtgggcgaacactcggcccagcgggcgaacatgccggctccggctccgcgcacctgctgacacctttcgaagcactttcacgtgtgaaccgaagtcgtcttgccgaactccttcctttctcatttcagtcctcgccttttccatcttccgtaggggcctttagtcttttgattagggtagaggtcgcgagagagcagagcgtaccgccctgccatagtcgcgaggatcttaatagtcggtcgcgactgttgtcatagtcaacgacggttgaaacttccaggaaaaaacttcgaattgggagggcgatcctcccggtgagctgaccgtaccccaaaccgacacaggtgaacaagtagagtatactagggcgcgtcgagagaaccatgtcgaaggaactcggcaaaatgaccccgtaacttcgggagaaggggtgctctcctatcttttgattaggaaagcggcacataccagggggtagcgactgtttattaaaaacacaggactctgctaagtggtaacacgatgtatagagtctgacacctgcccggtgctggaaggtcggaaggagaagtgtgataagctttgaatggaagccccggtaaacggcggcagtaactctaactgtcctaaggtagcgaaattccttgtcgcataagtagcgacctgcacgaatggtgtaacgactgccccgctgtctccgacatggacccggtgaaattgaattctccgtg

SEQ ID NO: 8311 - DNA, 1822 bp, Oryza sativa
  ref <308>: DATABASE ACCESSION NUMBER: AK105659
  ref <309>: DATABASE ENTRY DATE: 2002-08-28
atccaacactagtaatcgtatctcaaatctccaacaatggagttttctttggtcgtagcattgatcgccgtggcatcatcatgcgtgttcgtccatttcttggcgcggggcgccaccaagaaacggcgatcgccggcggccaagaagctgccgccgggctccctcggcctgccggtgatcgggcagagcctcggcctcctccgcgcgatgcgcagcaactccggcgagcggtgggtgcggcgccggatcgacaggtacggcgcggtgtcgaagcagtcgctgttcggcaagccgacggtgctggtcgccggcgccgcggggaaccggttcgtcttcttcagcggcgcgctggccctgcagcagccgaggtcggtgcagcggatactgggcgacaggagcatcctggacctcgtcggcgccgaccaccggcgcgtccgcggcgcgctgtcggagttcctccgcccggagatgctgcggatgtacgtgggcaagatcgacggcgaggcgcggcgccacgtcgcgggctgctggtccgggcgcgccgccgtcacggtgatgccgctgatgaagcggctgacgttcgacatcatcgcctccctgctcttcggcctggggcccggcgccgccgcgcgagacgcgctcgccggcgacttcgagcgcgtgatggggggcatgtgggccgtgccggtggacctgccgttcacggcgttcaggcggagcctcagggccgccgcccgcgcccgccggctgctcgccgggatcacgcgggagaggaaggccgcgctggagcgcggcgcggccacgcggagcagcgacctcatcgcctgcctgctcagcctcaccgacgaccgcggcggcgcgccgctgctgtccgaggaggagatcgtcgacaccgccatggtcgccctcgtcgccggccacgacacctcctccatcctcatgaccttcatggtccgccacctcgccaacgaccctgacaccctcgccgccatggtccaagagcacgaggagatcgcgaggagcaagcgcgacggcgaggcgctgacatgggaggacctgacgaggatgaagctgacatggcgcgtcgcgcaggagacgctccgcatggtgccacccatcttcggcaacttcaggagggcgctcgaggacatcgagctcgacggctacgtcatccccaaagggtggcaggtgttctgggtggcgagcgtgacgcacatggacgcggccatcttccacgacccggacaagttcttgccgtcgcgcttcgacagccagtcgtcttctccgtcgacggcgaaggcggcgccgccgtgctcgtacgtggcgttcggcggcgggccgaggatctgccccgggatagagttcgcgaggatcgagacgctggtgatgatgcaccatcttgtcaggaagttcaggtggaagctctgctgcaaggaggacaccttcgcgagggaccccatgccgacgccgctgcacggtctgcccatcgaaatcgagccgaggatttctccttgatcataagccaaaaataaaaataaaataaaatggacaacaatgagcaatcacgacatgaatgttgcattgcaattttttattttttgatcaagggcagcatggccattgcaattttttatagtcaggatagaataagattgttcagtgcagtgacaatgtagtcaaggaacttacactttgtgtaaaatcagcaaatttgtcactcatgtatgtggcatttgagatgacgctactcaactatgtgacaagcatttttttttcgaaacaaacatttggaagcagtacaaattttcaacttgatcaactc

SEQ ID NO: 8312 - DNA, 1773 bp, Oryza sativa
  ref <308>: DATABASE ACCESSION NUMBER: AK105660
  ref <309>: DATABASE ENTRY DATE: 2002-08-28
aacgccgccgtcgacccgtcgtcgtactcccgcccacccagcgccgccgccgccgccgccgtcctcccaggccgcccgcccagcaccgccgtccatcgtcgccttccccgtcctccccatccccccgctcgagttgcgggtgaagaggggctcgaagcggctgctccgccaagcccctcctctcgccctcctcccctctcgccgagcttgccgtcgccgccgtcatcctgctgcatcctgatctgtggaagtaacaaacagttcgtttgtctgtttccccgtaaaattccccaagctggacccgcccctggaagaagaagaagtagcttagtgttgatttgagcataatatgggtgccccgaagcagaaatggaccgcggaggaggagtccgccctcaaggccgggatcgcaaagcacggggctgggaaatggcgcaccatactcaaagacccagacttcagcaacgtcctgcgctaccgctccaatgttgacctcaaggacaaatggcggaacatgaacgtaaccgtgaacgcgtccggtgcccgcgacagggtgaaagcgcccgtcgttaagaagccaagatccgctcctaagcatgaaggccactctacctctacagctattgccgcggtaacttcagatggtgatgatgatgttgcggagcctgtgcctcttgcaacgtctacttcatccaagagatccctctcgaggctagacaatatcatagtagaggcagtaaggagcttgaatgagcctacagggtcatacaagacagccatagctaattacatagaggagcaatactggcctcctgctgattttgatcatgtcctgtcttcaaaactgaatgatctgacagcatctgggaaattgataaaggtgaatcgaaagtacaggatagcccctagttcatctttgtcagaagggcgaagctccaaagtagtgctgctcgaagatataaaaaaagaaccaacaaagttagatagggaagatgttgcagtcctcactaaatctcaaatcgatgctgaattagctcggatgagaaccatgactgcagaagaggctgctgctgctgctgctcgtgcagttgcagaggcagaagctatcatggctgaagccgaagctgcagtaagagaagcagaggctgcagaagctgatgccgtagctgcacaagctttcgcggaggcagcaatggcaacatttaacaacagaagttcagcaaaattgatcattcgagcttgaagctacctgtgggagctggtgcagcatcagtttcctccgaccttgttgtatgtacacttgtcccgcgttccaatgcaatgcaattgctactccagttgggctagggacgaccctattccatccttaacttatgcaagcttattacagaaccaaattgcccaaagccccaaactggaattgcaccgcatctgctgaatttgccaacaattttgttacgcctggatctgcacaggcattgcggctacggcatcttttgactcgctcatggtagtaacccacatatgctgggataatcagggagtgaccagtagaagtacatcatggttatccccattcctccttgggtgattgtaattcaccttgtaatcggttttggcatcaaataatcagagtattgcgttgttgttgcatgtacagatgtaacagtgtgtgtctggttgactggttcacttcattgtgtatatcaactggcttttttttttaagctctttctcatggataatatggtaatgctgcagcgtgatgtattc

SEQ ID NO: 8313 - DNA, 2203 bp, Oryza sativa
  ref <308>: DATABASE ACCESSION NUMBER: AK105661
  ref <309>: DATABASE ENTRY DATE: 2002-08-28
actactccggagcagcgaccaacaccaactacctcgcgtcgcggcggccgcagaggatggcgccgccgctctatctcctcctcctcctcccgctcctcgcctgcgccgacgaggtccctgaccgctacgccgtcctccgcgccccgcagggcccgggtgccagcgcggcggccaaggagtacctcgacccgaccttcccgctccccgcgcccccgccggcggcgccgtcctgcaccgtgccggtcctctcctactccttcggcgacacctacggcgccgcgccggccaaggcctcgtacgcgccccccgccgggtgccccgcgccctggtccctcgtcgtgctcaccttctccgcctcctgcgccggcgaccagtacgaccgcgtcgccgccgtctggctcgacggcgccgagctcctccggaccaccaccgcggagccgacccccgagggcgtccgctggaccgtccgcaaggatgtcacccgctactccgcgctcctccgctccccgcccggcggcgtcctctccgtcatgctcgagaacgtcgtcaacgacaagtacaccggggtgtacagcgtcaacgtctcgctggagttccatggaactccgccgtacctctccgacgcggcatcatcctcccctgctggcgtcgcaagcaacgatcccaaggaacctatgctgccggagtcatacttccagccggcggatctcatcgtcccgatctcggatgtcgccggcaacggcaagggcgggttctggttccgcatccagaacgcgtcggactcgcactccaggctcgtaaccattccgtcgagcacctaccgtgcggtgctcgaggtgttcgtgtcccctcactccaacgacgagtactggtactccaacccgccggacatctacatcagggagaacaacctcaccacgcggaggggcaacgcggcgtaccgcgaggtcgtcgtcagcgtggaccaccgcttcgtcggctcgttcgtgccgttcccggtcatctacacgggcggcatcaacccgctcttctggcagccggtggccgcgctcggcgcgttcgacctgcccacctacgacgtcgagctcaccccattcctcggcctcctggtcgacagcaacgcccacgagatcggcctcagcgtgttcgacggcatcgccgagtggctcgtcgacgccaacctgcacctctggctggaccccagcacgtcggacgtgcacgccgcgctcggcgcgtaccagacgccgcgcctgaaaatctcacgccactactcgacgcggctgctcgagggcaggttcaagatcaaggccaagaggaagtcctccttcagcggctgggtcaagtcctcgttcggcaacttcaccacggaggtggaggcggagctgaaggcgaccagcctggtggagttcaccggcgacggccggaacaagaccgtgtcgctggaggcgaagcaggagacgaagacgctgatccgggcgggcgacacgcggaaggtgatcggcagggtggagagggaggccaagtacccgctgtcgctcttcgcggagaccgaggacggcgagaacggcacgtccgtcgtcacggtgagcctcacccacggcctcagcgtggagacggaggtcgagacgaaggccctcgagagcaaggagaagctcgatgacgcgcaggccgcgcaagggtggatggtgctcctggaccacgacgtgctcaacgggtcggtgacgacgacccaggcgtaccggttcagcgacgacgagcgggagtacgagcgggcgatcgacgtcgtggacggcgccgtgctcagcgacaacgtcaccgagagcttcagcgccctggccgccgcagcggcggacgctcgccgccgccggttccacgccggcattgctgcgttgtaaggctaccttggattgccgtgggagttgagctgtttcgtgtcatcgatggctacggaatccaggtgaaattcgtcagttcgaagaattcttatgtgcaggattcgtttccgaccgcatcgacgtgaccaagactattgcttttcttcagaggtaaattgtgcactgtaatttgtatttagcgtatagtttctgtaatctgtattatgtatgcaattttgtcggtgtgaatcgtcgtttctgcttttgcagttcaaattttggttgtgtctgtcttaataaaaacgaaataaagctggaaattgcagatt

SEQ ID NO: 8314 - DNA, 1514 bp, Oryza sativa
  ref <308>: DATABASE ACCESSION NUMBER: AK105662
  ref <309>: DATABASE ENTRY DATE: 2002-08-28
aactgctcacgctcttgttcaaccgggagaagatgccgttcaacgcatcggcagcggcgacggctcctccggccaagcacctggtcggcgttcggctcaacgcgatggcgtcaaggttgaggagctgatccgccgtcgacggcgacgggtgctcactctgtcgttctctctctcccatccggcgcgacgccaagggcggctactgggcggcactcaactgggagaagatgcagttcaacgcgccggcggcggcgacggctcctccgaccaagctcctggtcggcgttcggctcaacggcgatggcgtcaaggttgaggagctgatccgccgtcgacagcgacgggagcagtcgatccggcgacctcttcccctccttcacggatcccatggtctctccgctccctcttgcgcggatccgtcgtcggctgcgatgggaggggttagatccggcgacctcttcctctcccgctcggatcccgtcgtctctcagcgccccgctcacgctgatccgtggccggcgacgacgggagggtccagatccggtggtgtccactgtggtcgcggcttccctgccaccgccgcttctgcacgcgcggcccatacaccgcaccctgccgtctccttcttccccgtgttagtatgcctttcatatgtttttaatgtatttgtgctgttcttataatgtagttttgcacttatgatagcatgttacttgtgcttgcaaggttgggtgggttgtcactgtggttggagctggttgttgagctgattggagtcagagatggtggccaagatggagaggagatgtcacccgaagttgtctcggaagccgcaatgaaggcggagatggaggcggcaaggtggggctgctggcgttggatgttgcactcgcgttcccgcaggccacgacgtcccagttcccgcccgccggtgagacctcctctcttgctttcccggtgttctcaggttctcggtttcccattattttaaataatgagatattatgattgggtgaaactgtcttggccatctaattggagtatttgagagaggtgtgtgcactgtgcagtcggcctttgttgattcgtagttatcttcagtcttgggcagcttaatctggctccaagttggcagcaagcagtccctgttctgaaaactgctctcttacttaagtttgctgaagggatactccttacatcgaagttcattagctacacttctttggttagaaattgctctgttgctgttcaatatgtaccagcaaaataaatatgagaaatcactctagtgcttctaatagggagtcatctttcagcttctattaaacacggaacatttaagaattaccttccatcgtcgtataaatgtagtaaacgcagatgtgtcatgcccaacagggaattgagtagcgtcaagcgggagattgagtatccacaccaattattaggtgtatatatgagtcttgtttgtattttcagtttttttatataggttgagaagatgtttgcatcct

SEQ ID NO: 8315 - DNA, 2362 bp, Oryza sativa
  ref <308>: DATABASE ACCESSION NUMBER: AK105663
  ref <309>: DATABASE ENTRY DATE: 2002-08-28
acacacacttgctcctcattcctctctcctctcctctcctctctctcatcaaccctagcttgatagttgattcaaccagccaatatattcgatctccccttctcttcttctctcgatcgatcgggtgatgagaagccaattgagaatttgagatcgttcgatcatcacctcgtttcttgctgagattatagccaagctccatgattccgtctatgccggtagtgacactgcaaggtgcacaccagtagatagctagtggcagcagcagcagcagcatcagtggagctagtcgtcgtcccggccggccttgccgtcagagatcgatcggtgtaagttacagggtgcaagtgcgatcgatcgccaccggcgcagcgagatctgattgatattgatccatcgccgatcgattgatcatacgttcagatatcataatcagcagcagctggtagaattcaagagaagttcgtccagatgatgctcaaggatctggccgaaattcagcagcagcagctgctcgccgccgccgaggagaacatgtcgaacctgacgtcggcgtccggcgaccaggccagcgtctcgtcccaccccgctcctcctcccgccaagaagaagcgcagcctccccggcaacccagatcctgaggcggaggtgatcgcgctgtcgccgaggacgctgatggcgacgaacaggtacgtgtgcgagatctgcgggaaagggttccagcgagaccagaacctgcagctgcaccggcgagggcacaacctgccatggaagctgaagcagcggaaccccaaggaggtggtgaggaagaaggtgtacgtgtgcccggaggccggctgcgtccaccacgacccggcgcgcgccctcggcgacctcaccggcatcaagaagcacttcagccgcaagcatggcgagaagaagtggaagtgcgacaagtgctccaagcgctacgccgtccactccgactggaaggcccactccaaggtctgcggcacccgcgagtaccgctgcgattgcggcaccctcttctcccggcgggacagcttcatcacgcacagggcgttctgcgacgcgctggcggaggagagcgcgagggcggtcacggcggcggcggcggtggcggggcagcagcagcatggcggcgggatgctcttctcgcaggtggcggatgtgcttgatcaccaggcggcgatggcgatgggggggcatgggctgatgcaagagctgtgcctcaagagggagcagcagcagcagcagcagcagttcgcgccgtcgtggctcacggcgcagcagcagcagcagcagctggaggcgatggccggcgcggggaatccggcggcgatgtacgggtcggcgaggctggaccaggagttcatcgggagctccacgccggagagcggcggcgcgcagcaggccggcctcagcttcgggttctcgtcgacgtcatccgcgccgccgcaccccgccgcctcctcggcgcacatgtccgccaccgcgctgctgcagaaggcggcgcagatgggcgcgacgctgagccgcccgtcgagccacgcccacatggcggcggcggcggcggcgagcacgcacaacagcagcagcagcgccgccaccaccaatgctcctcctcctcctcctaccagccacgtgtcgagcacttgcgtcggcgccggcggctacgggctcgccttcgaagcgtcccacttcatcgcagcagacgagagcagcaggggcgccaggtccgatcgtgacaccggcaatggcgtcgccggagccggcaacgacggcctcaccagggacttcttgggtctccgagccttctcccacggcaacataatgagcatggccggcttcgatccctgcatgtcgacgacgtcggcgtcgtcggcggcgccgtacgaccaccaccaccacagcaacaagccatggcatagctagtaaccacctcggccgccatggatgaatagcgaatgaatcatgcaagcaaatccaaacaaattttgttcgtgggctactcatcgatcgttcgacaagaactgcctgatgatgatgatcatgtcaagattatttcatagctgggtaagtgagtcgaatttacccagctctctctcttttgatgttccaattgaggtttaataattcgatgttcttttgggagggtatgggctgttcaattcatatatatggaacttttcaaattatatactgttgtttatgctagctatatatcatagttaattcatcttcctactgtaataatttttagccattctcagctcataaagctgtgtagagctactgccattagagctccatttgtaatcagttgttaccattaatcattcccttaaatttctagttcctg

SEQ ID NO: 8316 - DNA, 2189 bp, Oryza sativa
  ref <308>: DATABASE ACCESSION NUMBER: AK105664
  ref <309>: DATABASE ENTRY DATE: 2002-08-28
gttttttgaccaaaactttgctgctcactgtcctagctggagagaatccagcgatacacgcatgtcttcttcttcagctcggtcttggttgccgacctcatttgcagatttctgcacatgaggcatctctctctcgaagtatcgtgttttgatttgggcaggtagccagccactgtgagagtgtgagctgaggtgagcatcgccatgggagaggttgcagaagacatctacacccaagatggcaccgtggacgtcaagggcaacccggccaccaagaagaacaccggcaactggcgtgcctgcccctacatcctcgctaacgagtgctgcgagaggctggcctactatggcatgagcaccaacctcgtgaactacatgaagacgcggctcgggcaggagagcgccattgccgccaacaatgtcaccaactggtcggggacttgctacatcaccccccttctcggtgccttcttggctgatgcctacatgggcaggttctggaccattgccagcttcatgatcatctacatcctgggtttggcgttgctgacaatggcgtcgtcggtgaaggggctggtgccggcgtgcgacggaggagcgtgtcacccgacggaggcgcagacgggggtggtgttcttggcgctgtacctgatagcgctgggcaccggcgggatcaagccgtgcgtgtcgtcgtttggcgcggaccagttcgacgagaacgacgagggggagaagcggagcaagagcagcttcttcaactggttctacttctccatcaacatcggcgcgctggtggcgtcgtcggtgctggtgtacgtgcagacgcacgtcgggtgggggtgggggttcggcatcccggccgtcgtcatggccgtcgccgtcgccagcttcttcgtcggcacgccgctgtacaggcaccagcggcccgggggcagcccgctgacgaggatcgcgcaggtgctcgtcgcgtcggcgaggaagtggggcgtcgaggtccccgccgacgggtcgcggctgcacgagacgctcgacagggagtccggcatcgagggcagccgcaagctggagcacaccgggcagttcgcgtgcctcgacagggcggcggtggagacgccggaggacaggtcggcggcgaacgcgtcggcgtggcggctgtgcacggtgacgcaggtggaggagctgaagagcgtggtgcggctgctgccgatctgggcgagcgggatcgtgttcgcgacggtgtacgggcagatgagcaccatgttcgtcctccaggggaacacgctcgacgccagcatggggccgcacttctccatcccggcggcgtcgctctccatcttcgacaccctcagcgtcatcgtctgggtgccggtgtacgaccgcctcatcgtgccggcggtgcgcgccgtgacggggcgcccacgcgggttcacccagctgcagcggatgggcatcggcctcgtcatctccgtcttctccatgctcgccgccggcgtgctcgacgtcgtcaggctgcgcgccatcgctcgccacgggctctacggcgacaaggacgtcgtgcccatctccatcttctggcaggtgccgcagtacttcatcatcggcgccgccgaggtgttcacgttcgtcgggcagctggagttcttctacgaccaggctcccgacgccatgcgcagcatgtgctcggcgctgtcgctcaccaccgtcgcgctaggcaactacctcagcacgctgctcgtgaccatcgttacccatgtcaccacccggaacggcgccgtcgggtggatcccggacaacctcaaccgcggccacctcgactacttcttctggctgctcgccgtgctcagcctcatcaacttcggcgtctacctcgtcatcgtcagctggtacacctacaagaagacggcggattcaccggacgacaaggccgagcacgccggagcaaactgagccacgaggtgaagctgattatgacatacaagggggaattgaactgaattgtggcgtgtgaatgtcagaatgtgtggggttctaaacaagttcttgggagataaaatggaaaggaaattagtgtcgtttgtgaccttcaaatatgttatagtgttcattgcattatgtctggtaggaaaaaatgaagaagaataggaggatatagtagtttaaaaatataaatgtgatgtttagttttctag

SEQ ID NO: 8317 - DNA, 1818 bp, Oryza sativa
  ref <308>: DATABASE ACCESSION NUMBER: AK105665
  ref <309>: DATABASE ENTRY DATE: 2002-08-28
agcagcagcagccgcgccgaagcagcctcctcccatcaccgaggagagagagagagagagagagtagtgagagaggaagacgagagagccgcctccgcggccatcgccgccgccgcagcagcggggccactaccccgactgccccctcccctcctcccatggccgcgatgccaggtgggcccgaccttgccggggccggtggcgccgtcgccgtcgccgtcgacgcgatgcaggtcgacgacccgccgcgtgcgtccgccgaggagaagcatggtcccactataatgggaggaaatgatccagtcacaggtcatataatttcaactactattggagggaagaacgatgagcccaaaaggactattagctatatggctgaacgagttgttggaactggatcctttggtgttgtattccaggcaaaatgccttgagactggtgaaactgttgccattaagaaggtcttacaggacaaacgatacaagaacagagagttacagataatgcgatcaatggatcattgcaatgtcatctccctaaagcattgtttcttctctaccacaagcagagatgaacttttccttaacttagtcatggagtttgttcccgagtcactttatcgtgtcctgaaacactacaaagatatgaagcagaggatgccacttatatatgtcaaactttacatgtatcagatattccgcggattagcttacattcacactgttcctggagtttgtcaccgagatataaagccacaaaatatcttggttgatcctcttacccaccaagtgaaggtctgtgattttgggagtgctaaaatgctgattaaaggtgaagcaaatatatcttacatatgctcacgttactatcgtgctcctgagctcatatttggtgcaactgagtacacaacatcatttgatatatggtctgctggatgtgttcttgctgagctgcttcttggtcaacctctgtttcctggtgaaagtgcagtggaccagcttgttgagataattaaggttttgggtactccaacgcgagaggaaatccgttgtatgaatcccaattacacagaattcaaatttccgcagataaaagcatgcccatggcacaagatcttccacaagcgaatgcctcccgaagcaatagatcttgtgtcccgtctccttcagtattcgccaaatctgcgatgtactgcgctggaggcatgtgctcattcattttttgatgagttacgagaaccacatgcaaaactgccaaatggccgtccgtttccgcctctgttcaactttaagcaagaattagcaaatacacacccagagctcgtgagcaggctgttaccagaacatgcgcagcggcattcaggattttaattcattgttttgcactggaccataggacgaagtgtggtatgacgacatttacacttgtctgctcatacctgtgtatgccaaagggcaaataacatttctcaccttaaggttttagaacctaatcatcttcttgcaaagctgaaaatgggctcccctgacaaggtagtgtgcggtgtgccgtactacaatcaaatgttaaaccttgaggaggccattgtgtccagtgttctgccaagaggagcccgaatagctggagggatggtgggtgtattgttaagctgtggagggtgacttttatgttgaaacttcctttgctgtatgttccatgcctgtaccgcacctgcatccattcaacctcatattcacaactgatgtaatcatgataaaattgaatgtgtcaatgatggtcgattcgtatgccattatatgcgaattgactgttgtttct

SEQ ID NO: 8318 - DNA, 1608 bp, Oryza sativa
  ref <308>: DATABASE ACCESSION NUMBER: AK105666
  ref <309>: DATABASE ENTRY DATE: 2002-08-28
agctgcacggacaaattaagcgagggagtgagagctagctaactcaggctcagccaactgatcgcgagctgtgacgaggtgatcaccatggcgtcctcgtcgtcgcttcttgttcgtgggagagcgttcgcgctggttgtggctgtagctctggtggctgctcctcgccggattaatggcggcgccgccgggccggcggcgaggacgaacgaccccaactggcacgtcttcagcgtcagctcgctgctgccgagctcggcctgcactgcatcgaaagcggcgtccaactcgtcggctctcggcgtcgtgcaccggcacgggccgtgctcgccggtgcaggctcgtcctcgcggcgggggcggcgctgtcacccacgccgagatcctggaacgcgaccaggccagggtcgactccatccaccgcaaggtcgccggcgccgggggcgcgccgtcggtggtcgacccggcacgcgcctcggagcagggcgtgtcgctgccggcgcagaggggcatctccctcggcaccggcaactacgtcgtgtccgtcgggctcgggacgccggcgaagcagtgcgccgtgatcttcgacaccggcagcgacctgtcgtgggtgcagtgcaagccctgcgccgactgctacgagcagcaggacccgctgttcgacccgtcgctgtcgtcgacgtacgccgccgtggcgtgcggcgcgccggagtgccaggagctcgacgcgtcgggctgctcgtcggacagcaggtgccggtacgaggtccagtacggcgaccagtcgcagaccgacggcaacctcgtgcgcgacacgctgacgctctcggcgtcggacacgctcccgggcttcgtcttcgggtgcggcgaccagaacgccgggctgttcggccaggtcgacgggctgtccggcctcggcagggagaaggtgtcgctgccgtcgcagggcgcgccgagctacggccccggattcacctactgcctaccgtcgtcgtcgagcggcaggggctacctgtccctcggcggcgccccgccggcgaacgcgcagttcacggcgctggccgacggcgcgacgccgtcgttctactacatcgacctcgtcggcatcaaggtcggcggccgcgcgatcaggatcccggcgacggcgttcgcggcggccggcggcacggtgatcgaccccggcacggtgatcacccgcctcccgccgcgcgcgtacgcgccgctccgcgcggcgttcgcgcgctccatggcgcagtacaagaaggcgcccgcgctgtccatcctcgacacgtgctacgacttcaccggccaccggacggcgcagatacccacggtggagctggcgttcgccggcggcgccaccgtcagcctcgacttcaccggcgtgctctacgtctccaaggtgtcgcaggcgtgcctggcgttcgcgcccaacgccgacgactcgtccatcgccatcctcgggaacacgcagcagaagacgttcgccgtcgcgtacgacgttgccaaccagaggatcggcttcggcgccaagggatgcagctgattacaatccgagatgatgaatcaatcgatcattttgttttgttacagtgacatatatatgggg

SEQ ID NO: 8319 - DNA, 1768 bp, Oryza sativa
  ref <308>: DATABASE ACCESSION NUMBER: AK105667
  ref <309>: DATABASE ENTRY DATE: 2002-08-28
aacacgatgaacatcatgctcaccaacgtgctcgacgccgcggccggggcgctcttctactacctcttcggcttcgccttcgccttcggcacgccgtccaacggcttcatcgggaagcagttcttcggcctcaagcacatgccgcagaccgggttcgactacgacttcttcctcttccagtgggccttcgccatcgccgccgccgggatcacgtcgggctccatcgccgagaggacgcagttcgtcgcctacctcatctactccgccttcctcaccgggttcgtctacccggtggtgtcccactggatctggtccgccgatgggtgggcctctgcctcccgcacgtccggacctctgctgttcggctccggtgtcatcgacttcgccggctccggcgtcgtccacatggtcggcggtgtcgccgggctctggggcgcgctcatcgagggcccccgcatcgggaggttcgaccacgccggccgatcggtggcgctcaagggccacagcgcgtcgctcgtcgtgcttggcaccttcctgctgtggttcggctggtacggattcaaccccgggtcgttcaccaccatcctcaagacgtacggcccggccggcggcatcaacgggcagtggtccggagtcggccgcaccgccgtgacgacgaccctggccggcagcgtggcggcgctcaccacgctgttcgggaagcggctccagacggggcactggaacgtggtcgacgtctgcaacggcctcctcggcgggttcgccgccatcaccgccgggtgcagcgtcgtcgacccgtgggccgcgatcatctgcgggttcgtctcggcgtgggtgctcatcggcctcaacgcgctcgccgcgcgcctcaagttcgacgacccgctcgaggccgcccagctccacggcgggtgcggcgcgtgggggatcctcttcaccgcgctcttcgcgaggcagaagtacgtcgaggagatctacggcgccggccggccgtacggcctgttcatgggcggcggcggcaagctgctcgccgcgcacgtcatccagatcctggtcatcttcgggtgggtcagctgcaccatgggacctctcttctacgggctcaagaagctcggcctgctccgcatctccgccgaggacgagacgtccggcatggacctgacacggcacggcgggttcgcgtacgtctaccacgacgaggacgagcacgacaagtctggggttggtgggttcatgctccggtccgcgcagacccgcgtcgagctggcggcggcggctgcctccaacagcaacaaccaagtgtaaccaatccagaacgaacgacgtcacagcgaaggaagaaatcacgggtttctctccctctccgatctcgatcgtcacgtcataaatttgatccccatatttgattgccagtttctgtttgggccaaatgcttttgccgctctctctggtgttgcaagactgtaaaaacactgtaggatggacgagtgtctttcacttttgctgggcttctcttgtgtacaggcatgcgtacgtgtcttagaatgtgtggtgtgaaggtgggaagaatcagaggttagggtttaattttcttttgcacaatggttactgctattattgttttattttgtggtcgaattttatcgtcataagggtgtggtggaatggtggtcaagataggtggctgtgcagggctcaaagactttgcgtgggtccttttgtcctgcagtgctctacctctctatcaaaactttggcttatttcctgg

SEQ ID NO: 8320 - DNA, 2008 bp, Oryza sativa
  ref <308>: DATABASE ACCESSION NUMBER: AK105668
  ref <309>: DATABASE ENTRY DATE: 2002-08-28
ggctctcgcctcgtctcctcctcgattctcgtgtcgctgctgctgctgctgctgctgttgagcagagcaatctctcgctcgtctgcttggtgtttgctcgatattgagatcgaataggaagtagagttagagcgagtgaagtgattgctcctttcattgatggcgagcgagctacctgtggttagtttccagcttttctgagctgtactgttggtgtgggtgtggtcaatccgtgaaaaatccccaaaatcctgtaaagtttcatcccgaattcgttccagaaatccatccatttcttggatttgatctttgtggaatcgaatcatcaatccaatctcgttgggtcttcacggctccgattggggatttagcggaggtgtgtgttcgagtggtagcaatggcgaggttggtggtggtgattgtggcggtggccatggcggcgtggtgggcggtggcggcggtggaggggttggggataaactgggggacgcaggcgacgcacccgctgccgcccaaggcggtggtgcagctgctcaaggacaacgggatcgccaaggtgaagctgttcgacaccgacttcgccgccatgagcgcgctcgccgggagcggcgtcgaggtgatggtcgccatccccaacaaggacctcgccaccatggccagcgactacggcaacgccaaggactgggtcaagaagaacgtcaagcgcttcgacttcgacggcggcgtcaccatcaagtatgtggccgttggcaatgagcccttcttgaaagcatataatggttcgttcatcaacatcacattgccggcgctgcagaacgtccagaacgcgctgaacgacgccggcattggcgaccggatcaaggccaccgtccccctcaacgccgacgtgtacgaatccacggtgccgtccgccggccgcttccgccccgagatcgccggcctgatgacggacatcgtcaagttcctggccaagaacaacgcgcccttcaccgtcaacatctaccccttcctcagcctgtacctggacgaacacttcccgatcaacttcgccttcttcgacggcggctcaacgccggtgaacgacggcggcatcatgtacaccaacgtgttcgacgccaacttcgacacgctggttgccgcgctcaaggccgtcgggcacggcgacatgccgatcatcgtcggcgaggtcgggtggccgacggacggcgacaagaacgccagggtggacctcgcgcagcggttctacgccgggctgctcaagcggctcgccgctaacgtcggcacaccggcgcggccgaaccagtacatcgagatgtacctgttcgggctggtcgacgaggacatgaagagcgtcgcgccgggcagcttcgagcgccactggggcgtcctccggtacgacggccagcccaagttcgccatggacctcgccgggcagggccggaacacgatgctggtgccggccaagggcatcgagtacctacccaagacgtggtgcgtcatcaacaccaatgccaaggacgtgtccaagctcggcgacaacatcaacttcgcctgcacgtacgccgactgcacgccgctcggcttcggctcgtcgtgcaacggcatggacaccaatggcaacgcgtcctacgccttcaacgcctacttccaggcgcagagccagaaggaggaggcttgcaatttccagggcctcgccgtgcccaccgagaccgaccccaccaccgcgcaatgcaacttcacaatacagatcaagtcgtcggcggcggcggcggcggcggcgccggtggccgccggcgtggtcgtggcggcgctggcacagctcctgcttctgtggtagcattgagatcagtgtgcattgttgatttgttgcattctttggagattttaccctttggattagaagcctgtgatgtgattcaggtgctttttatttgaagaaatagaggaggtggttaatttgttgtgtaattagttgatttgagtacagtttatctgatgacattagctt

SEQ ID NO: 8321 - DNA, 2627 bp, Oryza sativa
  ref <308>: DATABASE ACCESSION NUMBER: AK105669
  ref <309>: DATABASE ENTRY DATE: 2002-08-28
tacttggcgagctcgaatctgagaggggtgatacctgaatccatcttcgagctcgccgcgctggagacgctcgacatgtcgatgaacaacctcgccggcgtgatcccggcggcgatcggcaacctccggcagctgtggaagatcgagctgtacgggaacaacctcaccggcgagctcccgccggagctcgggaggctgaccgggctgcgggagatcgacgtgtcccggaaccagctctccggcgggatcccgccggagctcgcggcgctcgaggggttcgaggtgatacagctctaccggaacaacctctccgggcagatcccggcggcgtggggcgagctgaggtcgctgaagagcttctccgcctacgagaaccgcttctccggcgagttcccggcgaacttcggccggttctcgccgctcaacagcgtcgacatctccgagaacgccttctccgggccgttcccgaggcacctctgcgacggcaagaatctccagtaccttctcgccctccagaacggcttctccggcgagctccccgacgagtactcgtcgtgcgacagcttgcagaggtttcggatcaacaagaacaagctcaccggcagcctcccggcggggttgtggggtctccccgccgtgacgatcattgacgtgtcggataatgggttcaccggaagcatctcgccggcgatcggcgacgcgcagagcttgaaccagctgtggctgcagaacaaccatctcgacggcgagatcccgccggagatcgggcggctcgggcagcttcagaagctgtacctgtcgaacaactcgttctccggcgagataccgccggagatcgggagcctgtcgcagctgacggcgctgcacctggaggagaacgcgctcaccggccggctccccggcgagatcggcggctgcgcgcgtctcgtcgagatcgacgtctcccggaacgcgctcacgggcccgatcccggcgacgctgtcggcgctgtcgtcgctcaactcgctgaacctgtcgcacaacgcgatcaccggcgcgatcccggcgcagctggtggtgctcaagctgagctccgtcgacttctcgtcgaaccggctcaccgggaacgtgccgccggcgctgctcgtgatcgacggcgacgtggcgttcgcgggcaacccggggctctgcgtcggcggcaggtcggagctcggcgtgtgcaaggtggaggacggccgccgcgacgggctcgcgcggaggtcgctcgtcctcgtgccggtgctcgtgtcggcgacgctgctgctcgtcgtcggcatcctgttcgtcagctaccggagcttcaagctggaggagctcaagaagagggacatggagcagggcggcgggtgcggcgcggagtggaagctggagtcgttccacccgccggagctcgacgccgacgagatatgcgccgtcggggaggagaacctgatcgggtcgggcggcacggggcgcgtgtaccgcctcgcgctcaagggcggcggcggcacggtggtggcggtgaagcggctgtggaagggcgacgcggcgagggtaatggccgcggagatggccatcctcggcaagatccggcaccggaacatcctcaagctccacgcctgcctctcccgcggcgagctcaacttcatcgtctacgagtacatgccgcgcagcaacctgtaccaggcgctccggcgagaggccaagggcggcggatgcggcgccgccgccgccgagctggactgggctcgccggtgcaagatcgcgctcggcgcggccaaggggctcatgtacctccaccacgactgcacgccggcgatcatccaccgcgacatcaagtccaccaacatcctcctcgacgacgactacgaggccaagatcgccgacttcggcatcgccaagatcgccgccgaggactccgccgagttcagctgcttcgccggaacccacggctacctcgcccccgagctcgcctactccatgaaggtgacggagaagacggacgtgtacagcttcggcgtcgtgctgctggagctcgtcaccggccggagcccgatcgacccggcgttcggcgaggggaaggacatcgtgttctggctgtcaaccaagctcgccgcggagagcatcgacgacgtgctggacccgcgcgtggcggcgccgtcgccgtcgtcgtcgtcggcggcggcggctgccagggacagggaggacatgatcaaggtgctcaaggtcgccgtgctctgcaccgccaagctgccggcggggcggccgacgatgagggacgtggtgaagatgctcaccgacgccggcgccgggccgtgcagcccccgcggccagccgccggcggcgagggcttgcgccaggagcaagagctgctgctgaattttagagtagattctgctttctcgcctctgtctgcatctgcatttctgcagccaactctcgctgaattttaatctttgatgtgtactagggatcatactgtagatgataatgcatttgcaggtattatgtaaaatggttgacaattaaggtagtagtccactttaattatagtttaaacctctgattttgtcatgcttttataccgatattttaaaatggatttgtacatatatgaatatttggttggc

SEQ ID NO: 8322 - DNA, 1985 bp, Oryza sativa
  ref <308>: DATABASE ACCESSION NUMBER: AK105670
  ref <309>: DATABASE ENTRY DATE: 2002-08-28
atcaaacctctcctcctcgtcacacaccccgtctcgccgccggcgatgcgcagacgccaatgacgacgacgacgacgacgacgaaccacagcgccaagagcatcctcctcctcgcgctcctcctcgtgccgcacctcgccgcggcgtcgtcgggagatgcgctgatcagccagcgccgccgcctgctcgactaccacggcggcggcggcggccatggcggcggcgacgtgtacgtggacccgtcgtacacgttcccgaacgcgcggctccgcgacgcgtacgtggcgatgcaggcgtggaagcgcgccgtcctgtcggacccgcacaacgtgacggggacgtggatcgggcccgacgtgtgcgcctacgagggcgtgttctgcgcggcggcgcgggacgacccgcacctcgtcgtcgtcgcctccgtcgatctcaaccacgccgacatggcgggccacctccccgacgagctcggcctgctcgccgacctcgccgtgctccacgccaactccaaccgcttctgcggcgccgtgccgagcaccctcgagaggctccacctcctccacgagctcgacctcagcaacaaccgcctcgtcggcgcgttcccggacgtcgtgctccggctgcccagcctccggtacctcgacctccgcttcaacgacttcgagggccccgtcccggccgagctgttcgaccgcccgctcgacgccatcttcctcaactccaaccgcctccgcttccggatccccgacaacgtcggcaactcgccggcgtccgtgctcgtgctcgccaacaacgacttcggcggctgcctcccggcgtccgtcgccaacatgtccggcacgctcgacgagatcatcctcatgaacaccgggctcaagtcctgcatcccgccggagctcggcatgctcaccggcctcgccgtgctcgacgtcagccacaacagcctcatgggcgccatccccggcgagctcgccaggctcgagaacatcgagcagctcgacctcgggcacaaccgcctcaccggcgacgtgccggagggcatctgccacctgccgcacctccagaacttcacctactcctacaacttcatcaccggcgagccgccggtgtgcatgcacgtcaaggcgttcgacgatcgccggaactgcatccccggccgccccgaccagaggccggcggagcagtgccaattccaaaacacccaccacgtcaactgcgacgcattcaggtgcaagaagttcgtcctcccgtcgcctccgccaccgccaccatcgccgccgccgccgtctcctccaccgccgtcaccctctcctccaccaccttcacctcctcctccatctccaccaccaccatctccatcgcctcctccaccttctcccccgccgccgtctcctccaccaccatcgccatcgccgcctccaccatctccaccgcctccatctcctcctccgccatcgccagtgtactacagctcgccgccgccgccgtactacgaggtttcaccggaggacaggtacctctcgccgccgccacctccggcgtaccacgaggcgccgccaccgccgtactacgaggtgtcgccggaggacaggtacctgtcgccgccgccacctccagcctaccaagaaacgccgccgccgccgccgcagtacgaggtgtcaccggaggacaggtacctgtcgccgccacctccatcaccggtgaagtggaagctgccggtgtacgagtactcatcgccgccgccgccggcagcaacatggaagccataaaattaaaatcgattctttcgggattttttttttcacacactatgatcatacatattgttaaatttgttgtatgttgagtaaaaaaagggatgctaaatcttttctgttactacccctccttcctgattttcttttgcttgtactgtatgtatttttcttcttttatttttttctccttctttgaatgaacagcaggaaatctgcttttcctcc

SEQ ID NO: 8323 - DNA, 1568 bp, Oryza sativa
  ref <308>: DATABASE ACCESSION NUMBER: AK105671
  ref <309>: DATABASE ENTRY DATE: 2002-08-28
atcccctccgcctccactcccctctcccctcctctcaacccccacagctcgcgccgccgccgcagctagggtttctctccgccctagcctacctcgcggagacctaccacccgaagcttcgggaaccctcgcatagccgccatgagcgacggcaaggactccctcgacctctccggcctcggcgccgccgtccccaacgccaaagagctcagcgcggaggacaaggccaacctcgtggagtcgattaagaacacgctgcagggattggcggcgcggcacacggacgtgctcgagagcctcgagcccaaggtcaggaagcgcgtggaggtgcttagggagatccagagccaacacgatgatctagaggcgaagttctttgaggagagagctgcacttgaagctaaatatcagaagatgtatgaaccactttactccaagcgttatgaaatcgtgaatggtgtggttgaggtagatggtgtcaccaaagaagctgcagatgaaacccctgcagagcagaaagaggagaagggtgtaccagagttctggcttaatgccatgaagaaccatgaaattctgtctgaggagatccaggagagggatgaggaagctcttaagtacctcaaggacatcaaatggtacagaattagtgagccaaagggtttcaagcttgaattttacttcgatactaatccattcttcaagaactcggtgcttaccaaaacataccacatgattgatgaagatgaaccaattctggagaaagccattggtactgaaattgaatggttccctgggaagtgtttgacacaaaaggttctcaagaagaaaccaaagaagggctcaaagaacacaaacctatcacaaaaactgaaaactgtgagagcttctttaacttcttcagcccacctcaagttcctgatgatgatgaggaaattgatgaggatacagctgaacagttgcagaaccaaatggagcaagattatgacattggatctaccatcagagacaagatcattccacatgctgtttcatggtttactggagagtctgctcaagatgaggacttcgaaggcattatggatgatgaagatgatgacgatgaagatgacgacgatgatgaagatgaggatgacgagggtgatgatgaagacgacgaggatgaaaagaagggcggacgagttcctgcaggggaagggcagcagggagagcgacctgcagaatgcaagcaacagtaagatgcttcctacctgagcgtttccaaagtccggtcctggagtgaagaagaatgtttggttcggcttgatgcaatgtctcgtccatttggtttggagagccagttggggaagtgttgggattgagttggtttagtggaactggcgggggatatttttttcgggacatggtattatatgtttggtagctttttccattgttgtattgggtcgacatatcttgtgcgaagcttatggttgagtgatgaatatcgccggtttggtattatcatattgccaataccactggcatagtgctgagaaattttgatctaggagaggcaatgtttttgtgcg

SEQ ID NO: 8324 - DNA, 3045 bp, Oryza sativa
  ref <308>: DATABASE ACCESSION NUMBER: AK105672
  ref <309>: DATABASE ENTRY DATE: 2002-08-28
ggatcggtcagcttgaatcagtcacccaggacactgtcgtatagtccaactgaaaatgccgtcctgatttgctctgatgtggatggaggctcctatgaactctatatagttccgaaggattctgctggcaggactgattatttgcaggaggcaaagaggggagctggtgggtcagctgtttttgttgcacgcaacaggtttgcagtgctcgagaagagtagcaatcaagttctggtgaagaatcttaagaatgaaattgtaaagaaaagccctcttcctattgcgatggatgcaatttattatgctgggactggtaacttgctgtgcaaagctgaagaccgagtgaccatctttgatctgcagcaaaggttaattcttggcgagctccaggcacctgctgttaaatatgttgtttggtcgagtgatatggaatctattgcattgctgagcaagcatgcggtggttatagcaaacaagaagcttgtccatcgttgtacgctccatgaaaccatccgtgtgaaaagtggtgcctgggatgagaatggtgtgtttatttacactactttgaaccatatcaagtattgtcttcccaatggagatagtgggatcattaaaacccttgacgttcctatttacataacaagggctattgggaataatattttctgcctagatcgtgatggagagaacaagctgatcacagttgatgcttctgaatacattttcaagctggcccttctacggaaacgatacgatcatgtgatgagtatgattaagaattcccagctgtgtgggcaggctgtgatttcttatttgcaacagaaaggctttccagaagttgccctccactttgtgaaagatgagaagacaagatttaacctagctcttgagagtggtaacatccaaattgcggttgcttctgccaaagagattgatgacaaagatcactggtaccggttgggaatcgaggccctgaggcagggaaacgttggtattgtggaatatgcgtaccaacgtacaaagaattttgagaggcttgctttcctatatcttattactggttacatggacaaggtggggttcatgtgcaaaattgctggacagaacaataacctgatgggtcaattccacaatgctctgtatcttggtgatgctatgaagagagttgagatcctagagaatgctggacagctacctcttgcttatattactgctgccacccatggactcacagaaattgctgataggcttgctgctgaattgggtgaaaatattccttctctacctgaaggaaaaactcgctctcttttgatcccccctgcacctctcacagccagtggtgattggccattgcttagggtgatgcgtggtatctttgagggtggactggatgctactgggaaggctgaacttgaggaagacgatgaagctgctggtgctgactggggtgatgaggacctggatatggttgatgcaagcgaagcgatggcgaatggtggtgatggttttgatgctgaggagggtgaagcaaatgaggaggatggtgaggaaggtggctgggacctagaagacctggaacttccgcctgaagcagagacccctaaaaacgccggtaatgcactctcagtggtctttgttgctcctcctccaggcatgcctgtcagccagatttggactcagaaatcttctcttgctggggagcacgcagcagcaggaaactttgacactgcaatgagattgcttagccgtcaattgggcatcaaaaactttgctcctctcaagcccctatttctcgatctgcacatgggcagccactcatatcttcgtgcacttgcaactgcccccattattccggttgctgttgagaaaggttggagtgagtctgcaagtcctaatgtgagaggccctcctgcacttgttttcaccttctcacaaatggaagacagactcaaggctgcctacaaggccaccacagaaggtaagttcccagaagccctgaggcagttccttaacatcttgcataccatccctcttatcgtggtagactcgaggagggaagtggatgaagtgaaagagttgatcgagattgtgagggagtatgtccttggcctgaggatggaacttaagaggaaggaattgagagatgatgtcaaccgccaacaagaattggcagcttacttcactaactgcaagcttcagagagttcatatgaggcttgtgcttggaagtgctatgggtttgtgctacaagcaaaagaactttgctactgcagagcactttgcaaggatgctgctggagaacaaccctaatgagagccaagcaaagagggcccgacaggtgcagcaacagtgcagtggaaagaaggatagctgtgagctgaactatgactacagaaatccatttgtcgtctgtggtgccacatatgttccaatttaccgtggccagaaggatgtttcctgcccgtactgtggatcccggtttgttccttccatcgaagggcagctttgtaccatatgtgagcttgctgtggttggtgcagatgcttcaggcctcctctgctcccctacgcagttgagataagtggcgctagatgccttatttccagctcaggaaaaacaattggacctttaatgcttacatggatggaaaaatgggatgttagatttgatttgtgatcagagaaggccattacatttgtgcaaaattttgaaatttaatagttcatacaaaaaagtgtgcaaatccaagaccaggctcaggataccaaggaacctcatcttgcctatgtaaattaactactttgagcagctgtggctagaagaatggatatatatcggccatgcctcatgtcagagcatttcagaataaatattcgtgtttagaatagactttttgatggtgaaatatttcaccgaggaattgtgagttcttacttcaaagcacattgcaaattgaggtcgtgttcctggatggttcgtcatttgtcgctgttatcttaacaagcggatttcacagcataattttttgctgagctacataaaagtg

SEQ ID NO: 8325 - DNA, 1721 bp, Oryza sativa
  ref <308>: DATABASE ACCESSION NUMBER: AK105673
  ref <309>: DATABASE ENTRY DATE: 2002-08-28
acatgaaaaggctaggggcattataattgctgcacttgatgaggttgcttggttgtacaatattagaggagatgatgtgcactacagcccagtggtccattcttattctattgtaaccttgcacagtgctttcttttatgtggataagagaaaagtatctgttgaggtccagaactacatgactgataatggtatcgatatcaaagactataatatggttcaatcagatgcaagcttgcttgcatctggacagctaaaaggttctgcagttaatggtagctcgtatggggaaaatgatatgaatgagaattcaaaagtttggattgattcaaattcatgctgtcttgcactgtactcaaaactggatcaagatcaagttctgatgctgcaatcacctattgctcttccaaaggctgtgaagaatcccgtggagctggatggtttgaggaaggcacatattcgagatggtgctgctgttgtgcaatacctggcttggcttgacaatcagatgcaagagaactatggagcttctggttactttagtgaggccaagggatcacagaaaaagcagcatatggaagtaaaacttactgaggtttctgtgagtgataaacttgaaggtttccgtgcatctaaagagcacttcaaaggtctgagtttccctacgatttcatccgtgggaccaaatgcagcagtgattcactattcacctgaagcaagttcatgtgctgaacttgatgctgataaaatatatctctgtgactctggggctcagtatcttgatggtactacagacattacaagaactgtacattttgggaaaccctctgagcatgagaagtcatgctacacagctgttttgaaaggccatattgcactagacagtgctgtatttcccaatggaacgacagggcatgctcttgatattctcgcacgaacaccactttggagaagcggtctggactatcggcatggcacaggccatggaattgggtcttatttgaatgttcatgaaggtcctcatctaattagcttcagaccttctgctagaaatataccactacaagcatcgatgactgtaacagacgaacctggttactatgaagatggaagctttggtataagattggagaatgttctgatagttaaagaggctaatactaaatataatttcggagataagggttatttggcatttgaacatataacatgggctccataccagacaaaactgatagacaccactttgctgaccccggccgagattgaatgggtaaacgcatatcacgcagattgccgaaaaattctgcaaccatacctgaacgagcaggagaaggaatggctgaggaaagctactgagcctatcgctgtgagctgctgttaaaccatcaactagctggttggctctacatggacacatggcacagggtctcgaccggccattcgtgctagatgtgcagaacggcaaacgatttgtggcgtgccatgcgtagataaatggttatcccgcaattcaattgcttgcaataagtgtgaacagcagaataaacatcgcaattgattctttggcttgtcatgctgctgaggttcatgtgagggacttggaaataaagctaggactggaaagcttccctcccatgaatctgcaggtttcatgtgtacagttatattgttgggtatcgagtgcctaatatgatttgcaatgaaaaataaagggtttg

SEQ ID NO: 8326 - DNA, 1852 bp, Oryza sativa
  ref <308>: DATABASE ACCESSION NUMBER: AK105674
  ref <309>: DATABASE ENTRY DATE: 2002-08-28
tgccaaagcacctcaatgattaattctgacctttcaattttcagaacaattttgacaatcttagacactactgttctcttagcaaattcacaaacttcagcaagttttcatgggaggaccctccctctgctatgcttgtgcatgccgcatgcttccactttgctgccctcgccttgatctccttgtcgtcaaccagctgctcgaccttgttcttgatctcctccttggtgacaacccctcgctcatccgcctggagcttcactccagtcccccacacattgcatatgtagctctggttgcagtactggtcggcgaagtacggccagcacagaaacggcacaccatgccggagcccttccatcgtcgagttccacccgcagtgcgacacgaagcatgcgatcgacgggtgcgagagcacgctctgctggggagcccaaccgacgatcattcccttgccgctgacacggtgcctgaactcctccagccagccttcgccggcaccattggtgaagttttgcctgatcacccacaggaatggccggccagaaagcactagcccatcggcgagctcttggacccgcgccatgtcgaagacggtgaagctcccaaacgccacgtagacgacggagcaggcgtcctgttcgtcgagccatgccaggcaggtcgtgtcctccggccagaaatggccggctaacctcgacgtcgccggcgcttcgagcggtccaaccggcagcacgttggggacgagggccagcgcccccggctcgatgtcctggaacgtgttgcagatgatgacctcggccgaggatattgtcgggttggtcttgaacacgttctggatgaccatcctgcgcccgtccggcgtgccgctcagggtaacccaggggagctcgactgctagaacgggcggcatcgtgggtctcaattggatcatctcgtttctcctcacattccctgaaatgattatatgttcttgatctcaattaaccacatgagtaatacaacaaacaactccaatacgacatttgtaattgtaagaggcagaattcatgattttgcatttgctgttcatggatgattactgatgtgttcttaccaatttcgtccaggacgccatcctgggtcagcttggggacttgcagcctgtgcgccacaacggcggcggagtaagtcgagaacaaggcgacgtggacacccaccgtggcggccagctccgtcacccaggccatggacacatcggcgatcacccacctgatcccctccgatctgatcatctcctcgatgccgccgagcatggcggccggcaagccgtcacccagcttggcgatgttggcacggtcaccggcagggtccatgccgtccgggaaggacaccatgtggatcccatcagggatcgcccccgtctcgttcgccatggcgttgatgacgcggtcgcggttgaagtcggtgtgcacgaattcgacctcgaagccgaggccggcgagccggtgagagagctccatcagaggcatgacatggccttgcgcagggaagggaagcaccatgacatgaggctgaggacgaggaggaggaggagccgccatggatgccaatggagcgtgctagtgtgtgacttcactgcaagaactttttgagttgggtgtgatttatacaagaaagttgtcagttgccattcagtctatgtggatctggatgtgcttagatgcctagaaaggcgatacagtcggcgctgttgcatcggatcgtgatgcatgcatcaccttttttgtactgcctgttggacctgtagacatctgctttcttttttctggtacagcttgatgttgaaaatgtgttgtttcgagtgacagcc

SEQ ID NO: 8327 - DNA, 1518 bp, Oryza sativa
  ref <308>: DATABASE ACCESSION NUMBER: AK105675
  ref <309>: DATABASE ENTRY DATE: 2002-08-28
agtataaagaagtggagaggttgtacaaggagcgcctcaaggagtgggaatttagagagagagaaaaagaatatcaaagacaacatgagaaggaacgagaaaaggacagggaacgtgagcgcaaaagggagatcatgaagcaggaagatgatagtgatgaagaggacaataggaaaagacgacgaaggagcagtggcacacttgaagagcggaaaaggaggcggctgcgtgaaaaggaggaagacttagcagacaaattaagggaggaggaagaaattgctgaagcaaggaggcgagctgtagagttgcaacaacaagcggacgaagcggctgcagcggcagcggcagcggcagtggtggcagaatctgctacagttatggaggttgatggcgatgatggaaaggaaagagatgcacaagacaaaccagctgttgtggatgttggtaacaatgatgcctttgctaatggtgttgattccggtgttaataatggtaaagacaacattggtgatggcaaaaacatgacacctggtgaaatttcggataccaagcataataccagtgctccagcaaagaaacttggttttggtctgattggctctggcaagcggacatctgtaccttcagtttttgctgaagaggatgacgaagataatgatgataagcgggcaagacctttagttcctattgattactcaacagaggaactgcaagctgttcaggccaattcttctactggccaaccaaatattgtagcagctgctgaatttgccaagcgcatattggtaacaaaggatgataaatctgatgttgagaaggataggagttggagatcaagtgatagaacgaaccaaagggatagagatagaaatgatcaagatgttggtcgcaccagtgatgagagaagggaaaagacacatgaccgagagaaagataagcaagataagccaaagtctgagaacaagaatattttggatgcaaaacaattaattgacatgattccgaggacaaaggaagagctttttgcctatgatattaattgggcgatatatgacaagcatgagttgcatgagagaatgaggccctggattgcaaagaagattattgaatttctgggtgaggaagaatcaactttggtggattacatcgtctcatgcaccaaagaccatgtccaggcatcaaaaatgttggagcttctacagtcaatcctggacgttgaagctgaaatgtttgtccttaagatgtggagaatgcttatatttgagatcaagaaagtcgaaacaggactatcagggagagcaaaggcatgatgttgagcgattgctgttattgcattttgatttactagttccactgccagctcgcttgcaggctaatagtgtaagaatactcagcatctaaatacatcgatcttgactccggatttttcaaaaagattaagaggttgaattaatgttcatcattcgttctgttgtatacatgaaccgataataattgcttcttgtaacttttgagctc

SEQ ID NO: 8328 - DNA, 1733 bp, Oryza sativa
  ref <308>: DATABASE ACCESSION NUMBER: AK105676
  ref <309>: DATABASE ENTRY DATE: 2002-08-28
catcaatttcaggtgctggttgtggcaatggcggcggcctcggccgcggccgcacagcgtgacgatctcggagttcggggcggtgggcgacggggtgacggtgaacacgctgccgttccagaacgccatcttctacctccggtcgttcgccgacaagggcggcgcgcagctgtacgtgccccgggggaggtggctcaccggcagcttcaacctcaccagccacctcaccatcttcctcgagaaggacgccgtcatcatcggcgccaaggaggtatcagaatggccaattgtagaaccgttgccatcatatggccaaggaatcgatcttccaggtgcgaggcatcgcagcttaataaatggacacaatgtgactgatgttgtaattacagggaacaatggaatcatagatggccagggtttgacatggtggaactggtttcgctcgaataagttgaactatagccgccctcatcttgtggagtttgtggattcggaagatattgtgatttcaaacttgacattattgaattcccctgcatggggtatacatccagtgttttgtagcaatgtaatggtccacgatgtcaccattcgaacctcattggatgctccacttaccgatggaattgttccagattcatgctctaatatgtgcattgaagatagcagtattagcgtcgctcatgatgctatctcgttaaaaagtgggtgggataactatggcattaccattggaaggccggcatcagacattcacataagcagagtagatctccaagcctcacttggagctgctcttgcatttgggagtgagatgtctggtggtatttcggatattcatgttgatcaccttaatatccatggttcctctagaggcatcctcttcaagactgcacccggccgtggaggttatataagagatgttgtaatatcagatgtccaaatggaagatgttaatgtcgccattaaattcactggcgattggtcgacacacccagataaccattttgatccttctgcgctcccgatgatcaaccgaatcacactgaagaacatggttggaacaaacatatcagttgctggagttttgtcgggaataaacggtgatccattcaccaatatctgcctctccaacatcagtttctccctagctgattcgacacaatccagctcttggtcttgctccaacatctccggatactctgagttggtctttccagagccttgcccagacctccaccattcatcctccaattcttccatctgcttctcccttcttacctaccatgcccttgctgcagcataagtgcataaagtaccaagtgtccatccttcgctgttccagtccttgtacaatccagagaaaaatccaacttttgtcaccatcttccttccaaattctttccaaataggtgtacaaaagaatcaccactcttcttgtgctaccagctttgaggctcatggatggaacaatctatgctggtttgtcaatgaggaagtctagaggggttctctgcacaatgaagtgtttgcttgtacagttaagatttgttcattcaatctgtaagaaaaaaacatttttttttggtagaggggataagtcttagagagtctctccatactactgtcaattttggtcatataaaataaaacatattatgattgagtcaccctgtatatcccaatcaatcttgtgagagcatccaataaaaaaaaacagcatatcacatggt

SEQ ID NO: 8329 - DNA, 2187 bp, Oryza sativa
  ref <308>: DATABASE ACCESSION NUMBER: AK105677
  ref <309>: DATABASE ENTRY DATE: 2002-08-28
aaatctccgaaccacaaattccaattcaaaaactttttccccgagtagcctcgccgtcgccgtcgccggagatggaggcggcgcgggagtcaatggcggcgctcgtcgacgccggcctctacgactgcgcccagacgctcgggtgctttcttgtgtcttcatcacctgcgagcagcgaggctggtatgtccatgaaggtggaaagcttggcactgcatggtgatgctttgcatggagagaaagaatttcgcagggcactgagtgcctacaaacaagctatgcaatacagcaaaaacattcctaggcaagcaacaagtaatactagaagctcagtaactgccactggccggtctccttctccaaattcttcaagtcctgcaccactcaatgaaaatgaggtgagatttaaaattgcactttgctattctgctctacgtgagcatcgtgaagcacttcaagagatggaagggattccttctaaagcgaggactctaaaaatgaatctgatgttagggaagctatatcggatatccagaaataatcgtgcagctgctgtatgttataaagagtgcctgaggcaatgcccttatgtttttgaggctattacagctttggctgaaatggggctttcttcaaaggagttctctttgatattctcacaagcaccaaatcgaggaggcaaggctccaggtgactctttagatgcacagcgttggtggaaccgctatgttgaggcccaatgttgcattgcttcacatgattataaaggtggccttgacatatatctagacttaatgcagcgattcccgaacaatgtgcacatcttgctggaaattgctaaggttgaagccatcataggtaggaatgatgaagctatcatgaactttgaaaaggctcggttaattgatccaaacatcatgacatatatggatgagtatgcaattctccttaagtcaaaatctgactacacaaagcttaacaagttggtacatgatatgctgcatattgaccctgcaagaccagaaacatgtcttgctcttgcagcattgtgggaaagaaaagatgaaagaaaagctttgacatatgctgaaaagagtctccgagttgatgatagacatataactggatatatcatgaagggaaatcttcatcttttgttgaatcgacctgatttggcagtcacagacttcaggggagctcaagaacttagggccgatcttcgctcttatcaaggattggtacgtgcttatctagcgctctctaaatgcaaagatgcattattcactgcacgtgaagcaatgaaggttatgcatcagtctgcaaaagctctcaaattagttggtgatgtgcatgctatcagttccagtgggagagagaaggctaggaagttctatgaatccgccattcgtcttgaacctggatttctgggagctgcattggctttggctgatctgcatgtcgctgaaggacgaaataaggatgcagtattgctgcttgaaagatatctaagacagtggacagatgattctctacacatcaagttggctcaagtttttgcagcaacgaatatgctttctgatgcactttcccactaccaatctgctctaaggataaacccacataatgaggccgcaaagaaaggattggaacgcttagagaagcaaatgaagggagtagacccggacgcgcctgaagaggacgaagagaacgaagctgacgatgtcgacggtgatcaagacgacgctgaactactgtagaaaaaacctgatcaactcacatcaacccaaggcaccacctcttaccaagcgtcaactgcgaaagaggaccaaatctgcagccgctgccacagcaggagagcccctcaattgccatatatcaactagcaacttggaaggcacggcaactggaagacgagtgacgacgacgggtgcctctcccttaccgcgagtaagttttcttgctaacgcgaaacctcgtcgtagagttgcaatgctcaccgtaggtttatttttctaatgctggggaaatgtgaactgaacttgttggtttctagtcaaactttattactacctctgtcctaacatatagcaacttagtacccaacagtccaaattcctggtatctaggatgtctcatttgatattagggtgctatattttgagacggggtagtagttaatttgctctc

SEQ ID NO: 8330 - DNA, 1899 bp, Oryza sativa
  ref <308>: DATABASE ACCESSION NUMBER: AK105678
  ref <309>: DATABASE ENTRY DATE: 2002-08-28
acggtacgcggtgctcgcgctcactcgaagatggacacgtggcacgtcgccgtcgccgcaatcctcgtcctcatccccttcctccggctcatcctctcccgccgcggcggccgcggcggcgggaagcgcggccgcctcccgccgggtcctccggccgtgccgttgctcgggagcacggtgtggctgaccaattcgctggccgacgccgagcccctcctccggcgcctgatcgcgcggcacggccccgtcgtctccctccgcgtcgcgtcccggctgctcgtcttcgtcgccgaccgccgcctcgcgcacgcggcgctcgtcgagaagggggcgtccctggccgatcgccccgccatggcgtcgacgaggctgctcggcgagagcgacaacctcatctcgcgggccagctacgggcccgtgtggcgcctcctgcggcgcaacctcgtcgccgagacgctgcacccgtcgcgcgtgcggctgttcgcgccggcgcgcgcgtgggtgcggcgcgtgctcgtcgagaagctgcgggacgagaacggcgacgcggcggcgccacacgccgtcgtggagacgttccagtacgccatgttctgcctcctggtgctcatgtgcttcggcgagcggctcgacgaggacgcggtgcgcgcgatcgccgtcgcgcagcgggacgcgctcctctacctgtcgagcaagatgcccgtcttcgccttcttcccggcggtcaccaagcacctcttccgcgggcgcctccagaaggcgcacgccctccgccggcggcagacggagctgttcgtgccgctgatcaacgcgcggcgggagtacaagaaacggcagggcggcgccaacggcgagccgaagaaggagaccacgttcgagcactcgtacgtcgacaccctcctcgacatcaagctccccgacgacggcaaccgcccgctcaccgacgacgagatggtcaacctctgctccgagttcctcaacgccggcaccgacacgacgtccaccgcgctgcagtggatcatggccgagctggtcaagaacccatccatccagtcaaagctccacgacgagatcatggccaagaccggcggcggcggcggcggcggccagcgcgaggtctccgaggaggacatccacgacatgccgtacctgaaggcggtggtgctcgagggcctccggaagcacccaccggggcacatggtgctccctcacagggcggcggaggacatggagatcggcgggtacctcatccccaagggcaccacggtgaacttcatggtggcggagatgggaagggacgagaaagaatgggagaagccaatggagttcatgccggagcggttcctcgccggcggcgacggcgagggggtcgacgtcacaggcagcagggagatccggatgatgccgttcggcgttgggcggaggatttgcgccgggctcggcgtcgccatgctacatgtcgagtacttcgtggcgaacatggtgagcgagttcgagtggaaggaggtcgccggcgacgaggtggacttcgccgagaagatcgagttcacaaccgtcatggcgaagccgctgcgcgctcgtctcgtgcccagaagggcctagatcaccatgtatgtatgcgttagggtcaccgtttcagtagcttagctcaatccaaatgcatgcttcttactactctagtggagttcttaattaaacactacctagtacaatacaataacctttgttctgaatgatcagtggcgatatagtgatatggatatgatgcttcttaattaattagtttctctacttagttcagtactttttacttccatgctctgaaattctgaatagagatgcatgattagtggtgaaatgtaaaaatagccggtgtaattaaggtgttcctattgaccg

SEQ ID NO: 8331 - DNA, 3336 bp, Oryza sativa
  ref <308>: DATABASE ACCESSION NUMBER: AK105679
  ref <309>: DATABASE ENTRY DATE: 2002-08-28
agaagagactagtagttgtttggtcgtcttcttccttcgactcgaagagatcgatcactctagtcttccccagctatctatggcgtccccctgctcccaaccctagctcacccatgggatccaacactccaccctcccgcgccgccctcgagcccttcgccaccctcgaccccgccgccctcgccggcctcccagcctcctccccgctcaccgtccgctccgccgccatctcctccccatacctctacctcggcaccggcggcggcaagctcctcctcttcaccctcgattccccctcccccgacttcctccgcctcctccccatcggccccacccgccccgtctccgccatcctccccctccccgccgtcgcccgcctcctcctcctcgccgacggcctcctcctcctcgcggaccccctcctctcccgccccgtccgccgcctcggctccgtccgcaacgttgccgccgtcgccgcccgcgcctccgaatccgacgatgatcgcccctcctgctccctcgcggtctccgtcgggaggaagctgctcctcgttgacctcaccctacacgacgccgacgagttggaggtgcggacgcgtgacatcgccctcgtcgatggcgtcaaggcgctcgcttgggtcggggactccgtcttcgtcggcactgcctcgggctactcgctcttctccaccacgaacgcccaaggtggcgatatattcacgctccctgagtcctccaggccacccagggtgaagcccctgtccgggggcgacgaggtcatgctgctcgtcgacaatgtcggggtcgtcgtggaccgatcggggcatcccgttggaagcagcttcgtctttaacaccacgccggattgtatagcggaggtgtacccctatgttgttgttgccggggactccaaggtagatgtctacagaagaaagaacggcgcacatttgcaggctattccttttgcaaggcctggtacaggtggactaattgtagcgagcgaggatgccggaattggcagcgacgtagttgtgattgctacggcttataaggtattttgctaccgtaaagtatcagcggtggaacagatcaaggcactactacgaagaaagagttatgcagaagctatttctttgttacaagagttcgaggccgatggggaaatctcaaatgacatgatttcctttgtgcatgcacaacttggattcttgttgtttttcgacttgcgtttcgaggatgctgtaaatcatttcttgctctcggaaactatgcaaccagcagaaatatttccattcatcatgcgggaccctaatcgttggtcagatctggtgccaagaaagcgttattggggcttgcatgctcccccaaagcctcttgaagaagttattgatgatgggctagtaacacttcaacaggcattgtttctcaaaaaggcaggtgtggacacagttgtggatgatgatttcctttcaaatccaccaagcagagctgatctgctggaagtagcaatcagaaatattatcaggtacctgtgtgcatcccgagagaaggatttatcttcttcagagatggaaggggttgatactcttctgatgtatccttatagagctctcaatcttgttgatgacatggagaagcttgcatcatctcagaatagctgtgttgtggaggaactagaatcacttttggatgactctggacatctgcggacgcttgcattcttatatggcagtaaaggaatgtgctccaaatcccttggtatctggcgtatcttagcaaggaattacagcactggtttgtggaaggatcatgcaatcctacctgaaactgactctcttgaaacttctgttggtaaaatgtctggtgaggaaattgctgccgttgaagcctccaagatactccaagcatcatctgatcaggactttgttctggagcatcttggatgggtggcagacattgatcaagagcttgcaactgcaattttaacatctgaaatgagggaaaaacagctttctcctgaaaaggttgttgctgccattgatccagagaaggttggcattcaccaaagatatttgcaatggttgattgaggaacaggaatgtgatgagcctcactatcacacgtcatatgcattgtccctctccagatctgccatggacgcagtccgtttgggatccaacaatgaagagagaaacaataaagaatttgattctgatatgcagttcatttatctattgagggaaaggttgcaattttttttgcaatcgtcagatttgtatgacccagaagaagtgctatatgtgatttcagaatctgagctatggctggaaaaggctattttgtataggaagatgggccaagagaacattgtacttcagatattagcgctgaaactggaggatagtgaagctgctgagcagtactgtgcagagattggtcgagatgatgcctatattcagctgttggatttgtatctggaccccaaaaatgggaaaggacccatgtttacagcagccgttcgacttctccataaccatggggaatcattggatccaatacaagtgttggagagattatctgctgatatgcctcttcagctagcatcagatacaattttgcgaatgctgagagcccgggtgcaccatcatcgtcaagggcaggtagttcataatttatcacgcgcaacgaaccttgatgcacggttgaccagattagaggagaggtcaaggcatgtgcagctaactgacgagagcatatgtgattcatgtcgagctcgccttggcaccaagctgtttgtcatgtacccagatgactcagttgtatgctacaggtgctaccgaaatcaaggtgattctgcatctccacatggacgcaacttcaggaaaggtggtatatttaaacaaagctggctcgttagtagataacaaagttacaagacaaggaaaccatggatgtgcgtgcctctgtttcagtgctatgcgtcatgaaaggagagcatatataatttggtggtgaagcctcccctttgcatttgaaggagcattcagcagcgatacggtctgaaaccatctgaaatgaagcattatcgttgatcatggcgattggagggaggcagagagagcagtggtcctggaaggtgataccgtagcttccggtggtcgaccagaaaccatgatgtttttttgtccataggattgttgttttgttttgataggataagatgggctacataattttaggtatcgctaggatttaatttacactgtagacaaaacataaggccttttgtgtctaatagaagaaagaaagatggagagcatttgcccctgttggaac

SEQ ID NO: 8332 - DNA, 670 bp, Oryza sativa
  ref <308>: DATABASE ACCESSION NUMBER: AK105680
  ref <309>: DATABASE ENTRY DATE: 2002-08-28
gagacgtgcgatttttactcctcacggtaaacgattcttgtgaacgccggcgctccatgtagcatggtggggggtttagtgctctcccaggcgcagcaccaggtcgggatcgccgcgacgtcgccggcgcaggcgcaggcggcggagcaggcggccttcagggggagggatcaccgggcgccatgcgcgaacctggacgaggcgaggaaggcgcacgcgcggcacgtcaagctcggcctgctcagcacgccggagggggcgccggtgagggtcgtcaccaacctccggatgagcaaggagtgccacgcgtacagcgcgctcatctcggagatcttcgggagggagatcgtcgtcagggaccggaaccggttccaccgcttcaagcgcggcgcatgcagctgcagaaactactggtgagacggctgggctggcatagtggcatggcatctctctgtgattgatgtaaatatggacattttccttgtgtttcatgcaagtgtaagattaattcctttgttgtgtatgatccacaatgttagatcaattatagtattatactgttgtgcaatgaaaacaagactgatgagttatataaatgatggtaaatatgcatttcgagtaactagtgcaactattgttattgatatttgaaagagatttttcatgattt

SEQ ID NO: 8333 - DNA, 2339 bp, Oryza sativa
  ref <308>: DATABASE ACCESSION NUMBER: AK105681
  ref <309>: DATABASE ENTRY DATE: 2002-08-28
tgaaaatttgcctgttattcatgaatctagaaatacagaccataccatgagtacacagagcaaagataagtcctctgcagcgaataattcgtcatcaagttctccttcatcttctgaggtgggtggtgctccagcagtacgaaggatgaaagtgaaagatgtctcagaatatatgattagtgctgcaaaagaaaacccccagatagctgagaggatccatgctgtcttacttgaaaatggagttgtcccaccacctgatttgttttcagaagaatcaagggaacaacctaaagaccttattgtgtatgacacatctctgtttcaaactaaagatgaaatgataaagaggatgaatgagcttgaatctacaacaaacgctgatttttgtcatggtccttcggtgccacatccccctggacatgaactccaaacaaaggctgttccttatcggattcctctggatcttaaacctatccaggggctgggtacctaccatccctcagattcccggaacagtactggtagttcacatatgtatgaaccatctgcacctccccaggaggatccactacaacttataaaacaaatgcctgttgcagcagctgctgttgcaaccgccgcagtggttgcatcctcaatggttgtcgctgcagctaaatctaacagtgatatcaaactcgacgtgcctgttgctgctgcggcgactgctgctgcagttgtggctacaactgctgctgttaacaagcagtacgaatacttggaacctggttgtcaattgcttagtttgccaagttcttcaggggcaaatgaattgatcccgaagggtagacatgacttctgggataatcagcttgaaattgatcatggacaaactagtgttcccgagaaagaaaaagatttggttgaagtacctcaggaagctgaaagagtctctgacaagtcggttgggactgaaagctcaagatctgatattgccctagatggtgttgcagagtttgaaatccaatgggaagagatcactctgggagaacgtgttgggctaggatcctttggagaggtgtacaaaggggaatggcatggaacagaagtcgcagtgaagaaattcttgtagcaagatatatcaagcgatgctctggatgaatttagaactgagttccaaataatgaagagattgcgtcatccaaatgttgttctatttatgggtgctgttactcgtgtacctaatctttctatcgtgaccgagtttcttccaagaggtagtttgtttcgattgattcatcgacccaacaaccaattggatgaaagaagacgtctaagaatggcacttgatgtggctcgtggtatgaattatttgcacaattgctcccctgttgtagtgcaccgagatttgaaatctccaaaccttcttgttgacaagaattgggttgtgaaggtttgtgattttggtttatcacgtatgaagaatagtaccttcctttcctcgagatccacggctggcacagcagagtggatggcaccagaagtacttcgaaacgaaccatctgatgagaaatgtgatgttttcagctacggggttatattatgggaacttttcacactacttcagccatgggaaggtatgaaccccatgcaagttgttggagctgttggttttcagcaacgtcgccttgatattccagctcatgtggatcccaccatagcagagataataaggagatgctggcaaacagacccaaagatgcgtccatcattttcagagatcatgtcttccttaaaaccattattgaaaaacacgcttgccaatcaaccccaaaggcagcgagtgcaacgagcagatggctaagaaaatggaggtcaacaccaggcgacaacgttaaaacaaggtgccttggtctttcatgccttccagtaactgcccacctgtaactataccattattttgtatagcaacatcaaatgcatggctaaggtgaaaaaggtgaagttctatttttgtccaccgtccgaatacactgtaaattttccacaggcaaagaaatgccgagcttagaaaagcagccaacccatcaagcaaaagaaaaggtaaaggagggaaaaggaaaatttgtgcaaaactactgtacatttttttttcttccttgtcatttctttggttcccaaaggttgagtattaatgtgtaaggcccaatcaattgtattgttgttcaacataaaaggtcagtcatcttaatcagcaagcttgaagaagccctctggcagggcccctgtgtatatcacattctgacaaattcgtcggaactgacaattagattgcaggagaaaaacccctttttgtacct

SEQ ID NO: 8334 - DNA, 1731 bp, Oryza sativa
  ref <308>: DATABASE ACCESSION NUMBER: AK105682
  ref <309>: DATABASE ENTRY DATE: 2002-08-28
actccactccatttcccactcgactccatccagacattgtctccaatgtcgccgccgccgcttcgcctcctcctcttcctcctcctgctccacctcccctcctccctctcctcgcgccaccaccaccacgccccgtcgccgtccaagccggcgccggcctcctacgcggcgccgctcgccgtcctcctcgcttgcaacgccacgcggttccagcccgcctgcgtctccacgctctccaacgcctccgccgacgcgtccactccggacctcctcgccgccacgctctccgcgctcagggcccgcatcccgccggccgtctccacggcgcggtccgtcctcgccgcctcctccaacgtcaacctcaccaacgccgccaccaactgcctcacgttcctctccttctccacccaccgcctctcgccgccgccctcgacgtcgtcgccgtcgctcctctccgcctccaccgcgctcctccacctctacgactgctggtccgcctacaagtacgtcaacttctcccgcaccatctccgacgccatggcctacctcgacgacaccatcgccgtcaacagcaactacatctccatgctcgccgcgctgcagcgctacggcgacgacaccttccggtgggccccgccgcagaccgagcgcgacggctactggccgcccgcggcggcggggtccgccgccgacgaggacgcgctcggcgtgcccaaggggctcccccccaacgtgacggtgtgcggcgcggggtgccactacaagacggtgggggaggcggtggcggcggcgccggactacggcgacgagatgttcgtggtgcacgtgaaggagggggtgtacaaggagacggtgagcgtgccgttggagaagacgaacgtggtggtcgtcggggacggcatggggaagacggtcatcaccggcgacctcaacgccgacacgccgggcgtctccacgttcaacacggccaccgtaggcgtgctcgcgaacgacttcatggcgcgcgacctgacgatctccaacacggccgggcccgacgcgcaccaggcggtggcgttccggtcgacgggcgaccgcacggtgctggacacggtggagctcctgggccaccaggacacgctgtacgcgcacgccatgcggcagttctacacccggtgccgcgtctctggcaccgtcgacttcgtcttcggcaactcggccaccgtcctccgcgacaccgccctcatcgtcctcccgaggcagctccgcccggagaagggcgagaacgacgccgtcaccgcgcaggggcgcaccgacccggcgcagcccacggggatcgtgctccgcggctgcgtcgtcaacggcagcgacgactacatggcgctgtacagggagaagcccgacgtgcaccacgtctacctgggccggccctggaaggagtactcgcgcacggtgtacgtcggctgcacgctctccgagatcgtgcagccgcgcgggtggatggcgtggaacggcgacttcgcgctcaagacgctctactacggcgagtacgagagcgccggccccggcggcgacggcgccagcgggagcaggatcgggtggagcagccaggtgcccagggaccacgtcgacgtgtacagcgtcgccagcttcatacagggtgacaagtggatacccaaaatacattagttagagcagcataaaaagaagtaaatggtggtccattgtgtgatcccctcgtgcgagtcgttc

SEQ ID NO: 8335 - DNA, 2509 bp, Oryza sativa
  ref <308>: DATABASE ACCESSION NUMBER: AK105683
  ref <309>: DATABASE ENTRY DATE: 2002-08-28
ctgcggaaacttgggttcttggccttgaattcaaacaagtttagtggtggagtaccgtcttcgattggcgtactcacaaacctcttatggctagacctggctgataatcaactcactggatctgtccccatctcaacatcaacatcaccaggcctggaccaacttgtcaaaacgcagcacttccatttcaacaagaaccagttaactggaacgcttactggacttttcaactccaatatgactctcatacacattttgtttgatagcaacaaattctcaggctcaatcccagctgaggttgggactgttagtacactcgaagttctccgattggataggaatggttttacgggagcaatacctgctacaattggcagtttggtcaaactgaatgagctgaacttagcaaacaacaagctaactggatcagtgccagatctcagcaacatgaccaacttgaatgttgtggatttgagcaacaacacatttgatccttcagtggcccccagctggttcacatctttaacatctcttgcttctgtttcaatagtttctggaagtctttctggccaggtcccaaaggggctcttcacattgcccacactgcagcaagtgtaattttctggcaacatcagcagctcactgcagacagtaaatctcatggacaaccgaatagtttctaccgatactgcaagctacaagaaaactctactcctggcaggtaatccgttttgcgccgagcaagatcccaacaacagagccttctgcagcaggcagctacagaacgcgagcccatacagtaccagtatggaaaaatgcggctcagctcagtgcagtgatggtcagaacgtgaaccctgcaagctgcggctgtgctttctcatacaacggcaagatggttttcagggcacccttcttcgtcgacttggtgagcagtacgccgttccagctgctggagtcgaccatggcggcaaagctgaacctgctccctggctcggtcgctctctcagacatccacttcaacagtgacaactacctccaagttcaagtgaagctgttcccaacatccggggtgaccttcaacctgtcagaattgacaaggattggttcttctctcagtaaccagatttacaaaccaccagcaaattttggaccttatttcttcattgcagacccatatgcccccttggcagaagagaagggctaaggaactcaaggaaagagcagacccttttgcttcatgggctgctggccagaaggacagtggaggggctccacagctgaagggagcaaggttcttctcctttgacgagctcaagatctgcaccaacaacttctctgacaaccacgagatcgggtcaggaggctacgggaaggtgtacagagggattctcggtgacggaacccgtgtcgccatcaagcgtgcagaccgcaactcaatgcagggcgctgtggagttcaagaacgagatcgagctgctgtccagggtgcaccaccgcaacctggtcagcctcattggcttctgctacgagcaaggtgagcagatgctcgtctacgagtacatctccaatggcacactcagagagaacttgacgggaagtgggatgtacttggactggaagaagaggctgaggatcgcgcttggctcggccagagggcttgcctacctgcacgagctcgctgacccaccgatcatccaccgcgacatcaagtccaccaacatcctcctcgacaacaacctcaaggccaaggttgccgacttcgggctctccaagctcgtggccgacactgagaagggccatgtctccacccaagtcaagggaacactgggctacctggacccggagtactacatgacgcagcagctgtcggagaagagcgacgtgtacagcttcggggtggtgatgctggagctggtgagcgggaggcagccgatcgagaaggggcggtacgtggtgcgggaggtgcggctggccatcgacccggccgaccacgaccaccactacggcctccgcgggatcgtcgacccggccatccgcgacgccgcgcgcaccccggtgttccggcggttcgtgcagctggcgatgcggtgcgtcgacgagtcggcggcggcgcgcccggccatgggcgccgtggtgaaggagatcgaggccatgctgcagaacgagcccgacgacgccggcgccggggagggggacagctccgccgacccgtccgccaacgagttcgaccgccaccgcggcggtggcggcccgccggcgcacccctacagcgacgtggagatcagccggggatcgtacgccggcgatggcgcgtcggattacatgccctattttgaggtcaagcccaagtagtcatcattagattgtaaattgatgagggtgttgtttgtttcagtttttttttcctttgttctttctccttttcagcttgtgatgaattgtaaattttgtatgtgttgcgagttgcgacagattaatatatactgctacagattctttcaatttttc

SEQ ID NO: 8336 - DNA, 1913 bp, Oryza sativa
  ref <308>: DATABASE ACCESSION NUMBER: AK105684
  ref <309>: DATABASE ENTRY DATE: 2002-08-28
tatgcttaacccgattgagaagaaattgaagatgagagcgaggagggtgctcgcaaagcttgctgagaaaaagaaatcagctgcagaatatgcacgtgcagaaaggagcttggatgggattgatatgacatgcaagattgtggactttggaaacgcttgttgggctgacaagcaatttacagattttattcagacaaggcagtaccgggcaccagaggtcattctaggttcaggatattcatttcctgttgacatgtggtcatttgcgtgtattgcttttgagcttgcaacaggggaaatgctatttacacccaaggaagggcaggggtatagtgaagatgaggatcacttggctttgatgatggaaatccttgggaagataccaaaaaagattgctaccatgggaacaagatcaaaggagtattttgaccgtcatggagatctgaagcggataagaagattgaagttctcatctattgaacgtgtcctagttgacaaatacaaaatttctgaatccgatgcacgggaatttgccgagtttctttgccctttgtttgattttgccccagagaagcgtccaacagctgcacagtgcctacaacacaaatggcttcaatatagtgatggcaagaactatgggactctcaacattagtgatgtcaaaaatgctagtgttacatgcagccctggaacgactgccagcagtgattctaagagcattgatgtaacacgcaacattggagacaagcctgacagttatgccgagagagctgatgcaaagtgcaatactagcaaaaaaagcatcatcaacagtaattctgagaattctaatgtacaacccaatactgcaagtgttggcaatagaaattccaaaattgatgatgtaaattctaatactgggagcatcactaacaaggattccaaaaacactgttataaagcccagtattggaagcttcgtgaacagaaatgctgaaacagttgatgtaaaacccaacattggcagcataaccagcagaggtgacagtagtagtgacaccaagagcaacattggaagcgttgccagtaaagatgccaaaactattgatgcaaaacccagcaccagcagcatcaccagccaggatagtaagattggtgacggaaggagcaacattgatggcattgccaacagagatgccaagaccgctgatgtgaagcataacattcgaagcgttgttaacacttatttgaggaattttgatgtgaagcacaacactggaaacattgttgatggtggtgtcaagcactcagatttgaaaccaggcactgtaagtgctgccaatgtcgattccaagagtataagtgcaaagcccagcactggaagttttgagaacagtgatgccaagagtattagtgcaaagaccagcactggaagttttgacaacagtgatgccagaaatattatgaaggcaaacactggaattgttgctaacaatgatatcaaggatactgatgtacagactaataccgaaagtgttaccagcggcgacgacctaaacgacattgatagaaagccaaacattggacgtgttgctgcaagtatacagaggctggagagcagcataggcaaagtgcaaagtggaaaatatcggtgagaaaaataatccatgctagtgctgatccagttacctattttgatcggcttggatctgttttctttttgtggagaggcatattcaatttcattagatttgtgtcattgatttgattgctgaggttaataactaccctttgtgatggagccaatcttcaagatttgaggatttggcaaaagcaccagctgatgctttttacatatcttatatgttcctgctaactgtaaaaaagttttgtatttgcacacagaatacacatggaggtacatatttcttattt

SEQ ID NO: 8337 - DNA, 2409 bp, Oryza sativa
  ref <308>: DATABASE ACCESSION NUMBER: AK105685
  ref <309>: DATABASE ENTRY DATE: 2002-08-28
agcagtcttagcagttgctgtagtggttccagtggtgatagtagttatacttatatctgctatgctgatgctacttttctggaaaaagcaagccattgtgaagtctagaggtcaagaacaatatggagatcatatacatattcctgaaaaccgtgagttcacatatgaggagttagtgaaaattacaaacaatttctcagtattcataggtgaaggcggatttgggcctgtttttcatggtcagttaaaagatgacactcagttggctgttaagatgcgctctccgacatcaatgtcagggaagggaatgccagagtttttagctgaggtcgagagtttaacaactgtacaccacaggtatctggttttattggttggttactgcactgaccaggatcatttaggtcttgtttacgagtatatgcctaatggaagcctttatgatcatttgagaggaaaaaatgctattatccagagattaagttggcaacatcgagcaaaaattgcacacgaagctgcccaaggtctggactacctgcacacaggatgtgtgttgcctatagttcacagagatgttaagtcacacaacattcttctagggtgtgacctaactgcaaaaatatcagattttggattgtcaaagtcatatctgaatgttgcacagagtcacattacagccactgctgctggcaccctaggctacattgacccagagtactgtcttagtggcagacttactattagcagtgatgtcttcagctttggagtagttctgctagagattgtaacaggggagcctcccatcatacccacaaatggacatattgtgcagcgcataaaagagaaggttaatatgggaaatattgaggcaattgctgatccgcgacttcatggtgagtttgatatcagctcaatttggaaggttgtggacatagcgctgttgtgcacaaaagaggcatctagtgaaaggccaacgatgagtatggtggtagcacagctaaaggatgccctagcattggaagaagcccgtttaagctacagtaccagtgacattagccaaggtggtgccaatgccgaattgtcaatcaactccatgccaacagcgagcttaagtaatctggaggagtatgccaagaaaagcctactaccagcggttgcgctttttgcactttgtttgcatggtgtttcggataagtctggagatatagcaagcacataaggcactatttcacacttctaacagattagagaaataacaattaagacgatcctacatcccgaactggcaaacatgtagattgtagaacaaatgtaggacacacaagtataaatgaatacaagaatggagaaatatgggtgctagaatcctagaagcatgttttaagtactaatgtacttttagttaagtagtactttacagagttaaacccaagtgtattaactattaatgaaataagcatacggagctgtgtgggttaccctctggagttgcaagttgcaaccgtatttgctactggagggatgcatcgaagacataacttaaaaaaattaaatcagcaagcaagcaaagcttggcaactcattaccatgattccagctactggaatgtggggatttctcctgtaatctggcatctggagtaacatgcgcagcgtccttgcatagcataatggtggattctcagaaacaaatctgcacaaactggcaaagcagatgcagcgtcagtttggatcataacagcaaactcatatattacgatggaagcagtaagcaaaatcgtgctgagcgagagaatatctggaagggactagcatattcccacaaggacacaagtacctgaagaacgcttgaccgcccgcgcggaccgtactgcggcggacggcggtggccctcaggacctctgggacggcgatggcctccgatggcgccgaggtcgcggtgggcgtcgacgtgagcgcgcggtggcggcggcggcaggtggcggaactaggaggtggcggcgcgcaagctcgtcggacttaaggtgggccggacggctgcggctgactcatgtgggccgctgtggactgcgtccaacggtgttagcccattctagctagttgggccggagcgggttcgccgctgacgtgcgggccttatgtttgtagggtgcatgcatggcagattagatgctgttgaaaaaagtctaaaaagtaaaacattttgccatggttgcggttgatgctgaccatgcagtagtggagaagaaggtttttgtcaaatctgagtgtaattttcttttttacggtcttttatgtaatgcgtagtataaaaaaatccaacaagttgctctgagcctaaacaacccaaagcccagattagttcaaacagagtacggattatctgatcaaaataagtttctctacttat

SEQ ID NO: 8338 - DNA, 3335 bp, Oryza sativa
  ref <308>: DATABASE ACCESSION NUMBER: AK105686
  ref <309>: DATABASE ENTRY DATE: 2002-08-28
tacaggtactttgctgcacaagctttggcaagtctggtttgcaacggtagcagaggaactcttcttgctgttgctaattctggggcggccactggacttatttctttgcttggatgtgctgaggttgatatagctgatcttttggaattatcagaggagttcatgttggttcctaatcctgatcaaattacactggaaaggctttttagagttgatgatatcagggttggcgcaacttccagaaaatctattcctcttcttgttgacctactcaaacccattccagaaagacctggtgctcctttcttggcgttgggtcttctgacacaattagctattgattgccccccaaacatgatgctaatggctgaagctggaatcctagaggcacttaccaaatacttgtcacttagcccacaagatgcaacagaagaagctacaactgatttgttaggcattctttttagttgcgcagaaataaggcacaatgaagcagcacttggtactgttaaccaacttgtggcagtccttcgtctaggaggaagaaattcacgctacagtgctgcgaaggcattagagagcttatttattgcagaccatgtcaggaacagtgagtcagctcgccaggctattcaaccacttgtagaaattctgaatactggcatggagagggagcagcatgcagctacatcagcacttgttaggctgctttctgacaatccatcaagagcacttacggttgcagatgttgagatgaatgcagtggatgtcctgtgccggattctttcttcggattcttcagctgagttgaaaggagatgctgctgaactatgctgtgtgctatttgcaaatacaaggatccgctctacatcagctgcagcccggtgtgtggagcctttggttgctttactcgtttgtgaagctaacccagcccagctttctgtagtccgtgcactggacaggcttctagatgatgagcaactagcagaattagttgcggcccatggggcagtcattcctcttgttggccttttgtttggcaaaaactacacgctccatgaggcagttgctagagctttggtaaaacttggaaaggataggccaggttgcaaattggaaatggtcaaggctggtgtaattgagagcattctagatattctgcatgatgctccagatttcctttgcattgctttggcagaaatgcttcggattttgacaaacaatgctagcatagctaaaggtccatcggcagccaaagtagtccagccccttttctctttactatccaaggcagatattggtcctgaggggcagtacagcactttgcaggttcttgtgaatattttagagcatcctgaatgccgtgctgattacaatttgacaccccggcaaactattgagccagtcatttctttactggattcctctccgcctgctgtccaacaattagctgcagaactcctatcacatcttattctagaagagaacctccagaaggacacaataacggagttggccatccctcctctaattcaagttctttcatcgggtttgccaaacttgcagcaaagggctataaaagctcttgctaaccttgcattagcttggccaaatacgattgcaaaggagggtggtgtttttgagctgtccaaggtgttgttgcaatctgaccctcctttgcctcatgttgtatgggaatctgctgcatctgtcttgtctagcatattgcagtacagtactgagtttttcctcgaggtgcctgttgcagtactagtgcagttactcagatcaggaacagaaagtactgtcgttggtgcactgaatgcattgcttgtattggagagtgatgattcgacaagtgcggaggcaatggctgagagtggtgctgtggaagctttgctggatctcttgaggagtcatcagtgtgaggaagctgctgccagactcattgaagcacttctgaacaatgtaagaataagggaggcgaaggctgctaaaaatgctattgcacctttgtccatgtaccttctggatcctcagacacaatctcaacaaggaaggttgcttgctgctcttgctcttggagatcttttccaaaatgagggtcttgctcgttctactgatgctgttgccgcatgccgtgctctagtaaatcttcttgaagaccagccaactgaagagatgaaagtggtagccatttgtgccttgcagaatctagtgatgtatagccgagcaaataagagggcagttgcagaatcgggtggcgtccaggttctgctggatcttatcagttcaagcaatcctgatacctctgttcaggcagctatgtttgttaaacttctattcaataaccacactatccaagagtatgccactagtgaaacagtcagagttataactgcttcaattgagaaggacatatgggcatctgggagtgctaatgaggagtatcttaaggctcttaacgctctacttagtaacttccctcgcttaagggtcactgaacctgctaccttatgcattcctcatcttgtaacatctctcaagactggttctgaggcaacccaggaagctgcactggactcactgtatcttcttagacaagcatggggagcttgtgcagcagaaatatttaaagctcagtcagttgctgcctcagaggctattccgctacttcagtacttgatacagtctggcccacctcggttccaagaaaaggcagaattgcttcttcagtgcttgcctggtactttgacagttactataaagcgtggcaacaatctaaggcaatcagttggaaatcctagcgcattttgcaagcttactcttggaaataatccgccaaggctgacaaagattgtctcaactggtgcaacacctgaatgggatgaagcctttgcgtgggcgtttgacagccctccaaaggggcagaagcttcatatctcctgcaaaaacaatagcaaattcggaaagaaatcatttggtaaggtgacaatccagatcgatcgggttgtcatgctgggctccgttgctggcgaatacaccttgctaccagagagtaaaagcggtcctaataggaacctggaaattgaattccaatggtcaaacaaatgacaagtatctacatagttaggttatctgtgtaagttaaaatccataagaagttgagagagtgttcttgttttccatactctgctataaacgttaccatatttgtgcatcagtgtaaatagcctgcagagaaatttgtcgttttgttgtacctttctgtgagataaaagagaacagatgagtcatattttgtactgattgtaatgaattgattcatttttttc

SEQ ID NO: 8339 - DNA, 1966 bp, Oryza sativa
  ref <308>: DATABASE ACCESSION NUMBER: AK105687
  ref <309>: DATABASE ENTRY DATE: 2002-08-28
agaggagccccgcctaccgccgccctcacgcctcctcccacctacctcacctcgaagctgacgtcagcaatggcgctcgccaccaactccgccgctgtttccggtggcgctgcggccgcggcgtcgtcggcgccccagccgcggctcgccgccacgttcctcccgatgaggaggcgaaccgtctcggcggtccacgcggccgacccggcgaagagcaacgggcccgtgcaggccgcggcgaaggcctcgtccccgtcgacggtggcggcgccggagaagaagccggtggggttggggaagtggacggtggatagctggaaggcgaagaaggcgctgcagctgcccgagtacccgagccaggaggagctcgactccgtgctcaagacgatcgagacgttcccgcccgtggtgttcgccggggaggcgcgccacctcgaggagcgcctcgccgacgccgccatgggccgcgccttcgtcctccagggcggcgactgcgccgagagcttcaaggagttcaacgccaacaacatccgtgacaccttccgcatcctgctccagatgggcgccgtcctcatgttcggcggccagatgcccgtcgtcaaggtcgggaggatggctggccagttcgccaagccgaggtctgattcgttcgaggagagggacggggttaagctgccgagttacaggggagacaacatcaatggcgacaccttcgacgagaagagccgcgtgccggacccgcagcggatgatccgcgcgtacgcgcagtcggtggcaacgctcaacctgctccgcgccttcgccacgggagggtacgccgccatgcagcgcgtcacgcagtggaacctcgatttcatggatcacagcgaacaaggagacaggtaccgtgaattggcacaccgggtggatgaggcacttggcttcatgactgcagcagggctaacagtcgaccatccgataatgacaacaactgacttctggacatcccatgagtgcctcctcttaccatatgagcagtctcttacacgtgaggattccaccagtggcctcttctatgactgctcagcccacatgctatgggttggtgagcgcactcgccagctcgatggagctcatgttgaatttctccgtggtgttgccaaccctcttggcataaaggtgagtgacaaaatgaacccccgtgacttggtgaagctcattgagattttgaacccatcaaacaagcctggaaggataaccataattacaagaatgggggcagagaacatgagggtgaaattgcctcatctcatccgtgctgtccgcaactctggacagattgtcacatggattactgatcccatgcatggaaacaccatcaaggctccatgtggtctgaagactcgtccattcgattccattctggctgaagtacgtgcgttcttcgatgtccatgatcaagaaggtagccacccaggaggtatccacctggaaatgactgggcagaacgtgactgaatgcatcggtggatcaaggaccgtcaccttcgatgacctgagcgaccgctaccacacccactgtgacccaaggctgaacgcgtcgcaatccctggagctcgccttcatcatcgccgagagactgaggcggaggaggatgcggtccggggtcaacagcaacctgccattgcccccattggctttctaaactgctgaaacgggggaagggaaaagaaactgggaggagggggtagaatagtttcaactcgccggcggtgatatctgcatgtgttctgtcaaatgtttgtatggtggttgttgagtgttcttggcactataggcagttgtcgaggatatggtagcatatatactcgccgtgttgtaataagttttttgatggatgtgttctgatgaatttttaagggggcctcagctctgtgctgtttggccttggggacaggagaaaataaagctagatggtttgcttggtt

SEQ ID NO: 8340 - DNA, 2002 bp, Oryza sativa
  ref <308>: DATABASE ACCESSION NUMBER: AK105688
  ref <309>: DATABASE ENTRY DATE: 2002-08-28
gctgctctcgctgccagtccgccacccaccgccgcccaccgccgagcggcctccccgcgcggcgaggccaaaccctcccatgtccaccccggccggcgtggcgccccgccgctcctccaggctcgcctccagcgctcctccgctcggagccggccagccttcctcctccccacttcctcggcgccgccgccgccgcgcttcgccgtctggctgcgccagagaggttgacaactcgcctcctccggtggtcatcttagatgacaacgaaatggagcagcatgttgaggcagaagaaatgaagaagcaaggggaagagagtgtggaggcaaatgaagcagaggagaaggacaaggatgcggaggtcttagaggaactacctgattggcttcctgatggttggatcatggaggtacgttgtggcgacaacggcaacatctaccggtattacacttccccggtgtcaggatacacattctctacaaagatggagacactacattatcttttttcggagatggatgagcgtgtgctggagtctcaggcgtgcgccgatgacaatgagcttcatagaatgcacacatggcttccagatgggtgggcaattgaagtcagagctgggggtaagaagatggaaaaaatgtacaagttctatgttcatctgcctactggaatgcggttcttgtcgaaagaaaatgtactgctctattctaatgaggggaagatttccagatgtgatgtaaagggtttgtgtgatacaagctctgaagataatattcttgcaatggtagaatttaatccagatgggcttccagaaggatgggtgaaggaaataatatttagaaagtgcaatgatggaattaggaaagacccgtattatactgatcctgttagtcgtcatgtattccgcacactcaagtctgtaatcaactaccttgaaactggacaaatcactaaacatgcctatattccgaggagaagcgttactgatatgtactcttttgacaggtgcacagatctgcctcaaagtatgctgaaaagactgaaaatacaaggaaaagcaaagaaaaagtctgtaggagcatcggtcaaaggcaagaaactatctaatggcctggcatcaaataactgtatgtcttctgggttggatcctgaaatcgggccagaagaaaggaaacttggaactgttaaatccataaccaaagaagcagttaactcagatactatcaagcgatcaagaggaaggccaccgaaaatcttgatgccaactattgaaagcaccaaacctgagattgcattagtcacgtcagaggctatcaagagatcaagagctgaaggtgtcaattcttgcttaattcatctctctgaaccaaatgaaaagatggtcaaagccaccagtgcagtagaacctgccagttcaaataatgccaaacgacatggagggagcccgcaaaaaaaatttaagcacattactgacatcactttagattgtgccaagagttcaaataaggagtcagagcatattgttacagcaaagaaattgggtattggaggtggagaacaagtggcaaacgaaaatacattggagcacactaacatgaaagagcaccttggggtaatccaggactacacaagcaacaggaagaaagataaattgaacttgattactgatccagatctgcatgagcataaaaacggcaagtttactgaaaaactagcgtgcactgcagttcataaattttatatgaggagaagtagcaatcatacagtggcattgaaaaaaggataatgaaaacaagatactcttaccgagtttagagcccttctccaaacataattggagcagaataaagaacacttcaattccctcgtaagtaatgaaatagctgaatgcgattgtaccttgggcaatatgaagcaagtgtagtttccattgaaaatgtgccctttatttggtacattcttgagagaataatgcgatatcaaacgactaatttgattgtct

SEQ ID NO: 8341 - DNA, 1704 bp, Oryza sativa
  ref <308>: DATABASE ACCESSION NUMBER: AK105689
  ref <309>: DATABASE ENTRY DATE: 2002-08-28
atgcctcgccagtgctttgttatcattttgtaccatgtcttttgggcctacggcgtacattactacatgtggagcgattagcagcagccatttcgtagtcagaatagaagaacacactcttgaggctatcagcaaccagctccactgctagctccaggccggtcatggcggcggctggtcacgatgtgcagctcccccacgtcgccatcttcccgttcatggccaggggccacaccgtcccgatgacccacctcgcctgccttctccgccgccgcggcctcgccaccgtcaccttcttcagcaccccgggcaacgcgccgttcgtccggggacagctcgacgacgacgtggccgtcgtggagcttcccttcccggaccatgtcgtcgcccgcggcgccgcggagtgcgtcgaggccctcgactccctgttcccccttccggcgttcgtcgaggcggtgtcggcgctccggccggggctggaggtgtcgctcgccgccgctcggccccgcgtcggcctcctcgtcgccgacgcgttcctgcactgggcgcacgcctccgccgccgcgctcggcgtcccgacggtggcgttcctcggcgggaacatgttcgcgacgatcatgcgcgacgtgatcctccgcgacaacccggccgccgcgctgctgtctggcggcggcggcgccgaggcggcgacgttcgccgtgccggagttcccgcacgtccacctcacgctcgccgacatcccggtccccttcaaccgcccgtccccggagggtccgatcatggagctgaacgccaagctatggaaggccatcgccggcagcaacggcctcatcgtcaacaccttcgacgccatggaaggccgctacgtcgagcactggaaccgtgaccaccgcgccggccccagggcgtggcccataggcccgctctgcctcgcccatggcggcaccggcaccggcaccggcgccgtcgagccctcatggatgaagtggctggacgagaaggcggccgccgggagagccgtgctgtacgtggcgctcggcaccgccatggccatcccggacgcgcagctcagggaggtcgccggcgggctggaagccgccgcggccgcgggcgtctacttcctgtgggccgtgcgccccagcgacgccgacctcggcgccggcttcgaggagcgcgtggaggggcgaggcatggtggtgcgggagtgggtggaccaatggcggatcctgcagcacggctgcgtgaggggcttcctcagccactgcgggtggaactcggcggtggagggcgtcgccgccggcgtgccgctggcggcgtggccgatgggcgccgagcagccgctcaacgcgatgctcgtcgtcgacgagctgcgcgtcggggtcagggtgccggtgccgacggcgatggcgacgggcgggcacggggtggtcgggagcgaggtgatcgcgcgcgtggcgagggagctgatgatgatggccggggaggggaagggcggcggcggcggcgaggaggcgaggaacgtcgccgcgctggcgtccaaggcgcgagaagcggtcgccgagggcgggtcgtcgtggaaggcgctggaggagatggttgccacgctctgccgccctgttgaaggagatacaccgaaacccacaaaataagtttatttgtttctacgtttgaccgtcatcttataatctatctatctatctatct

SEQ ID NO: 8342 - DNA, 1482 bp, Oryza sativa
  ref <308>: DATABASE ACCESSION NUMBER: AK105690
  ref <309>: DATABASE ENTRY DATE: 2002-08-28
actagctccccacataccaagaacagtgtcactctagcttcttcctctttctctctataaatcttttcccgagccaagaaaaccaccattaaacccaccaccaccgccacctcctccacctccatggcgatggcgatgcaccggttcagcctctgctgcgtcgtcctcctcgtgctcgcgccgctcgccgccgtcgcgtggcggccgtggccgccacggaatgggagcggcgaggttgaggggatcggggcgtccaagaagttcgaggggtcgtcggatttcgtcaagctgcagtaccacatgggccccgtcctcgccgccgacatcacggtccacccgatctggtacggccggtggcccgccgagcagaagcgcaccatccgcgcgttcctccggtcgctctcgccgccgggctcgggctccggcgatggcggcatcccgtcgccgtccgtggcggcgtggtggcgcaccgtgcggctgtacaccgaccagacctcggcgaacgtgtccggggtggtgaggctcgggcgggagaagtgcgacgcgcgcgcgtcgcggggcgggcggctgacgcggctcgacatccagtccgtggtgcgggacgccgtgacggcgcggacgcggccgctccccgtggactcgagcggcgtgtacctggtgctgacctcgccggaggtggtggtggagaacttctgcgggcaggtgtgcggcttccactacttcacgttcccgtcggtggtcgggtacacgctgccgtacgcgtgggtggggaactcggcggcgcggtgcccggaggtgtgcgcgtacccgttcgccatcccgtcgtacgtgggcggggggcggagggcggaggcgccgccgaacggcgacgtgggcgtggacgggatggtgagcgtcatcgcgcacgagctggccgagctggcgtcgaacccgctcgccaacgcgtggtacgccggcgaggacccgtcgttcccgacggagatcgccgacctgtgcgaggggatctacggcaccggcggcggcggcgcgtacaccggccagctgctcaccgacggccgctccggcgcgtcgtacaacgtcaacggcgtcggcggccgcaagttcttggtgcagtgggtgtggaaccccatcctcagctactgctccggccccaacgcgctcgaccagtagccgccgccgccgccacgcacgaacgcagtgttcgtccgcccatggattcggattccttttcttgggaatccatggtagctttaaattcttgtatagatcgagccggtgaagtgaacaagggtggcgatgtttggggttttgggtgactttgggtgaatggatggtatgtttgggggagactgtttggaactttgagattattttgcttaaaaaaaaaaaaaaaaaagtgatagagatgtgttgaggatgagttctggaacagcaataattgctcaaacaggtcactgcattgcgagtggtttgtgttcgatt

SEQ ID NO: 8343 - DNA, 2001 bp, Oryza sativa
  ref <308>: DATABASE ACCESSION NUMBER: AK105691
  ref <309>: DATABASE ENTRY DATE: 2002-08-28
aaatgttgttgaaaatgaaggtatttggtattgcggacttggttataagtgaattggatattgagatgcctagttacctgggactgcttacactactacaaaacgattggcacacaagaaaaagatccatggaaacatggagaatggagatgttcagttcatctattgtccaaagatctctggtttatcttgtagtgcatggctaaaaataacatttgagattcgggggaaataatggtggaaggagtgcttggtaagttggaaaatagctcaggacaccacttgtttctggaatgtccgtctgtttcttcggattgtagaaattgaagggtggaactccttgcagaggattagatcatgctccaggaggcctaacctatatgatatgaattggataaagagatgaaccaggctttaggaacatgtgaattctgcaagactggcgagcccaaatgtgggttgctgcattgttgatattttaactactttataaaccagacaagagatcaggatcatatggtgctgagttcaccttcaattactgtgctgtttacttgacagaaattattttcagaggcttatttctgcaatgcattttttttctggtttgactcttgagggcctttgctgaaagcagttcaccttcaggagttgcagaactcatgcatgatgcaagtcctacttgctgactgttactccttgtggcttctaatgttcatgtagaatgtttgtcgctcgcctttcaggatatcacccgcactcaggttccatgatacctccacgtggccgcggagtagaaagcagcaatttcaatgacggttcacgttatggatatgagctggcaagtaaaggaggtgaaaggttacaatatgtttctcctcccaatggaagaggaagaccacacaggagggatggtggtgctcctggaaaagatttcatcttcattaatggagaatatgtgcacaggaatgacccaaacttgtctccaagagaaggtgactggatatgtcagaatcccacttgcggaaatcttaattttgctcggcggtctcactgtaacaactgcaacaaggaacgctatgcacctgccatgtacaagtccagctacagtcctgacagacgccagttcaactctccaccacaagggccaccgagtagggttattggtccaccgagtggccgtgatctgccaagggagaaacaaaggtatagatcaccaccgcgtggttggggtatggtccgaccggatgatcatagggactattctacgcagttgtcccaagatcgtccaggacgaatggcagaccctatgcacagggacaggatcaacttcggggatgaacttccacaccgacagcgtgggaagtttgactgggatggctataatcaccgggagcatccacgcgatggaccatatcttgaccgaagagaaccacggttggggtctcccaggggtaactggggacaagctgtacgggacagaagtcattcacccatgcgtaacaagcccatgaacaggggactagacttacgggagagaagccgttcaccctttcgggacaggcccttgaacaaagcctccattggaagaggtggacctgaccgagactatgttcatccatttgacacccatgggcgacctcataatttgggcaatagccgtggccatggttacaggcaggaggatgatctgtttcctattcgcaatcaaggtgaccagcgtgtcctttcccgtcatcggaatggaatccactgaaatgtaatatctttcagctgggtacagattcttcgtgttgataggctatctggaaaagcgaatctaataaaaattatctcgatgcttgaggactcctgaagctttgtaataatgtttaatgttttgtactgtgtagttacttccttggttgggttgtttcagtggaagtttcaccattagaaatgtcttcatgaactgaatttaaagggcaatgctaggaatgaatattggagtggttaaagatg

SEQ ID NO: 8344 - DNA, 2509 bp, Oryza sativa
  ref <308>: DATABASE ACCESSION NUMBER: AK105692
  ref <309>: DATABASE ENTRY DATE: 2002-08-28
taaaggaggtgggggtgcaaagacagccaggaggtttgcctagaagcagccaccctttaaagagtgcgtaatagctcactgatcgagcgcccttgcgctgaagatgaacggggctaagcgatctgccgaagctgtgggatgtcaaaatgcatcggtaggggagcgttccgccttagagggaagcaaccgcgaaagcgggggtcgacgaagcggaagcgagaatgtcggcttgagtaacgaaaacattggtgagaatccaatgccccgaaaacccaaggtttcctccgcaaggttcgtccacggagggtgagtcagggcctaagatcaggccgaaaggcgtagtcgatggacaacgggtcaatattcctgtactaccccttgttggtacggagggacggaggaggctaggttagccgaaagatggttataggtttaaggacacaaggtgaccctgctttttcagggtaagaaggggtagagaaaatgcctcgagccgaggtccgagtaccaagcgctgcagcgctgaagtatgagccccgtggactagccattgcttctccacgaggctcataccaggcgctacggcgctgaagtatgtaacccatgccatactcccaggaaaagctcgaacgaccttcaacaaaggggtacctgtacccgaaaccgacacaggtgggtaggtagagaatacctaggggcgcgagacaactctctctaaggaactcggcaaaatagccccgtaacttcgggagaaggggtgccccctaaggggaaagaggaaaaaaaaaaacccctcccctttcgttcccgtcgccggcggccgccgccgccgcccggaacctctgctccccctggccatggcgttccctgattgggtcatgctcgacccctacgtcttccgcgacggcccgttccccgacgacgatccgaccgcggcgatcgggcacaactcgagaggcgacaaggtcggcgtgcgcttcccgctccgcgcgccgccggagccgtccagcatcttcctggattgggaggctggcacaggggattgcgacgacttctccgtcgtcgccgcccaccgcgacgccgtcctgttccagatgggttacctggtttcgttgggccccagcaatgcctacaaggcgttcgactatttgctctaccgggcggcgggggccggcggctcttcgccgtcgctcgacttgctcgctcccttcggtggctccgtcgacgagctcaaggccaggatggaggcggacggcctgatccgcctcacgaaccagcacctccgcaggctcaagtgcctggacatcggcgtcctgtgccgcgacggcgaggagttcgccgtggcggagctccagatcaccaggtcagaggtcggtccggagctccacgtgctgcgttcttctacctccagccgcaagtgggagctcaagcggccgccgatcacccctgcgaacggcggctctctcgatctggagaaatttctctgggactgggacgccgacacggtcatcccgttcgggagctacctgtgctgggtggattactgtcttggtatcttgttctgcgacatgtttgatgagaatccacagctccactacctagagttccccgcggatgtcagaggagcatgcttcggtgggtgttgtcaggccgtgggtgtgaccaatggcgtcatgaagctcgtctctctggttcctgatgatggcctcattgctgagaattacacccctgaatctggtttcaccatcgtttgctggaccttgaggatggatgaaatggataagatggtgtgggagaaagatgccgtgctcaaatctgattatctttggtcgatgctcaaacccggttttctttggcccctagatgagttcccttttatcactaccaataggttcccaagagtgcagttccctctaatcagcatcgatgactcaagtgttatatatcttgtcttggcacagaatgggatggtggaggaggcaggatacaattacgatgaaacatggctccttgcaattgatatgagtaaaatgaccttgaaaatgtcatttccatatatcaatgatgaaatgggagatccatctcctgagatgcttgcatttgctgaggataaattctggaggtttgagccattcctcgctgctgacttctccaggcatttcaatctgcgatgccccaggttatccaagcaaatttgcatggaatcagctctactgcctcagaaaagaaaattcggttgtgctgaataccttccattggatggtccctctcttgccatattctgaattctgatgtgaagtgaacttttcttctgaattctgatgcgaacggaggtaattctgatgtgaacggaggtaattctgatgggaatgatgtatcttccaaactctgatgtgaatgagtgtgattctgatgtgaacgatgtgaatatcttctgaattcaaatgtgaatgagatgtgattgatgaatatcttctgaattatgatgcgaaaaaaaaaaacaaaaaac

SEQ ID NO: 8345 - DNA, 2059 bp, Oryza sativa
  ref <308>: DATABASE ACCESSION NUMBER: AK105693
  ref <309>: DATABASE ENTRY DATE: 2002-08-28
taaatatgtgtgatcatgtaatgcttaaagatactgttgactgatttgaggtaataatacaataaaccagtggggcactcgggtgtagtctctagggcgccccactgttgtgaaatgtgagctctgaagttgtggactatcttcaaagctatgacctagtcgagatatgtgttcatctaagttcgtttgagtttgcagctggtattgattgcgctatggttctataaaaaaaaaaaaaaaagaggcgccaaacacacgacacgttctccccacacacacaaaccaacgcgacgcacgagagatttgtacgtgaagcacctgcagcgggcgacccaatggagaccccgactctgaccacgctgctcaaggcggcggtggccacgttcccctcgcgccgcgccctcgccgtcccgggcaaggtcgacctgtcgcacgcggcgctcgacgcgctcgtcgacgccgcggccgcgcgcctcgccgccgatgcgggcgtgctccccggccacgtcgtcgcgctcgccttccccaacaccgtcgagctggtgatcatgttcttggcggtgatccgagcgcgcgcggtggcggcgccgctgaacccggcgtacacgcaggaggagttcgagttctacctctccgactccggggcgcgtctcctcatcaccaaccccgagggcaacgtcgccgcgcaggcggccgcctccaagctgggcctcgcccacaccaccgccagcctcaaggacgccgccggccaagtccacctcgccggcttccccgcctccgccgccgccgcggccaaggacttcgccaacgacccgtccgacgtggcgctgttcctgcacacctccggcaccacgagccggcccaagggcgtgccgctcacgcagcgcaacctggcggcgtccgtccagaacatccgcgccgtgtaccgcctcaccgaggcggacgcgacggtgatcgtgctcccgctcttccacgtccacggcctcctctgcggcctcctcgcctccctggcgtccggcgcgtccgtgacgctcccggcggcggggcgcttctcggcgtccaccttctgggccgacatgcgcggcgccggcgcgacgtggtacacggcggtgccgacgatccaccagatcatcatcgaccggcacacctcgaagccggaggcggagtacccggcgctgcggttcatccgcagctgcagcgcgtcgctggcgccggcgatcatggagaagctggaggcggcgttcggggcgccggtggtggaggcgtacgcgatgacggaggcgtcgcacctgatgacgtcgaacccgctgccggaggacggggcgaggaaggccgggtcggtggggcgcgcggtgggtcaggagatggcgatcctggacgaggaagggcggcgggtggaggccgggaagagcggcgaggtgtgcgtgcgcggcgccaacgtgacgagcgggtacaaggggaacccggaggcgaacgaggcggcgttccggttcgggtggttccacaccggcgacatcggcgtcgtggacgaggaggggtacctgcggctggtggggcggatcaaggagctgatcaaccgcggcggcgagaagatatcgccgatcgaggtggactcggtgctgctcgggcacccggccatcgcgcaggccgtggcgttcggggtgcccgacgccaagtacggggaggagatcaactgcgcggtgatcccccgggagggcgtgtcgctcggggaagaggaggtgctggcctactgccggaggaacctggccgcgttcaaggtgcccaagaaggtgtacatcgccgacgagcttcccaagacggccaccggcaagatccagcgccgcatcgtcgcgcagcacttcgtcgtgccggtgctgcccaccaaggcgtaataaaagtctctacctcccgaccaacccatcgcatgccatcgtcctactgtatctatcaagttcgtgtcttgatttgattttttctggttacttcggctacaaccagtagcttcgtttagggttgggtttcccgtgctaacgagtagtaaaatttcggtttcccgtcc

SEQ ID NO: 8346 - DNA, 1742 bp, Oryza sativa
  ref <308>: DATABASE ACCESSION NUMBER: AK105694
  ref <309>: DATABASE ENTRY DATE: 2002-08-28
ataacgcaagctaccacacgtagctgataagtccgatcgtcgccgcgcgccgcgccatggtgccgtcgttcccgcagccggccagtgcggcggcggcgacgcggccaataccggggagctacggcccgccgctgctcggcccgctccgcgaccgcctcgactacttctggttccagggccccgacgacttcttccgccgccgcgccgccgaccacaagagcaccgtgttccgcgccaacatcccgcccaccttccccttcttcctcggcgtcgacccgcgcgtcgtcgccgtcgttgatgccgccgccttcaccgcgctcttcgacccggccctcgtcgacaagcgcgacgtcctcatcggcccctacgtccccagcctcgccttcacccgcggcacccgcgtcggcgtctacctcgacacccaggaccccgaccacgcccgcaccaaggccttctccatcgacctcctccgccgcgccgcccgcaactgggccgccgagctccgcgccgccgtcgacgacatgctcgccgccgtcgaggaagacctcaacagggcccctgaccccgccgccgcctccgccagctacctcatcccgctccagaagtgcatcttccgcttcctctgcaaggcgctcgtcggcgccgacccggcggcggacggcctcgtcgaccgcttcggcgtgtacatcctcgacgtgtggctggcgttgcagctggtgccgacgcagaaggtgggcgtcatcccgcagccgctggaggagctcctgctccactccttcccgctgccgtcgttcgtcgtcaagcccgggtacgacctcctctaccgcttcgtggagaagcacggcgccgccgccgtgtccatcgctgagaaggagcacggcatcagcaaggaggaggccatcaacaacatcctcttcgtgctcggcttcaacgcgttcggcggcttctcggtgttcctgccgttcctggtcatggaggtcggcaagcccggccgggacgacctgcggcggcggctgcgggaggaggtgcgccgcgtgctgggcggcggcgacggcggcgaggccgggttcgcggcggtgagggagatggcgctggtgcggtcgacggtgtacgaggtgctccggatgcagccgccggtgccgctgcagttcgggcgggcgcggcgagacttcgtgctgcggtcgcacggcggcgcggcgtacgaggtgggcaagggcgagctgctgtgcgggtaccagccgctggccatgcgcgacccggcggtgttcgaccggccggaggagttcatgccggagaggtacctcggcgacgacggcgaggcgctgctgcagtacgtgtactggtccaacgggccggagaccggcgagccgtcgccggggaacaaacagtgtgccgccaaggaggtggtcgtcgccaccgcgtgcatgctcgtcgccgagcttttccggcggtacgacgacttcgaatgcgacggcacctccttcaccaagctcgacaagcgggagctcactcccagctaagctttgctgccgccattctctcactcgatctccatgcacatatgcatgaagaaattaattaaattcaagttgctagctccattttttctctttgagctgctgataaaaaaaacatctctattcttctgtgcaataagccaataattaagcattaatcagagcgtacaagtaaaaattgttttcactgttttatgtggatatatatatgtacagggatccacc

SEQ ID NO: 8347 - DNA, 1871 bp, Oryza sativa
  ref <308>: DATABASE ACCESSION NUMBER: AK105695
  ref <309>: DATABASE ENTRY DATE: 2002-08-28
ctaaaccccccctctagcctagtcccaccactaggactcaacgagaaggggggcaggtgtccgaagcggatcacggcggcgggagagagatccggtggcccgatccatggctgcggcggcggtggcgcgccgcgtcgtcctggtgctcgtcctcgccgccgcctccctcgccgcggcgccgcgcggggcggccgctcgctcgctcggcggcagggagggccccggggaggtcgacgccgacgccgccgtcgacctcaacgccaccaacttcgacgccttcctcaaggcctcgctggagccctgggccgtcgtcgagttcttcgcccactggtgtccagcttgcagaaactacaagcctcattatgagaaggttgcaaaactattcaatggtcgggacgctgcacatccagggttaatactgatggctagggttgattgtgcatcaaaggtgaacatcgatctttgcaatagattctcagttgaccattaccctttcctactttggggtccaccaacaaaatttgcttctgctaagtgggatcccaggcaagagaataatgaaaatgcttccaaagaatgcttcggatcctgagcagattgttcaagcaatttacgatgttgaggaagcaacagctcaagcgttacagataattttggagcgcaagacgatcaaaccaaagaatcgtgattcgctcatcagatttttacaaattttggtggctcgtcacccatccaagaggtgccgaaggggatctgctgagctacttattaacttcgatgatcactggtcatcgaatctgtcgttaagttcacaagagggttctaaattgttggaaagtgttgcggaagagaaccactggatctgtggaaaagaggtgccacgtggatattggctgttctgccgcggcagtaaaagtgaaacaagaggatttagctgtggtctatgggttttgatgcattcactaaccgtccgaattggggatggagagagccagtcaacctttacatcaatatgtgattttattcacaacttcttcatctgtgaggaatgccgcaagcacttttatgaaatgtgttcaagcgtgtcagcccccttcagaactgctcgtgagctcagtctctggttatggagcacacataacaaagtcaatatgagattgatgaaagaagaaaaggatatgggaactggtgatcccttgtttccgaaggttacctggcctccaaatcagctctgcccatcttgctaccgctcaagcaaggtcaccgatggagctgtggactggaacgaggatgcagtgtatcaattcttggttaactactatggaaagaagcttgtatcgtcctacaaggagacctacatggagtctcttcagcaacaagagaagaagatagtttcagaggattcatcgatttctaatgctgcaagcgtcccaattggagctgccctgggtgttgcgattgccagctgtacatttggggcgctggcttgcttctggagggcccagcagaagaacagaaagcaaagaaagaactggaactgaaaaatagcctaccagttgctcaccctgcacttcatcagaggggctcatcaatgaatgtgtatttttctggacggattaaaatcttggtaagtgctccaaacagtgtgggaaaggaaatggtcgggcagtcagttacagatgaaaaactcacagaagtacgatgattaactcaagtgtattttttgtgcaacgatgtgagctttgttgcatcatgtcatagatcaacgtgtaatagtttgacatatagatttcggatgattggtgtatacgttcggatgttactatccatttaacgagtgaaattttgaattcagttcgtagctttctact

SEQ ID NO: 8348 - DNA, 2264 bp, Oryza sativa
  ref <308>: DATABASE ACCESSION NUMBER: AK105696
  ref <309>: DATABASE ENTRY DATE: 2002-08-28
aactcgcggaacatttatttcttcttccccactccctctcctcggcttcccttccccgcgatgttttctcgaatactcctctaaaccccacctaaaaccctagctctgctgcctaagcgcgcgcgcctcgccgatggactcctcggcgcgatcgggcggcggaggcaccggcgggtacaccagcactcgcgtgtggatggtcgcgggcgtcgccatcgccggcgccatcgtcttcgtggaggccgcgcggcgcaggcgccggtggctgcgggacaggtccgaggttccccccgatttcggcgccttctgctaccgcttcgagatcgccccggcgccgcagcctccgcctcccgccgcgcgccagctactctcgggcctcacattcgcggccagcgacaacttcgagatcgagggctatgtggctgggtttgggaatccggactggaagaggactcacaaggcagccacgcgcacggcggttcctgtcacgatgctgcagaagcaggggggcacctacgttggtagcacagtcatggatgagctcggatttggtgtttctggaggaaatttacacaatggaacaccaatcaacccagcatctccatcactcttccctggtggatcatgcagtggttctgctgtggcagcttctgcacaacttgtcgactttgctcttggtactgatacaactggtgatgtaagaattccagcatgcttctgtggtgtactttgtttcaagtcctctcatggggttgtatctactcttgggaccattgcaaactctcaaagtttagacacgattggatggtttgcacgagatccaagtgttctgcatcgtgttggagatgttcttttaccagctgctacaggtgggcttacgcaaacaaggcagttattttttgctgacgattgctttcagttgctgaaggtccccaacgagaaaacagtaaatgtcatagaaaatgctatccagacattaccaggatatcagccacctaagcacatcaatattggtgagtatatcagttcacatgtacctagcctgaaggatttttgtgaacccactgtggagatgctcgaaggaatgtcagccttgaaagcactctcaacagttatgctgttattacagagatatgaattcaagacaaaccacgaggattgggttaatactgtaaaacccaagcttgggcttgatacctctactcgtgtgctacaagctgtcaattcgaaaagtgataacatcaaatctttatacattgtacgaaatgaattgcgagctgcactcaagaatcttttaaaggatactggaattttagttctgccaaccacagctggatatcctttaaagaggaatgcaaggcaaagactttcacctgggtttgaagatagaatgagtgcatttgtaggcattgctacactttcaggctgctgtcaggctgtgattcccttaggaagtcacaatgatcatcctatatctctttcattgctagcagcacatggatcagacaaattccttcttcgcaatgtcttgtatatgttttcttccatcaaagaacaagtcgttttggcgtccaagttggtaactgcaccagtaatcaatagagatgctgattttggtgcagcagagttgttgaaagagaagggaaatagtgctttcaaaggacgaaaatggagcaaggcggttgaattttattctgatgctatcaaattgaatggcacaaatgcaacatattacagcaatagagcagctgcctatctggaacttggccgttataagcaagctgaagcagattgtgagcaggccttactcttggataaaaagaatgttaaagcatatctacgacgagggatcgcaagagaagctgttctgaatcaccaagaagctcttcaagatatcaggcatgctttagctttggagccacagaacaaagcaggccttttggcagagagaaggctgcagaaaaaactaaggtgatacgagcagctgccatctcgtgagtttttgagaggcgcctgattgtacgcaattttgatcgactgaggaagctccttcgctccgtttgttacttgtgttgcccgtgtgaggcattgagcagtttgccgcggtgctgagtcgtcatcagttgatgttctcacgaattcgagaactttggcgtgtttgtataggaattaagccacatattttggccaggcgatgacggaagaaacatttggttagatatattttgtacaaaatcatgtcataatgatatcgtgccttgtat

SEQ ID NO: 8349 - DNA, 1645 bp, Oryza sativa
  ref <308>: DATABASE ACCESSION NUMBER: AK105697
  ref <309>: DATABASE ENTRY DATE: 2002-08-28
atcttctcgcctgagattccgtcgacgccattgcttgcttgcttgttgcttccattccattccattccacacacgagtgaacgagcggggaaggttctagaaggttcggttagagttttctggtctgccatggcgtccactgtgacgacgccgagccggccggtatccgccgggtgccaccggcgctcgccgcggcggtcagcgcccgtcgtgctctccctcggcggcgggccgcggcggcgcacgccgtcgtccaccagctgctcggcgctcgcgtcgccggcgaagcagggcacggccaagctccctccgccgcagccgacggcgtcgaggaccgcggcggccgacgcggagcgggagcgggagcggacggactacaacgaggtggccgccgcgctggagagcatctacaagctgagccccgccgtggtcgaggagaaggacgccgacgaggaggacgagaagagcaaacagaccaagcggaagagaaaaggcagagtggggaggagccggaacgcgacggtgacggtgaggagcagccggaggaggaggcggggacagaggatggacctggggaagagggtggagatgaggaggagggaggaagaagagggcggcgcggcttccgcatctccacctacgccctcttctggatccgccactccatcgtccgcgccatcaccctctccaacttcacccgcttccccttcgccatggaatccgagaggcaggagatccacagggctcgggaggagctggcgttcgagctggggagggcgccgacggaggaggaggtgatgaagaaggtggggctgtctccggcgaggtaccgcgacgtggtgcggatgacgaggcccacctactccctccacgcgcgtaacagggtcacccaggaggagctcatcaacgaggtcaccgacgacgacgccatcggcgtcgacaccagcagccacaacaccctcctccgcctcgccatcgacgacctcctggattcgctgaagcccaaggagagcgtggtgatccggcagaggttcgggctggacgggagggggaagcggacgctgagcgagatcgccggaaacctcaacatctcgagggagatggtgcgcaagtacgagctcaaggcgctcatgaagctcaagcaccccacgcgagtggaatacctgcgcagatacatgtgaaaaccaccatgcaatcgtctcgtctctctgctgtgcataaaacatgtagtacaagcatgtattcctagcaatcttactaattccccaaacctgcatagcattagcaaataccaacaaccacaggtattcattctactctgcatattctgctgtatataatttctgcatgatcccctctgcattgcagattacagatacaaaatacactgagatgattccgtgttatagatacaggaacggtgtgtgtgtgtgtgtgtgtgtgtgtgtgtgtgtccacgagttttttttccaagtgaggttgcggtacatatgcacctcagatgtaagtaattcttacttagcatatagatacggtgcaggggatgatccgatccctgcttagcttagctcatacgctgtgcattcaaaagaaaagacatttccttttcctatcaactgatgctcagtctgtataatactttctg

SEQ ID NO: 8350 - DNA, 2074 bp, Oryza sativa
  ref <308>: DATABASE ACCESSION NUMBER: AK105698
  ref <309>: DATABASE ENTRY DATE: 2002-08-28
agcttattttttaaaatctaaattaagcattgttcttagatgtattagtaatatctgttgttagctggtgtcctttatttctctggattatttctgagcttaggagcttgagctaatttgaccatgctgaatcaatttcttaatatggtagttttactagttcttgttgtaaggtgctggaaagtttctaaaattgcttcagcaagagaagcacaaccaagtggatccgattcatttaggtcgtgtgttattgtggttatcttttgccaagctcccttagcagtgactcctaactagggaagttattttgcgccctaattccatctgtgtttcaaacatgaccctttattttattatcttaacttggttaatcatggtgctgattttaccctccaaataacctgggtccacgaaccaattgttttttgggtctctaggaataggatgtggaaccttgctgatgtcgaaatggacctattatatgtttattaggagtaaatgtataggcgcttcatagttctgaagttgctattttttgtgttccaacctttcttgtcttgttattttaccatatttataatttttttgactgtttcatataaactattcattttgttacatggaaattaccgtgtatagtttggcaatgcaaatatttgtggtcattttctggcagggttcaagttgaacatctccaatttatttttgcttctagcaaagtttttttttttttttttgcagggatgcttctagcaaagtttgtttcatgcacattttttctcatgttaaattattactaccaccatcacactcattatgatgttacactactcgtcatagtactaatgtatgttcagtttactgacaaagtaggctatctgggcacagtttactgacaaagttggttaaattaaaactaccaccatcacactcattttcagtttactaatgtatgtctagtaaagttgttgacatgatgcatgattgagttgttatctgagcacttagaggtgtaatatccgcttcatgtttctcagttgtatgttcagatgattgtttttgaactagatatttattactaccttcatattttaatgtatgacgccgttgactttttatcaaacgtttgaccattcgtcttattcaaaaaatttatgtaattattatttattttattgtgatttgattcatcattaaatgttctttaagcatgacataaatattttcatatttgcacaaaatttttaaataaaacaaatggtcaaacgttggtcgaaaagtcaacggcgtcatacgttacgatacggagggagtatttattatcgcgtgatgcctgcatcagcttatatctgtgtagagctacgacctgactctcaacgtctctgtttctgcaggcacagcaacaccagcagcgtccaccacctccacggactcggcaggtgaaccctgcaccgccgcctgttccttcaccgtcagcgcctccgctgccgccacagcctccgccgccaagggaccaagctcaagctgacaaggccccaattccggtcgcccctccaggcgccgccgtgcctcctgcacagccacagccacagccacctcaagcaggcgctgaagccgtcacaacggagagcaccgaggcgacgcaggcggccaatccaccggcgacgacggcgagcaacccgcatcaagcgccggtaatacccgacgaggagacgctcatccaggaggcgatccggatgacacggagccggctcaggaggcgcatgggtggagcttgagctggaccgccgccgatgtacgtaaagctcccacgccacgggatcatttctcgtcatacgtttcgctctcgacgcagggtgcacactgcactgcatgcacatcctgaaatctgaatcctgtgtaaaaaaaaaaaaacaatctgaagcctgttggtttcgtttcgcggtttcgcaattgtgtatagatcccaccaggtcaccaggaagtagaacagtagattgatggacattgtgatggcacgagaagatcagtaaccgagtacattggtaaagaaagaaagatacttggttggtag

SEQ ID NO: 8351 - DNA, 1627 bp, Oryza sativa
  ref <308>: DATABASE ACCESSION NUMBER: AK105699
  ref <309>: DATABASE ENTRY DATE: 2002-08-28
atcaaggtgttgagacggatcacaccattcacatggtccgtggtgctgcaccaccaccagcgtcaaccgcacctcctgcagccaacaatgtaactcctgccattaatgctaccactgcttccaattcaccagcagttggttttggaggtttgttgcatggtcttgggggttcaggttctgctaacagtggagggttgggctcatttggttctggccttccagaactatcccagatgcaacaacagctatccgagaaccctacgttgatgagagaaataatgaatatgccactcatgcagaatatattgaatagccctgatctaattcgcaatataattatgaacaacccccaaatgcgtgaaattgttgatcgtaatccagatcttgctcatgtcctcaatgatccaagcattctccgccagactgttgaagcagctaggaatcctgaacttatgcgagagatgatgcggaacacagacagagccatgagcaacattgaatcttctccagaagggttcaatatgctccgccgcatgtatgaaactgttcaagagccatttctgaatgcaacaacgatggctggggagggtgatagaagttcaaacccattttctgctctcctaggaaatcatggatcaaaccaagccagagatccagctgcaaattcaccaacgaccacctcagaatccacaacaggttctcctgctccaaacactaatccacttccaaatccctggagcacaactgctggagctgcacagggagcaacaaggccctctccagttaccaatgcaaggagtgccacagctggtggcctaggagggttaagttctacagatttggaaggtatgctgggtggtggctcggatacttccttcttgagtcaggtgttgcaaaatcctacaatgatgcaaatgatgcagaacattatgtcaaatcctcagtccatgaatcagctgcttaatatcaacccaaatgtacgtaatatgatggaatctaacactcagttgagggagatgttccagaacccagaatttgttcgccagttgacatctcctgaaactttgcagcaattaatctcattccagcagtccttgatgtcacaacttggtcaacaacaagctggcccagagcgaacccaatcaggtgctggtgcaggcaatactaacctcaacaatctgatgagcatgttcagtgggctcggtgctggtggtggcctaggtgttcctagtgcacccaatgttccaccagaagagctatatgcaacacaactagctcagctccaagaaatgggtttctttgacacacaggagaacattcgagctttgattgctacagcgggaaatgttcatgctgcggtggagcgacttcttgggaatattggctgatagactgttgtgatcgaagatgtcctcgacttgttacctgtagctcagattgtaagattgtctggttcattggttttataccgtcagattcaaaggcatcatctaggtacatggtttagatgaataaatgagtcaagtgggttaacctttccatacatggttgtcatgtcgtgatcgggatattggtgtattgatggtactttgggttggtgtatatacatattgagctattggtggtt

SEQ ID NO: 8352 - DNA, 796 bp, Oryza sativa
  ref <308>: DATABASE ACCESSION NUMBER: AK105700
  ref <309>: DATABASE ENTRY DATE: 2002-08-28
gcgtgttgttggtcatccagagttggacagacagcgccttccttatcctaagcacacaccatccaaaacctcctccacgctctatctctccatggctgccgccgccgcttcgctgctccacctcgccacctccgcctgctccccgccgcgcgtcaggctcgtcggccccaccaccggccggagatcgccgctgcgcgcggctccggcgccgccgccgccgcgggcgtacaaggtgacgatcgagcacggcggcgagtcgcgggtggtggaggtggaggagggcgagaccatcctgtcgcgggcgctcgacgagggcatcgacgtgccgcacgactgcaagctcggcgtgtgcatgacgtgcccggcgcgcctcgtcgccggcgaggtggaccagagcgacggcatgctcagcgacgacgtcgtggcgcagggctacgcgctgctctgcgcctcctacccgcgctccgactgcaccatccgcgtcatccccgaggacgagctgctcaaggtccagctcgccaccgccgacgactgaggcacatcgcgcgcccgccgccgccgccgtcgccggcgtgtgtgtcatctccggctagcttgtacaacttttttcccctcaagtggtatttcccgagatatttgtgacaattgctcctttgcctagctagttgtttcagttgtgataatgtagtatctactatttttgttttaagcattatgtaggatacatagtattatttctatctttttcatattctaagagacgaactacaaaagggtaatgtacaaaaatttgggg

SEQ ID NO: 8353 - DNA, 2088 bp, Oryza sativa
  ref <308>: DATABASE ACCESSION NUMBER: AK105701
  ref <309>: DATABASE ENTRY DATE: 2002-08-28
accgccactccccccccccgcgccgccaccccaccccaccccaccccacgccgtctcctccgatcgccggagaaggaggaggaggcgtcagccatggcgctggccttcgacgagttcggccgccccttcatcatcctgcgtgagcaggagaagaagtcgcggctgcgcggcctcgacgcccagaaggccaacatcgccgccggcaaggccgtcgcccgcatcctccgcacctcgctcggccccaagggcatggacaagatgctccagtcccccgacggcgacgtcaccatcacaaatgatggcgcaacgatcctggagcaaatggatgtggacaaccaaatcgcgaagctgatggtggagctgtcctgcagtcaagactacgagattggggatggtaccactggtgttgtggtcatggctggctctctcctggagcaagccgagaaactgctggaacgcggcattcaccccataaggatcgccgaaggttatgagttggcctcaaggatagcttttgatcaccttgagcacatctcccacaagtttgagtttagtgctaccaatatagagcctctggtgcagacctgcatgacaaccctgtcatcgaaaattgttaaccgttgtaagaggactcttgctgagattgctgtgaaagcggtccttgctgtggctgatttggaaaggaaggatgtaaacttggacttgatcaaagtggaaggtaaggtaggcgggaaactagaggatactgagctagtatatggaatcattgtcgacaaagatatgagccaccctcaaatgccaaagaggattgaggatgctaagattgccatcctgacctgcccatttgagcccccgaagcctaagacaaagcataaggttgacattgatactgtagagaagttccagatgctgcgtgagcaagagcaaaaatactttgatgaaatggttcagaaatgcaaggatgttggagcaaccctagttatttgccaatggggctttgatgatgaagccaatcatctgctgatgcatagaaatttgccagctgtcagatgggttggtggtgttgaattagaattgattgccattgctacaggagggcggattgttccgaggttccaagagttgagtcctgaaaagcttgggaaggctggagtagtcagagagaaatcatttggaacaacaaaagatcgcatgctttacattgaacagtgtgccaactccagagctgtaactatcttcatacgtggtggcaacaaaatgatgattgaggagaccaagcgaagtcttcatgatgctctttgtgttgcaaggaatcttatccgtaataattcaattgtgtatggtggtggttcagcagaaatatcttgctcagttgctgttgaagctgctgcagatcggtacccaggagttgaacagtatgcaatcaggtcatttgctgatgcgttggatgctattccactagccttggccgaaaacagtggtttgtctcctattgatacactgacagcagtaaaatctcaacaagtaaaggagagcaatcctcactgtggcattgactgcaacgatgttgggacaaaccacatgaaggaacaaaatgtttttgaaacactgataggcaagcagcagcagatcttactggcaacccaggtggtgaagatgattctcaagatcgatgatgttatctcgccttctgactattgatgatgcttttgaagactatggagtttattgtgctagggccttggcgacaagcacttccagtaggctctgcattttctgtcgatcggtttttgattaacatttacgccatgggtttgcttgcttgtgctatttgatgagctatctgtttgtgtgaacttaacttttggtactttgtttttcgcgcccgcactttgtatagcttgagacaatagcacaatccctttgaagctggcctagaagtttgagtagctaccatttgctcttgtgctgctcagattcgtagatgctatataggttgcgcgctgtggtagtatcgtattgtgttctgcatcgtccgcatgtactctacttttcttaatgatcattttgagccatatgaatatttac

SEQ ID NO: 8354 - DNA, 1900 bp, Oryza sativa
  ref <308>: DATABASE ACCESSION NUMBER: AK105702
  ref <309>: DATABASE ENTRY DATE: 2002-08-28
actcacctcgtcgtcttcacttcacttcacgcacgctcagatccagcctcgcttcgctgccccccacctccatggcggccgtgtcggcggcggccgcccgcctgcaccacctcctgagcctctgcgtggccgtcgctgggctgctgctgatgctgctcggcggcggggaggcgtcggtgcacgagtaccgcgggctcggcttcctcaacaagggcaatgcgttcatcctccacgccggcagcgagggcctctacgcgccgtcctcccccgcgaatgcgacgaccgcggaggacgacgaggatgccgccgccgccgccgtggccgacgccttcatccgatttgacaagattacgtttaggagaccaaaggatgctgcaaaggaaactggttcagcaatggttcagatacttgtttttgagatagaagatcgtgagatgattggtggatcagcatatggaggtcagaaagctatttgttgtacctcagatcttgcgaagttaggagcttgcacggaaggttctgtcatctatcggccatcacaggtgaatcctggctggccacagttgctttttcatcttttgatggaagtgacacgattgcaacactaccttcaaggatcattcctataacaaaaaccgggatgtacaatatgtacttcatacactgtgatccatcacttgctggtctggagatagaggggcaaaccgtatggaaaaatcctactgggtatcttcctggtcggatggcacctcttaagaacttttttggaattatgtcattcgcttttgttgtacttgggatttattggttctatcagtacatgaagttttggcgtgaagttctgccactgcaaaactgtattactcttgtcattacattgggcatgcttgagatgtcattgtggtattttgagtatgctgagttcaacgagactggtgttcgaccaaagggcatcacattttgggctgtaacatttgggactgttaaaagaacagtagcccgtgttattattctcattgtctcaatgggatatggagttgtcaggcctagtttgggtggtctcacatcaaaggtggttatgcttggaggaacattctttttagctacggaaatccttgaattggtagaaaatcttggtgccgtaaatgatctatctggaaaagctcgattgttcttggtttatcccgtggctattttggatgctgcattcgttgtttggatttttatttcgctagctaagacccttgacaaacttcaggccagaaggtcaatggccaaacttgacatttacaggaaattcacaatagcattggctgtaactgttctggtgtctattggctggattggctatgagatttacttcaaatcaacagatgtattcaatgaacgatggcagtatgcatggataattcctgcgttctggcatgtcttgtctttctcacttctttgtgtcatttcatacctgtgggcgccgtcacagaactcaatgaggtttacctatgatgcaagcgaaaactttgatcgaggggacagtctgtcactaataaggccaggtcccattgcttccaagaacgggtggagtttatcttcttcaccagacaccaaagcaacaaagaacgttacagttacatcttttgatggagatgacgaagaaaacaaaagggagtagaaggggcactgtgcatttcatgagggagagaagatacagccacattcaaattttggtatgcagcagatcacactttactaattctagttgtcgggatacgccaagggaattatggaagtaatctttattgaattcatttcctccatatagtagtttttcacacggtgcgccacgttataggcatcactgtatggatgatgatatatatgataggaacaatttatctatgcc

SEQ ID NO: 8355 - DNA, 1448 bp, Oryza sativa
  ref <308>: DATABASE ACCESSION NUMBER: AK105703
  ref <309>: DATABASE ENTRY DATE: 2002-08-28
caaatcctttactttcctttaaaccaaacaagcccttaaatgaaagattttttaaggaagattccttgaacaccctataaaatttttacattccaagggatcctttagaggaggttttatgagcagctagctacctaaaatgtcttgtcttttaagcaaaaggtctgccaagtagctttggaaaaaaaaatactactacatgctggcactcaaaatgaaacctagtagctaatgctaggaaactgatttcattagcttggaacctgatcgagggacatccaaccccatcgtttcagatgacggaggaaaaaacgaaacgacatatttacaaatgaaaaataatttgtgaatacaacttttatatacgtgttcttaacgatctaaaagcaaaaaactgaaaaataaactacggtaaatttttttttaaatcaacttaaattaaggttggaaattcaaattctggatgataagcataagcaatgaggctgatcgagtggttggatgcttcccaactttacattaggaattaatctcttagcttaattactcctaaaataacttcttgccgttattagtctgttggccgtgctaagatctgaacatcaaagtatatatatggtttggtgaaggaaatagaaaggggaagtaagtaggataagtgcagctgtgcgttggtactacagtacccactagcagctttctagctaccgttgagtactgtagcaccatacttgctctgctatgtttgttctaaagttgatgaaaggacaaatatggggacaacgcaataaaacgctctttaatcactcttattattaactagatctccaattaattactgctttcccgttctcgtgcatgcacgccatcacaaacgttcgtcgtcgaagaaatgtttggaaccgtacgtattgatccatctgtgccaaattatgtattgatttcaaatataatgcagatcaaaagcgaatttgccctgcattttggtcatgtcttgaattatgtatcttgcccttggttaattaggaagtttacaaacattacaagaatccataattttcttagcggtcaagaaaccgtcaaggttaattattccattagcctaccgtcaagtaaacactgctaagtctagaaagtcaacgatattaagatttcttggcgactaaccataaggaaatgtcttattggtggtcagactgctaagcaaattaagaagattatgaactcttgaaaccgccaaaaatatatttaaactcgccggctgttttttttggccgccaaagaaattagttggtcgccatgaaaattatggattcttgtagtgagtgcaagattttgtggttcactatatataagtcgggagaactaggttcagagtgtaccgtccataattgtgcacaacattgtatacacgttggtaaaaagttagcaagtgctataatctcgtg

SEQ ID NO: 8356 - DNA, 1732 bp, Oryza sativa
  ref <308>: DATABASE ACCESSION NUMBER: AK105704
  ref <309>: DATABASE ENTRY DATE: 2002-08-28
gagctttgtttcatgactacttatatattcattgtttcagaacattccataattttatccacagttttaaaccaggccagtgagtgaactggctatttcttggttcactagtcaggtttttctgtaggaacacagtctgatgaaggtaacattaaattgtcttgagaaaatcctttaaaagattaacagctattcgagttgtttgccaactaatacctagtattgtttcttacgaacaatggtcctatccacttgattccttcctacattggaagacaaagatgctggttcaaatctgcatattgcaactcctttaaattttgtttcacctgttttggagctaaacagtccagaacacagacaatactggatcaggcttctgtgtgtttagaggattttaccatccttaagaggtgccaccaggtacaaggtaatgacgggtaccattcaaatctaaccattgatttgctgggaggatgatggccaaaagttaaaaatagcaatgctaggtatctatatccgtttctcacgacagacatgggaatgggatcagaggatcagggaggatgccttacaaggggaatgcacatgatggcacccaatttgagtctgctgctttgatctgaacagagggaggaatctggatgaggaaaaataatgcgtaactcaaagaacaagactttctcatgaatcgatatcctattatttacagcagatccaagctctggatcttgtttttatagttcatcaatataaaactgccaattccactgtaatctggtattccagcatatagctatttacgtttggttcagcaaacccaacaacaaaattcatagcaacaaacaaaaaataaagaggaagagaggtcagtggggtctcagctcagtactgaaccagcggcgatgggagtggaccagggtggagggaggtccctgccgtcacctgcccccacgttccctgctctctcctcctagcgcatcagaaggtcgtcgagccggtccactgccacatctgccacgcaaaggtcatcgctgtcactgtctgctcatcgttctcgttgttaggccgcccatgaaatcgaggaagcctcccagctaccgccgccctcggccatatctggcacccctgacatcggcggcggccatgtctgtcccaaaggtgggcgatggtcggcaggagagggaagacggggagacagcgcatgagctgcagagccaaggaggtaatgtcgttggatggggagaaatagttgatgcgaaattaccatgttaccctcccaccattagaaatagattggtacctgctctcaataggccgtcgtggcgggcggtacaaaacctttccagccattagatggtgtgtatttgactgctaggattatggtacctcctgccctcaaggactgcagaaagcctcgtgtgtgatcatttggctgggttttctttattcttccaagccttgggttgaaatgaacctgactctgaaagagttgttccattttatttaactcttaacttctgtatttcattgttgcaatgctatctaccctagctaaagtttaacatgttctcagtgttaagtaattccatctcaaactcattgtcttatcaaaacaggtcacaaaaactgtgtatgcatccccgagccgcgtaaattttcatcttgatcgaaggcagtagaaacggtacctgcataccccaatatttgtttctcaattgatgatcgaatt

SEQ ID NO: 8357 - DNA, 2030 bp, Oryza sativa
  ref <308>: DATABASE ACCESSION NUMBER: AK105705
  ref <309>: DATABASE ENTRY DATE: 2002-08-28
aagctatgtgtcaagtgatgattctacctcggcgcctttgaggctctatgaaactgccagggtgacgacggagagttcagtcatggacaagaaattcaatgtgtcttggagctttaatgttgaccctgattttgattacttggtccggttgcatttctgtgagctggagtatgacaaggcggagcagcgcaagttcaagatttacataaacaacaagactgctgctgagaactatgacgtgtttgcgaaagccggggggaagaacaaggcttttcatgaggacttccttgatgccgcctcaccgcagatggacactctttgggttcagttgggatctgaatcctcagcaggtcctgcagctactgatgcacttctgaatggcatggagatctttaaggtcagtcggaatgggaatcttgctcatccaactgtgaggattggaggtttcaacagtgccatggggaaaccgaaacgtagccccaagtgggtactaattggtgcagctgctggtttggtgatttttgtgtcaattgttggtgttattttcgtatgtttctatctgcgatggaagaagaagacctcagctaacaaaaccaaggataatccaccaggttggaggccacttgtgctccatggtgctacaacacctgcagcaaattcccgctccccaactcttcgtgcagcaggtacgtttgggagcaacaggatgggaaggcagttcactgttgcagaaatcagagaagccaccatgaactttgatgattccttggtgatcggtgttggtggtttcggcaaggtctacaagggagagatggaagatggcaagctggtggcaatcaagagggggcatccagagtctcagcagggtgtgaaggagtttgaaactgagatcgagatcctctcaagactgcgacaccgacaccttgtgtccttgattggctactgtgatgagcaaaatgagatgatcttagtttatgagcacatggcaaatggtaccttgaggagccacctttatggaactgatcttcctgctcttacatggaagcagaggcttgaaatatgtatcggcgcagcccgggggcttcactaccttcacactggacttgacaggggtataatccacagggatgtcaagactactaatatcttgttggatgacaactttgttgcaaagatggcagattttggtatctcgaaagatggtccacctttagatcatactcatgttagtactgctgttaaggggagttttggttaccttgatccagaatattatcggaggcagcagttaacccaaagttcagatgtgtactcttttggcgttgtgctgtttgaagttctatgtgctcggccagtcataaacccggccttgccaagagatcagataaaccttgctgagtgggctctcaagtggcaaaagcagaagttacttgagaccataatcgaccctcggttagagggaaattacacactggagtccatcaggaaattcagtgagatagctgaaaaatgccttgcagatgaagggagaagccggccttcgattggtgaagtcctgtggcacctagagagtgctttgcagttgcatcaaggtcttctgcaaagtgcgaatactgatgatttatcacagcctgaactgaagctctctgatgcatcctgcaatttagggtgcatcgaagaagttgaggaatcctgccgtgcagggtcccaggatgtgaatgaggaatatgtggatgtcaaaattgaagttccatgataatggaatgctggtcaaactagtggcttcaagcaactgaatagggtgagtgtcaaattaacaaaaatgtttagatgcactgctatctagtattgtaacaccatatatgagtgtccctacaatgtactgagattattttggtacagttaggagaaaactctcttcatttcttttgtacttgtgctgatgtacaagtctttatgatgcaaatttcattgattcttttgtaaaattctagagccgtatgcaatgcaatactgagcattaactggag

SEQ ID NO: 8358 - DNA, 2561 bp, Oryza sativa
  ref <308>: DATABASE ACCESSION NUMBER: AK105706
  ref <309>: DATABASE ENTRY DATE: 2002-08-28
cgaggtgcaatgtcatttgttgctgcgacaatggctgggctggcttctgttggtggtcggggggttagaggtagtcgcgatcgacgtggcctgtcacttggaggtagcataaatgagcacaataaactgatatttatggctggggggaagcagctcagcaaacatctgactgtgtatcaagctctccaacgtcagctgatgtttgaagaggatgatgatgagaagtttaatggatctgatttgtcaaatgatggaaatcgattttggggtgatgtgttcacgataacataccagaaggctgatagccaggctgagaaggtatcccaaggtggttccacctcgttgaactcaaaatcagatccttcaagatctatatctgaattgaaaggtgtttctctccttgatagcatcttacaggcagaactcccatgtgatctagagagaacaaactcaacttacaacattttagcactattgcgtgtattagaggggctcaatcagttgtcccctcgtttaagagtacatgctgcttctgatgattttgctgagggaaaaatcaccacactggatgagctatatagaactggagccaaggtaccgtcagaagagtttgttaatagtaagttgacaccaaagcttgctcggcaaatgcaggatgttcttgccctctgtagtggcagtttaccttcttggtgttaccagatgaccaaagcctgccctttcttgtttccctttgaaacaaggagacagtacttttactccacagcatttgggttgtcccgtgctttgaatcgacttcagcaacaacagggtgacaaccaaaatgctggtggcgaaagggagatccgatttggaaggctacaacgtcaaaaagttcgtgtttcccgtaaccgtattctggattctgctgctaaagttatggagatgttctccagtcagagagctgttcttgaggtagaatactttggtgaagttggaacagggcttgggcccactttggagttctatactctcttaagccatgaactccagagtgttcgccttggattatggagatctagttctccatctgatacgggaatgcaaattgataggagcgcaagtcccgacgatgacttggcagccaaagaactcagctcagatttacctgacaatggcagccacttgatacaagctccctttggattgtttcctcggccttggccacttaccgttgatgcttcagaaggcagtagattttctaaggtcatcgaacatttccgcttggttgggcgagtgatggcaaaagttttgcaagatggaagacttttagatttgcctctatcaacagcactttataagcttatacttggacaagagctggacttatttgacataatctcatttgatgctgaattcggaaagacattgcaagaactgcaaattcttgttgaacggaagaggttccttgaatccacttatggcatgaatcagctagaagtcacggacttgcgtttccgtggcactcctatcgaagatttgtgtttagattttactcttccaggttatcctgattatattcttaaagaaggcgaggaaaacacaattgtaaatatttacaacttggaagagtatgttactttggtagtggatgctacagttaaatcagggataatgaggcaagtcgaagcatttagatcaggatttaaccaggtctttgacatctcatccctgaaaatattttcacctgaagagcttgactatctaatatgtggtcgccgagaaatttgggagcctgattcattggtggataatataaaatttgatcatgggtatactgctaaaagtcctgcaattgtaaatctactcgagatcatggctgaattcaccccagagcaacaacatgcattctgccagtttgtaactggtgctcctcggcttccgcctggtggtttagctgcccttaatcccaagcttactatagttaggaagcacccctcaagtgcggtgaatacttcaaatatcgctggagttacagagtctgcagatgatgatctgccaagtgttatgacatgtgctaattatcttaaattgcctccatactccacaaaagaagtgatgcgcaagaaattgctttatgcgatcctagaaggccgtggatcatttgatctatcatgagttgatgataactaacatacagggctcaccattgaatgccctatcaattttatccagaattagtttctttgttgcccgtgtgacataataggttgaggctaccagccgctgtggacaaagcttgaaggacagagtctcccttcagacacagtgaaatcaagttccatatatgtggcgtgggcagcctcgcgagcaccgagaagaggagctctatcctttgccgtacatgtaaataaagaaaaaaaaagaaggggcaatagtagtttacatatttgtcgaaagaaggattgattcgttggtgaaaccctttgctgtgtatctggaatgttattactttgctattattatgttgttaaccatcatgtgtacatgtgtgatcgataatatcgtactgtttttgtact

SEQ ID NO: 8359 - DNA, 1472 bp, Oryza sativa
  ref <308>: DATABASE ACCESSION NUMBER: AK105707
  ref <309>: DATABASE ENTRY DATE: 2002-08-28
ttttgttctacccagacagcgcaggagaatcttctacatacacgcttcattccatttttgatagattagcttcgacttcaagatacctgcaacgtgttgaatccatcaagaagtttaacagtaccaataagtggcgaaagcggggcatttcttctgtgcccctcatttttaaggtagaaccgagaccggcaccaggaagagtttctgtgctcaatgatggctccattgttgttgaggttggaggagtcgaacttgggcaaggactgtggacgaaagtacagcagatgacagcttttgctttgggacagttgtggcctaaggggtgtgaaggtcttcttgacagaatccgtgttcttcaatctgatacattgaacttaattcaaggtggccttactgctggcagcactacgtctgaatctagttgtgcagcaacccttcaggcgtgcaacatgctgattgagagattaaagccggtcatggagaggctgcaattacagtcagacacagtctcatgggatacattgatttcccaggcctctcaggaaaatattaatttgtcagcgagcgcgtactgggtacctgagcaagactcgaacttttatttgaactatggagctggtacaagtgaggttgaggttgatcttcttactggagcaattaccataataaggagtgatcttatctacgactgtggcaaaagcttgaatcctgctgtagacttggggcagattgaaggttcatttatacaaggaattggtttcttcatctatgaagaacaccagacgaacagtgacggtctggttattagcaacagcacctgggactacaagattccaagcgtcgacaccatcccgaagcaattcaacgcagaggtgctgaacactggatatcataagcaccgtgtgctttcttcaaaagcttctggtgaacctgccgtggttcttggagcatctgtccattgtgcggtgagagaagcaatccgagcagcaaggatagagtttgcaggcaacaatggatctggaagttcattactcacatttcagcttgatgtccctgcaccaatgacggtggtgaaggaactgtgtggcttggatattgtggagaagtacttggaagatttatctaaccgtggagctgcaagtggcaactagaacaaaatctgcaaatctgcgattcagtaactttgagttattgaaaggactggcatgatctgatgatcctaccttttgctgctccagtgggtcttggtaaaacagtaaaaatcaaatgtttgccatatatttagtgtttttatttaaaacattttgaataatgagttgtgcttattgaacctgaatggaggtgtgtacctgtggtgcaaaagacgttcaagtttatcgagaatttgatggaactgaaccaccaacttttttgtaacatgacaactattgatgatataaaagtttttccttgattgatagtttgatcaagcc

SEQ ID NO: 8360 - DNA, 1422 bp, Oryza sativa
  ref <308>: DATABASE ACCESSION NUMBER: AK105708
  ref <309>: DATABASE ENTRY DATE: 2002-08-28
agccttacttaaccaagaagcatagccatagctagtgatcgatgtgtccgtccattcctgtataaaaaagataggcgttgtagcgagcactatcactaagccgtatataaagagagcagtttagtactaaagtgagtgtgctagtgtgagcttagtggcaatggcgatgagaggcggtggtgcgacgatgctgtcgtggtacttgcaggtggcggcggtgagcttgctggcgagggcgacggggctggaggcgcagctgcgggtggggttctacgacaactcgtgcccggcggcggagatcatcgtgcagcaggaggtgagcaaggcggtgtcggccaacccgggcctcgccgccggcctcgtccgcctccacttccacgactgcttcgtcagggggtgcgatgcgtcggtgctgatcgactcgacgaaggggaaccaggcggagaaggacgccgggccgaacaccagcctgcgtgggttcgaggtggtcgaccgcatcaaggcccgcgtcgagcaggcttgcttcggcgtcgtctcctgtgccgacatcctcgccttcgccgcccgcgacagcgtcgccctgaccggcgggaacgcgtaccaggtgccggcggggcggcgggacgggagcgtgtcgcggtcgtcggacaccggcggcaacctgccgccgccgacggcgagcgtgagccagctgacgcagttgttcgcggcgaaggggctgagccagcgggagatggtggcgctgtccggggcgcacaccatcggcgcgtcgcactgcagctcgttcagcagccgcctgtaccgggcgggcacgacggccggcggcgccggcggcgggcaggacccgaccatggacccggcgtacgtggcgcagctggcatagcagtgcccgcagagcggcggcgccgccggcggcggcgcgctcgtgcccatggacgccgtcacccccaacgccttcgacgagggcttcttcaagggcgtcatgaacaaccgcggcctgctctcctccgaccaggcgctgctcggcgacaagaacaccgccgtccaggtggtcgcctacgccaacgacgcctccaccttccagagcgacttcgccgccgccatggtcaagatgggcgccgtcggcgtgctcaccggcagcagcggcaaggtcagggcaaactgcagggtcgcctgatgcaaatcggtaagccatagcttagctcgccgtgacaacgtgacgtatcatgtatgtaacgtgcattttgtgtgtgcgtgtgtgtgtatggttggttggttgtgcatcaagagctagagctctctattctttggctgatgatctgtattaattctttgtgactgtgtgtgtcttttgagagaactgtaagttgtaactagccatgtgtgccaaatggtgcttaataattaaaaaaaagagaagct

SEQ ID NO: 8361 - DNA, 2551 bp, Oryza sativa
  ref <308>: DATABASE ACCESSION NUMBER: AK105709
  ref <309>: DATABASE ENTRY DATE: 2002-08-28
ctctggactcgccccatttcctctcgccgccggcgcgtcggcgccgcgcctccggctgaggagaatgctgccccccgcgcccacccgaaacccgggagcctgcaggttcatacccctcctcccaccaaaaccgcttctctctcccgccgccgccgccgcctcctcccgcggtggcctctgcgtcgccgccgcatcccgccgcgatttcctcctcctagtcccctccatcgccgcggcctccaccgtgctccagtccctcccgctatccgcctccgccgcggacgatgagaagcaggccgcgtcgcccgcgccgggccctgcagcggctccggctccaacctccgcgggagagcccgaggcggaggcgctgtcgagggtgtacgacgcgacggtcatcggggagccgcaggccgtggggaaggacgcgcggcggagggtgtgggagaagctgatggccgcgcgggtggtgtacctcggcgaggccgagctcgtgcccgaccgcgacgacagggtgctcgagctcgaggtcgtgaggaagctggcggcacggtgcgccgaggccggaaggagcatctcgcttgcgctcgaagccttcccgtgcaacctccaggagcagctcaaccagttcatggacaggagaattgatggcaacaacttaaggttgtacacttctcactgggcaccagagcgctggcaggagtatgaaccccttttgaactactgtcgtgataatggagtcaaacttgttgcctgtggaactccacttgaggtgtcaagaactgtccaagcagaaggaattagaggcctttcaaaagcacaaagaaagctgtacgctcctccagctggctcaggcttcatttctggttttacatccatctcaggccgatcattgatagacaagatttcagcaattcatggctctccatttggcccaagctcgtacctatctgcacaggcaagagtagttgatgactataccatgtcccaaaaaataatgaaagaaattactaatggatatccttcagggatgcttgttgttgtaactggttcaagccatgttatatatggttcacgtggaattggagtccctgctagaatatctaaaaagatgcaaaagaagaaacaagttgtagtacttcttaatcctgagaggcaaggtattaggagagaaggtgaaatccctgtagctgatttcttgtggtactctgctgccaagccatgcagtcgaaattgctttgaccgtgctgaaattgctagagttatgaatgcggctggtaggaggcgagaagcattaccccaggatcttcagaaaggaatagatcttggcgtggtttctcctgagatactgcaaaacttttttgaccttgagaaatatcctgttatggctgaactgattcaccgattccaaggtttccgtgaaaggttattagctgatcccaaattcctgcatagattagctattgaagagggtatatcaattaccaccactctcatagctcagtatgagaaacggaaaggaaggtttcttgaagagatcgactatgtccttactgatacgattagaggttctgttgttgacttctttacagtgtggcttcctgctcctaccatttcactcttatctttaggtgataatggttctggtgagagtttggagcttctcaaaggacttttagggtcacttccagataatgcatttcaaaagggtattatggggcagagctggaacacaaaccagaggtttgcctcagtgctgatgggtggaattaaacttgctggtgtgggattcatttctagtattggagctggagttgcttcagatgttctgtatgctgctcgtcgagttttgagaccttctacaagtgttgaaacagcgcgcagaagaacccccatatggaaatcggcgactgtttatagttgcttccttggaacatcagcaaatctacgatatcaggtcattgctggtctggtggagcatcgcctaggagaatatctgatggcttactataaccagccgcttcttgctaacttgttgtcctttgtttcacggacaattaattcatactggggaacacagcaatggattgatcttgcacgggctacaggcctgcaaactagtaagaaagagctgccatctccagagatttcaaacctacctgacatgccactgttagaatgtggcacaacagaagtacaaaatatggatgatagcaacaagcaacagccaatgaagtaaccgtacatagccaatgactccttggcctgtttgattgtggccattcaacacagggacaacttttgttttgatcacccgatactgtacaggtatatatacgggaaagacttcgtacggcagattgaagctcgtcgatatttttgtttcccaatctttatggccaggccaattttaacccttcgagagtatatatttgtacatcagtgaatgaaacaaatcatgttcgaaacacgtaaacaattacacgcaggagttccctctgaacacatcctatttactcattctgaatccaatgttttcttgaggattggcagt

SEQ ID NO: 8362 - DNA, 1225 bp, Oryza sativa
  ref <308>: DATABASE ACCESSION NUMBER: AK105710
  ref <309>: DATABASE ENTRY DATE: 2002-08-28
ctggatttagtgcgtcgatgctgtaacaccattgcccccgcgtcgctcctagggcaggggcgacacgggaggcgacccagccgccgccgccacaccacccccactgccctccttccacctcgccgccgcccgagcgggccgccggaaaccgcgcggccgcaaggacggcggcggcgtggccttctccccccagatccgcgcctctcgaccggatctggagggtggcggcagttggcgacggcggcagcggtgtggcgacgatggtggcggcaattggccggcggcagttggtgatggcggtctctctggacgccggcagcagttggcgacgacaaccgcggtgtgatggcgtcgggcagctagctgctcggtggtggagggcgacggcgcggcggcagtttgcggaggcggtggttggcgtcggtggcagcggtgacggcagctgcgactctggaggcggtggcaacgtcggcggcgaggaaggagttgggtgcgaggtgaggatgacgacggcgaggtggctgggtgtttggcagcagcggccacggtggtggtgaccgtgtttgcggtcaccgaaggcatggcggcctcgcttgactagccgagggcgtgggagacggctgcatctggccggcgtggcatcgtgcagtggaggggtcggaaaccggcttggcgcagagaagtgcagccgatggtagcggaggccggctcggcgcgagaggcgcaggcggcggagatggaggccggcttggcgcgagaggcgcggccggtggagggaggccggattggcgcgaggcgcgtccggtggaggaggccggcttggcgcagagaggcgcggccggtgatggaggaggcgacctaggtgtgaggaggagctgccggtgggtgtggcgcggtcttcgacgcatgaaggctggccggcgggggacgccggtgcaggggtcccacatgtcggcaaagcttgtgtggtggtggagcatcggtgcgtcagacgtggtttcgcagaatctcgtctgtgcccctttgttggcctagtggcggtcggtcacgcttagtggcggccgatccggtgctagccttctcctgggcgtgtgtgttggcgatgtcggcgtgtgggtggtggtatattttttccttttcctggttacgactctccagagttgtaatattgtatttttttcctgctctatcaatagaacttcgcaccgtctcgtgcgagtcgttc

SEQ ID NO: 8363 - DNA, 1914 bp, Oryza sativa
  ref <308>: DATABASE ACCESSION NUMBER: AK105711
  ref <309>: DATABASE ENTRY DATE: 2002-08-28
gtgtatttcctggacgcaccccgttcctaacgctaccttgttttgcctatgtacgcgcggacgtgtgggcgagcgatcatgacacgaccgtcttcaccttgtagttccgcgcgaacgcgctgtacacgacgaagttgagcgtgcacagcgccgacatgacccagaagaagtagtccaggtgtccctcgttgaggttgtccgaaatccacccgggccggccgtccacggcggtgaacgcgttcacgacggcgtagatgaaggagctcatgtagcttcccagcgccacggtgagcagcgccagcgacgtgcagatgctcttcatggactccggcgcctcgctgtagaagaactccagctgcgcgatgtagcagaacacctcaccgccggccagcatgaagtactgcggcatctgccacgcgatgctcagggactcgccgcgcgccgccgcgtcgaggcgcaccatctccaccagcgcggcgatggccatggcgaccgcgatgagcagacggccggcgcccatgcgccgcagctgcgacggctcgccgttggccggggagaagctcctgaggagcggcacgatcaccgagccgtagacgagcacccatgccaggacgcagaacacctcgaaggacaccatcgacgcggcggggatggtgaacgacatgatccgcatgttcatcgcggcgccctgctgcacgaacgtggtgttcagctgcgcgtacgccgccgacagcacgatgctcgtcgcccatatcggcagcagccgcatcaggatcttgagctcctccacctgcgtcaccgtgcatagcctccacgagcccgcggccgccgccgaggcgtcgttcgagtcctcttccaggtcggactgcacgatcaccgccgccttgtcaagaaagctgaactcgtcggtgtgcgtgatcttgggctgatcgatcttgtcatggacctcgtagaggagggcggcgtcggcggggacacggaggctgaccttccggcacgcggcgaccaccacctgggcgaggctcttgagcggcgtgccggtgggcatgctgcgcttgtacatgggcgtggcgagcacgaagccgccgaacgcgatcgcgacgcaaaccgtggcgatgccgaagccgagtccccagctcacgttctgctggatccacacgatgaataggcccgacacgatcatcccgaagtcgacgcacatgtagaaccagctgaagaaggacatcttccgctcccggtccaccgcgttgtcgtcgtcgaactgctccgcgccgaacggcagcagcgccgcgcgcacgccgccgctgccgaacgccacgaggtagagccccacgaaggcgatggtctgcgcgccaaacacaggctgctggcacgacgtcgagcccgccacggcgcacagcgcggtggtcggcaggaacgccgagaaggtgaccagcaccatgcccaggaggtagaacacgagggagacgaggatggtgttgtagttgccgaagaacgtgtcggcgatgatggcgccgaacaccggcgtgaggtagctcgtgccgaaccacgtcgtgacattggacgcgctcgcgaggctgctgccgtgcaggacggtctccaggtacaccaccaggttcgtggcaatgccgttgaacgctgtgctctccaagcactcgaatcctagcaccaccgccggcgctttgctcccgctcttcttgtcctggatgagtggcaccgtcaggctgatgtcgtcctggagtttcgggttccagctctgcagatcaagttcaaagtttggggagaacatgtcagtttacatttttttttatttcttgtatatctgaacaagccatcaaagtttttgcggcgttgttgtagacgtcagcgattgtacttgaaaatcgtaaagggataaaggaagcagctttgtac

SEQ ID NO: 8364 - DNA, 1607 bp, Oryza sativa
  ref <308>: DATABASE ACCESSION NUMBER: AK105712
  ref <309>: DATABASE ENTRY DATE: 2002-08-28
aaaggttgggtgaccgacatggagacattcctgccagcgatcttgagcgacctcctcggcaggtccatctcttacctggtgcagcgataccggcagcagagcacggtgcaggacgacctcgagaagctgcgcctcgcgctggtcagggtgcacgtcaccgtcgaggaggccgaggcgcggcacatcaccaacaaggccatgctccggcagctcgacgtgctcagggaggccatgtacagcggctaccacatgctcgacgccctcacgtaccgagcccacgcggacggggcgtcgttctcgttcgcgccgtccaggctcaacgccgccaagcgcctccgcctcctcgccgccgacgagggcgccgcggagctgcgccgcacggtcgacagcctcgggcggacgatcgccgacatgagggagttcgtcgtcttcctcaagggctaccctcgcatcagtactcagccttacagcatgcacctgctcctcgacaagctgatgttcggccggcagaaggaggtggagcaggtcgttggattcctgctgcagccggacgtctgcggcgctggcgccggcgccggcgccggcgtgctgcacatagttggcgtcgcgagggtcgggaagagcaccctcgtcgaacacgtctgccacgacgagagggtccgcggccgattctcctccatcgtgtgcttgagccgagaagaccttgaggacatgggagaccatcgtgctctgaccgtcaagcacggcagccatgcctcccacgggagctcgctcgtcgtcgtcgacctagccgaggacgaggagcccgtgggcgacggggcatggaggcggctgcggtcgtcggcgatgtgcagggcgcgggggagcaggatcatcgtgacgagcaggtcgccggagacggtccgtggcatcccggcggcgcgcgccatcgagctcaagttcctccgcgacgacgtctactggtacttcttcaaggtgctcgcgttcggcagcgcgaacccggacgaccacccgaggctggcgtccatcgccatggacatctccgcggagcagaagggcggcttcataggcgccaccatcgccagcagcctgatgagggccaacccggacgcgcactactggaccctcatcctcaagaacatgagggagtacacgcggaagcaccgcgccatgttcggcaagcacccgcacgacctgctgcggaacaaccacccggtgtacctgtggaggctggccgagagctccaagatcttcctgtgccacggcttctacaccgcgtgccccgccaagcaggagatccccagggtgacgttccaggaggtgctgtccggtagggtgacgccccgcgggaggttcgaggtcctggcgtggacgtcgcagatacccccttgccggagctacctgatgagctgctcgctggacacgccgcctggtccgcaccgtgtccttgataggaagaagcgtcttaggcagctggttacatgaaatgaagctgatcatctcgtttcatcttgtcatggtgtatgtagatccgatcctctgcagcggctgtgcgcgaaattgtacattgcattaagttgtggtcccacgtaatgtgtagttgaatc

SEQ ID NO: 8365 - DNA, 1550 bp, Oryza sativa
  ref <308>: DATABASE ACCESSION NUMBER: AK105713
  ref <309>: DATABASE ENTRY DATE: 2002-08-28
ggcaaagcagaagccgaagccgaagccgcaacctgcaaaaccaagtccacctccgcctccgcctccgcctccgcctccacccaccaccaccaccgccgccgctgcgccgccggagatgaacaggatgacggcgccgcacggggggatgccgccgccgccgatgccggcggcgggggggctggcgaggtacggctcggcgccggggtcgctgctggcgtcgatcgccgactcggtgatccggggccgcggggttggggttgtcgatcagctgcatcatcatcagcatcagcatcagcttccgccgccgccgccgccgcagcagcagcagatggtggggaggtacttctccgcggagtcgtcggggctcacctcctgcgagtccagctgccggacgacgacgacgacgcccacagcggcggcggccgatgtcgggcggcacccgctcgagcgcgcgtacggcggctccggcgagatccacgtcgacgcctcctccgccgccgtcccgctcttccgccacagcagctcccccgccggcctcctctcccgcctcatggctgacccgcacggcaatggcatggccgcgacgagagggatgggcggctactccggcggcggcggcgacgccggcgcgatggcgcacaggaggctgagctcgcagtggagcttctcgcggcaggacctgccgcagatatcggagatgggcggcctcatccccgacatcggggagagcatcgtcaccggcggcggcggcaacagctccagcgatggcgccggccacggcgcgcagtcctcctccttcctctcctccaggaacttctccatgagctcctgggacgacaccaactccatcatgttctcgcccccgagcagcagcaagaaggcccgcgtcgccgccgccgccgccggcgaccacggcgacgacatggtctccagcttcagcaacatcgactcccagtttggcttgtcgaagcagtcgtcgctggagatggccggcatggatgacttcttgcagctccagccagactccgtcgcctgcagggcccgggcaaagcgcggctgcgcgacgcacccgcggagcatcgctgagagggagaggagaacgaggattagcaagaggctgaagaagctgcaggatctcgtgccgaacatggacaagcaaacgaatacatcagacatgttggatattgctgtaacctacatcaaggagcttcagggccaagttgagaagctaaaacatgaccaagcaaactgcacttgctcaggcaagcacgattgctgaggctggagaaccagatctccgagctaatgttgtaatgatgtgattggtgaacccaaagttttgcttcagaagattagggtgtaaaagcacttcacatgtcaagtggcctccatgcctcgccctcccctttatcggttgtgttatggacagcgtcaatgacttgaagagtaggcggtgacaaagtagattaattgttgtattttaattgatgtaaggcagtggcttgtatgtaaaatcatccatttcaacgccaatgggattgcttcttatt

SEQ ID NO: 8366 - DNA, 2771 bp, Oryza sativa
  ref <308>: DATABASE ACCESSION NUMBER: AK105714
  ref <309>: DATABASE ENTRY DATE: 2002-08-28
aaacttggtggatttggttttgctctttctgttgaccaagccacaggcagtttgacatcaacacagcaattccactattcggactatgatgttgaggatacagctttacctcttcaaccatctctgaattatactgcaccagaattggtccgaagtggagattctaaagttggctcggcttgtgacatatttagttttggatgtctagcttatcacctggttgctcgtagaccacttctggattgccataacaatgtgaaaatgtatatgaattccttgacgtatttaacaagtgaagccttttctaatattcctgctgatttagtggtggatttgcaaaggatgctatcagttgatgtagcatcacgccctagtgctatggcgttcacaggctcttccttcttccggaatgatacgcggttgcgtgctcttcgtttccttgaccatttgcttgagagagacaatatgcagaagacggagtttctgaaggcattatcggatatgtggaaggacttcgattcccgagttcttcggtataaagttcttccacctctctgtgctgagttacgcaacatggtcatgcagccaatgattttgcccatggttctaacaatagcggaatctcaggacaaaggtgattttgagctttcaacactgccggcccttgttccggtatttacttcagcgtcaggtgaaacacttcttttgctcgtgaagcatgcggatcttattattcacaaggccacacaagagcatttgatatcacatgtccttcctatgctggtacgggcttatgatgacactgatccccgactacaggaagaagtactgcgacggacagtgccattgtctcgtcagcttgacgtgaagctactgaaacagtctgttctgccacgcgtacatggattagccttaaagactacagttgctgcggtgcgtgtaaatgccttgcgctgtttaggggatcttgttccatctttggataaagaaggcatactggagatcttgcaaactcttcggcgttgtacagctgttgaccacaccgcaccaacacttatgtgcacccttggagtggctaatgcaatttttaaacagtgtggtgttgagtttgctgcggagtacgtgattcctctcgtcttcccactgctcacagcacatcaactgaatgtacagcaatttgctaagtacatactatttgtcaaggatatcacaagcaagattgaggagaagcgtggtgtgactgttacagataatgggaatacagaggtaaaagtatcaccctcattggctaatgggattcattctgagccattgtcacgaggtgtgggacaaactgaacagatacaaactgcaaagggtgctgcatgggatgaggactggggccctactaagaaagcaagcactccatcacagtcatctgattccaatgcacggatgaagcaaccatcagacccttttgatttcagcactcaaacaaagcaaccctcggcacttccttttgatttcagtactcaacaacctaagccatcatctgcaatcccgcaagtgacaccagctacaatttcgcctgcaccatcacttccatcactgcaatctcttgcaccaagctctggaccccaaacttctggttcatgtgttcctgttgacattgagtggcctcctagaaaaaacacatcgtctgactttaatgcaccattatctgttagtgagcaaagtaaatctggagggctatctagtgatggtcttgctgatattgatccttttgccgactggcccccaaaagcaagcagtggtgccagcattttagctgttggacacctgtcaagcacaagccaaagtatttctggactaagtacaggaaatattgggttcagtggcaacagtggttctctggggcaaatgaaaaccaaccaaatgagctggtcagcgaaaccgaacactactaatttaatggccgtgaactcaacaggcaattacttgaatcagggcaactcagctcttggatttggaaatccaattggaggacggagtacagggtcattgtcaagcagcacaacacagggtccacccaggcttgctcctcctccatctgcttctgttggaagagggcgtggtagaaatcaagggcaatcggcactttcacgagcatcacgtactcctcattccaatgtttcatcagagcagccacctattctagatttactgtagcaattgagggccctctatcttcgttttgcaaatgttgaagttcctatatggtgagcatcatgccttttttcttcccaacctgcttgcggcagtagtgtatttacatgtcagttttgcaaactggatggtctgagactgaggcccccaaatgaagctgcttcagagccttccagaggttacagaatgttccctttctcaggagtcaggatgtcttcttccacacttggtcttagttggacaggcgaaacaggagaaattctatttgtgtataatatatttgttcagacggctgtagattgtagagttcatgaatacagtcaacatgtttgttgggatgttttgaatgcccagaatgtgccaccactccaccaggtttaatgggcctcgtgcaaatggacccaaggcgatttactcagatactcccctcccctacatgtaattcatttattctgtgaaggccccatgttgtgtagtccagaagtataggcccatcaacacaacagtaaccgttgtcgatagaaacccgtgtcttctgtgaattgtgattaaagttgttgagggtg

SEQ ID NO: 8367 - DNA, 704 bp, Oryza sativa
  ref <308>: DATABASE ACCESSION NUMBER: AK105715
  ref <309>: DATABASE ENTRY DATE: 2002-08-28
aaaaaaaaaaaaaaaaaaaaaactctttccccatcccgtctgctgctccctccctgctcgcggcgccatccgcccggtgccgccgtcgccgtccacccggcgccgcagtcgtcgtcctcccggcgccgccgccgtcatcctccggcgctgccgtcgtccatggagccgagtgagaggcggcgcagggagaagatgcccgtggggtcgagctgcacggtttggtggaccatgatgtagcgcagctcctcatcgagaagcaccatggcgagctgcacggcgaccccggtggaggaggaggactccgcgccgccgccgccgccgccgccgccgctgccgcgcgcgaggagctcgacggccggtgctttctctgagctaagccatggcaagaaaggcacgagaggaagaggaagaagaagaagaagaggaaggagaagagcagtcagggcacggggatcagtggcaagccaatgggggcagcttcttcttcgatgcagcatctgttcttgctctgccgcctcctcggcttctgctttgcgttcacggcgagccagcagcagcagtcggactcgtgtagcagcgccggcgtcgcggtcgcgcatctcgccttctgctgcctgaccgtctggaagcaggaggacttcgtcctgcgggtgtgtatgctactgaattttgcagtcctaccagttattggaattttactgcgt

SEQ ID NO: 8368 - DNA, 2003 bp, Oryza sativa
  ref <308>: DATABASE ACCESSION NUMBER: AK105716
  ref <309>: DATABASE ENTRY DATE: 2002-08-28
accccgcgcgaaaaccccatgcgacctcctccccggccgcgccgcccagtgccggcgcggctcgtcgccgctgcggtcctcctctcggctctcgccgggggagccgcggcgggcgccgccatcgccggcgatgggtacgggcgcggcaggaggctgtacatgaggaacaaggtcctggagatgttttaccatgcttatgacaactatatgacttatgcatttccacatgatgaattgaagcctctaaccaaaagtttcactgactcccttagtgagcttggcaacctaaatcttgaacatttgccaaatgattacaatggatctgcacttacactagtcgaatcgttgtcaagtcttgttgtcttaggtaacctcacggagtttgaaagaggagttctctggctttcagagaacctaacatttgatgttgatgctcgaataaatctttttgagtgcaacataagacttcttggggggcttatttctggtcatattcttgcaaaggagcacagcagtcatcttaaagatggaccatatcaggaccagttactacatcttgctgaaaatttaggaagtcgttttctaccagcttttgagacacctactggattgccatacgcatggatcaatcttaagtatggagtgatggaaaatgaaacaactgagacaagcacatcagggtgtggttctctgattcttgaaatgggtgcattatcacgtttgacgggtgattctagatatgaggctgcagctcttcgtgctcttcgtaagttgtggagcatgagaagttcactaaatcttgtaggcacaacccttgatgtcttgactggcaagtggattgaatattcgtcaggcattggtgctggagttgattcattttatgagtatttgattaaagcgtatgttcttttcggaagcgaagaatactgggatatgtttcattcagcttaccttgcagtgcagaagtatttccgacatggcccatggtatcatgaggctgatatgaggaccggagaagcaacacactggcaactaactagccttcaagccttctggccaggtcttcagacacttctaggagatgttgctgctgcaaatatatcacatcgtgaattttacaatgtatggcaaaggtttggtgttctgccggaaagatatcttttggacttcggaatgttgcatcctacagagaagtattatcctttacgtccagagtttgctgagtctacattttatctttatcaagcaactaaagatccttggtatctagaagttggtgaagctatcattggatcccttaattactatactaaagtggatggaggttttgctagtgtcagggatgtttcgacaatgaaacttgaagatcatcaacatagcttctttctttcagaaacctgcaaatatctttttcttctctacgatgattcattcttgaggaaccaaaattacatatttaccacggagggtcacccccttccaataaggagcacatggcacgagataatcccgacaacgcatgttcccagcaactggacattcgttaaggatgacagccaacccttccgtgtgagcgcattgtcgtctcaagtttgtccagaaacgattttccggcaaagcgttggctccccgtgggagagtgcatgccatgtaccagacgtgttacctacccacagatgcaggaccgatgatgactgtggagtggaggccgtatcatgcaggagaagaacttgcagtatggctggctactgcggcttgtggctgggggtttattagcttttttttttctgtggagattatactgtttcccattctttaaagcacaaaaaagtgaacgttactggacggcctcggcctgttacttctgtacattagaatatatatagctaatcgaacagaatgatagtagcaaagtcgttgtcccagttgttagcgcagaatgaaacatgtatgcaaattctcctaatgtattctttgctgatgtaatcttttgatttattatc

SEQ ID NO: 8369 - DNA, 1478 bp, Oryza sativa
  ref <308>: DATABASE ACCESSION NUMBER: AK105717
  ref <309>: DATABASE ENTRY DATE: 2002-08-28
gtgagtcatgcttacttccattcagcatacaattccatgttggctatgtgccctctggtggaagggttgttgggttaagcaagctttcgagagtagctgatgtcttcgccaagaggttgcagaatcctcaaagactggctagtgaagtttgtggtgcattgcatgctagcatacaacctgctggtgtggctgttgctctgcaatgttggcacatacctttgccagaaaacttgaaatgcaagactttgcaaggttggattagcacttcacattcatctcgctctggagtttttgagggtgagagcagctctttttggaatgacttctcagcccttcttaagcttaggggcatagacatggagagggacagccattctgcctccatagcttggtgccctttaaggtctcatgatgtcccagtctgcaatgggcactgcaagaaggctacaaccaacggtgcaatttcacccaaatcagtaccagctccctctaatatggtttctgctgttagctcaatgctcttatcccttggagaggatcccttcaggaaagaacttgtaggtactcctcagcgttacgtgcaatggctgatgaagttcagagcatgtaacctagatgtgaagctgaatggctttacactcaataatttgagtgtataccagagtccagctggagatgctgctgaccatcgagcaatccattctgagctgcatttgccattttgtgcgcagtgcgagcaccatcttctgccgttctatggagtagtgcatattggctaccttgacggcggagatggtgaagtgattgatcgatctcattttcaggccttggttcatttttatggatgcaagcttcaggttcaagagagaatgacaaggcagatagctgaagcagtttattctgtttcgcattgtggggccatagttgttgtagaagctaaccacatttgcatgatatcaaggggaatagagaaaatcaggagtagcactggaacgattgcagttctgggtcagtttttgacggacccttctgccaaggcacgctttctgcagaacgtagtagatacaactggtttggcagtatgaatcacttagatcatacaaactagaatatcagctaagaatacatgattcagagaagtaccgcagccactttaatatggttgaaagttggtacccagttcggtgtgttaccggcaaacattgcccattggttcgagaccggggctggtgccacgtctctctggaaggaaaatgtccatttgcttggtgagggaaaattttcgtcacatggaagattatattgaagctgtcactggaagcaccaaaagggtttggttttctctgtgttgtaccatttttcatttgcacggcacttgaaatctatactgcactaattgcagatgtgccgagaaagatatatacacagaagcaatgtttgtcacatcatttttcactgtagcaaattttgatgagatc

SEQ ID NO: 8370 - DNA, 2478 bp, Oryza sativa
  ref <308>: DATABASE ACCESSION NUMBER: AK105718
  ref <309>: DATABASE ENTRY DATE: 2002-08-28
tgcttgagagagcagccttagaaccactgccttgtcaacctgtgtctccaaaggatgacaaatgttcccagagtcgcatgaaggatggtgcttctggtgaggttaacaaaatttccatggagcgcgaggaaagacgcctaactgagcttggtcggaagatacttgaaacatttgtgctatctcatatattcagtggaattgaagttgcgtaccaagaagctgttgctttgaagagacaagaagagttaattcgagaggaggaggaagaggcatggcttcttggaaatgagatgaaggggaagcgtgggggtggtgctaatgaaaaagataggcgtgcaaagaagaaacaggccaaacaaaagaagaacaatcgtaagattaaagacaaggaaagagacgaaaaatttgaagcaaagattctggaaagacttcatgatgaaactgcgattgatgatagtgatggcttatcatcaaagcaggccgaagaagtgacaacaaaggttgaaaacttggaagaaggtgcttcagataggcaaggtgatctagatagttcagaaattgctcaccgaccagactcaggtgacaagtatcctagacaaatgaatggactgagtgatgttactggcaatgcacaaaaggtaaagaaggcctcctctatggaggctaactcaccagtctttctggctgattctgttgctgcaagcggcactcatagcagaggaaataatttgtcagacagtaagaaccgcatgacaccaaataaagatcatgttccaaaaccaacattgcaagccaatagagcatctgctaattgctcgaaatcaactccagttgatatagagaaagatgttcctcttccttcaagatcgccacaaattaataaacctgctccagttcctccaaaatctccacaagttggtaatgctactccagttcctccaaaatctccaccaattgaaaaagcttgtccagttccccccaaatcaccaccaagtgctaaagatacatcccttccttcagtgagatcacttcaaattgataaacctgtcccagtccctccaagattaccccaagttgataaagctgcttcactttcttcagaattgccacaaacttctaccacttctaattctgaagctcaagaagagactgctgccataagggttgcatctccctcagtttctgaagttactgtcacagcatcaagaccttcgagtgcccctgtgttccctgccccaagatcaactgtaccagctacacaagtacaagtttccacattgctttcgcgctcaatgagtgaagcaactcgaagatcaggaaatgatccttccccttctgcaccagcttacattccacaaacctaccgtaacgctatcatcggtaagcatgggcggggtacaacctcaggaactactgcatatcagtcaacctctctgggccaaggtactgccctttcacagccattgtcgacatatgcaccaactatgtcagtgacgatgcctcctgctggaaggaatgatcagttttctggtaggcatggattggagtctgggttgggaaagccagaagcacgtgatagctggcaaccatggaatgctaacaggcatgttgacaaacatctctggagggatgactcgacataccaacaaacaaccaacggtcatgcatatccgcaaccttggaaggatgttaattttcttcaagcaaggggcacagaaacagaaatacccagcaggtttggaggaccgcaactacctaggcagttccaagctgagactcatgcggattatctcttgcaacaaccacaggggccagtggcagaagaatttccgcaccttgacatcataaacgatttgcttgaggaggaacagagcaatggcagtatgccagagtccattggtcatgattaccatacatttggtctgccgttgccgtttttgttaagaggcaatttggcagatcaggaaatggcttctgctagcagtcctgggcggtttaatttgactgagccatattacgacgagggatactcaagggcctatgacatgagtgctttccaggggacaagggaaagacaatttccctccttggatgcctattctaatggcctgtctgacatgagtccatcaaagccttggctgaatggctctcctaatccatcgatgaaccatgcagttggtacaaatggatacccccagcaaataccggactacaccaatttggctagtgagttgaatggagcctctctataccatcgccgctacgccaacggtcgctggtaacgtgatgacgcctgtatacagtcttgcaatcaaaaaaaataatgcttgttacctgtaatagatgttcagtctgggtctgagccgtgtcatggcctgtaattccaaacttttaattccaaaagggcaaagggttgcattctgtaaagcgttcgccgtgtttaggctggttaatgctaagtcgagtgcttttctgatc

SEQ ID NO: 8371 - DNA, 2421 bp, Oryza sativa
  ref <308>: DATABASE ACCESSION NUMBER: AK105719
  ref <309>: DATABASE ENTRY DATE: 2002-08-28
gcacaaccccaccccgaatccaccaccccacgccaagcccgctcgccgccgccgcccgagcgcgcgcgcgtacgggcacggcgggcgtacgacgccggaggtggggatcgagcgtgccccctcctccgtcgcggcgggcgacgtcggacgtcgtcggtcgtagcttgccttcgtttcgttgtcgggttttcggtgctgctgctgctgctggtggtggtcgagcaaaggccggtggcggatcgccggcggtcccgtccgcgggaggggcgcgggtgacgcggtgatcaggtgatcggagccccacccttcgttttctccgcgcaattttagcaccgacgcgggtggtggtggtggtggtggtggtgggcattggcatttcgtccccttccccacgatagagacgcggagcgtgtgccccccctctcgatcttgccgccgctcgtaatccccgcctgatgccggagaacctgcatttttttttgagccattccaggcttacgttctaatgcgacgctgctagcgatagaaaacccagtggggggtctgtgagaatcatcgcttgatctccgatctatcctgttaaccattcctgtgaggttaggaggtttctggtttaggggcctgagtgaggaggagggtactcaaacggctggacctgcaatcgatctgctaacttggctaactttgataaaagtgtcccttccaacattgccatttggagctctatgggttggttgaccaaattttttagaggttcaacccacaaaatctcggaagggcaataccacagcaaacccgcggaggagacgatatggaatggaccctctaattccgcagttgtgacgggtgtcccgtcagaatttgacaatgaagatatcgctcgtgctatatcactctctctattagaggaggaacaaagaaaggcaaaggcaatagaaaaggacatgcatttggaggaggatgaacaacttgcaagagctatccaggaaagtttgaatgttgaatcgcctcctcgtgctcgtgaaaatggcaacgccaatggtggcaatatgtatcaaccactgccatttatgttttcttctggattcaggacttgtgccggatgtcacagtgagattggtcatgggcgtttccttagttgcatgggagctgtttggcatccagaatgttttcgctgtcatgcttgtaatcaaccaatatatgactatgagttctccatgtcgggaaaccatccataccataaaacatgctacaaggagcgctttcacccaaaatgtgatgtctgcaagcaatttattcctacaaatatgaatggcctgattgaatatagagcacatcctttctggttacaaaaatactgtccatcacatgaggtggacggtactccaagatgctgtagttgtgaaagaatggagccaagggaatcaagatatgtattgctggacgatggtcgcaaactctgcctggagtgccttgattctgcagttatggatacgagcgagtgccaacctctttatcttgaaatacaggaattttatgaaggcctaaatatgaaagtggaacaacaagttcccttgcttcttgtagaaagacaggctttaaatgaagccatggaaggagagaagactggtcaccaccatcttccagaaacaagaggtttatgcttatcagaagagcaaactgtcagcacgatattgaggagaccaagaatggctggaaataaagttatggaaatgataacggagccatataggttgactcgtcgatgtgaagtgactgcaattctcattctttatggtctcccaagattgttgacaggttcaattttagctcatgagatgatgcatgcgtggttgcgacttaaaggatatcgcacacttagtccagacgtagaagagggcatatgccaagttcttgctcacatgtggattgagtcagagatcattgcaggatcaggcagtaatggtgcttcaacgtcttcatcctcatcagcatccacatcatcgaaaaaggggggaagatctcagtttgagcgaaagcttggtgattttttcaagcaccaaattgagtcagatacctcaatggcctatggcgatggttttagagctggcaaccgagctgttcttcagtatggtctaaagcgcacccttgagcatatccggttaacagggactttcccattttgaaatttcatagattcgtcttttgatggaagttatacacgatcgatttgtcattaagcgtccatttacaggaaaagaaagcaattctgagatgtgcaattgtacaaacaatcttttcagttacttttggaagggctaactgacgacattgattaaattgtgatatggttagcccaaccaatcacacatgtatggcgttcagaaattctaatggaaacagcggtattttttatgtgac

SEQ ID NO: 8372 - DNA, 2227 bp, Oryza sativa
  ref <308>: DATABASE ACCESSION NUMBER: AK105720
  ref <309>: DATABASE ENTRY DATE: 2002-08-28
caagcattcagcaatcaattctgaactctacgagcaacggattctcctgtagaattgatacattatagcgacctgaaatgaattgatggttacaagcatctttaaactttaggctctgggtccctccaattgtctcttctatctggagagctccttttcgagggggttgttaggatctaggaatatgttccgtttgcagttgttttaatgtcagtagcatctcaatcatggagatgattgagatctccatgattgagattttgaggtatctttggtcttcttgaagacttgaacagctgttcaacatcttttgagaggattcccgtgtgattttatagagaagttgagtagatgttaacaccaggcttcccttcacgttttgatggagtatcttgatggcatgatgtgtagttttgcgctgtagattgatagcatgatgtggaaagtgatgtgcccagttgcacatttttgaagtgttgccagatattcaatgaactgttgaacctcaaatagaaatgctggtgtgatgctattcccattaatgctaatctactaagcagggttgcttttaatcctttctcagacaaaacacacttttcttgctcccccacaatgattgtctagtagtgagggtagctgcttctaaatggcaagcatgaagatgccttccgctttgctttgttctgatgtaaaagctatctgtttgaagctacaataagattactagaaatgtttcaacaagaacggatagtcaattgtgatagaatggaggaacaaatgtggctttccattaatacatttggtcagttttcatgtgaatgtggtagcatttgtatcgataacgaactctagaagttaagggagaatatgtctgttttagggaaaaaattcgagtagaaaatattgcagaattgaaggtccagaagaaagtttttagtcttgtgatcactgaacagtttttgtcaaaaaatggatactaatattttatttcttttcacattggtgttctctctgcgaaattgcatggaaacttgctaaaaatatggcattttctttgctttaccatgagcattaataaaactgagtgctgtcaaaaaggggtgaattgctgaaaggttgggcatttcagagtagggatggtttaattgaatttatcagaaaagtacatgggaaataattggtatatctttttgtgaaatcaatacagaccactatcttgtttgaacacctttgtaaatttgctttgagattaccacaatgatagcttggatttcattatctcttcattagctaggttaataaatcatttccaattcatccttttcatcagggaaaagaaacatctgatccagaaaatggtagacagtgtcctttctttgatgagttgcatgcagtcttcactgaacgagctagaactatgcaacaacaactccttgagtctgaatctggaccatctgttaaaaagaaactaaagcgaccaagtggtgacctgtcatcggaggactctgatgatgaggaagatggcagtggagatagtggcgatgagaaacccataagaagcagaaagaggaaaattgctgacaagaggcaacaatcgcaacgaatggcagaaaagtcgaggactagcatttcaagcatccatgaattgttgcaggatttcctggtgcagcagcagcgcatggatattcagtggcatgagatgatggagaggcgttcccaggagcggattgtttttgaacaagaatggcgtcagtcaatgcaaaagctagagcaggagagactgatgctggagcacacatggatggagcgagaggagcaacgaaggatgagagaagaagcacgagctgagaaaagggatgccctcctgaccacactcttgaacaaagtcttacaggaagatttatagacactgatgcctcgcctacaactgatagatactttagttgatatttctggcatgttccattcaattctttgtagctcctgcagatgttgttcttggagagaatatttcttgtagcatttctattagattcctaggattctttaccagttttttagtgtactaattttgatgcaatattttattgtggatgtaagtatcagaccaccatcttgatacagtgacccatttatgtttgatgataacaacacttcagcaagctttcaaccttgtacaaaatttatgtaagcaataaggtatgtttggttggatggatgaacctgt

SEQ ID NO: 8373 - DNA, 2265 bp, Oryza sativa
  ref <308>: DATABASE ACCESSION NUMBER: AK105721
  ref <309>: DATABASE ENTRY DATE: 2002-08-28
accatttggtccagaaaatgggattagttctaaagaattaaaagacaattccagtgaatcaagtagtcatgcaagacctggaactactgtctcacaggatactgaacgtagtgcaaggcgcagctcaaagaagtcgagtgatgatgcaagtgggaacgaggaccttgtctcatcagatgatggttcttcttttgctgccaagatcaggccaagtgctgcagccaagcttgattttgacttgaatgaaggaatacctggagacgacgtgcattagtctgaggcagaaacctctcctgctgtgtgttcttctgcaattaatttaccttgtctttctccatttatatcacctatgtcaagtgggctacctgctccgataaaagtagctgctacagctaaaggtccctttgttcctcctgagaacctactaagatttcagcctgagactggctggaaaggttcagcagccacaagtgcatttcgtcctgcagaaccaaggaaaatttttgagatgactctcagcgcacctggcattccagtttctgatgctgcagataaacaccgcccagcacttgacattgacttaaatgtagcagatgagcaatttcttgaggaagatatctctcagagttctgttcagacaactggttcggaatctggcaacactagaagaagcaatggtcctgtacgaagtgttggtattgaacttgatttgaacagagctgatgaagttgcagagaaccattttgtgtcgaacactccccacagggtcgaagtcccattgttatcgtcaagaccgttacctgcaattttctctagtgctgatacaaatggctcaagggattttgatctcaataatggaccaactctagatgaaactggcacggaacatgcagcaaggagtctatcatctaaaaataccagcagtataccattcatacctcaagttgctggcggtagaatgaacagtgccgagatgagtaatatctctccatggtttgcttctgcacacccttatgctcctgtagctgcacagccatttttaccatctagaggagaacagcctcacccagttgagacagctgctggaagtggaacccagaggatcattacatccttggcagatggtgtccagcgtggaagtgatccctgccgtgctccagttatttctacttcaccaaccatggtttttcatcctcctgcgtatcaatatgcaggattcccttttactcctggtgtgcaccttcaagcaccggggttttcaattggctcgacatcttatgccaattcagcacctgcaggagttccatattttcctagcattgctccaacactgttagggccagcaggtgcattacctgctcaacatactaggcaatatgcaataaaccttcctgaaggaagcagcactgttggacacgacagtaatcggaaatggggaaggcagggccttgatcttaattctggccctggaagtgtagatgcagaaataaaggacgaacgagtatctttaccagttagacaaaatttaatcacgccaccacatgcctttggggaagagcatacaagaatgtaccaaatgccaagtgttggaataaagaggaaggaaccagaaggcagttgggatgcagaacgttcttcatacaagcaattatcatggcaatgagcttttaactgttatcatttctcatttcacagtgacttcagcttccagtgagcttaggcaactgcatgtggaacttgggctctggtgtgttgcacccttgctggaatatacagttcatacatgaccctgtgatgatgtgaattgtgagaggaatgatactttgctgtaaatgttcatcatatttcatactttcctggaaacatttttccttggcttcagcagttgcactgctagattttcgtagctgtcaggcatatgcttctaatttgctccgatatgactggagatggaatggtatagccgtataggtcctgagccacaacaaacatctgaagccgttgtaattagtccagcttgtttgtttaaagtttcttatgacaaaccattttcacattgttgggcaaatctgcagccttacatatgattttagatgtgacatgtatttttcgtgtaaccgttgcatcagtttgctcatgtaactttatggactatccagtagactgtctgcagttcccgaatgcttgcaaggggcattctggtgtaaccatctctgccttgcagtcataagaaatttagtagaccaagaaataatctatttctgt

SEQ ID NO: 8374 - DNA, 1997 bp, Oryza sativa
  ref <308>: DATABASE ACCESSION NUMBER: AK105722
  ref <309>: DATABASE ENTRY DATE: 2002-08-28
tagagcgaattatgaacttaacttcgttcccatcaccgcaggtgctgcagcgcttgacgatgcttaaaagattatatatccgttcttgctggtgcctcagatcattgggtggcttacgagaggcaacctccctttcagaagttaagatagattcatgcatctcattagagttggtggatgaaaatggaatagctgttatgccatcctctattggaaagctctctctatttggctgcatactaggggccaatttcctcagtactgacttcccacgtctgcgtagcatttccatcacatgctgccgaagctcttcatcatttgctattggtcatctgcgttccctggaatcactctcactgaataacatgccagacttgtgctttcttgaaggcttatcatgtccacatctccaggacatacatctgataaatgttccaaatcttaccgcagagtctttttcccggcatcatgcatggaaatcactcgctattagtagctctgctatgctcagtctcatgctctctataaaggatttcatgctcccagagaaactctgttttgaacaatacgacgagccatccattacatttcaaagctctgcaaatttcacatctatcaagtttctagagttcagggattctaaagtcatgtacctgccaagcagtttgaagaacctgtccagtctggagaggatcaaatttgtcaggatccccaacttatcatctctaccagatttccctaattctatccagcaaattgaaatacaagactgcgagtgcttgaaaagaagctgccaggcacctaatggagaaaactggcaaaagattgagtgcatccgttggaagcttatcgaagtttccaaacctgatgaaagtatagcgtggttcatacacaggtatgataaagttggaatagctgcctaccctaagaagctacagcctggacaacctgtggtctggcacgacaagaatcactgagtaattaacaactcatcacaactgaactgccgctgacccgctgtttaaaacccgtaaacagaatcacatctcttgttcgtccatgtctccaggacggcagactgctgctaccgttgcagttggcagcatatgaatcatctttttcctctggatgaaatttcattggggaacaaaatcatttttttccccaggggatgcaaagctcatattctcataaatggttcagtcaaataattaaatagagttttaagttctctaatcctatgaatgtttgtgaatgtcagggcaccagtgcgccatcgcccactcaccgagggctcgccacaccctctctcctctgccaggtgagggatggtgtcgtggcagcaacaacgtcttcaggagaagatgaagcggcgatgttggagaactgggtcgcggggaacggagaactcctggcagggtgcatgagttcgaattcaaatctgcattctctccacaacaataaatgaagagtgaagccatgacgtacgatccaaattcccatgtgttatccttgccagtactaattggaatttggcaaattcccatgggttccggtactgtgcatgtcagttctcagagatcactatttgctggcaatactttggcaattccattcttgaaataactcggggataattggcatttgttcagatctctgtccaggcatctatcatcatggggctgcagggtgctgtttcacaaactgcactacagcccggacaaccatcgcgtgatgtccgtccaacagtagagagctggtatttcgcaaacaacaaactgcattagaaatgtgaagttgtgtgatttaaatccttagcaaaggtcttacatcttcttactacacatttttttaatgtcccgggcttatatttggttgaactgttgaaggtgcatgcattactccacttggcttcagaaaagtgaacacatacagttatcacattgacgttgccaacatatatctgatgataattaaacaattatcaattatcaatt

SEQ ID NO: 8375 - DNA, 2399 bp, Oryza sativa
  ref <308>: DATABASE ACCESSION NUMBER: AK105723
  ref <309>: DATABASE ENTRY DATE: 2002-08-28
agccggcgagagagagccagccagccagccagccagacagcttcttcttcctcgtccctgtgttgctgcttctgctgctgctgccgccttgtgtatagccttgtgtatctcctttggcttcttctgggtacctgccggccggctaagctagctgatcgccggccgccggctctcgctgagctcttcttggtgccggccgcggcgttgttagtgtcgtctttgctgggctgcaggaagatcagcagcaagctaagctagtagcctccaaggtgcccggagatgtcgtcggcgctggaggtggagggctcgggctcgccgggcgtcgagccggcggcgacggcgacggcgagcaggctgaagcggcacgactctctgcggtgagcgggatcagggagaaagctccaaacttgactcagacgcaagtcgtgctgatctcggtggccatcctgttcatgctcttctccgtccagcggttcggcaccgacaaggtcggctacaccttcgccccgatcatctcggtgtggttcctcctcatcgtccggcatcgggctgtacaacctcgtcgtccacgagatcaccatcctcaaggccttcaatccgtggtacatcgtgcagtacttcaggaggaacggcaagaagggttgggtgtctctcggtggcgtcgtcctctgtgtcacaggcacagagggaatgtttgccgacctgggccatttcaacatcagggccgtgcagatcagcttcaactccatcctgttcccatcggtggcgctctgctacatcgggcaggcagcgtacctgaggaaattccctgagaatgtcagtgacaccttctacaaatccatcccagggccgctgttctggccgacgttcatcgtcgcgatcctcgccgccatcatcgccagccaggccatgctctccggcgcgtttgccatcctctccaaggcgctgtccctcgggtgcttgcccagggtccgggtgatccacacctctaagaagtacgaggggcaggtgtacatccccgaggtgaacttcatgatgggtctcgccagcatcatcgtcgccatcgccttcaggaccaccaccagcatcggcaacgcctacgggatctgtgtggtgacgacgttcatggtgacgacgcacctgatgacggtggtgatgctgctgatatggaagaagcacctggtgttcatcctgctcttctactgcgtgttcgggttcacggaggtggtgtacctgtcgtcgatcctgtccaagttcgtggacggcgggtacctccccttctgcttcgccatggtgctgatgacgatgatggcgacgtggcactacgtccacgtgcggcgctactggtacgagctggaccacatcgtccccacggcggagctggcgtcgctgctggaggagaacggcggcgtgcggcgggtccccggcgtgggcctcctctacacggagctcgtccagggcatcccgccgctgttcccgcgcctcgtccgcaagatcccctcggtccacgccgtcttcgtcttcatctccatcaagcacctccccatcccgcacgtcgccgccgccgagcgcttcctgttccgccaggtcggcccccgcgcccgccgcgtcttccgctgcgtcgcccgctacggctacaccgacgccctcgaggagccccgggagttcgccgccttcctcgtcgacggcctcaagatgttcatccaggaggagtccgccttcgctcctcatcaagagatgatcgatgccgccgccgacgacgacgacgaggcggcggcgaggccgaggcggtcgacgagctcggccgtgcacagcgaggaggcgatccaggcggcgtcgtcggggaggacgacggccagcagcgtccagctccaggcgggcggcgagccgccggcggcgatggacgtggaggaggagaagcggctgatcgacagggaggtgggccgcggcgtggtgtacctgatgggcgaggccaacgtgtcggcggggcccaactcgtccatcctcaagaggatcgcggtgaactacatctacaccttcctgaggaagaacctgacagaagggcacagggcactggcgattccaaacgatcagctgctcaaggttgggatcacgtatgaaatctaggcatttgatacatctgatctgatatcaaagtatacatatatatgtgggaaaaaaaatgagcctagtataaaccatgggttttgttgatgatgctgatgttggaagagagggcaaagtgccttttttgtttgttgaataagtagtttcagctgaaagtgttggcaggcagggagggtttggtttttctttcgcctctgtacagtgtggcttgtgtaaacggcgtgtgccaacttgagtagaaggtttctcactggtggtgtgttgtccatgct

SEQ ID NO: 8376 - DNA, 1677 bp, Oryza sativa
  ref <308>: DATABASE ACCESSION NUMBER: AK105724
  ref <309>: DATABASE ENTRY DATE: 2002-08-28
aaaaagtttgattctgaagcgaaggacatgccagcagctgaaggagctgttgcagcagcagctgtagctgatcaaatgtatggcccaaaggaggatcgcaagttggcaattgtgctggttgggttgccagctcgtggtaagacctttacagcggctaagcttacaaggtaccttcgatggttaggtcatgaaacaaaacacttcaatgttggaaagtaccgccgactcaagcatggcattaatcagactgctgatttcttccgtggagacaacaaagaaggtgtggaggcacgcaatgaggtggcggctctagcaatggaggatatgctatcttggatgcaggaaggtggtcaggtaggtatctttgatgccacaaacagcacaagaaaccggagaaatatgctgatgaaaatggcggaaggcaagtgtaagatcatctttttggaaacaatatgtaatgaccaaaatgttctcgagagaagtatgcgcttgaaagttcaacgaagtcctgattatgcggaacagacagattttgaagctggtgttcgagatttcaaagagagattggcctattatgaaaaggtatacgaaccagtggaagaaggctcatatgttaagatgattgatatggtcagtgggactgggggccaattgcagatcaatgatataagtggttacttgcctggccggattgttttcttcttggtgaactgtcatcttacacctcgtcccatcctgctaactagacacggtgaaagtttagataatgtcagaggacggattggtggagattcatctttgagtgaaaccggatcgctttattcaaggaaacttgccagctttatagaaaagcggctagcgtctgagagaactgcatctatatggactagcacactccagaggtcaatattaacagcgcagcctatcattggatttccaaagatacaatggcgtgcacttgatgaaataaacgctggcatctgtgatgggatgacgtatgatgaaataaagaaaattaaacctgaagaatatgaatcacgtagcaaggacaagctgaggtatcgttatcctagaggagaatcctacctcgatgtcattcaaagattagaacctgtaattattgagcttgaacggcagcgtgctccagttgttgtcatatctcaccaggctgtgctaagagcactatatgcatattttgcggataaaccactggaggaacttcctaacattgagataccacttcatacaataattgagatacaaatgggtgttgctggtgttcaagagaaaagatacaaactcatggacgcagtgaactccacagcagggatttaggacatgacgcatgaagcttaaatcctaaaagaaatctgcctaataatttttctttattctgatgaagtttgcaaactcccaatgcattactgacatccatgggaagtaaaattattggtgtgaacaattaacatggctggttcagctcaaagatggtttgactttcaaattttgaatggatattatgtattaaggttggctcctgctaactaatgcgctcagatagcactccaagtggattcgggcccttcgaattctaaatatgtttgttgaggatttgcatgtacagcttcaattatagtgaccaatgtgggttcctttgaaaaattcagtttgcttgtc

SEQ ID NO: 8377 - DNA, 1652 bp, Oryza sativa
  ref <308>: DATABASE ACCESSION NUMBER: AK105725
  ref <309>: DATABASE ENTRY DATE: 2002-08-28
aaaacccaaacgacggagacccactactccgagccatcaagaacacacacacatccagaaagcctaatccaatccaaaagccctaatcacccagactccatctctgtgaggtttgagagaggtaggtgagccgtagatctgagcgagttcttgggtcttccagcaggtagatcacttcatctgaggatcaatctttttttttttcctttgtttttgagcttctgttggtgtacaggacagagagttccagagccttttagtttctggtgttctgatctgttcttggtgtaagattattggtctgatttggtagccaagagggttaattttttccacacctccttgtgctagttagcttagcttataccccccttgtaaagtgattagtagatctagaacttctcttttcgtctgccagttcttggattttggaaagaacaggtggtttgttattcagatttttaggttagaaaaaatccacaaaaaaaaagatattcgatggcagctgctatagaaggaaatctgatgcgggcgctgggagaggctccgtcgccgcagatgcagaagatcgcgccgccgccgtttcatcccggcttgccgccggcgccggcgaacttctcctcggccggagtccacgggttccactacatgggcccggcccagctcagcccggcccagatccagcgcgtccaggcccaactccacatgcagcggcaggcccagtcggggctcggcccgcgggcccagcccatgaagcccgcttcggcggctgctccggcggcggcggcggcgcgggcgcagaagctgtaccgcggcgtgcggcagcggcactggggcaagtgggtggcggagatccggctgccgcgcaaccgcaccaggctctggctcggcaccttcgacaccgccgaggaggcggcgctcacctacgaccaggccgcgtaccgcctccgcggcgacgcggcgcggctcaacttcccggacaacgccgcgtcgcggggcccgctcgacgccgccgtggacgccaagctccaggccatctgcgacaccatcgccgcgtccaagaacgcctcatccaggtccaggggcggcgccggcagggccatgcccatcaacgcgcccctggtcgccgcggcgtcgtcgtcctccggctccgaccactccggcggcggcgacgacggcggctcggagacgtcgtcgtcgtctgcggcggcgtcgccgctggcggagatggagcagctggacttcagcgaggtgccgtgggacgaggcggaggggttcgcgctcaccaagtacccgtcgtacgagatcgactgggactcgctgctcaacaacaataactagctcttctcttccatagcccgccattgccggccggcgcagatgaggttttaggcattctgcgcggcggcgaggcgatggattatatgttcgttcttgtgtagatccttttctttttgtgttggttttttaggttccggaggctgctcgccggcgtcgtttttgtgtccggcgtctccgatgtctagtaagcagtgactcgttagtgtagtagttgtacaactctacaaatgtacaaatacttgtgcatgtaggttgttgtaatcaattgttggtaactacctgtaatagaactactgtgaattaactgtatt

SEQ ID NO: 8378 - DNA, 1942 bp, Oryza sativa
  ref <308>: DATABASE ACCESSION NUMBER: AK105726
  ref <309>: DATABASE ENTRY DATE: 2002-08-28
accattacaccattccattccagtggtagaagatccgagatcgaggaggaggtgaggagaggagcaagaagaagaagaagaagaagaagaagaagatgggcatggagagcggagatgcccaactgccgctgctccaccaccaggcttccgcatccaatcagcactataccaagccccccttcaactggaaggctcctgctcttatcttggcctttgaattcttggagagcattgcctatgctggcatctccctcaacttggtcgtttatcttggaaccgtcctccatggaactaccgcctctaacgcagccaatgttgatacatggaacggaaccacttttcttacaccggtgcttggagccttcttggctgatacatactggggaaagtacaagaccattgccatctctacagttttctatcttattgggttgcttgtaattaccgcctctgctgtcatcccatcactacaacctgctccatgcaatgggagctcatgtcctcctgcaacagggtttcagtattttgtcttcttcaccgcgctctaccttatttcggttggcaccgggggtgtcaaatcagcattactcccctttggagctgaccagtacaacgattcaaacctcgaagagagtaaaaagaagcaatctttctttagcttgttcttcattgctatcaaccttggagtgttcatttcgggcactgtcgtcgtttggatacagcaaaatgttgcttggtctctcggattcggcatctcctcaatatgccttgttgttgccacagttgcctttttggcaggaacaccagtgtacaaggtccagcttcccagtggaagcccactcaagagtgttgtaatggtttttgttgcctcttttaagaagagaaaactggaggttcctgccgataacgcactcctgtatgaaggggatgatgctgatttaagcaatggacaatcagtcaaactagcacatactgatggtttcaggtggttagataaggcggcagtggtttttgaggaggtggaagagataaataaggatgagggtgggggtggagggtggctgcagtgttcggtaacgcaggtggaggaagtgaagattctgctgcgggtgctgccgatatgggtgaccagcgtgctgtacgcggcttccttgggtcagacggccaccaccttcgtgcagcaggggaatgccatgaacaccaagatcggatccttctctgtcccggcggcatccctcaactccgccgaggtcatcttcatgatgatctgggtggtgttccaggacacggtggtcgtcccgatcgccaggcgctacaccgggaaccccgcggggctgacgcagctgcagcggatgggcgtggggcggttgctggcggtgccggcgctggcggtggcggccgtgctggagacgtggcggctgcgcagcgtcagggacggcggcaacctgagcatcgcgtggcagctgccgcagttcgtcatcctggcctgctccgacgtcttctgcggcatcgctcagctggaattcttctactcggaggcccccgtgtcgatgcggagcctctgctcggccttctccttcctggcgctctcgctgggctactacgtcaactccctcgtcgtctccatcgtcgccgtcgtcaccaccacctcgaacaagggctggctccccgccgacctcaacgacggccatctggactactatttctggctctggacggggatcagcgccatcaactttgtggtgtacgccgcctttgccaagaattataccgtcaagagactcgccgtcccgcactcgcactgatcgtctccctcatccacccaacactgccttgtattattccaatcaaccattcttgtattattattccacttgattcgttgagcatgtatataaaccaaataaaaaataaaccaaataaagggctgaatccatgcatt

SEQ ID NO: 8379 - DNA, 1883 bp, Oryza sativa
  ref <308>: DATABASE ACCESSION NUMBER: AK105727
  ref <309>: DATABASE ENTRY DATE: 2002-08-28
tcaatcaacaccatatgcaatctagaacctcatttagtccaagcagggagaacactatgttatctcaaagacataatcgatacgaagagttacctgacacatggtacaaacaatatgctgaaaaattcaggacatggcatggcaagttccgttcaggtgacaaagatataccaaaaagaacatcagagggaatgtccaattacctgaaggtttgcagtgtgcataaaaggaagagggctgtgtttatggatgatcagggtcacaacatctcagtcccaatgtcggaaaatggcccttcctcaaagaatgctggggactatagtaatttaacagatgatactttcattccagaaattaggtttccagctgactgtgtcccggaaagcgcaattcctagaacaagtgagacgtctaggatctacaaaatagaagttcatggggttcttgataatttaccggcgcctgttagtcgcaacactgcaatgcttgaaagatttggaatgatgcctgagtattataagaaagggaacaaatatcgagggaaagatggatccagagtagaaggaaaatctctaagccaagaacaagcaatgcttatgacaaggaagttggttgctcgctacttggcaaatgcaggatttgaaagtggaactgcagtgtgtattgatgttctttcagaaataataattaagcacatctctaagctggggcgtaacttgaagcttctaactgacagctacaggaagcaattttcatccattgaactccttaagatgttcctacagactgttggctacagtaacattggccccttgatggaaatcactaaaacgacaaatagaggggccaactaccctatgcagcaagatgcacaggtgcaaaatcaaaatgctcttcttcatgcacaacagctttcggggcaatttgcaccccaaatgggaattaatacacagaatttgacaccacagcagcagcagcaactgctgcagcaacagtggttgaggcgcaatcaactggccagcccccgtggtcctcttacgatggcggacaaaaaccaggctatggtaaatgtgaagattgagaatacggtggactcacagattgatagcccctacggatcacttaccagacaacaattgcagcagctaaggcaccatcagcttctacagcagcagcagcagcagtttcagcagcaacagcaagttcaacagcagcagcaacaacaacaacaacaatttcaacaccagcagcaacaacagcagcagcaatttcaacaacagcatcagcagcagcaacaatcacagcaattgcaacaacagcatcagcagcagcaacaaccacaacaattgcagcagcagcatcagcagcaattggccatgtcaggaggccagaatgcccaactagcgcagcagctagcaatgtcaggaggccagaatgcacaactagcgcagcaattagccatgtcaggaggccagaatgcgcaactagctcagcaattagccatgtcaggaggccagaacccccaattagcacagcaatacaaacaaatgccatcgatgagtgcgtacggcatgaggatgccgccggtgaaagtggaagcgttccacgagctggtgagtggggattcgtctctgaaacccgatagcgactcaaacaaactcatgtctcccaagtaggtcagtcttacaccgagggaaaatcgcgtagccagcggttagctgtagtgtacaaaggactacatttgtgatctctcactgttgtttccgaagaactgaagcctttgtagttttcatcaaatccagcaaggcaagcagtgtattgtaattgtagatgtataagtggttactaactgaggtgataagatcgatgtggtaatttatcag

SEQ ID NO: 8380 - DNA, 1482 bp, Oryza sativa
  ref <308>: DATABASE ACCESSION NUMBER: AK105728
  ref <309>: DATABASE ENTRY DATE: 2002-08-28
ggcgagcttgtccgttgagaggcggcgaggttgcgcccgaccaccgcgcgatgtcaaccctgatcatagccaagatgagggccggtactaggggctcggccactcgagcttgactcccggggcgaggttgtgcctgaccgccggtgagctgcgacgctgtgacgagcttgatcccgactgcatgaggcgtagtgagtgcctcaaccagtctctcatggcgcgcatcggcgcatcaacgtcggggaggagtgagtgagaggagtgaagatggggaggtgtgtggtcataggagtgcgaaggtcaacgccgatgggggaaggacctgcggtcgccagatccggcgaccccacctctcgcaggcgatagatcggccggctcccgttcctcccaatgtgggatctgcgcgcctacgacgagcagctgctcatctcggtccgtgcctcatcgaagtgaggaggcacttgctctgattatgtgttgacgaggacggcgcaggcgcgcagcccggcgtccggcggtggctgcttccgtggcctcaagtgacgctgctgaagctgacgatctgggcatccggcatatcaagctgcagcggaaccggcggtgagcacaaatctgggagtcgcaatcgcatcccccagccagccgacatgcacgatttctgcagcttcaattcctcatccttcaccgcacatcttcctccaaatccctctctctctctcctctcctctctgccgagtaaaccgtcatcgagagaacattagttagctcttgagaaaaatcccagtttcatgtgcgtatttgtttttggtgtgctgttttttttttaatttctagttctcgaagacttttgctggatactatcttcttcccatgcttctcgcaggctatcgtcttcaatgtgttgatgtgttccgatatgtaatcctaacaatcttcttgctggtgttttttttttccttgtggtgtgcactccgctgactcaggcatgctgatcgatagccatcgactccaggaagttctgatcagccgcaccagaggcttgcgttgtgaagaggtgcaaatcgctttgattcagtgatattcatgaaagaacctctgtttgcgctcaatgggatatcattttctgatttatttatttttatggtttgccagttcgcctcaagtgatttcttctggtgattttgattcacatgagttcttgaaatcttttggggtggaaaaattcgttgttttactgaaatgctaaacatctattccgccccctttgtagaattgtgccatctgcccatatgtttttttttttttgactgaatccgcccatatgtttttatcatccctgaaaaaaaaatgtctcatataatatatcgataccttatggtagatatattattcaataaaaaaatgtcaggatgtatattatagtagatagatacctcgatttgtaaatgccagttttttggtgaatggaaataccatttttgc

SEQ ID NO: 8381 - DNA, 759 bp, Oryza sativa
  ref <308>: DATABASE ACCESSION NUMBER: AK105729
  ref <309>: DATABASE ENTRY DATE: 2002-08-28
aaaaaaaaaaaaaaaaaaaaaaaaaaaaaaaaaaaaaaaaaaaaaaaaaaaaaaaaaaaaaaaaaaaaaaaaaaatggacactctccacaacaccccaactctgaagctgcttgcttggagtctaggaccagcattcacaagcacaatgaagctcaacaccaccaccaccctggctctcctcctgctcctgctcttggcctcctcttccctccaagtttccatggctggatcagatttctgcgacggcaagtgcaaggtgaggtgctcgaaggcgagcaggcacgacgactgcctcaagtactgcggcgtgtgctgcgcctcctgcaactgcgtgccgtcggggacggccggcaacaaggacgagtgcccctgctaccgcgacatgaccaccggccatggcgctcgcaagaggcccaagtgcccatgatcatttttgcattatgcatgctacatgatgcttagccatcatccgtagttgctttgcatgcatgatgcatgctcatgatcgagatggagtagtagatatatgcatatgcttgccatgatcgatcgtatggaccatgcaaagtatgcttgtttgtgtgaggatcgactcgatcttgagtctttccatgttcttggttttctttttttactgctagttaattactatggagtacatgtgaatatgacatcggatatgtaatgtatacatgcatgcctggtgataataatggtgtgtgtgctgtaataaagtgttggcttaattggtgtagtac

SEQ ID NO: 8382 - DNA, 1771 bp, Oryza sativa
  ref <308>: DATABASE ACCESSION NUMBER: AK105730
  ref <309>: DATABASE ENTRY DATE: 2002-08-28
tccctctcccgcctcctccccctcgcgccgtcgccatcgcctcgcgccgccgtctccgagcgcctccgcctcgtaaaagtcaaaaccgtgtgcagccctagaaagccgcacaagctgcaaaaccctcctcgtctacccttccctctctgctcgccgccgccgccgccgccgcacgccttcgaagatgctcgacatcaacctcttccgcacggagaagggcggcgacccggagctgatccgcaggtcgcagcgcaaccgctccgcctccgtcgagctcgtcgacgaggtcatcgccctcgacgaccagtggcgccagaggcaattcgagctcgacaaaatccggcaggagctcaacaaaaccagcaaggaaatcggcaagctcaaggctaaaaaggaggacgcgtcggctctgattcagagcacgctcgatgccaagctcgtgacgattggaaacattgtgcatgaatccgtccctgtcagcgatgacgaggctaacaatttaattgtacggacatggggagagaggaggctggagggtaatttgaagaatcacgtggatctttgtaagatgcttgacatagtagctttggagaaaggtgctgatgtagcaggtggaaggggttactatttaaaggatgaaggtgtcctactgaacttggcattgataaattttggactcgcttttctgagaaagcgaggcttcaagccaatgcaaactccttttttcatgagaaaggaaaccatgggaaaatgtgcccagttggcccaatttgacgaagagctttacaagctaacaggcgatggagaggaaaagtatctcatcgctacatccgagcaaccgctgtgtgcgtatcatctaggtgatcgaatttatcctgctgaattgccaattagatatgctggatattccacctgcttccggaaagaagctggttcacatggaagggacacggctggtatcttcagagtccaccaattcgaaaagattgagcaattctgtgttacaagtccaaatgacaatgaatcctgggagatgcatgaagaaatgataaaaaattcagaagatttctacaaggagattggcctaccgtaccaacttgtctccattgtgtctggtgctcttaatgatgctgcagctaagaagtatgatttagaagcatggttccctgcatcaaaaacctatagggaattagtgtcctgctcaaattgcacagattttcaagcaaggagacttggtataggttatggccagaaaaagaatgatgagcaatccaagcaattcgttcatatgttgaactcaacattgactgccactgagaggaccctttgctgtattttggagaacttccagaaggagaatggtgtcgaagttccaaaagcattgcagccttacatgggtggaatcgatttccttcctttcaagctggatagcaaacaagttgctcgactccaaatcaaataatccaaattcaaagggagatgctatctgagctagatgaggaatcaacaaagattttcttgctttcagacactactggatgttattcatacttctaaaaaatgcgtttgttcagaacttgtatcaatgatcatgatgttacagttttggctctcatttgagtgtattgattagcacaatgtctgaccatgtacttgcacagtgatattccgtagaatgtctggctatcttggacatgtgcgcttaatttgccgtaaaagatgtattcattttcatggcctttagtgcctatactaatttgttgcatacagt

SEQ ID NO: 8383 - DNA, 2006 bp, Oryza sativa
  ref <308>: DATABASE ACCESSION NUMBER: AK105731
  ref <309>: DATABASE ENTRY DATE: 2002-08-28
gaagaggagtcagctaaaggtttgtctcaggccttaacattatataaacagccacagaatgtgtcctcttcaagcactaggtatgcttcatcatcaaggaagaaacataaggcatcaaatgattttgaggatgacacagttcaaggatcccaacgtatgagagaccttacggagattggatcaaagaaacacagttcatacgtcctaaatgggcaccgggatctaccacttcttgagagtgcaagctttggttatagcttgtctggtaccaatgggataaaaggtgatccgcagtctcattcggcaacaaaaaggaagcgttccaatattggccaagcttatgaaaattcaaggaagaaagacagacgtcgccctttatcgaagttatgtaaagattcggctgtggcagttccagcatatagccactgggatccttcagggcattcttctgcccagtactcaggaggcaaaatgtccaatgcatttgaaccaagtagggggaaatttggtttcccattggatgtaaataattattcatacagctcagggacctcaagtgtggaaactttattagatgcatcatgcgcaaatcatgatggtgttgccaaggtaattccagtaaaggaagcggaggtctcatgcatgcctgggtttctcaataatgactgctctgatggcgatgaatattttgataccccccttgttatggaggaagatgccctcgaagaagatcatctgcataaatatgaatcatgtgcatcagtcaagggccagatctcaaaacccaggaagcaaactgctgaatatactgaactggtcataccttcacctcatggtcacagaagttctaagaagaaaagcatgagctttgttagtcaaagaacacaagaaaaccacaaggataggactttgttggcacaacatggaagaacagtaaaagggcaagcattagacactgatgctgttgaggtggatgccagggtgagcagtgctttctgtaagccccctgcacttaagaacaatatgcaacttgcaatagttcctgctgatggttgtgccagtactttggagcaacagtattatggaagtggacctgagcatgatgaatcatctgaaactataagcaaccgctcacaatcagaaaagggcgcaccatcttccccgtattatgagccacttcaagtgataccacctgaacagaaatctggtctagaaccttccagtccccatgtggtaaagccaatcaagaatgcacggacagactataaggtatatgatgtagaattggctgctcaaggaagctacaagggccatcgtgtgcctcttgtttctctcatgagtaaatggaatggtaagcccattgtccgttaccctataactgtggaggttttaaaagatagtagttctgcggcgagccgagatgatctgcgcccagcaactagcagtcttaacaacttgctaaagaggagcgaacctgcggaaccaaggcaagcaagatcgtcacattcatcgagacctgcatcaagaccaaagcccagcggtaagaaaaagatctcagagcatgatacggacaagtcacggcggccacacacaaagaaatcagcaacttcaccgaggaaaatgcgtaggctctcatctttcgccagcagtcgtagagatggtgcaagcaggaagcccgtagttggcaagattagtgggcctacaatcgcgtgcatcccgctccgacttgttttcagtaggatcaacgaagctttaagttttccagtgagatcagagaaccctacatgaggtgtgggctgccaagcctgcgcttggagatagcctgtgaacagagagacatattgctagttttgcatgtacattagcagccttataatttttataaaaaaaatattaatgcctgccatgttcatatcagctatgtgcttgtaaccgtgtaattgcgattatccgccttggtttcagttgaagcatcccacagtgggaggaaaataagcaccttgaat

SEQ ID NO: 8384 - DNA, 1642 bp, Oryza sativa
  ref <308>: DATABASE ACCESSION NUMBER: AK105732
  ref <309>: DATABASE ENTRY DATE: 2002-08-28
acagtgctgaacactctcttcctattacctctctcatcctctccatctctctagtttctctctctaattaagcattgcaacaattcaaccaaaatgcagctaattcttcttctctcaaagccaagaactctccaacttttccccctcctcctctgcctccttctccttccatgtctctcccagcctctcccctctccttctccttcaccttcgccgtcgccttcggcgtcgccggcgccgccgccatcgctgccgctgtcgccgttcaatgagcggctggaggcggcgtacgtggcgttccaggcgtggaagcacgccatcaccgaggaccccaagaacctgacggaggattggtgcgggccgttcgtgtgcaactacaccggcgtctactgcgcggcggcgcccgacgatccgcacgtcctcaccgtcgccggcgtcgacctcaaccacggcgacatcgccgggtgcctccccgaccacctcggcctcctcgccgacgtcgcgctcctccacctcaactccaaccgcttccgcggcacgctgccgccgtcgatgcagcacatgcgcctcctcttcgagctcgacgtcagcaacaacctcctcgccggcgcgttcccggcgttcctcacctcgctgccggggctcaagttcctcgacctccgcttcaacgccttcgacggcgagctccccgccgccgtcttcggccgccggctcggcctcgacgccatcttcgccaacgacaaccgcttcaacgtgtcgctgtcgtcggcaagcctcaccaactcgacggcgtcggtgatcgtgctcgccaacacccgtctcgccggctgcctgccgccgtccatcggcgacatggcggacacgctggtggagctcatcctcctcaacaccagcatcagcagctgcatcccgccggagatcggcaagctgaagaagctcagggtgctcgacctcagccacaacgagctcgccggtgagctgccggccagcgtcggcgacatggagagcctggaggtgctcaacgtcggccacaacatgctcgccggcgaggtccccgaggccatctgcgagctacccaggctgaggaacctcaccatcgccggcaactacttctgcgacgagccggtgtcctgcctccacgtcccgctccgcgacgaccggatgaactgcatcccggactggccgcaccagcgctcgccggaggagtgcatcgccttcgcccaccgcccgccgccgcactgcgccgccgacggctgcatcgtcatccctccgccgtgagcgatcgatcatggcggccggagtacgtaacgttgcatggtcgtcgttggtgacgtcatcgtcctagttggttggtagagactgcaaatctccatgtggttttctaggagggggtagccaattaatattctatcatccatccatgcatccaaatttcagaattaaatggttgttgttaaaaaaactttcgattatcattaattaagttgtgatgtcgccgtctcgatggatacatatgtgtgtgtgtttggtgtggttaattagtggtatactccctccgtactcgtaaaggaaatcgttttggagagcgacacggtctccaaaacataactttgacttcttatttctataaaaatatttgttg

SEQ ID NO: 8385 - DNA, 2110 bp, Oryza sativa
  ref <308>: DATABASE ACCESSION NUMBER: AK105733
  ref <309>: DATABASE ENTRY DATE: 2002-08-28
aggctgtaggtagctagagaggaaaaatccacgctagctatgccttctccttcctcagctcattggctgagcttggtcggaagcgtctggctccagaccatcaacggcccgaacgccgacttcccggtgtactcgtcgcagctcaaggaggtgaagggcatctcccaggtgcagctcaacttcctcgccttcgcctccgacgccgggaagctcttcggctggttcgccggcgtcgccgccctgtacctgcccctgtggctcgtcgccgtcgtcggcgcgtcgttcgggcttgtcgggtatggcgtccagttcctcttcttggagaggcccgggctcgcgtactggcacctgttcctgctcacctccctcgccggcaacggcatctgctggatcaacacggtgtgctacctcctctgcatcaagaacttcccgtcggacagccgcgtcgcggtgagcctcgcgacgagctacctcggcctgagcgccaagctctacaccaccatggccgagaagatgccccggggcgccacggcgaggtactccaaggagaaggtgtacctcctcctcaatgccgtcgtgccgatgctcgtcaccctcgtggcggcgccgtcgctccgggtggtggagctcaccagccaccgccggaccgacccggcgttcctcgccatgttcgcgattaccctcgccaccggagcctgcgccgtcgtcggcagcatcggctccaagtccatcgggctctcgaccagcgagcacatgatcagcctctacatcctgctcgccctcccggtgctcatcccggcggcgctcaaggtgcgggagagcatggacaagctacgggaggcgaagcgggagaacagagtgcacgacgtcgccgccgccaccgacgtgccggagacggccgtgtcggtgctcgaggtggccgaggcggcggagaacaaggaggaggacgacgccgccgccggcgagagcggcggccaagacgaggtcggcggcatccggctgctgcggcggctcgacttctggctctacttcctgagctacatgttcagtggcacgctggggttggtcttcctcaacaacctggggcagatcgccgagtcccgcgggctcagcgacccgtccactctcgtctccctgtcgtcctccttcggattcttcggccgcctccttcccgccttcttggattactacaccgcaaagtaagcaaccaagctgcatgcatgcatgcatgtgccgatcaaatcaaatcactcgtgttttttacaacttgtttaaatgttggagtctttgtttatgcatgtcctgacaggggatgaatttttggtttgggttttgactatgcgcaggagtggctactcgctgtcaaggacggcgtccatggcggcgctgatggcgccgatggcgggggcgttcttcctgctgctggacccgagggacatgttcctgtacaccagcacggcggtggtcgggacctgcaccggcgccatcacgtcggtggcggtgtcggcgacgggggagctgttcgggaggaagaacttcggggtgaaccacaacgtgctcgtcgccaacatccccgtcggctcgctctgcttcggctacctcgccgcgttcctctaccagcgggaggcccgcggcgccagccgctgcgccggcgccgcctgctaccggggcaccttcctcgtctggggcgccacgtgcgccgtcgggacggcgctctgcaccgtgctgtacgcgaggtcgcgcggcttcgccgggaggctaccgccgccggcgaggtcgacgacgatgccatgcgccggccagcggccagcgactaacttaggagatgataacaagggaccagaaccagaagtttctagtacagcagtttaacaaattaattaggtgccacgtaattaattaagtggagaaaaaaatctacagctagtgatgtggagtaggatttgatgatttgccttttttttcctctgggaaaaatattttgtttcattagtttctttttctaatctttttgagtaatcccatggtggattgagaagctcaacttgtgtgtacgtatatacgtatatggccaaaaaggaaaggataatacacagctcactttattact

SEQ ID NO: 8386 - DNA, 2159 bp, Oryza sativa
  ref <308>: DATABASE ACCESSION NUMBER: AK105734
  ref <309>: DATABASE ENTRY DATE: 2002-08-28
aagagagatggcccatacatatactcctacttttaagtagaactaaagagaaaaaaaaaggaaggaaaaaaaaaagagaagaagctcgtcgtcaatcgtcatcgctggtcacaagtcctctcttccttgtactctcaagtcctctcttcctcccccgccctccgatccccaagtgcccttgtgctaccccgcgccgcgcgccgtcacagtcgacgcttccgccgccgccgccgtcgtcgtcggcggcaggcagctcatggaggttgctactcccaataataacgctcactaggtcattgatgaactagtatccaatgatgatgatgacgataggctcagcgccctcccaaatgaaatttcgatctacatcctccaacgcctgccgctgcgcacttcagcacagaccaccatcctcgcaaggcgatggacccatcttttcccatccatgacacatctcaaaatagatatcaatgaatttgtaccacgcatcctcactaggcacaatgtggctcgaagcatggccatgtcgtggtacacccaagcactaaggacattgctagctcctacaattgaccctgatcggaccataaggaccatgcatctacgcttctaccccacagactcatacctgctctccattgcccgcatggtcgacgatgcggttcagagtgccagtgccagcaagattgaggtccttgactttgccattctgaatgaggtgtccgaggtgcactgcaccgagaaacagatgtcacgatacgggcgacgcttcatgtccttctttcaggcttgccccaatggattcaggtgcctaacaagcctctctctatgggccctcaggtttcgggattcagatatcccaagcctactaggctcctgccaccagctgcagcacctccttctacgggctttgcgatagcggtcgcaactctgtgctcaagattgacgcatcaccatgctcacagctcaggacattgaggatgatcttctgcagttacatcaaggttgaactcgtccacgttccaaagcttgaatcagtggattgtgatacatgggtgggtgtcaaccctcctgtttattttggttgcgtcccactgcttgacaagatacgcttctcttccacctgccttaagatgcagcaaccattcgttctgagcagctggctgtccactgtgccagctctaactagtttgcatctggactaacaatatgagatggtttggatcatgccagaagagccgaagaaactattccccatatttcgcaatcttaaggatgtatatctttacaacattagtaatgacagtggcctcgactggacactgtttgtccttgaaggcgcaccctccctcaagagttttcatgttaagatatctcaccacatatgtgggggggatggttttgagcacaatgctggcagtagtaatgttgtgtgggaagcatcatctgacatcatcaagcataaaaacttgaggttgttggatataataggctttgaggcagaagagaatctgatcaagtacataaggctcgccattcagcgagctatcgctttacagagaattcacttgcatgagaaggaaccatgtgaagactgcgatgatatttatctcaatacgccatctctgtccagaactagattccctaacaatgagcaagagaaggatctactaagagagcaactcctgcagggattctcatcgtctatagaaataataataggttgttactagtaattgttagattttcttttcatgccagtaattgttctaaacatgaaaattttgaattttgatattcttatatcatggggttcagaatgcaaagtttcctgtaatttcaaaattctttacattattgattctaaaatcccaaaatttgaaatgccaagcaggggaagactgatttttttcgggcactcagtgccacacaggagtcatctgaaggtgatggcgtagaagatttgaagttagcttggtggtgacatggaaggtttctctttacgtagaattgactactacctttaccaacggtatataagaatttctctcttaacttacagcgcacaagaactttatttgggtcatatggtacatttctttgttaaatccggacatgtactatggcgttgttctgatattatgaggtgattgtcttgt

SEQ ID NO: 8387 - DNA, 2291 bp, Oryza sativa
  ref <308>: DATABASE ACCESSION NUMBER: AK105735
  ref <309>: DATABASE ENTRY DATE: 2002-08-28
ctacaccctactctcctccttctcgccgccgcgcgacggcgtcgtcaaggagtacttcgtcccgggggacggctccggcgagttccgcgtcaagttcacgccggacgccggctccaccgcattcgtcagcgccatcgagctgttcccggctccgccggagctgctgtggagacgcccggtgaagccggtgggcgccctggtcgacagcgtcgacgtgaacgcgtggccgcagcaggcgctggagacggtgtaccgcctcaacgtcgggggatccaaggtgaccgcggcgaacgacacgctgtggcggacgtggctccccgacgacccctacttctccagccccagggggctctcgcaggtgaactcgacctcgaccccgatcatctacggcacgtcgatcgggtacacgagggaggtggcgccggacagcgtgtacaagacgcagcgcgccatgaacatggcgagccagcagttgttcctcactccggggcctttcaacttaacgtggaccttcgcgcttccgccgccggcaccggggtccgactccgactacctcgtccgcctccactggtgcgactactcgctggtgagctccgttgtaccaacgggcatcgtcttcgacgtctacgtcgcgcagaggcttgcttccaaagacctcgaccgaaacgcggcggacgcggcggagcagcccaacgaggctttttacctggactacgcggccacggccccgaccaccgggaacctcaccatcagcatcggcaagtcggacaaaagcgatgcaggcggcatgctcaatgggctggagatcatgaagctgcggcgcgccgataatttgaactccgccggatcgcacggcaggaggaagaagattctcatcggcacgctctcggcggcgctcggcgtcgctgttcttgcgtgcgcgctgctctgcttgctcgccgtgctgcgcaggcgtagacaggcgccgactccggcgccggaggagaaggagagcacgcagctgccgtggtcgcagcacacgcaggatggctccagctgggttgacatgtcgaacgcgtcgggcgcgggcatgaccggcgggctgcacaggatgagcatgcagctcaacatctcgctggcggacatcacggcggccacggagaacttcaacgagcgcaacctcatcggcgtcggcgggttcgggaacgtgtatagcggcgtgctccgcgacggcacccgcgtggcggtgaagcgcgccatgcgcgcctccaagcaggggctgccggagttccagacggagatcgaggtgctgtcccgcatccggcaccgccacctggtctccctcatcggctactgcaacgagcagtcggagatgatactggtgtacgagtacatggagaagggcacgctgaggagccacctctacgggtcggaggagccgccgctgtcgtggaagcagcggctggagatctgcatcggcgcggcgaggggcctgcactacctgcacaccggctactccgagaacatcatccaccgcgacgtcaagtcgaccaacatcctcctcggcgacgcgttcatcgccaaggtggccgacttcgggctgtcgcggatcgggccgtcgttcggggagacgcacgtgagcacggcggtgaagggcagcttcggctacctcgacccggagtacttcaagacgcagcagctgacggaccggtccgacgtctactccttcggcgtcgtgctgttcgaggtgctctgcgcgcggacggtgatcgaccagagccttgagcgcgacgagatcaacctcgccgagtgggcggttagcctgcagcagaaaggggagctcgccaagatcaccgacccgaggatcgccgggcaggtgaacggcaactcgctgcgcaagttcgccgagaccgcagagaagtgcctggcggactacggcctggaccggccgtccatgggcgacgtgctgtggaacctcgagtactgccttcagctgcaggagacgcacgtcaacagggacgcgttcgaggacagcggcgccgtcgccacgcagttccccgccgacgtggtcgtgccgcgctgggtgccgtcgtccacgagcttcctcatggatgacagcgtgaccgactcggggatcgccaacagcaaggccttctcgcagctcagcagcggcgatggccgttgatcaatcagctggtcagtgaaccgacagtcggtcagactcagatagagaagtttgtaaccataatttttcctctctttttttttatgctgatctattctctgaatccaaaacccatgcacgtcgcagc

SEQ ID NO: 8388 - DNA, 1810 bp, Oryza sativa
  ref <308>: DATABASE ACCESSION NUMBER: AK105736
  ref <309>: DATABASE ENTRY DATE: 2002-08-28
gaaaaacaacgaaagagagagagaggggggcggcgccgccggcgacagagccgcgacatgtgaggcgccgccggtcgccggagcgagcgagcgatgagcagcagcgccgccacctccacctacgcggagagcgtcgcgtcctgccgcgctcccgctcccgccacccccaggcccccccacgccgccgtgaggcgccacctcgacttcgccgccggcgacggcggtgagctggatgacgacgaggtcgaggacgaggacgaggacgacttcctcttccgcgccgcggaggagacggagcggagccactacgaggcccagcgccgcgcttccgcacctcccccgccgccgtctcagcccccggctttcttcgagaggccgtgcatctgcggccgcggcggctgcgatgtggaggagagggagctcgggcggtgggcctacgtctgcccggcgactccgaaatgcaaatattctgtttggtgtggagaagctgatatttgtccaaatccacagcctgcttatatgagccatcctaaaccaaatcctcatgtttttagcagcccatgcagtcctgttgtgttcaacagtcctagcaatcatttagctggttctacaactcctacaccgaacaatctccaagtttttaatggtccaagaaaccctcatgtgtccaacagtcctagcaatcatttagctggttctacaactcctacaccaaacaatctccaagtttttaatgctccaggaaaccttcatgtgtccaacagtccaaacaatcatcgatctggtgctacaactccagttaacgctaatccccctggttctagatcaagtgataaacaaccaatctgccattgtagggctggaaaatgcaaagtggagacaataaaagggcaaaagtactatgtgtgttgtatacagaagggacaaggtgcatgcccttaccaagtgccggtcaatgcttttgttgaagaatcaccacaagctggaaacagcgttccattggaggataaccgtgggaactacagtccagttaaagtggaggcgaacaatgacaacggatcaatcaatcctgatcaacctgaatacgatgagtggccatttgacatcgtcaacaatgatgttgtatgcagtggcttcttgccaactgctgagcctacactaagagatggtatagttgctggggaatcaccaagtacgcagcacctgtcaaatgctacgactgaagcgaaaacaccaacaaaatcgcccattatgccgccacctcatggtagcgggagccccttcactcctcggtcgaacccctgctaccgatgtggtgaagacgggcactggtccaggaactgccctaagccggcttcgagcccacttaactctccttgctacaactgcggcaagcttgggcactggagaggtaattgccctggaacttgatgacacaagaggggtgttaagaagcatatgatcggtatcattttggcaatgtgacaggaccatcagaagctaggcttaatgagtaatggcctacttctgcttaatgattgactctcccatggctgccatgtaaataggtttagggtttagggtttatgcaatatgctatagtattgggcacctgatactacttgtggtgtctgtggcagcaagaggtgggctcctacggtgtttgtccatcatctgctttgttaatcacttcttacatgaagtaaccccaggattaagttaggtcgtaattggaaccttctgtttatggatcatgtatggtatttatgtcgcctataaagatgtatcaatatatacttacttatatggt

SEQ ID NO: 8389 - DNA, 2061 bp, Oryza sativa
  ref <308>: DATABASE ACCESSION NUMBER: AK105737
  ref <309>: DATABASE ENTRY DATE: 2002-08-28
agccactccccgcgcagcagctcagccgtcgctaccaccacctcaagctcccgcctcgcgcgcagctagctgagagcgagcgctcgccatggagaacggcgccggcgccggggacgacgagtacacgcgcgacggctccgtcgacctccgcggcaaccccgtcctccgctccaagcgcggcggctggaaggcctgctccttcatcgtcgtgtacgagctgttcgagaggatggcgtactacgggatcgcgtcgaacctggtgatctacctgacggagaagctgcaccagggcaccgtggaggcggccaacaacgtcaccaactggtccggcaccgtcttcatcacgccgctcatcggcgccgtcgtcgccgacgcctggctcggccgctactggaccttcgtcgccggctccgccgtctacctcatgggcatgctgctgctcacactggccgtctccgtgccagcactgaagccgccgccgtgcgacggcggcggcggcgccgcctgcccgcgcgcgtcggcgctgcagctgggcgtctacttcggcgggctgtacaccatcgcgctcggccacggcggcacgaagccgaacatctccaccatcggcgccgaccagttcgacgacttccacccgccggagaagctgcataagctctccttcttcaactggtggatgttcaccatcttcctcggcatcctcttctccaccaccgtcctcgtctacctccaggacaacgtcagctggaccgtcggctacggcatccccaccctgggcctcatggtctccgtcgccgtcttcctctccggtacgccgctgtaccgccacaaggtgccccagggtagccccctcgccacgatggggagggtcgtcgccgccgccgtgtggaagtggcgcgtcccgctccccgccgactccaaggagctccacgagctcgagctcgagcactacaccacccgccgcgggttccgcatggacgcgacggtgtccatggcgttcctgaacaaggcggcggtgaagccgggcgaaggaggaggaggatcggtggcgcggctgcccgggtggacgctgtgcacggtgacgcaggtggaggagacgaagcagatcgtgaagctggtgccgctgctcgccacaatggtggtgccgtgcacgctggtggcgcaggcgggcacgctgttcgtcaagcagggcgtgacgctggaccgccgcatcgggaagttccacgtgccgccggcgagcctcggcgcgttcgtgacggcgacgatgctcatctgcatcgtgctctacgaccggttcctcgtccccgccgtgcgccggcggaccaagaacccgagggggatcacgctgctgcagcggatcagcctggggatgctgctccagatcgtgacgatggtggtgacgtcggtggtggagagccagaggctggggtacgcgaggaggcacgggctggtcgccaccggcgggcagctgccggtgacgatcttcatcctgctgccgcagttcgtgctgctgggcgtcgccgacgcgttcctggtggtggggcagatcgagttcttctacgaccaggcgccggagagcatgaagagcctcgggacggcgatgtcgctgacggcgtacggcgccgggaacctgctgagcagcgccatcctcgcggccgtcgagcgggtcaccggcggcggcaaggggaggacgccgtgggtgaccaacaacctcaacgcctcgcgcctcgactactactacgcgttcctcgccaccctcgccgccgcgaacctgctggcgttcgtcgtgctcagctgcaagtactcgtaccgcgtcgagtctacggagaccatcgacgtcgacgtcgccatggacagcgtcgcgcagggcggcggcgtggtgacggtcaaatcagaggcagccccaatggcatgacagcacttccggaattgtatcctgtctattcccgtctggattctgaagttgcaatgtaatgaagaaacggtgatgatacatattagcactttaaaaatgttaaatgaaaattttatttactcgttctgtaaaggaacggtaatacggac

SEQ ID NO: 8390 - DNA, 1604 bp, Oryza sativa
  ref <308>: DATABASE ACCESSION NUMBER: AK105738
  ref <309>: DATABASE ENTRY DATE: 2002-08-28
gtctcctctcctctcttctcttctctctccaccctcacccgcgttgccaccgccgttccagcccccgccccccgataccccgatatccgacgccaccccatccgccgccgaaacccccaatctccccgacacccccgcctccgcctcccccttctccgacgccgcgctcgccgccgacgcctccgatgccgatgcctcagccgtcgccgcgccacccgacgacgacgggaccaacccgttgggcggcgccatgaagcacatggccctcgcgcccccgccgccgccgaacaagaagtccaagaagaagaacagcaacagcgtctggaccaggcccaactcccgcaagggcaagaagaaggccaagcagccggccaacgccctcgccggcggcagcgccggcgccaacggccgcctccccaagccctccagcggcgacgacgagctcgtcctcaccccggcgccccgattcgcggccgagcgcaacgacgacgcgcccgatctgcccgtgctcctctcccgcgtcttcaagtccgacaaggtcgaggtctccgacgaccgcctcaccgccggcagcacaaagggataccggatggtgcgcgccacccgcggcgtcgctgccggcgcttggtacttcgaggtcaaggtccttcacctcggcagcaccggccacacccgccttggatgggctaccaacaatgctgacatccacgctcccgtaggctacgatgtgtttggatttggataccgcgacatggatggtaccaaggtgcacaaagcatggagggccaattatgccgatcaaggctatggcgagggcgatgtactcggcttctacattcatctacctgatggagagctgtatgagcccaagcagcctttcctggttcactacaaggggcttcctttccgcgcagaagctcccaaggcagctgagcagaagacgccggatccagttcctggtagtgagatatgctacttcaagaatggggtatgccagggcactgcttttgtggacattcctggagggcggtactacccagctgcgtcaatgtatacactgcctgaccagccaaactgcgaagtcagattcaactttggtcccaattttgagttctttccagaagattttggaggtcgatcagttcctcaaccaatgaataatgtgccttatcgaccatatcagctggcgaatgaggtgcctgcagaaaacggtactgctgaaaaaaccattaaactgcagtgaaaattctgctttagttagagcttatgtaatccggttaaacagcacgcgggctgatggctatagctggtttagtaatgtttgtctggttagatggatgctgtagttattgaatatttttcacttgatggtttggccatttgaccttcgtgtagcaacgcatgccttcaatctttcccatccatgatggggcgaagttaatccgagatgttggggggcggtaagggcggttgcacgtagtctagcagtgggatgaggattaagggcgacagtttaatactcataatatgtaatatttggtcaataatgtttggccgaatcttatcctaaggaggagtaatacaaatagatgagaggtacatct

SEQ ID NO: 8391 - DNA, 1091 bp, Oryza sativa
  ref <308>: DATABASE ACCESSION NUMBER: AK105739
  ref <309>: DATABASE ENTRY DATE: 2002-08-28
agaattcagcgagagagagcgaatcagccactgcacttcttgttcttgttctcttcctcctcccgaatccgatccatccattggccgccgccgccgccgccgcctcgtgcgtcgcgtgttcgtgtccagagacgatgggcagcctcgccgccgagaagaccgtcaccggatggggcaccacgtgacggtgatcagctcgtcggcgaggaagcgcggcgaggccatggacgacctgggcgccgacgcctacctcgtcagctccgacgcggcggcgatggcggccgccggcgactcgctggactacatcatcgacaccgtgccggtgcaccacccgctggagccgtacctggcgctgctgaagctggacgggaagctgatcctgatgggggtgatcaaccagccgctgagcttcatctcgcccatggtgatgctcggccggaaggccatcaccggcagcttcatcgggagcatggccgagacggaggaggtgctcaacttctgcgtcgacaaggggctcacctcccagatcgaggtcgtcaagatggactacgtcggcgtcggcgtcatcgtcggctgctgccgcgagtgccatccgtgcaaggccaatgtggagcagtactgcaacaagaggatttggtcctacaacgacgtctacaccgacggccggccaacccagggcggcttcgcctccgccatggtcgtcgaccagaagtttgtggtgaagatcccggcggggctagcgccggagcaggcggcgccgctgctgtgcgccgggctgacggtgtacagcccactgaagcacttcgggctgatgtcgccaggtctccgcggcggcgtcctggggctcggcggcgtggggcacatgggcgtgaaggtggccaagtcgatggggcaccacgtgacggtgatcagcaacatcgacgacgccgacgcgccgcccgcctgatcgccgccgtgcaccctcatggcagcatccgtatgatccgttcttgaacttgtttgtgtgagactctgacgacttgtccatgtaacgtccgtgtgcctttccggtataaattcggcctcgcaatatatggaccattttgcatttc

SEQ ID NO: 8392 - DNA, 2854 bp, Oryza sativa
  ref <308>: DATABASE ACCESSION NUMBER: AK105740
  ref <309>: DATABASE ENTRY DATE: 2002-08-28
gtctcgtctccttcctcggctcggcattttcgcgaaatccgcaacaaaatccacggcggcaacgaagcccgggggcggggggaccctacagcgcagccgcacagagaaggggaaggaagcctactactctactagtcctacccctaccctaccctacggcctagggggagggggggaggagagaatccaccaagtgaaggatatggagtgcaacagagatgatgcaattcgatcaaaggagattgctgaaaggaagttcaatgagaatgatatcgctggtgcgaagaggtttgccttgaaagcaaagactcttttcgactcgcttgaaggtattgataatatgatttctgccttggatatccacataagggcacagacgaagattgaaggggagaatgatttgtatggaatattagatatatcggcctctgatgacgatgaaaagatcaagaagcagtacaggaagttggccttacaaactcatcctgacaagaataaattttctggtgctgaaagtgccttcaagctcatccaagatgcttgggatgttctgtctgataaggacaagaagagatcatatgatcagaagaggtttggtggttcctcaagagtatatcagaatggctttgcggaaaatgctaatgccactcctggttccactatgtcaagtatgaatggtttcttctggcaaaattctggtaggcacccttcttatgcaacagacacattttggacatactgtgattcttgtcaaatgagttttcagtactccagggaatacgtcaaccgaaatctggcgtgtagtttctgccaaacagaatttgttgctgttgaaactccacccccaactgctccagtttactataatgtgaccaatttaatggacactagcagtaatatggatgacccacaaggaacaggagtaccctatagcagcaacaagatttttgatcctgtgctgcagccagttttcggttctgtaggcggtgcacacgcctctagatatccagttcaacagacatgcaagcctgctagaaaggaggaggtagctgaagttaatgtagccagaagagaagaggcaactaaaaggaaacatgaacaagcaagttcttcccttggatcatcaagttcagctgcaaaagtcatccacagaagagaagcagtgacaaaggaaatggaagctgaaaagaggagatgcatcaacaacaaaagtaaagtttctggtcaaaagaacaacacaaataaagttgttgggaagtcaacaagttctgccgctgatggtgattcaggtccacagatgcatccagcaaaaagaaaatctgcttcttccattggaacgtcaggaacaaagaggcgtaaaatgccttctgatcataattctggtaatgctaggactagctttggaaaagtgttcctgcagttggagacagagatcccaggcttaaaaatggagaagatgaaacttcaaattcgggacaaactagaagaattcaaaagtagaagggccaacgtagaaaataaaggaaacgtgcatgtgagtttagaaaaaaagaagacatggaagtggaagaaacctgcaacactctttgtatacacaaggagaaaccgtaaggaacacaggaaagagcctggagtggatgccattggtgctggttcttctcacaagcatttggatggcaaatatagttgcttggatcaagtgccatcttctgatgaaggatcttgtgtaatgccggtccccgaagcagatttctacacttttggtgatcatcctgaaacttcttttcaaaatggccaaatatgggctgcatatgatgaagaagatggtatgccacgctactatgctttgattcagaaggtgctctcgagacatccttttaaagttagactggctttcctcaaagcaaaggactgcagtgaatttgtaacttcaaattggatctcatatggttactccaagacctgtggtgatttcatagttggtacgccaaaaaatactgaccaactgaatacattttctcatgttgtcacatgggagaaaggcccaggtggtatcatcagaatttttcccaggaaaggtgatatctgggccctatatcagaactggtctcctgaatggaatacatgtacacctgatgataccatatacaagtatgacttggtccaggttcttgatagctacaacccaagtgcaggcatttctgtcatgcctatagtgaaggttccggggttcgtttcagtgtttacgccccttcttgacccaacgaaaagcaggacaattccgaaggaggagatgctgcgattttctcaccaggtgccattccatgtccttactggagaagaagctaagaattctcccaagggatgctatgaattggatcctggttctactccgaaggaacttcttcaagttgttccacaatctgacggcgtataaaataagtcccgtagctgatgctgatgctagctctagcttgtacttagtggctgaactattttttcgcttttttatatcctggaatcattggggtaataccggtttctttagtattgtacaatactacaatacatacccaatgctgtgtatgttttgacctgtaagctccccatgttgttttgatgtattagtaaacatggctatctgtaagttcctagatatttctggccagttagccatattattatttcttgatgtttctcatcaagagcagtagaaactttagaatattgctgacctgttgttgtgcatggagttggtgatggtcgtcacagttggccgagatatttaactatttggaggtcaaatatctcgttcaggaaaaaagggtgagatgtggaagtatatctcgttcac

SEQ ID NO: 8393 - DNA, 1955 bp, Oryza sativa
  ref <308>: DATABASE ACCESSION NUMBER: AK105741
  ref <309>: DATABASE ENTRY DATE: 2002-08-28
agctctccgtcattccgcctcccgttgaccggcgctcctccacatctcctctccatggtcgcgtggatccgccgtcggcggcgacggcaggggtggatccaccgagctccatcatttgtccgcccccgctcgcgccgatccaccgcctctcgcgtcggcagcgacgggaggggtggatccggcgacctccgtcgtctctccgcccccgctgacgccgatccaccgcctctcccgtggatccgccgtcgacggcgacgggaggggttgatccggcgacctccgtcgtctctccacccccgctcgcgccgatccgctcgggctcgtcgtcgcgtcgtttgtgggctgcttcttcacgtccgtcgcctcgctcatcatctccaagctgcatccgccgtcggcagcgacgtgatgggcggatccagctcatcccttcagtcccaactctgtctgggtgtccaggaagagaccggcggcggggagggccagaatggcggcggtggtgagggcggaggcggtggacacatccatcagcccaacgatgagggcgctccggtcgtccaagaacatggccatcacagaccaggccacgacgttgcggcaggccggcgagctggtcatcggcctcgctgcaggggagcccgacttcaacacaccggcctcgctaccgaggtctggacagcgacaccgtgggacagcttgtcggccaggtgatgatcagcgctccctcagcggcgagcgacatcccggtccccctttgtgagaagggtccggtcgaacgcgtcgctgcaattaatgttctccctctgcggacgtcatcggaccactcgcggaccaccaggcagcggcgtcattgaaggagggcgtcaccaatgaggcgtccgacgttgcagctgctgctaccacgagtggcaacaacgttccgaggaaggggaggaattctcctccgtactcgggacccgtcggaaggcgccaaacccggcggactcggacgcgtctccccacctcagcgaaggcaaaggctagtgactagtgacgatcggcgagaaggcggcgcaggcgaaggcggcgcaaggtgggaccggtgcggcttccagtgcgtcccctgcagtgacctcgacagatgtagtggtcgctactaaggaccgggaggcgacgtcgagtagccccgccgtcaaccttgtgtctgctcggggcccgtccaccgatgccctcacctggggggagctccaggcggagatggagcgcctcctccaggccggtgctcggggcgtaggccgcgaggtcgaggaggccagggcggcagcgtcgtcagcaaaccagcgtgctgaccagctggtacgtgacttggcggaggcccgtgaggacctcctgaagatgagggagctggtggccggcaacgagaggcagcggcaagggctcgagcaccggatgttggagctcgagaacaatccgtcagaaatccgatgctcgctgcgggtatcgtacaccagcctacaccagctcgccggggaacgtggtgtcacgactaccagctggcctgcaaaatttgcacatgaacgtactacttgcctatagatgatggtggtgtggccgtgtgggcaatattgggtgcatatgaaatgctgcaagaaaaaaaaagggtgccctttataccgatcaagaaaaagaagtgcattttagcttgatcaagaactaacccaaaagcaggctactcgtcaacactgtttcactccctctcagtgatatgtgttcatgtctattcggccagcaagcacattgcgttcgtcaatacatgctgtcactgcccttttgatcgcccgcagaagagccaccccagcatgcacgcagacaacaagacaacaacaagctttgagttgaagggaaatccagattatatatttgatattagttaattcagtgtctcaaaaaatatcatcaactccaatttgatgacc

SEQ ID NO: 8394 - DNA, 1888 bp, Oryza sativa
  ref <308>: DATABASE ACCESSION NUMBER: AK105742
  ref <309>: DATABASE ENTRY DATE: 2002-08-28
gcttcgagcatttggtaccacctattttgcattgccatcttgtaagaaacctcagcatccaccaagagtttcaggccgcaccaatggcttgtgctccagatcccagcaataacaagaatagctcgtcgattcttcatcagcaagtgaagaaaattagcaggattcctttttcatggggagcacatgcatggggtataggaagagaagatccaagaagggctattcatgctctcaaggttgggacagcactcacactggtctcactcctgtacatacttgaaccgttgttcaagggagtgggaaggaatgcaatgtgggctgtgatgaccgttgttgttgtgcttgaatttactgcaggtgcaactatatgcaaagggctgaatagagggttaggaacaatcttggcaggatctctagcatttataattgaacttgtagcagtacgatctggaaaagtattccgggctctgtttgttggatcatcagtctttctgataggatttgctgcaacatatttgagattcttcccatccattaagaagaactatgattatggggtcgtgattttcctgctaactttcaatctgataacagtatcaagcttccgtcaagaggatgtggtgcctttagcacgagatcgcttaagtactattgcgataggttgtgcaatatgcctattcatgagtctttttgtattgccaaactggtctggagaagacctccacagttctacagtacgcaaatttgaaggattagcaagatcaattgaagcttgtgttactgagtatttccaagatcaagacaaggatgataaaattcttgataagcaggcatcaagagcttccattcacattggttatagagcagtccttgactcaaaatcaagtgatgaaaccctagcacactatgcaagctgggagccaagacattcaatgcaatgttacagttatccatggcaaaagtatgtgaagattggatctgttcttaggcactttgcatatactgtcgcagcacttcatggatgtctagaatctgagattcagactccaccatccgtcaggtcactattccgaaacccatgtactagagttgcacgagaagtggtcaaggctttacaagagcttgcagtaagcataagagatcatcatcgttgtgcccctgatgtgctgtctgatcatcttcatgaagcactacaggatctaaactcggctataagatcacagccacggctctttctcggctccaaacatgcatgtgcaaatagtcatgtgctgatggaattaaattctagcaagcatacagccacaagaactactctaccatcattcaagactgatggcacatccctattagaaaggaggaatacaaaagcagaccaaccatcagaacggaatgagcggggcacattaaggccaacactaagtaagatagccatgacaagccttgagttctcagaagcacttccattcgctgcgtttgcttcattgttggtagaaatggtagttcggctggagatggttattgaagaagtgaaggaactggagagagcagcaaattttagagaattcactggacatgactatctgaccattgatcttacttccaatgacaagatgagaaacccaaatggcgtaccattagacagccacacaatttccactgcagctgagtaagtactggataatagatcaaatcagtagatgatcactctgaagcagatatgtatttctttttggactaagaaaatatggcctgtgaggctgtgattcccaataaatgttgttagaatgacaactcataaaaaaacaatattaaacctacaggatgtttatcggagttggatgatgtaaaaaaaatttcagcagaaagtactcatgcttttccccag

SEQ ID NO: 8395 - DNA, 1773 bp, Oryza sativa
  ref <308>: DATABASE ACCESSION NUMBER: AK105743
  ref <309>: DATABASE ENTRY DATE: 2002-08-28
ttctttcaagtgtctttgcttttattttatgttctggagctgcgttggtaatttgtttcaagattagaaaccgcaaccatttaactgaagagtcacctatgccaccgaagcctgcaggtcctgggtctgcagttgttgggagcaggctaggaagcagacctatttcagcatctccatctttcagctcaagcatagtgacatataaagggacagcgaaaacatttagcttgattgagatggaaagagctacacaaagatttgacaactccagaattattggcgagggtggttttggacgtgtttatgaaggtattcttgaggatggagaacgggttgctgtcaaaattcttaagagggacgaccagcaagttacacgggaatttttagctgagcttgagatgcttagccgattgcatcacagaaacctggttaagttgataggtatatgcacagaagaacatatccggtgtcttgtgtatgagcttgttccaaatggtagtgtggaatctcacttgcacggatcagataagggaactgctccacttgattgggatgctaggcttaaaattgcacttggtgctgcacgtgctcttgcttatttgcatgaagattctagtccccgtgtcatacaccgtgacttcaagtcaagtaacatcttattggaacatgacttcacccccaaggtgtcagactttggcctagcaagaacagccataggtgaggggaatgagcatatttcaactcgtgttatgggaactttcgggtatgttgctcctgaatacgcaatgactgggcatcttctagtaaagagtgatgtctacagctatggtgtcgtcctccttgagcttcttaccggaaggaaaccggtggatattttgagacctccagggcaagaaaatttagttgcatgggcttgtccttttcttactagcagagatggcttggaaacaataattgatccatcacttggaaatagcatcctattcgatagcattgcaaaagtagcagctattgcttctatgtgcgtgcagcctgaggtggatcagcgcccatttatgggtgaagttgttcaagctttgaagttggtatgcgatgaaggcagcgagttcaatgaatcaggaagtttcagccaagatttacatattcaggattctgggattataagtagagcaagcctggatgtggacgtagaacctgttgtatctgctgagctgttcaatgcatcagcacattatgacactcttgatgcatctggttcttttcgacgatattcaagttcaggtcctcttagggtaggtagaaccgggcacaatagggagaggggtttatcaactggtagctcaagcgagcactgtggtacacaaagattcaggatagattcagagtagtcagcttgcaggcttcttttgacgatgtggggctgtgttcattggcttcttttcgcaagccacatttcatattcattgtgaatatctgtgaagagcactgagcaatatcaccagcttctgccgggacaaggaccagttttcgaagagcactgagcaagactgcaagagtaccaacatctcgtcccgtcccgtctctgtttatacagttctagagatctataaagccggttccttttttttagtggaaagtaaagccggttcatcaactgcggttcatcaactgtaaatgttcatgtaccttcccaagtgtagccattcctttcgcatggaaggtaagtgaaatatcggatgaaatgaagggtatttttgcctgtcatcctttcag

SEQ ID NO: 8396 - DNA, 2390 bp, Oryza sativa
  ref <308>: DATABASE ACCESSION NUMBER: AK105744
  ref <309>: DATABASE ENTRY DATE: 2002-08-28
aagcaaaagcgattcccgtagtagcggcgagcgaaatgggagcagcctaaaccgtgaaaacggggttgtgggagagcaatacaagcgttgtgctgctaggcgaagcggttgagtgccgcaccctagatggctaaagtccagtagccgaaagcatcactagcttacgctctgacccgagtagcatggggcacgtggaatcccgtgtgaatcagcaaggaccaccttgcaaggctaaatactcctgggtgaccgatagcgaagtagtaccgtgagggaaaggtgaaaagaacccccagtgggtagtgaaatagaacgtgaaaccgtgctgagctcccaagcagtgggaggggaaagtgatctctgaccgcgtgcctgttgaagaatgagccggcgactcataggcagtggcttggttaagggaacggaacccaccggagccgtagcgaaagcgagtcttcatagggcgattgtcactgcttatggacccgaacctgggtgatctatccatgaccaggatgaagcttggatgaaactaagcagaggtccgaaccgactgatgttgaagaatcagcggatgagttgtggttaggggtgaaatgccactcgaacccagagctagctggttctccccgaaatgcgttgaggcgcagcagttgactggacatctaggggtaaagcactgtttcggtgcgggctgcgcgagcggtaccaaatcgaggcaaactctgaatactagatatgacccaaaaataacaggggtcaaggtcggccagtgagacgatgggggataagcttcatcgtcgagagggaaacagcccggatcaccagctaaggcccctaaatgaccgctcagtgataaaggaggtgggggtgcaaagacagccaggaggtttgcctagaagcagccaccctttaaagagtgcgtaatagctcactgatcgagcgcccttgcgctgaagatgaacggggctaagcgatctgccgaagctgtgggatgtcaaaatgcatcggtaggggagcgttccgccttagagggaagcaaccgcgaaagcgggggtcgacgaagcggaagcgagaatgtcggcttgagtaacgaaaacattggtgagaatccaatgccccgaaaacccaaggtttcctccgcaaggttcgtccacggagggtgagtcagggcctaagatcaggccgaaaggcgtagtcgatggacaacaggtcaatattcctgtactaccccttgttggtacggagggacggaggaggctaggttagccgaaagatggttataggtttaaggacacaaggtgaccctgctttttcagggtaagaaggggtagagaaaatgcctcgagccgaggtccgagtaccaagcgctgcagcgctgaagtatgagccccgtggactagccattgcttctccacgaggctcataccaggcgctacggcgctgaagtatgtaacccatgccatactcccaggaaaagctcgaacgaccttcaacaaaggggtacctgtacccgaaaccgacacaggtgggtaggtagagaatacctaggggcgcgagacaactctctctaaggaactcggcaaaatagccccgtaacttcgggagaaggggtgccccctagctcgctgcagtagcagaagcgtctcgctttcccctttgctgctgctgctgctgctgcgccgccgcctccgccgccgccgccgccgattccgctcccctcccttcccctccgagctcagcaatggcaaattcatcatctggagttgcaattcatgatgattgcaagctgaagttcaatgagctacagtccaaaaggatgcaccgcttcataactttcatgatggataacaaggggaaagagatcattgtggacaagattggggatcgcacaacaagctatgaggatttcactagcagcctgcctgaaggggactgccggtttgcaatctatgactttgacttccttactgcagaggatgtgccaaagagcaggatattctatatcttatggtccccagacaatgcaaaagtgaggagcaagatgctttatgctagctccaacgaaagattcaagaaggagctgaatggcattcagttggaagtgcaggctactgacgccggcgaaatcagtctcgatgcgctcaaagatcgtgtgaaataagcattgccatgcctttcatgatcttgcaatatggacttgtctattatggatttgtgtgtcactataaatttggtagtgtgagactgcttgatggtttgtgggtttgttcatggaaccatggagatatggctctatcctgtatttcgttgttgcgctcagaatgtatgggcctgtgatgcactgttccaagtttaattgagatgtgtcaatgttcaagttacagaat

SEQ ID NO: 8397 - DNA, 1734 bp, Oryza sativa
  ref <308>: DATABASE ACCESSION NUMBER: AK105745
  ref <309>: DATABASE ENTRY DATE: 2002-08-28
aaggtaggatggcatcgttgatggaagtgcaggtgccgctgttgggaatgggcactacgatgggcgccctggctctggctctcgtcgtcgttgtggttgtgcacgttgccgtgaacgcctttgggcggcggcggcttcccccgagtccggcgagcctaccggtgatcgggcaccttcacctgctccggccgccggtgcaccgcaccttccacgagctggcggcgaggctgggccccctgatgcacgtccggctggggtcgacgcactgcgttgtggcgagctcggcggaggtggcggcggagctgatccgcagccacgaggcgaagatatcggagcggccgctgacggcggtggcccggcagttcgcgtacgggtcggcggggttcgcgttcgcgccctacagcccgcactggcgcttcatgaagcggctgtgcatgtcggagctgctgggcccgcgcacggtggagcagctgcgccccgtgcgccgagccgggctggtgtcgctgctgcgccacgtgttgtcgcagccggaggcggaggcggtggacctgacccgcgagctcatccgcatgtccaacacctccatcatccgcatggccgccagcacggtccccagcagcgtgacggaggaggcgcaggagctggtgaaggtggtggcggagctggtgggcgccttcaacgccgacgactacatcgccctgtgccgtggctgggacctgcagggcctcgggcgccgtgcggccgacgtgcacaagaggttcgacgcgctgctggaggagatgatcaggcacaaggaggaggctaggatgcggaagaagacagacacagacgtcggcagcaaggacctgcttgacatcctgctggacaaggcggaggacggcgcggcggaggtgaagctcaccagagacaacatcaaggccttcatcatcgacgttgttactgccgggtccgacacttcggccgccatggtggagtggatggtggcggagctgatgaaccacccggaggccctgcgcaaggtgcgggaggagatcgaggcggtggtggggcgggacaggatcgccggcgagggggacctgccgagactgccgtatctgcaggcggcgtacaaggagacgctgcggttgaggccggcggcgccgatcgcgcacaggcagtcgacggaggagatccagatccgagggttcagggtgccggcgcagacggcggtgttcatcaacgtgtgggccatcgggcgagacccggcgtactgggaggagccgctggagttcaggccggagcggttcctcgccggcggcggcggcgagggcgtggagccgcgcgggcagcacttccagttcatgccgttcgggagcggccggcgcgggtgccccgggatggggcttgcgctgcagtcggtgccggcggtggtggcggcgctgctgcagtgcttcgattggcagtgcatggacaataagttgatagacatggaggaggcagacggcctggtttgcgctcggaagcatcgcctcctcctccacgcccacccgcgcctccaccctttcccgccgctcctctagctacccctacctacctaccactcctactcctttcctgtccctgtaacgcaccgtaatacaaccattataaattaattaccactttactatattgtaataattaatgtgtatgtattccctacctagacctattgcatgtctctcaaatcaaatattccaagcaagcttgattgtg

SEQ ID NO: 8398 - DNA, 1527 bp, Oryza sativa
  ref <308>: DATABASE ACCESSION NUMBER: AK105746
  ref <309>: DATABASE ENTRY DATE: 2002-08-28
agttccccaccaaactctctctcgccatggccgcatccgactccgactccgacgccgacgccgccgccgccgccgccgcctcgctgctgccggcgcccatccacctcctgccgccggacgcgctccacaacgtgctcctccgcctccccctccgcgacgccgtcgtctgccgcccggtatcgcgcctcttccacgaaaccctctcccacaacttcctcgccctcctcccctccctccgcctcctcctcctccgccacccgcgccccgaaggcggcggctgcctccacgccttcgaccccgaccgccgccactggctccgcctccccttctccgccttcctccccaaccagtccttcccccccgtcgcctcctccccctctctcctctacctctggctcgagtccccttcgccttccccgccatccctcccctcctcctcctcctcctcctccaccgcctccaccgcccacccgcccaaatcgctcgctgtctgcaaccccttcgcggggacctacagcttcctgccccctctcggatctgcctgggcgcgccacggcaccgtcctcgctggccccggcggcgtcgtcctcgtgctcaccgggctcgccgccctctcctacaccccatccggatccggcaagtggatgaagcatcccctctcgctcccctccaagccgcggagccctatactcgcctccggcgctgccgccgtcttcgcgctttgcgatgtcggcaccccgtggcgcagccagtggaagctcttctcctgcccgctctccatgctcacaggcggctgggcccccgtcgagcgctccgcgtggggcgatgtcttcgagatcctcaagcgcccgcgcctcctcgctggtgccggcggccgccgtgtcctgatgatcggcggcctcaggtcctcgttcgccatagacgcgccatgctccacggtgctcatcctacgcctagatctggccaccatggagtgggacgaagctggccgcatgcctcccaatatgtaccgttgcttcaccggcctctgtgaggctgctgcacagggtaatgccatgcctactgctgttgctggtggcaacaacaaggtcaaggtgtttggcggtgatggcaaggtgtggtttgctggaaagcgggtgcgagggaagctggcaatgtgggaggaggatgagctaggcaacagcggtggcaagtgggactgggttgatggtgttcctgggtacagtgatggcgtataccgtggctttgtgttcgatggtgggttcactgctatgccctgaagtctatggagaacacataccagtccggtgcgtgactaaatgcgctcaggttaagattttaattgattcgggacatctatccattgcatgcagggggaattgacatgtcaaagaattttatttgcattgtacttggttcgtagcatcatgagatactttcaattgctgtacttgttaaaagtgaaatgttttaaatatcttttcagggtttgttgcttcagacaataaaatcaggttacttttattt

SEQ ID NO: 8399 - DNA, 1898 bp, Oryza sativa
  ref <308>: DATABASE ACCESSION NUMBER: AK105747
  ref <309>: DATABASE ENTRY DATE: 2002-08-28
aggctgcacggcgcgtggagattgatagagcgacgacgagctcgggccagtcgaatagttgagtgaggagacacaacggtggaggcagaggcggctcatgagcttgaatctggtcttcctcttccccatcgatcctgcggtgagcctctctgaagacctccaaatccctttcctccttagcagtcaaggctggagctgctgctgttctcttaattgccaagagaaatgctccgagaactgagttgttgtggctgctgcattgtactctcgatgattttgtatctttagttccttagagcatcaccaacaatatctgtatatggttatcctgaaatttggagattttcgttcaaaaacccagtccaacagaatccctagccaagcgcccaatagttcaaaaaccgaatttttcgttctccacaagtagggagaggcgctcgctcccaatctccctctctcgtgccgtcgtgcgaattcccacgcgcacgtgaagtgttctcgacagggggttcatcacgaggttgttcgccgtcgcatcgaggtgtcctacaggtgcccacatctcacgcgcgcgccgctgcctagagctttctcggcgtcgatagttcctgctctggcggcggcagcggcaccatctccactacagccaggcgaacttccatcggcccgagttggtttctcctcaaatcgggattggtctctcgatgatggagatgagcgaaggtatctgctagtgcttgctagttttggcgctgctaatctgctactacgaattctacagttggtactgaataatgttgttggtgccggtggtggtgttgaaagttgatgttggtgttgctgatgatgtgctgttgttgatgctactgacctgctgctagttgtgatctgctgcttgttgcttgccatgctattgctaattgccatgctgttgccgatctgaatttttttttgaacgacgtttgctgatctgagttgacgctactgatctgctattgttgaaaatggtacgatgttgttggttctggttggtaattagggactttgctgatgctgctacttgtagtggttctgcttgattgtttgcaggaaatatcagatttgctgacgtgctactgcgtggagaggggtgacagggaggtgaccaccaagtggttcccgcgatcaatggtcacacgggcgagcgtgataatctcacaggagggagagcctgaaacagatttcagttggtagttttgtagagggaccactttttagatttagggagtcaattttagccaatctcttggagggctcaatattttaacaccttaaattttatttaagattcccataaacaaaattttgggatactcttggtgatgctcttactgagttattctagtacagtactgaattttaacacctatcattattctgaatttttttatgctacttgtagagaagtaaagagcaatactttctagtatatctgttagtgggttttattatgacccacacaacgggtaatgtactaatgagaatgatttgaactgaggaaattaaatttatattaatatttggtgctatccctaaatttatattaatatttggtgctatcccaatctgcagtccattggaaaagcttgagaggagagcaacatgcaacagacaataatcctgtgggtctggggttcagcacttcaaaactgacgaccattgtgagaatacataggaggtgctaactaagatgattgaaggtgacaatctagaggaggtgctgcaggaattggaggagatgaagaacttcatcaagacaatgcatagcacttatcatgctattaggatttaaaaagaaaattcatataagagttagtttgtaatcaatttgtctatatactgaaatgacaatattacac

SEQ ID NO: 8400 - DNA, 1869 bp, Oryza sativa
  ref <308>: DATABASE ACCESSION NUMBER: AK105748
  ref <309>: DATABASE ENTRY DATE: 2002-08-28
ccggatggcacctcactcaccttatgcgccgctgcatttagtacccaaaatgctgaacgaaccctcacctgctgccctggactctaggggtgcattcatcgttcatgtgctctcatcgatctatgtttgggttggaatgaagtgtgatcaagtaatggagaaggatgcaagagcagcggcgttccaggtggtgaggtatgagaaggtgcaggggcatatcaaagttgtcagggaaggaagtgaggtaccagaattttgggacgccttttcaagtgcacccgttaattcagacagcaatacaaagattagcaaggatcagattgattcagcatccaagactggcccggggaaccgtagggtggaatcttatgatgctgattttgagcttgtatacaaagcaatcactgggggtgttgtgccagcattctcttcttcaggtgctggtgatgagacccatcttccagcaagagaaagtacctggagttcactaaggcgcaagttcatctctaggtcgttagctcgagtctattcagattctgctttaatcagggacttggatccgcgggtggaccgagtacaacacctggctgcagaggcatcaacatcaccacctttcctatctccgagctctttgtcatcagattcaagcatcagttcaaagtatagttcagactcaccctcactgtcaccttcaactagctcgccaacatcacttggtctttcgcccgcttcatctaatttttcccacactttggtgccatcatctaggtccccccttcaccaatcatctaacgaggaaccttcaaaatctggcctggggtcaatacgctctccctccaagacctcttctatagcagaaagaagaggagggttttcatctctgaagttaccatcattccaaaaggatctagtattaccaccaagggtaccgaccagccttcgcagagaagaggaagtcacagataagagtaataataatagtgtaaaacagcttactggtgtgtgttgcccagagaaatgcactggcaatacttcaacagtgcacactaaaactggaataactgagcgtactgacagtatctcagaggcttgcggtaatttacaactattagtctaccgttggcccagcaaggaaaagctaactactttcactcgcaaggatcttgacccaaaatcagttttgatttttgttactcctgaagacagcagaagtgaagcagttaaaacggtacacatttgggtaggaggtgaatatgagagcagcaaatgtgttgacactgttgattggcagcaagttgttggtgatttttttcatctaaaggagctcggcaatactcttcctgttaaggtttacaaagagcatgaaacggagaatcttttggaagtgctgaatgctcgttaatggtaggctcaggctgtaggtatcagcatattgtagtagcttaacaaagtcagccgtgaagtatgattgaatgaaggcatctcctccagaatcgctccatgcggtggtgattttcagcgaggtataagccgttacaactattccccttgaacatatagaccacagattccatttagtagaactgatgatggattggcaattgtgcctacctcatatgatttgcttatggtcagaaaatgggcaggaggctgccagaacgttgtatctgtgagttaaaacacacatggatcaggttttggcacaatttgggtgtatattctccgctcccctgaaatgtaagctcagaaactgggaggcaacggtgtcgttttcaccctaaaaatttcttgtacatctcgaaaaagaaacagatcagatgtgtaatcctcttgtcttaaaaaaaaaaaaaaaaaaaaaaaaaaaaaaag

SEQ ID NO: 8401 - DNA, 2517 bp, Oryza sativa
  ref <308>: DATABASE ACCESSION NUMBER: AK105749
  ref <309>: DATABASE ENTRY DATE: 2002-08-28
gtgctcgctagcttcgtcatctaccactgcaatttacacgacggccatgatgaggctgctgctggtggcggtggcggtggcgatggcggcggtggttgtggcggcggaggagagggcgacgtacatcgtccacatggcgaagtcggcgatgccggcggagtacggggacgaccacggcgagtggtacggcgcgtcgctgcgctccgtgtccggcgccgggaagatgctgtacgcgtacgacaccgtgctccacggcttctccgcgcggctcaccgcgcgggaggcgcgcgacatggcggccatggacggggtgctcgccgtcaacccggaggcgaggtacgagctgcacaccacgcggacgccggagttcctggggatcgccgggaacgacgggctgttcccgcagtccggcacggcgggggacgtcgtcgtcggggtgctcgacaccggggtgtggccggagagcaggagctacgacgacgcgggcctcggcgaggtgccgtcgtggtggaagggggagtgcatggccgggacggggttcaactcctccgccggcaaccggaagctcgtcggcgcgcggttcttcaaccgtgggtacgaggcggcgatggggcccatggacaccaccagggagtcgcgctccccgcgcgacgacgacggacacggcacgcacacgtcgtccacggccgccggcgccgccgtctccggcgccagcctgctggggttcgcgtccggcacggcgcgcggcatggcgcccagggcgcgcgtcgccgtgtacaaggtgtgctggctcggcggctgcttcagctccgacatcctcgccgggatggacgccgccgtcgccgacgggtgcggcgtgctctcgctctcgctcggtggcggcgccgccgactacgcgcgcgacagcgtcgcgatcggcgcgttcgcggcgatggagcagaacgtcctggtgtcctgctccgcggggaacgccgggcccggcacgtccacgctgtcgaacgtggcgccatggatcaccaccgtgggcgcggggacgctcgaccgcgacttcccggcgtacgtctcgcttggcaacggcaagaactacaccggcgtctccctctacgccgggaaggccctcccctccaccccgctccccatcgtctacgccgccaacgcctccaactccacggcgggcaacctctgcatgccagggacgctcacgccggagaaggtggccggcaagatcgtcgtctgcgaccgcggcgtcagcgcgcaggtccagaagggcttcgtcgtgcgcgacgccggcggcgcgggcatggtgctctccaacaccgccaccaacggcgaggagctcgtcgccgacgcgcacctcctccccgccgcgggcgtgggcgcgaaggaaggcgccgcaataaaggcgtacgtggcctccgacccgagccccacggccaccatcgtggtcgccgggacgcaggtggacgtgcgcccgtcgccggtggtcgccgcgttctcgtcgcgcgggcccaacatgctgacgccggagatcctgaagccggacatcatcgcgccgggggtgaacatcctcgcggcgtggaccggcaaggctgggccgacggggatcgccgccgacacgcgccgcgtcgccttcaacatcatctccggcacgtccatgtcgtgcccgcacgtgagcggcctcgccgcgctgctgaggagcgcgcacccggagtggagccccgccgccgtgcggtcggcgctcatgaccaccgcctactccacctacgccggcgccggcgacgccaacccgctcctcgacgcggcgaccggcgcgcccgccacgccgttcgactacggcgccggccacgtcgacccggccagcgccgtcgacccgggactcgtctacgacctcggcaccgccgactacgtcgacttcctctgcgcgctcaactacacgtccaccatgatcgccgccgtggcgcggagcaagagctacggctgcacggagggcaaggcctactccgtgtacaacctcaactacccgtccttcgccgtggcgtactcgacggcgagcagccaggcggcggagagctccggcgcggcggcgacgacggtgacgcacaggcgcacgctcaccaacgtcggcgcggcggggacgtacaaggtgagcgcggccgccatgcctggcgtggccgtggccgtggagccgaccgagctggcgttcacgtcggccggcgagaagaagagctacacggtgagcttcacggcgaagtcgcagccgtcgggcaccgccggattcggccgcctcgtctggtcggacggcaagcacagcgtggcgagcccgatggcatttacgtggacatgatgagcgccgccaagtcagagtggtcaccacacacacacgcacactaccacggttaaagggctggagtgtaaaaaaaatatttgggtggatttgggagggggtttaaaaatttggtggtatttcgaagtgttcataatgctattaatcttaaagtttagatggtgatttttgag

SEQ ID NO: 8402 - DNA, 2056 bp, Oryza sativa
  ref <308>: DATABASE ACCESSION NUMBER: AK105750
  ref <309>: DATABASE ENTRY DATE: 2002-08-28
acaacgcggccacactcttcttccttccactcctcactccacagccatggcggagtcgtgctacgtgcgcgtcctcttcctcctcctcctcgtcgtcacgccccttccgatctccattgcttcacctctcaagcttcggctatctgcctccgaggtcgccgcgcttgaggcgcacgcgccgccgccgccgccgccgcccccgcccgacacgccgacgacctacttcgaggtggaccggccgcaccgcccgccgccgggcagcttcggcccgtgctccacgctgctcctctcccactccttcggtttcacctacacgctcccccccgtcacggcaccgtactccccgccgccctgcctcgccgccgcggggggccgtgcgtcggcgatctccctcgccgtcctcgagtggcgcgccacctgccgcggcgtccagttcgaccgcatcttcggcgtctggctcggcggcgtcgagctcctccgcagctgcacggcggagccgaggcccaagggcgtcgtctggtccgtgtccaaggacgtcaccaaatacgcgtccctcctcgccgcccgcaactcctccaccctcgccgtctacctcgccaacctcgtcaacgaccagtacaccggcgtctaccacgccaatgtcacgctccacctctacttccgccacccgccgcagccgccgcagccggggttgggccccgccgacgtcatcgtccccatctcgcagagcttgccgttgaacggcgggcagtggttccagatcaacaacaacgaggacgttgagtccgcgagcctcgccgtgccggcgaacgcctaccgcgccgtcctcgaggtgtacctctcctaccacggctccgacgagttctggtacacttacgggaacccgttcaacggcaatggcccgttccgcgaggtcaccgttcggatcgacggggacgtcgtcggcgccgtctggccgttcccggtgatctacaccggaggcatcagccccttcctctggaggccgatcagcggcatcggctcgttcaacctcccgtcgtacgacatcgagctcacgccgttcttgggctggttgctggacggcgaggagcacgagctcgggttcgccgtgaccgacgcccaggacttttggtacgtcgacggcaacctccacctctggctggaccccaggagcgcggcgacgacggccggcatcatcagctacgacgcgccgccgctggagaaggtcaccgccgtcgcgtccaggggtcccggcaacgagtactaccagacgacggcgttccggcgcatctccgccgccgggtgggtgcaaacgtcgtcgtacggcaagatcaccgcgacatggacgcagcggttcagcttcgtgaacacgaaccaggtgcgtgaggacacggagcagacggtgaaccagaccaccgacgcgtactccggcgtccacgtcaccgaccacgccggcgtggcgtactcgcaggaggcggagcagagcttcccgctctacatctaccagggccaggtgaaccagacgtcgaacgactcgttcaccgaggagacgagcgtgcagctgcggttcgaggaggagagggtcgccgccggccggccggggttctggtcccggtcgctgagcaacgcgcaggactccgccgtggacgtccgcgtgcaggaaggggacgccgtcgggacgtcgtggcgcgcggcgcagacgtacaggtacgaggcgacggacgggtgctactaccgggacgtggccagccagggctacggcgtcgtctccgaccacgccgacgaggtctgcgcgaagggatcgcctgccgccggccgtgccattgccggcggcgccgcgacggagttaggcggcgacgccgcggcggctgcgggagtggcacggctgagctcgtgagaaatggctgcacttttgagtgtttgcgcgatctaattaagctcctttcatttgtatgattactttatacactacacatagagatgtgcccgtcaagtgtacactttggtgaagatttatcgttttatctgttgcaataagagagatgtggacagcttt

SEQ ID NO: 8403 - DNA, 2313 bp, Oryza sativa
  ref <308>: DATABASE ACCESSION NUMBER: AK105751
  ref <309>: DATABASE ENTRY DATE: 2002-08-28
aaggagagagagatagaatagagagagacacacaaacacctacaacaccaacaacaacaagagaaagagagaaagaagagaaggaaaggagaggaagaagaggtggtggtggtggtggtggtggtgtgtggcctccttcccctccctcctctcgcgaggttgccatgcctcccccaagatcctagaacgcatccccacaacctcacctcgctcgcaagaatcttcttcccaccatcgccctccctcgggatcgatccaacccgatcatcaatcggggcggggaaggaggaggaggggatggaggcggacgccgggaagctgttcatcggcggcatctcgtgggacaccaacgaggaccgcctccgcgagtacttcgacaagtacggcgaggtggtggaggccgtcatcatgcgcgaccgcgccaccggccgcgcccggggattcggcttcatcgtcttcgctgaccctgccgtcgccgagcgggtcattatggagaagcacatgatcgatggccgcatggtggaggcgaagaaagctgttcccagggacgatcagcacgctcttagcaagagcggcgggagcgctcatggatcgccggggcccagccgcaccaagaagatattcgttggggggctagcgtccaccgtgacggaggcggacttcaggaagtactttgagcagttcgggacgatcaccgatgtcgtggtgatgtatgatcacaacacgcagcgtcccagaggttttgggttcattacgtacgattcggaggatgctgtggacaaggcattgttcaagaccttccatgaactgaacggtaagatggttgaggtcaagcgcgcggttcctaaggaactatcacctgggcctagcatgcgttctcctgtcggtggattcaactatgccgtgaacagagccaataacttcctcaatggatacacccagggttataatccgagcccagtcggtggctatggaatgaggatggatgcaaggtttgggcttctatcgggtggccgtagtagttatccttcttttggtggtggttatggagtcggtatgaattttgatccagggatgaaccctgctattgggggaagctcaagcttcaacaacagtctccagtatggaaggcagcttaatccatactacagtggaaattctggtagatacaatagcaatgttagctatggtggagtcaatgacagtactgggtcagtgttcaactcgctggctcgtaatttatggggtaattcaggtcttagttactcttccaactctgcaagctctaattccttcatgtcatctgccaatgggggccttggtggaattgggaacaacaatgtgaattggggaaaccctcctgtgcctgcacaaggtgctaatgctggcccaggctatggcagtgggaacttcggttatggatccagtgaaaccaactttggtctcggtaccaatgcttatggaaggaatgctggatctggtgttgttaatacattcaatcaatcaaccaatgggtatggaaggaactttggagattcatcaggaggaggtggcggtggtggcggtggctccatctatggagacacaacttggagatccggatcttctgagcttgatggaaccagcccatttggctatgggcttgggaatgcagcttcagatgttacagcaaagaactcagcaggttacatggggcattaacaaatagagcaatgtcgccgcctaggaatctttttcacatacaacatttgtcaaaataggttgaggagagaaccacaggtgcatcaggtgcaaattttgaacctcacatgatttacagaaatgggttagttaatagagctaaccaccaggggtttggtcaatgagatcagatatatatcctcagagaaccatttaaacgtatttccattttatgtaaggtttgagattgtggtttcggatttctacagcgagtttaggttttggcaaccttgtgttttttcttggttgagatgtgaagtaagattgcgggatatatatatctgaagagtgttcagttgtacggcggcgctgcccccatataggcccccctttttgggtttttgttcttatagtagaaactgctctagcgttttgcaaattgtgtgctagctgttgttatcaggatgataatttttttccccttcttggtttttatcttactgaagtgtatgtaccagagatcttgctggtctgtgtttttcctagtggaacttttgagggatgccccttctgggtctcaaagaataataatgctgcattatattctaattcattttgaggctttctaaggct

SEQ ID NO: 8404 - DNA, 2414 bp, Oryza sativa
  ref <308>: DATABASE ACCESSION NUMBER: AK105752
  ref <309>: DATABASE ENTRY DATE: 2002-08-28
tcatactccaggaactgtcttgttctagctctttgcttggtctgaaagtcgatttctgcacaggtactgcgaaagctttgggaatagtattgcagaaagcgcagcaatctgaagcttactgtccaagccagtttgcagctgaagccaaagactgaatctttcatcagggtttgataatatcaaatacccttgtgatgacagagttaatcagtttgtctcgtcatctacgtgatgattcttcttcagtctgtctcttcttctgcttctgaagacgatggccacattcttctcctcttccaccaatcagagagacctcaccggcggcggcggcgacggaggcgacatgtcgttccagcactacccaccgccgtctaacccttactcggactcgtcggccggcggcctgatcccgctcccggcgagcatcgtgtcgcatagccacattgcgcacggcggcggcgacgagccggcggcgttcagggaagcggcgacggcggacggcggcgagatgggcctgcagacgcagctgctcatggcgcacggcgcggcggcgcggggacaccagggcgggctatcgcttagcctcggcacgcaggtgccggtgtctctctaccagtacaggccggcgggcatggcggccgcctcgctgctcagcccgagccagtcgtcgccgatggcggggaggagcgcgcagaacagcatctacgtgcagaactcgaggtttctcagggcggcgcgcgagctgctcgacgaggttgtcaatgtccgcgacgcgatcaagcggaagggtgacaagaaccagggcaaggattccggcgagtgcaagggcggtgacgccgccggcgacgacaaggccggctcgaacccgcaggagcaggagagcaattcagcccccgagctctcgccgtcggagaggcaggatctccagaacaaggtcaccgcgctcatggccatgctcgatcaggttggtcggaggtacaggcactaccaccaccagatgcagatcgtgatgtcgtcgttcgacgcggtggccggcggcggcgcggcgaggccgtacacggcgctggcgctgcagacgatctcccgccacttccggtcgctgcgggacgcgatcggcgcgcaggcgcaggcggcgcggcggggcctcggcgagcaggacgcgtcggcgcagggcggcggcggcctctcccggctgcgctacatcgaccagcagctgcggcagcagcgcgccatgcagcagttcggcatgatgcagcagccgcagcacgcgtggcgcccccagcgcggcctcccggagtccgccgtctccgtcctccgcgcctggctcttcgagcacttcctccacccgtatccgaaagattccgagaagctgatgcttgcgaggcagacgggattgtccagggggcaggtatcgaactggttcatcaacgcgcgcgtgcggctgtggaagccaatgatcgaggagatgtacaaggaggagttcggcgcggagatggactccaactcgtcgtcggagaacggcggcggcggcggcggcaagggcaaggacgaggcgatctcgtcggaggaccgcgacgagttccagagcccgtcgagcgccgccgcggcgaggcacgccggcgtcgcgggccagctcaacaacccgttcaagtcggaggcgatgggcggcgccgccctggacgtcggcgtcggcgtcgtcggcctgtccagctgcctcggcggcgccatgggcacgtacgccaccggcctcaacctgaaccaccacgtgcaccaccccggcgccggcggcaccagcctactgcacgacgcgctgcaccaccaccaccacggcggcggcggcgacgccaggttcgtctcctacggcgacatggccgacctcggcggcggcggcggctacgacggcggcagcgtgtcgctgacgctgggcctgcagcactgcaacaacgccggccccgtcccggccgagcagcagggcctgctctacggcagcgccggcgacttcgactacatcaacggctccgacgaccggcagcggttcggcccggcgtcgcagctgctgcacgatttcgtcgcgtgatcaaagcacggcgcgcgatggatgcatcgtctgcggcggcggcggcggcggcggggaataacgcaagacggcgtcagaagcctgggccggccggccggcgccgtcggcgagggtatacaggtatacaagcaatatacacgtacactcgtgtgttgtgttgggggggtaagtaaagtgatcgaagtaggggtgatcaggggtgtaattgtaaaactgtatatgagaagggggtgtagcttgctgtaaagatagattggtatttttgctagcttgcagatttctctactgattgatgcatggatcattcatatatatatatgtggtgatgtgttgggtc

SEQ ID NO: 8405 - DNA, 2550 bp, Oryza sativa
  ref <308>: DATABASE ACCESSION NUMBER: AK105753
  ref <309>: DATABASE ENTRY DATE: 2002-08-28
aaaacaatgattccgtaaaaggtgacaaagttcaggatggatccttcaagagccaaatttcttcaggacactccatcaataaacaaccttcccgaactcttgtagtcagaaatattactgctaacatcgaggattctgatctgacggttctgtttcagcaatacggggacattcgcatgctctatacctccttcaagcaccatgggtttgtaactgtttcttattatgacataagagcagcccaaaatgcaatgagagcgctgcatagcaagcctctggggctgatgaaacttgatgtgcaattttcttttcctaaggaaaatgttccaggcaaggatattgataagggaatgttggtggtatctaacattgattcttccatctccaatgatgatcttctccaaatgctcagtgtttatggtgatgtaaaggagatttccagctctcctataagctgcaccaagaagtttgtagagttctatgatgttagagcagcagaagaagcactacatgaccttaataagggtggaatttcaggcccaaagttcaaggttgaacttagccaacatggagaggcaggatcttgcttgaggcagcaacattctagagaatggaagcaagacagtttgcctcaccaacctaaaaactcttcacctgggaccattggaaagttgggcaccaaatgtcaggacaacagcactgttcataatttattttctccagttaaccaacaattggagagcccaacccagtgcatctctacgactggtcctcaaattttatcttcacctatcagaattaaatctacacttcagcacaataatcaagcctctgttggcgatcttagtggacctcttggtcaaggaaactttggacgtggaatacaaaccctccacccacgctcattgccagagcatcacaaccgcatttgtaataactctaagtccatgacagtaagtggtaggaatgctagctctagacaagacggagtggatcacaatatccaaaaagtgggccctgctggtttttgcggtcattcttttgatcaaaataatgaagcatttggctttactgaaattggaagttgcccccttcatggatatcactacacctggaaccacacaaatgtttttccacaaagtccctcagctccaatactgtggtcgaacttgcagcacccaatgcacgtgcatagttatcctggtgtgccgcctcacatgctgaacacaggttcttatcccatggaccagcatcacttgggttcagctcctgacaatggaggcagttttggaaatgtgcactcttttcatccaggatctctcggaagcataggtttgcatggtagccctcagttatatccatcagaattatctgcctttgcatccagcagaggaaattttagggaggccttgttctccccagttggcggtggatttcaatcccttcagcaaatgtgcaatgcaatcaatggtcggaatcctatgatccatgtttccacttcatacgatgctactaatgatcggatgaggagtcgcagacatgatggaaatcctgcacagtctgaaaacaaacggcaatttgagcttgacattgatcgcatagcaaagggtgaagattcacgcaccaccctgatgatcaagaacataccaaacaagtacaactgtaagctgcttttggctgtcattgatgagaaccaccgtggaacctacgatttcatctatctcccaattgattttaagaacaaatgtaatgtggggtatgcttttatcaatatgactgatccgcagcacataatcccattctataagacatttaatggcaagaaatgggagaaattcaatagtgaaaaggtggcgtcgctcgcatacgcccggattcaaggaaggagtgctttgattgctcattttcagaattctagcctgatgaatgaagacaaatggtgtcgacctatgcttttccacaaagatggtccaaatgcaggagatcaggagccttttcctgtggggaacaatgtccggtctagggctgggagaaataggtcgctcatcagcttggacactaaagatgcaagtccatcaagctccccagaccaagaaagcaattctgtcggcaccgcgaactcaacttgccgtacgaccttggagcaaacctaatcactaactggagggcacaagaagctgtaatgataaactagggaattcccagttttgctaagtatttatttgactatcagggagccaaagtttgtgacctgtgagtgtaatgatgaatgaaaggctctgccaggcaaggcatcacctccactaaaattatgagagggatcatcagttttaccctgtgtatggatggagctgtgaactggttggtattgtaacggtactactacttcagtagagcaacaagtgtgtgcgtgtgaatgtgattgactctctgagagatgagaactggaagctgtacagttgatgagttgagtagtcgagtctttggttgagattgaccaccgaaagtacattcattctcttctcagattgactgcgccttgattcattc

SEQ ID NO: 8406 - DNA, 3365 bp, Oryza sativa
  ref <308>: DATABASE ACCESSION NUMBER: AK105754
  ref <309>: DATABASE ENTRY DATE: 2002-08-28
ctacttatgggcttccgttgggctacttctctgagggtcctgatagttctgttgttcctgataaagatgggaagaaagtggttggggtgaaaaaaggcttgttgtcatgctatcgctgtttgatatatttaggagatcttacccgatacaaaggtctgtatggggatgtggattatgcaagtcgtgaatatgctgcagcctctatctactacaaggaagcagcttcgctgtgcccttcgaatggcaacccacatcatcagcttgcaatactggcatcatatgctggagatgaggtaacagctatctataggtacttccgtagcttagctgtggataatcctttttctgcagcgagggaaaacttgattctcgcatttgacaagtttcatatgcagaatcatgatatctatgctcagctatcaggtaatagcaaggttcccaacgctaagagcttgccatccagatcagttggtagggccagaggaaggggtgagacaagatttcagcccaaaggttctagtacagaagaaaattcaaaggagcgagagcacagtattcaagaaatactgaaggctttctatattcgatttgttcgcctcaatggaattcttttcacaaggacaagcttggaaacatttggggagttgtctgctacagttatcagcgatttgcaaattcttctttcatctggtccttacgaggagcttaattttggtgttgaggctgctgaaaacgcgctttctgttgttaagcttattgctatccttatattcacagtgcacaatgcaaacaaagacgcagataatcaatcatatgctgaaattgtgcaacgcagagttcttcttcaaaatgcatttgctgcagcctttgaatttgttggataccttctcaaaagatgcgcagagcttcatgatgttgcatcaagtatctacttgccagctattttggtcttcattgaatggctggcgtgccatccagattttgtggctagttctgagatggatgaaaagcaagccgatgcaagatctttcttctggagtcaatgcgtgccatttatgaataagctcattttgactggtctcgcacatgtcgatggtgataatgatgaaacttgcttttttgacatgggcacatatgaggagggtgaaactgggaacaggcttgcgttgtgggaggatgttgagttaagagggttttcgcctttggtacctgctcaaggtatcttggacttctccaccaagcaaggttttggaagtgatggaggtaccaaggagaaaaaagcacgtgtagaaaggattcttgctgcagggaaggcgctgttaaatttcgttcaaattgatcagctgcgaatatattttgatgcatcctcaaaaaagttccttatggcttcagaacctcctcctcctgcttcttctgttcctcttgttgtatcttccaatgcgcagacaacaaatcacatacaacaggaacctgaagtctccagtaaaattggttctgtcgcagaagatctaggtgtgcttcagtcaaaggcacaactctttcttgatggagatgatgatgaagaaatagttttcaagcctccagtttctgaaaagcttccgagagttacttcagaacagactagtaatgagttattacagccagtggtggtgtctgatgtcaattggtcaaatgatggtgcaccaccaccaatgacatttcagagcaatggaccggttctgactcccaatgtttatgttcaatctctcccaatctcttctcttggttgggcagccaatgctgggcaacatgtgattcttgatgttggtgcaaggtcaacatctgatatttttgagtctctgaaagcacctgatcataactgggtaagcactggtgcaccacttgttggctcactggatacagtccctatggcgagcttttccaatataatttcggatcagcgtacacctccatcgtcactcggttgtttcagtaacccagataatacagccatactccctgggcaagattcattcttattgagtgcattaaacaatgttaacataggtgcaagtggatttctggatcaaagagtgaatggtggactcagtggattacagtctgtgggaaatgtgcctcaggtatctgctcaagctactatgaatagtacaaatccaatgattggtcagtataaacatactgaagttaccatcccttctgccttctattcagttctgccgtcagtagtatcttctgatggtgtatcaaagaaaaatcctgtcagccgtcctggaagacatgttggccctcctccaggatttaacaatgcccctccaaagcgacaggatgattccattttagctggcaatggccagcatgttcagaccaatgacggcatctggttggatggctacaggtcatcactggattatgtcaataatcagcgttttgcacattcaaatgttaccactgccagcagtactttcaccactccctttccttttcctggaaaacaagctttcagcatgcatcctagaggtagcgatgaaaaacagtggcaggatttccaccttttgggcccacaaagcaacttccagaacttaattttcagcaagggaaccagcaaaatggtccactggcggaacaattaccagcacaatctgcatggtctggcaattaccttgtgtgactagcttgtaccatgaaggatttgctgagaatctgttgggagtaagtggcgaagattgacacttgaattcggccttgataagtacagccctgtcatgtaatgtttcttttggaagatgcttgtcttggaagcataacaagtgctacccttggaactgggtatggcaggtcttccaggctatgaaggggattttagatgatcccttccattgtctgatgagaatatgtacggagagttctttaacttctcagacccagggttttgacctaatgagtaatctgcaattctgcatacgggcagttactgagatgcgtcaggtaagtccgtggattggttgctgccgtggaaactgaagccttcacgaacgaatggatgaaattctgtttttggtggtactcttgtcgatcagagctatgaataaagttggtgatgactgcttcatgcttgtggatgttctttccagctatattgttcatgtggtacattgttactgcaaagtcattaaatacacttaaggataaatcattatgcagttgctatcatatgatgtgctatggtagcaacgtttcgtgttggtatttgtgtgtgaaccaaatgtattatcagcttgatgagctgatcttttaaaacgtattgacttgtaatatgttgtacagaacgtcttgtttgttttaataccgaatgtcgtgcttgtttt

SEQ ID NO: 8407 - DNA, 1949 bp, Oryza sativa
  ref <308>: DATABASE ACCESSION NUMBER: AK105755
  ref <309>: DATABASE ENTRY DATE: 2002-08-28
aactcggaggaggaaacgggaagagacccgcgagagaggcggcgccccgtttcgtccccaaaaccgatccattcattcgccaaccacgccgtccgccgcgtcgccggtagagaaggccgccgtgcgtgcgggagagaagggggaagcacaaaccgcgctcggggacgagagccgcgaggcgaaggtgtggggaggatcgggacgcggcgtcggcgtcggtctcacctccgggctacaagagcgagaggtagcagagggagagtcgtgaggtgcagccatgtcggcggcgcaagggatggcctacaagctccgcaccgacgcggcgcccacgggcgctggccgcagggctcggcgcagccactcctccgtggcggcgccttaccgcgcggctaggctggtacagggcggcgtgtccatcgagggcggtttggtcggcggatgccagctcaccgaggagcgcgtcgccgcacggccgccccgcgccgccgcgcgcgacgccgagccggtcaggccactttcgacgctccccgagagcagcattgggctgtacgacccctcgcgcgagcgcgactcgtgcggcgttggtttcgtcgccgagctgtcgggcgattacaagcgcgcgacggtcaatgacgccctcgagatgcttgagagaatggcgcaccgtggtgcctgcggctgtgagaagaacactggcgatggtgccggcatccttgtggctctaccgcataactttttcagagaggtgacaaaggatgctgggtttgagctaccgcagccaggcgagtatgctgtcggtatggtcttcctgccaatcgatgagaagcgccgtgagcggagcaaagctgagtttcagaaggtagcggaatcgctgggacatgtaatacttgggtggcgccgggttcccactgacaactcagacttaggtgaatctgcgctccagactgagccagttattgagcaggttttcctcaccaaaagttcaagttcggaggctgattttgagcagcagttgtatatcctgaggaggctctcgattctatctatccgtgcagctctgaatctccgtcgtggaggaaagagggacttctacatgtgttctctctcctcaaggactattgtctacaagggccagcttaagccatgccaacttaaggggtactactatgcagatctaggtcatgaaaacttcacaagttatatggctctggttcactcaaggttctccacgaacaccttccccagctgggaccgtgcacagccgatgcgtgtattaggtcataatggagagatcaataccctcaaagggaacaagaattggatgaaagcacgagaaggtctcttagagtgtgagaagcttggcctaacaaaggatcagttttcaaaaattctaccaattgtggatgctacctcgtctgattcaggtgctttcgatggtgttcttgaacttcttatccgtggtggaagaagcctgccagaagctgtgatgatgatgatacctgaggcatggcagaacgatgtgaacatggaacctgagaagaaagctctctatgagttcttgtctgcccttatggagccttgggatggacctgctctaatatcttttactgatggccgttaccttggggccaccctggatcgcaatgggttgaggcctggtcgattttatgtgacacacagtggacgtgtagtcatgggaagtgaagttggtgttgttgatgttccttccaaagatgtattgagaaagggtagactaaaccctggaatgatgctgttggttgattttgagaaccatactgtagtggatgatgaagcattgaaggcacagtactcgaaagctcacccatatggggagtggctcaagagacaaaaaatatacctcaaagacattgtagaatctgtgccagaaactgagagagttgctcctggaatttctggttcactcacac

SEQ ID NO: 8408 - DNA, 1959 bp, Oryza sativa
  ref <308>: DATABASE ACCESSION NUMBER: AK105756
  ref <309>: DATABASE ENTRY DATE: 2002-08-28
agctggagaagacgagaacgcaaaaccaatcagtcgtcgtcgaacgcggcgggcggaagaggcgaatcgcgtaacgatttttgttaaatttgtaaccggccatggatccgaggcgcagccactgggagagctcgtcggaggacgtgacgaggccgctgctcccgctgcacgacgacgacggcgcggcgggccggcgctcctgcgccgcgctgaggtcgctgctcgccaacaagtacctggcggtcgcgtcgggccccgtggcgtgcgcgctgatctgcggcctcgtcgacctcggcggccaccgcgccgcgcgcaacatgctcggggtgctcgcctgggtgttcctgtggtggattaccgacgccgtgccgctcgccgtcgcgtccatggcgccgctgttcctcttccccgtgttcggcatctcctcctccgacgccgtcgccaaggcctacatggacgacgtcatctccctcgtcctcggcagcttcatcctcgcgctcgccatcgagcactacaacatccaccgccgcctcgctctcaacatcacgtcgctgttctgcggcgacccggtgaagccgccgctgctgctgctgggaatctgcggcaccaccatgttcatcagcatgtggatccacaacacaccgtgcaccgtgatgatgatgccggtggcgacggggatcctgcagcggttcccgcgcgtcgacggggcgtcgtcctcggcgagcagcgccgcggacgcgcgggaggtgcagcggttctccaaggcggtggtgctcggcgtcgtgtacgcgtcggcgatcggcgggatggcgacgctgacgggcaccggcgtgaacatcatcctggtggggatgtggtccacctacttcccggagcagccgcccatcaccttcagctcgtggatgtcgttcgggctcccattggcgctcgtcctcttcgtcgcgctctgggccacgctctgcgtcctgtactgctccaagaacaccgggagggcgctctcagcttacctggacaggagccatctcaggagggagctcagcttgcttggtcctatggcttttgcagagaagatggttctagccgtttttgggggtttgattgtcctatggatgacgaggagcctgacagatgatattcctgggtggggatcactcttccacggcgaagttggggatggaactgtcactatcatgatggcgacgctgctgttcataatcccgagcggcaagaacgacggcgagaagctcatggactggggcaagtgccggaggctgcagtggaacatcatcctcctcctcggcgccggcttcgccatcgccgacggcttcagggcgagcggcctgaccgacatcctctccgaggggctcggcttcctccgcggcgcgccggcgctggccatcgcgcccgtggcgtgcgtcttcagcggcgccatcaccgagttcacctccgacgacgcgaccgccacgctggtgctcccgctgctcgccgagctgggcaagtccatcggcgtgcacccgctcctcctcatggtccccggcgccgtcggcgcgcagctgtcctacctgctgcccaccggctcgccgggcaacgtcgtcggcttcagcacgggctacatcagcatcaaggacatggtgatcgccggaacgcccctgaaaattgtcggggttgcagctctcaccatcctactgccaacgttaggatccgtcgtttttggcatggatcagaagctatagaaactttagtcaaagttcaattggatgttttttgaatatttcaatttgtaggctgtaggttattacgtggataatatagtagtaagttgcataggttgtattgttgtacagcgtgtagtcaatcccattgtcttgcctcatgaaaaacatggggtcatattctttgagtcaatataggttgtatttgtattgagttgttccatgttaatatatctttcgacatcgt

SEQ ID NO: 8409 - DNA, 1532 bp, Oryza sativa
  ref <308>: DATABASE ACCESSION NUMBER: AK105757
  ref <309>: DATABASE ENTRY DATE: 2002-08-28
aatttcttccttcccctttccttttcgctcgcggcgcgaggcgatcagatggcggcgtcgtcgtcgtcgtcgtcgtccgccggccgccgcctcgccggaaacctaagcctgaggcctggcgtggcgtcgattatccctgggctgccggacgacgtggccgccgtcatcctctgcctgctcacgttccccgaccagtcccgactccgggccacctcccgcgcgtggcggctcctcctctcggcggccacgctccttccgctccgccgcagcctgcggcttccgcggcgccacctcctgtgcctcttccccaccgacccctccctcgcctccccgatcctgctcgaccccgccgcgcccaccgcctggtggtccctcccgccgatcccgtgctcgccgcagcactacggcctcgccaacttcgccgcggtcgcggtcggcggccaaatctacgtcctcggcggctcccgcttcgacgcccggagctatcccctcgacaacccctccccctccgccgccgcctaccggctcgacctcgccctctcccgccaccgctgggagcgcctccccgacatgcgcgtcccgcgagggagcttcgcctgcgcccccgcgcccagcggcggagtcatcgtggccggaggtggctccaggcacccgacgttcccctcctacggcagccgcaccagcggcgtcgagttgtacgacgccgcagcgcgcgcgtggcgcgtcaccgcggcgatgcccagggaccgggccgggtgcgtggggttcgtcgcgcacggggcgggggatgggagggaggatgagttctgggtgatgggcgggtacgacggctacaccacggtggggggagtggtgcctagtgacgtatactgccgggacgcggtggcgctcgggctgtggagcggcaagtggagggagattggggacatgtgggaggaatgggagagagagcgccttgggccggtggctgtcatttctgctgaagatggaagggtcacagaggtgttcatgctcgatggtcatgatatcttcaggtataacttctcttcgaacagttggtcaaaggaagctacattgaggagaaagatcccaagtactcaatcatgtggtctcatagcaatgaatggcgaactttatgttcttacatctgcaaaactccctgtcgaaacctcaagtccatggaagcagtcgaagaagaggttggcgctggagtttcaagtttacaaccctgcagcaaagatgtggagggtgctcaccacacatccccctgttaacgtaccaattgatttcaggactgcagctctctgtacggttgagctgtaggtttcttgatgatcaccattcactgtacagattaaggtagttgatcagacatttgattgcaaatttagatgtaaatgagaacaccatccaatgatgtcagcaaataggcgaagattgttgcgctcgtgagtgctttgcattggtagcttgtgtgtatatgtacaggatgggacattgcacatgatctaataaaaaggacggtacattgc

SEQ ID NO: 8410 - DNA, 1944 bp, Oryza sativa
  ref <308>: DATABASE ACCESSION NUMBER: AK105758
  ref <309>: DATABASE ENTRY DATE: 2002-08-28
gcacgtacgctttcccattctcttttgcttaaaccgagctagagctttgctagctcagttcgtccatgagagcagcagcggcgggtcggcagcctcgcttgtagctagcgataatgaaggtctacatcacgtcggcggcgccgctggctggcgaggcaacgaaggcgatggcgtcgccgccgtcgccgccgccgcaccagcaccagcaagcggcaacaaggcgcgggtgccggtcggctgtcgtgacggggctcctcgccggcgtgctcctcttccgcgccgcgctcctcaccatcgaggccggcgcatccctctgcccttccaccaccggatgcttggactggagggccggtctcggggactggctgtacggcggcagcggcgacgcgatggaggaattcatgaaggagtggaggagaggtcgcagggaggccagcctgttggatcccgtggtggtggaggcggcaccggattcgctggacggcctcatggcggagatggacaccatgctggcgtcctacgatcggctggacatggaagccgtggtgctcaagattatggccatgctgctgaaaatggatcggaaggttaagtcgtccaggatcagagccctgttcaaccggcacctggcctcgctgggcatcccaaagagcatgcactgcctcacactgcggcttgccgaggagttcgcggtgaactccgcggcccgctcgccggtgccgctgccggagcacgcgcctcgcctggccgacgcctcgtacctccacgtcaccatcgtgacagacaacgtgctcgccgccgccgtcgccgtggcttccgccgtcaggagctcggccgagccagcgaggctggtgttccacgtcgtcaccgacaagaagagctacgtgccgatgcactcgtggttcgcgctgcacccggtttccccggcggtggtcgaggtcaagggcctccaccagttcgactggcgcgacggcggtgccatcgcctctgtcatgaggacgatcgaggaggttcagaggagctcaatggagtatcaccagtgtgacgcgtcagttgtcagggaatacaggaggctcgaagcctccaagccaagcacgttctctcttctcaactacctcaagatccacctcccagagttcttcccggagctcgggagggtgatacttcttgacgacgacgtcgtggtgcgaaaggacctgaccgggctgtgggagcagcacctcggcgagaacatcataggcgccgtcggcgggcacaaccccggcgaagacggggtcgtctgcatcgagaagacgctcggtgatcacctgaatttcactgaccccgaagtgtcaaacgtactcgaaagtgcgagatgcgcgtggtcgtggggtgtcaacgtcgtcaacctcgacgcatggcgaagaacaaatgtcaccgacacgtaccagctctggctagagaagaaccgggagtcgggattcaggctgtggaagatgggctcgctgccgccggcgctgatagcgttcgacggccgggtgcaggcggtggagccgcggtggcatctgcggggcctcggctggcacacgccggacggcgagcagctgcagcgctcagccgtgctgcatttcagcgggccgaggaagccctggctggaggtcgcgttcccggagctccgggaactatggctcggccacctcaacagatcagacagctttctacaaggatgcggcgtagtcgagtaacacagtaaacgacacagcagcaattgagctgggaaagagtatataagtatagacgatttggttcgagatctccatgtggcgcagagctgggttcatgtcttcatgaggagagggaagtaggtgctgccttcagtctctcctcgctctggctctacgtgcaacatgttcagtgacacagtgtagaattgtatagtgacgatgtatataagggctgttatct

SEQ ID NO: 8411 - DNA, 2027 bp, Oryza sativa
  ref <308>: DATABASE ACCESSION NUMBER: AK105759
  ref <309>: DATABASE ENTRY DATE: 2002-08-28
gtgcttgtgttggtggggggagccgcacttgaggtggtcagggatgagtaaggaggaagtcctgaagattcagacttgtgtgctgaaagtgaacatccactgtgatgggtgccagaagaaggtcaagaagatcctccacaagattgaaggtgtgtaccagactagcattgacgctgagcaggggaaggtgacggtgtccggcctggtggatccggccaccattatcaagaagctcaacaaggccggcaagccggcggagctatggggttccaaggtcggggtggcggcggtgaacaaccagtttcagaagctccaccttgacggcggcggcggcaagggccagcccaaggatggcggcggcaagggccagcccaaggacgccggcggcaagggccagaaggggggcggcggcggcggcggtggtggcaacggtggaggcggcagcaaagacgtgaagatgatgatgccgccgcagatgccgcagccgacgccgcagcagattcagcagctgcagcagcagctgcagatgaaggggctgaagttgccgcagttcatggacgccgccaagatggcgccgttcgcggcggccgcgccgatcaaggaccccaagtccgtcaagttcaaccttcctcctcccgaggatgacttcggcgacgatggcagcgagtttgatgacgagtccgacgagttcgatgacgaggacgatttcgacgacgacggcctcgacgacgactacttcgacgatcccaagatgatgaagcagatggccatgccgccaccaaacgccggtggtggcggcgacaagaagggtggcaacaacggcggcggcgccggcaatggcggcaagaagggcggcggtggcaacgagatccccgtgcagatcaaggggaacgccaacaacgccgctggcggcggcaagaaagactccggtgccaagcagaaccaaggtggcggcggcaagaacggcggcgggcagccgaacaacgccaaggggggagggggcgccccgaacggcggcggcaaccaccctgctcaggggaagaagggcggcggtggccagggcggcggtgtcggtgggccgatgggcggcatgccggcgcagcagcaggccatgatgatgaggccgaacatgatgggcggcagtgccggtttccccgggatgggccagatgggcggcgggcccatgaccatgcccatgggccaccacccccacatgggcgccggcgccgtgcagggcatgccaccggcagcgttctaccagggcggcggcggcatgccgtccgggcccgagatgctgcaggccgcggcggcggccgggaaccccatggcccagcagcagtacatggccatgatgcagcagcagcagcagcagcagcagcagatgatgatgaacggccacggccaccatggtcaccacggtcaccatggccacggcggcggcgctgctccggcggggtacccggcgatggggtacgggtacggccggccgccgatgccgtacccgatgcactacccaatgcagccgcacccgcatgccgatccctacaactacttcagcgacgagaacccgaacagctgctcggtgatgtgaggtctccagtgtccggattgctttcttcctcctcctgttgctgctgctcattttgttgttcaagaaagtgaaccaaccaggagtctgaggaagaagctcatcaggtcacaggtgatcgccatcatgatggttgagagatgctctcaggatcagtcaaccagtatacaccatgggaaatgagtcccatctagatcgctcttctttttttcttctttttcttttttcttttttacttagctcgttttcacctttcttttaaaggagaactcaacttccttgaaggcgaaggtaggtatagtaattatctatagtttttcataagagatgatgatgatgatggtgctttataattcgagaaggagggtggtggtggtggtttccttcttgctccataaggtgttgtggtgatgcatggtagatgaacaatgtgcaaagc

SEQ ID NO: 8412 - DNA, 1994 bp, Oryza sativa
  ref <308>: DATABASE ACCESSION NUMBER: AK105760
  ref <309>: DATABASE ENTRY DATE: 2002-08-28
gatgagaaagtagaagataaaggtactgctgaagtactggctagggagacaggtgatagtataactgcacctggagcactagatgagaaaacagaaaaggaagctactgctgaagcactagctgacaagacgacagaaggtgaaattacagctgaagtacaggttgaggagactactacaactgagaaaattgtagaggataaagaactagctgaggagacgacagaaggtgaaactacagctgaagtacaggttgcggagactacttcaactgagaaaattgtagaggataaagaactagctgaggagacaacagaaggtgaagctacagctgaagtacacattgaagaaacttcaacaactgaaagaactgtagaggataaagtggtacctgaggagacaacggaaggtgaagctactgctgaagtactcgaggaatgtacagccattgagaaaattgtagaggataataccatagctgaggagattacagaaggtgaaactgtagctgaagtacatgttgaggtagctacagcaattgataaagctgtagaggaaaacacactagctgaggagacagctaaaggtgaaactacacctgaagtacacgttgaggaaactacaacagcagaggaatctgtgggggacaaagcagtagatgagacaacaaaaggtgaaactacagctgaagtatatgctgaagaatcaaccgagaaaactgtagaggataccacagttgaggcaccagatgagaaaactaaaacagccaatgatcctgtagaggatgccaccgttgaagagccagataagaaaaccgcagccaatgatcctgtagaggatgccaccgttgaagagccagataagaaaaccgcagccaatgatcctgtagaggatgccaccgttgaagagccagataagaaaaccgcagccaatgatcctgcagaggatgccacagtcgaagagccagataagaaaaccgcagccaatgatcatgtagaggatgctacccttgaagagccagataagaaaactgcagccaatgatcatgtagaggatgtgactgttgaagagccagataagaaaaccgcagccaatgatcctgtagaggaagtcatccctgaagagacagataagaacaccacaaccaatgatccagtagaggatgtgactattgaagagccagatatgaaaaccgaagccaatgatcctgtagaggaagccaccgttgaagagccagctgtggaagctgggacaattgaagagattgctacggctgaagcacgagatgagaaaaccatgataaccgaggaaactgcacaggatcccatggttgaagatgagaaaaccatgacaaccgaggaaaccgtacaggagcccatggttgaagatgagaaaaccgtgacaacggaggaaactgtacaggatcccatggttgtagatgacaaaaccatgacaaccgagaaaactgtacaggattccatggttgaagaaggtggtacgaatatcgcagctgctgaggaaactgtagagcatgctgctgctactgctgaggctttggctggacaagcaagttcaaccgagcagaacgggtagcataagctggattcttgtaggttttggatgatattgcggcagtcggctcaactgattcatccaatctggatgtcgtgtggaatcaactctagcaacatagcgatattagtttctagtaactacggcgtatttgctgccttctatataaaccttacatgtagttgtcttgggagcagcagcagtgtgtcacgaatagaagagtttcttcagaaacggtggtgcgacagccagtggaccagctactggattagcatccgaattaagccatgttctctcctactacattttaaggcctttgggccaatctaccggggactcatgattcttgtaccaatcttccattttgtaaactggctgtgttctgtaggttatttctcctttattccatcatagtagctcat

SEQ ID NO: 8413 - DNA, 1383 bp, Oryza sativa
  ref <308>: DATABASE ACCESSION NUMBER: AK105761
  ref <309>: DATABASE ENTRY DATE: 2002-08-28
actaatctctccacgtcactcccagctgagcagcgtgagcccgtgacgagaatttctccacctacttcgagctgagcctgatcgattcgcgagatttccgttcatggcggcgaagtctttgagggagatcaggagagcggcggcggcggggattgggagtaggagatgcttctccggcgacgcggcggcggcggcggcggcggcggcgggggtggcggaggggaaggtgggaggaggagcggggaaggaggtgaacctgttcacggccatcaaccaggcgctccacatcgccctcgacaccgacccgcgctcttatgtcttcggggaagatgtgggtttcggtggtgtcttccgctgcacaacagggctcgctgatcggtttggcaggaatagagttttcaatacgccgttgtgtgaacagggaattgctggatttgccgttggtctagcagcaatgggtaatagagctattgctgagatccagttcgcagattatatctttccagcttttgatcagattgttaatgaagcagctaaatttagataccggagtggaaatgaatttaactgtggaggattaacgattcgatcaccttatggcgctgtcggtcatggtggtcactaccattcacagtcaccagaggctttcttttgtcatgttcctggactcaaggtaatcatacctcgaagtccacgtgaagccaagggattgttgttggcaagcattagagacccaaatccagtcgtattttttgagccaaagtggttgtaccgtttggctgttgaagaagttccagaggaggattatatgctgcccttgtctgaggcagaggtgattcgtaaaggaagtgatataacactaattggttggggagctcaacttgcagtactggaagaagcatgcgaagatgcagcaaaggatggaatatcttgtgagctcatagatctaagaacactgattccatgggacaaagaaacagtagaggcctctgtcagcaagacaggaaaacttcttgttagccatgaggctccaatcaccggagggtttggtgcagaaattgccgcatccatcaccgagcgctgcttccaaaggttagaagcgcccgtcgcaagagtatgcggcctggacactcctttccctcttgtttatgaaacattttacatgcccacaaagaacaaggtcctggacgctatcaaagcaactgtaaattactgaggtgctggagcaagctacctatgcgttgttccttgacagtatagacaaaaattatgtgcaccttattgctggttgtagcctgaatatgcatctccataaaagcattgtatttgataatatagaattatagatcaataaagccgtgaagatgcgaattattgttctgc

SEQ ID NO: 8414 - DNA, 2494 bp, Oryza sativa
  ref <308>: DATABASE ACCESSION NUMBER: AK105762
  ref <309>: DATABASE ENTRY DATE: 2002-08-28
actcgctcgccagttcgtcgtcctcttcgccgagctcgcgagctctcgcactctgtctccatccccgcatcgcatcgcctcgccgctgctgatctcgtcgcggtcgccggaggggagctacgaggattgcctaacccagaagttggtgcttcgagatagccatggccaccggagtggcaccagcgccgctcccacatgtcagggtccgtgatggtggcatcggcttcacgaggagcgtcgactttgctaagatcttgtcggttcctgctactctaagggtgggctcatcaagaggcagggtgcttgtggccaagagctcaagtaccggttctgataccatggagctcgagccatcttcagaaggaagcccacttttagttcccaggcaaaagtattgtgaatctatatatgagacaaggaggagaaaaacccgcactgtgatggttgggaatgtgccacttggcagtgatcatcccattaggattcagactatgaccacctcggataccaaggatgttgctaaaaccgtagaggaggttatgaggatagcagataaaggggctgattttgttagaataacagtccagggtagaaaggaagctgatgcctgctttgagattaagaacactcttgttcagaagaattacaacatccccctagtggctgatattcattttgccccgacagttgctttaagagtggctgaatgctttgacaaaattcgtgtcaacccagggaattttgctgatcgccgtgcccaatttgagcagcttgaatatactgaagatgattatcaaaaagagcttgagcatatcgagaaggtcttctccccgttggttgagaaatgcaagcagtatggaagagcaatgcgtataggaacaaatcatggaagtctgtctgaccgcataatgagttactatggtgattctccacgcggaatggttgagtctgctttggaatttgccaggatctgtcggaagctggacttccataactttgtgttttcaatgaaagcaagtaaccctgttatcatggtccaagcatatcacttgcttgtagcagaaatgtataacctagggtgggattatcctttgcacttgggagttacagaagctggagagggtgaagatgggaggatgaagtctgccattggcattggaacacttctgatggatggcttgggcgatacaatccgtgtctccctcacggaaccacctgaagaagagattgatccttgccggagattggcaaatcttggcacacatgccgcagaccttcaaataggagtggctccttttgaagaaaagcacaggcgctattttgatttccagcgtagaagtggtcagttgcctttacaaaaggagggtgaggaagtagactacagaggggtcttgcaccgtgatggctctgttttgatgtcagtttccttggatcagttgaaggctcctgagctcctttataggtctcttgctgcaaagcttgtggttggcatgcctttcaaggatctggcaactgtagattctattcttttgagggagctcccacctgtagaagatgctcaagctaggcttgcactcaaaagattagttgacatcagcatgggtgtgttgactcccttatcagagcaactgacaaagccactcccacatgcaattgctcttgtcaatgtggatgaactgtcaagcggtgcacacaaacttttgccagaaggcactagattggctgtcacccttcgtggagatgaatcatatgaacagctagatcttcttaagggtgttgatgatataacaatgttactgcacagtgttccttatggtgaagagaagactggcagagtacacgctgctaggaggttatttgagtacttagaaaccaacggtttgaacttccctgtaatccatcacatagaattccccaaaagcgtgaacagagatgaccttgttattggtgctggggcaaatgttggtgctcttctagttgatggtcttggtgatggtgtacttcttgaagctgctgaccaggaatttgagtttttgagggacacatccttcaacttgttacagggctgcaggatgcgcaacacaaaaacggaatatgtctcttgtccttcttgtgggcggacactctttgacctccaagaagtcagtgctcagattagagagaagacctctcatctgccaggcgtctctattgctatcatgggttgcattgtcaatgggccaggggagatggccgatgctgatttcggatacgttggaggtgctcctgggaagatcgacctttatgttggcaagaccgtcgtgcaacggggcattgcaatggagggggccactgacgccttgattcagttaatcaaggaccatggccgttgggtggatcctcctgttgaggagtaggccgtagcatgtagttcatatatgtactcctccataaacaatgttgtagctgaggcacattgtattgtatccacggagtacataaatacacgttctgt

SEQ ID NO: 8415 - DNA, 2635 bp, Oryza sativa
  ref <308>: DATABASE ACCESSION NUMBER: AK105763
  ref <309>: DATABASE ENTRY DATE: 2002-08-28
ttaatcttttggttgtttctacctttgctctgatcgatctatgtctgcttcctggacttttcagtctggtaaattttttccatcagtcagaaattatctggctacaacctgctgcttcttgatgctcaactaccagagaattaacatcactatctcagatggtctagcccgtcagagttgaagtacagtctggatcaaaattttcctgaaatccagacagtaagttcatggacagggcggacacatcgggttttgtcagtggtggactcatcggtacttcgctgctgctgattttcttccacttcgtctactctccagtgcacatatagaacaagatcaagaagcacctgatctatctttgtctcgttgtttcttccaccttctgtacattgcaggattacttagcctagatgaataacggttttccggaaatcattcgccgcggaaacccgcatctgatggataattccgcagttgtgataatgggacactctgtggcaagctacaccatggacagccatggacggagctcttcttgcctagaccacctgggttcatcaatggagaacagtagtatccatggcaagagaggtaacaaccggaggtcgggtcatggtgtgtctgcgcaagatgacggctgcgggttggttcttggattgggtccatcgccggagatgggctcctccgcggcgcgcaggtcgaaagcgccggcgccggcgacattgttcagccagaggagcttctccttcactgagccaggggtgctcagccttgggcttcatcggggagatcatggtggcgcgacgattcagcatctggaagaagcgcctgctgggaacatcatctccttcgccgccgccgtcgatgagggctcgacgtcggcgaggaggagctccggtgggtacatgccgtcgctgctcttcgcgcctcggcccaacgcgtcggctcctgaagaggctcgtcatgatgtcgtggcggatcacacggacaacaccgtgagtggtggtggcgcgcgccatggccatgcgcggcgtcgcgtcgttcgtcagctcagccctgagcctgagcctgagccttcggcgaccatgacggagacctcgttcggtgtgagctccgacgtggtcacgacggtgaccaatcctgtgacgacgcagccggcggcggcggcggcgcagtcgcaacgccggcatccgaagaagtgcaggttcaaggggtgctccaaaggagcgcgaggcgcgtcggggctgtgcatcgcccatggcggcgggcagaggtgccagaagcccgggtgccacaagggcgccgagagccgcacggcctactgcaaggcgcatggcggtggccgccggtgcatgcagctcggctgcaccaagagcgccgaggggaagacggatcactgcatcgcccacggcggcggccgccggtgcgggcaccagggctgcccgaaggccgcgcgggggaagtccgggcggtgcatcaagcatggcggagggaagaggtgttcggtcgagggctgcatccggagcgcggaggggagggtcgggctctgcatctcccacggcggcgggcggcggtgccagtacccggactgccgaaagggcgcgcaggggagcacgctgtactgcaaggcgcacggcggcggcaagcggtgcgtgttcgacgggtgcctcaagggcgcggaggggagcacgccgctgtgcaaggcgcacggcggcgggaagcggtgcatgttcgagggcggcgggctctgccccaagagcgtccacggcggcaccagcttctgcgtggcgcacggcggcgggaagcggtgcacggtgcccgggtgcggcaagagcgcccgcggccgcacggactgctgcgtcaagcacggcggcggcaagcggtgcagggtcgacggctgcgccaagagcgcgcaggggagcacggagttctgcaaggcccacggcggcggcaagcgctgcacctgggccaccggctgcgagaagttcgcccgcgggcggagcggcctctgcgccgcgcacggcacgctcatggcctcacagcagcgtcgcgccggcggcggcgggagcatgatcggtccagggctcttccacggcctcgtcggcgccatgaacaacggctactcgtcctccggcgtcagcacggcgtcggagtactccgacgcctgcgacggcgcggcgaggaggcaagagctgatacctcctcaggtgctggtcccgaactccatgaagtcgtcgtgctcgtcggcgccgccgccgtcgatgggcaggggcagagagggaggagggttcgtcgtccccgaggggagggtgcacggtggcggcctcctgtcgttgctcggcgggagcttcaggaacgtcgacgtcgacgagctctgaagcagcagcgctcgtgtgagaaaatcagtgtcagtttctgcatctcaaaaaacggaggaaaaaaaacgaagagaaaaaaaagaaagagattctatagctcatatagatgttaggttggtacgaaacttcatagattgttttgatgttattatcgtgtcaagattcaagtctcagggcatgaacttgtcaggggatttcaaatgttttgagttcgttgtgaataaaatgtagtagacatgaacttgtcaggggatttc

SEQ ID NO: 8416 - DNA, 1635 bp, Oryza sativa
  ref <308>: DATABASE ACCESSION NUMBER: AK105764
  ref <309>: DATABASE ENTRY DATE: 2002-08-28
gcttcgtgtacataacctaacctactcctcgtcttcttcctccaaatcaaattccaattccaattccattttctcgatcaaacacagcacacaggattggacgccgagacgaggaggaagaagaagcgagcgaagcttgtgttggatcggagtggggaggagatgttgagggcggtggcgaggtgctgcgggcactggccgccgggggcggcggcggcggacgggatgctgtggcagacggagctgaggccgcacgcggcgggggagttctcgatggcggcgacgcaggcgaacctggccatggaggaccaggcgcaggtgctcgcctcccccgccgccacgctcgtcggcgtgtatgacgggcacggcggcgccgacgcctcccgcttcctccgctcccgcctcttcccccatgtccaacgattcgagaaggagcaaggggggatgagcacggaggtgatccgtagggcgttcggcgcggcggaggaggagttcctgcagcaggtgaggcaggcatggcggcagcggccgaagatggcggccgtgggctcctgctgcctgctcggggctatctccggagacacgctctacgtggccaacctcggcgactcccgcgccgtgctcggccgccgcgtggtcgggggcggggtggccgtcgccgagcggctcaccgacgagcataacgcggcctccgaggaggtccggcgggagctcaccgcgctcaacccggacgatgcgcagatcgtggtgcacgccaggggtgcgtggagggtgaaggggatcattcaggtatcgagaaccattggtgacgtttacttgaagaaacaagagtatagcatggatcccgtgtttcgtaacgttggtccccctattccttgaagcggccagctcttagcgcagaaccatcgattcaagttcgcaagctcaaaccaaatgatctgttcctgatatttgcttcagatggtctctgggagcatctcagtgacgacgctgcggtgcagattgtcttcaagaatccaaggacgggtatagcaaacagattggtgaaggccgctttaaaggaagccacgaggaagagggaggtcagcttccgtgatctgaagacgatagagaagggagtgaggcgccatttccacgacgacatcagcgtcatcgtcgtctaccttgaccgccaccgcggtcgccgtcacacaagggccgtcgactcgagcagcaactgcaccaacgcccccgtcgacatctactcctccaactccggccaatccgtggagactcttcaagcccatcggggctccggttggtagaagaagactgggacgcctcccttgaaaagatcaagacggtctcttgttaattagtaaaaacatgtagagccgctgatcagtaacactagctgcagtggcatcatcggaagaaacgcgggaatgtacataaattagtagcggcgcgtggcattttgatgtggggaagaatatttgattttttttccttcctttttgggctaatttaattgcagagattactttttgctgttcttctttggtttatatttctgctgaaccagcagttaactgttgactgggaattaccgcatttatgtgcggcaagataatatagtagtggtatagtggtatt

SEQ ID NO: 8417 - DNA, 2001 bp, Oryza sativa
  ref <308>: DATABASE ACCESSION NUMBER: AK105765
  ref <309>: DATABASE ENTRY DATE: 2002-08-28
atcacagcatccatcgccgccggccaccaccaccaccaccgccgccgccgtcttactctctctgtctcgagctcgagcttgttgttgttgatatggcgatggtgttgccggagacggcggcggaggggaaggcgctgacggacgcgtgggactacaaggggaggccggcggggagggcggccaccggcgggtggggctgcgcggcgatgatcctcggggcgatgatcctccgaccagttcgacgagtccgacgtcgacggcgagaggaagaagatgatgcgcttcttcaactggttctacttcttcgtcagcctcggcgcgctgctcgccgtcaccgtgctggtgtacgtgcaggacaacgtcggacgccggtgggggtacggcatctgcgccgccggcatcctcgccggcctcgccgtgttcctctccgggaccaggaggtacaggttcaagaagctggtggggagccccctcacccaggtcgccgccgtcaccgccgccgcctggagcaagaggtcgctgccgctgccgtccgacccagacatgctctacgacgtcgacgacgccgccgccgccggccatgacgtcaagggcaagcagaggatgccacacagcaaggagtgccggttcctggaccatgcggcgatcatcgacaggtcggcggcggagtcgccggcgacggcgagcaagtggaggctgtgcacgaggacggacgtggaggaggtgaagcaggtggtgcggatgctccccatctgggcgaccaccatcatgttctggaccatccacgcccagatgaccaccttcgccgtcgcgcaggccgagctcatggaccgccgcctcgccggcggcttcctcatcccggcgggctccctcaccgtcttcctcatcgcctccatcctcctcaccgtccccttctacgaccgcctcgtcgtccccgtcgcgcgccgcgccacggccaacccgcacggcctcaccccgctccagcgcgtcttcgtgggcctctccctctccatcgccggcatggccgtcgccgcggccgtcgagcgccaccgcgccaccgcctccgcctccgccgccgccgccgcgcccacggtgttcctcctcatgccgcagttcctcctcgtcggcgccggcgaggcgttcacctacatgggccagctcggcttcttcctccgcgagtgccccaagggggtgaagaccatgagcacgggcctcttcctcagcacctgcgccatcggcttcttcttcagcacgctgctcgtcaccatcgtccacaaggtcaccggccatggcgcccgcggcggcggctggctcgccgacaacctcgacgacggcaggctcgactacttctactggctgctcgccgtcatcagcgccatcaacctcgtcctcttcaccgtcgccgccagggggtacgtctacaaggagaagcgcctcgccgacgccggcatcgagctcgccgacgaggagaccatcgccgtcggccactaatagtgaccgatcgatgcgtcagcatgacatacgcaagctagctaccagttagctgcacgcgtcgtgtatgtacgtcgtccttgtaacaactttggttttttcttttcttgtattttgaatttttcttcttcttcttcttcttcttcttcttcttcttcttcttcttcttcgtgtattgtattcgacgtatttcgccgggtataatttgggtgtattctcatcgcacgtataattaattaattaaccaactacgtaataactacgtggagttaattaatgtgtacgtacgtggggtgtatgtagaaggaagatatatacgtacgtagggaagggggagatttgtacggcaatgtataatttgccacaaagtgtattactgatgtatatgtttatacgtcttttatactgatagtgtgcagggcaggaggaaattcctgcatatgcgaggtgcgggcgcacctctcaatctgatcaataaattaaacacaaaaaagtttttgttcatatgag

SEQ ID NO: 8418 - DNA, 2146 bp, Oryza sativa
  ref <308>: DATABASE ACCESSION NUMBER: AK105766
  ref <309>: DATABASE ENTRY DATE: 2002-08-28
ctgaatactagatatgacccaaaaataacaggggtcaaggtcggccagtgagacgatgggggataagcttcatcgtcgagagggaaacagcccggatcaccagctaaggcccctaaatgaccgctcagtgataaaggaggtgggggtgcaaagacagccaggaggtttgcctagaagcagccaccctttaaagagtgcgtaatagctcactgatcgagcgcccttgcgctgaagatgaacggggctaagcgatctgccgaagctgtgggatgtcaaaatgcatcggtaggggagcgttccgccttagagggaagcaaccgcgaaagcgggggtcgacgaagcggaagcgagaatgtcggcttgagtaacgaaaacattggtgagaatccaatgccccgaaaacccaaggtttcctccgcaaggttcgtccacggagggtgagtcagggcctaagatcaggccgaaaggcgtagtcgatggacaacaggtcaatattcctgtactaccccttgttggtacggagggacggaggaggctaggttagccgaaagatggttataggtttaaggacacaaggtgaccctgctttttcagggtaagaaggggtagagaaaatgcctcgagccgaggtccgagtaccaagcgctgcagcgctgaagtatgagccccgtggactagccattgcttctccacgaggctcataccaggcgctacggcgctgaagtatgtaacccatgccatactcccaggaaaagctcgaacgaccttcaacaaaggggtacctgtacccgaaaccgacacaggtgggtaggtagagaatacctaggggcgcgagacaactctctctaaggaactcggcaaaatagccccgtaacttcgggagaaggggtgccccctcgcaaaagggggtcgcagtgaccaggcccgggcgactgtttaccaaaaacacaggtctccgcaaagtcgtaagaccatgtatgggggctgacgcctgcccagtgccggaaggtcaaggaagttggtgaactgatgacagggaagccggcgaccgaagccccggtgaacggcggccgtaactataacggtcctaaggtagcgaaattccttgtcgggtaagttccgacccgcacgaaaggcgtaacgatctgggcactgtctcggagagagactcggtgaaatagacatgtctgtgaagatgcggactacctgcacctggacagaaagaccctatgaagctttactgttccctgggattggctttgggcctttcctgcgcagcttaggtggaaggcgaagaaggcccccttccgggggggcccgagccatcagtgagataccactctggaagagctcggattctaaccttgtgtcagacccgcgggccaagggacagtctcaggtagacagtttctatggggcgtaggcctcccaaaaggtaacggaggcgtgcaaaggtttcctcgggccagacggacattggtcctcgagtgcaaaggcagaagggagcttgactgcaagactcacccgtcgagcagagacgaaagtcggccttagtgatccgacggtgccgagtggaagggccgtcgctcaacggataaaagttactctagggataacaggctgatcttccccaagagtccacatcgacgggaaggtttggcacctcgatgtcggctcttcgccacctggagctgtaggtggttccaagggttgggctgttcgcccattaatgcggtacgtgagctgggttcagaacgtcgtgagacagttcggtccatatccggtgtgggcgttagagcattgagaggacctttccctagtacgagaggaccgggaaggacgcacctctggtgtaccagttatcgtgcctacggtaaacgctgggtagccaagtgcggagaggataactgctgaaagcatataagtagtaagcccaccccaagatgagtgctctctcctccgacttccctagagcctccggtagcacagccgagacagcgacgggttctccacccatacggggatggagcgacagaagcatggaaataggataaggtagcggcgagacgagccgtttaaataggtgtcaagtggaagtgcagtgatgtatgcagctgaggcatcctaacgaacgaacgatctgaac

SEQ ID NO: 8419 - DNA, 2037 bp, Oryza sativa
  ref <308>: DATABASE ACCESSION NUMBER: AK105767
  ref <309>: DATABASE ENTRY DATE: 2002-08-28
ctctccaaccacaccactctccaaatccatccatcgatcgagaattcctcttctccctcttcttgttcttcttctcctctctgaatttaacaagaaatcaagaactaggtgtttgttttgactaacaagaactcggtcgaacactctgcgtgcgtgtttgtttgtgtgtgtcatgtgctctgggccgcgcaagccgtccacaccgccgctgccgcagcagcagaaggaggcgacggtgatggcggcgtccttgcttcttgagctggcggcagcggacgacgtggcggcggtgaggagggtcgtggaggaggagaaggtgtctcttggcgtggctgggttgtggtatgggccttcggcgagcggcgtggcgaggctcgggatggagcggaggacggcggcgatggtggcggcgctgtacgggagcacgggggtgcttgggtatgtcgtggcggcagcgccggcggaggccgcgcgcgcgtcggagacggatggggccacgccgctgcacatggcggctgccggtggcgcggcgaacgcggtcgcggccacgcgcctgttgctcgccgcgggggcgtcggtcgacgcgctctcggcttcggggctccgcgccggtgacctcctcccgcgcgccaccgcggcggagaaggccatccggctgctgctcaagtcgccggccgtgtcgccgtcgtcgtcgccgaagaagtcggcctcgccgccgtcgccgccgccgccgcaggaggcgaagaaggagtacccgcctgacctgacgctgcccgacctcaagagcggactgttcagcaccgacgagttccgcatgtacagcttcaaggtgaagccgtgctcccgcgcctactcccatgactggaccgagtgccccttcgtccaccccggcgagaacgcgcgccgccgcgaccctcgccgctactcctacagctgcgtgccttgcccggagttccgcaagggcggctcgtgccgcaagggcgacgcgtgcgagtacgcccatggcgtgttcgagtgctggctccacccggcgcagtacaggacgcgcctctgcaaggacgaggtcggctgcgcgcgccgcatctgcttcttcgcccacaagcccgacgagctccgcgccgtcaacccctccgccgtgtccgtcggcatgcagcccaccgtatcgtcgccgcgctcctcgccgcccaacgggctcgacatggcggcggcggcggcggcgatgatgagccccgcctggccgtcgtccccagcgagccgcctcaagacggcgctcggcgcgcgggagctcgacttcgacctcgagatgctcgcgctggaccagtaccagcagaagctgttcgacaaggtgtccggcgcgccgtcgccgagggcgagctggggcgccgcggcgaacggcctcgccaccgcgtcgccggcgagggccgtgccggactacaccgacctgctcggctccgtcgacccggccatgctgtcccagctccacgcgctgtccctcaagcaggccggcgacatgcccgcgtacagctccatggcggacaccacgcagatgcacatgccgacctcgccgatggtgggcggcgcgaacaccgcgttcgggctggaccactccatggcgaaggcgatcatgagctcccgcgcctcggcgttcgccaagcgcagccagagcttcatcgaccgcggaggccgcgccccggcggcgcgttcgctcatgtcgccggcgacgaccggcgcgccgtccattctctcggactggggctcgccggacggcaagctggactggggcgtccagggcgacgagctgcacaagctccgcaagtcggcgtcgttcgcgttccgcggccaatccgccatgccggtggcgacgcacgccgcggcggcggagccggacgtgtcatgggtgaactctcttgtcaaggacggccacgccgccggcgacatattcgcgcagtggccggagcaggagcagatggtggcatgatcatcagaggctcatagcgacctagctaaccaaaaaaaaagaagttctttctttcaatt

SEQ ID NO: 8420 - DNA, 1865 bp, Oryza sativa
  ref <308>: DATABASE ACCESSION NUMBER: AK105768
  ref <309>: DATABASE ENTRY DATE: 2002-08-28
atatcgtaggcagcttccctctgcatacaagaggctgcctcccatttctcttctctgtcggtgttctcctcaagatctgtcttaagttcttgagatctgtttcagaactaagctgagaagatggtgaagatctgctgcattggagctggctatgtcggcggcccaaccatggccgtcattgccctcaaatgcccagcaatcgaggtggtggttgttgacatttccaagcctcgcattgatgcctggaacagcgaacagctcccgatctacgagcctggcctcgatgaggtcgtgaaggagtgcagaggcaggaacctcttcttcagcactgatgtggagaagcatgtcgccgaggcgaacatcatctttgtatctgtcaacacccccaccaagacccgtggtcttggagcaggcaaggctgctgacctcacctactgggaaagtgctgctcggatgattgctgatgtctccaagtctgacaagatcgttgttgagaagtccactgtccctgtcaagactgcagaggccattgagaagatcttgacccacaacagcaagggcatcaactaccagatcctctcaaacccggagttcctcgcggagggcactgcgatcgaagatctgttcaagcctgacagagtgctcattggtggccgggagacccctgagggcaagaaggctgttcaggctctcaaggaggtgtacgcccactgggttcctgaggacaggattatcaccaccaacctgtggtccgctgagctctccaagctcgcagccaacgcgttcttggcacagaggatctcctctgtgaatgccatctccgccctatgcgaggcgactggtgccaatgtggccgaggttgcttactctgtgggaaaggactccaggattggccccaagttcctgaacgccagtgttggctttggtggatcctgtttccagaaggacatcctgaaccttgtgtacatctgcgagtgcaatggccttcccgaggtggccaactactggaagcaggtcatcaagatcaacgactaccagaagagccggtttgtcaaccgcgttgtgtcctccatgttcaacacagtctccggcaagaagatcgccgtccttggctttgcgttcaagaaggacaccggtgacaccagggagacaccagccattgatgtgtgccacggtctgttgggtgacaaggcacagatcagcatctacgatccacaggtcaccgaggaccagatccagcgggacctcgccatgagcaagttcgactgggaccacccgatgcacctgcagccgaccagccccactgcattcaagcaggtgagcgtggtgtgggatgcatatgaggccaccaagggggcccatggtgtctgcatcctcaccgagtgggacgagttcaagaccttggactaccagaagatctttgacaacatgcagaagcctgcattcgtctttgatgggcgcaatgtggtcgatgccgagaggctcagggagattgggttcatcgtctactccatcggcaagccgcttgatgcctggctcaaggacatgcccgcggttgcataataattttccatattccacacctgaacctcatagctctctacactctgctggtgctgaagagagtctgcgtcgaagaggaatttggttgaccatcattttttatagctcgttgttcgtctttacatacaggagaggctaccattttgtcaaacagaaagttgatttctgttagtatctttgttcaagtttttcttgtgttgcaccattgtagatctgaaatcttcaggcctctaccgtttgagtgccaccctcaatcttgtatgatgacatgaattcttatagccgatttattcttcaaatgt

SEQ ID NO: 8421 - DNA, 2018 bp, Oryza sativa
  ref <308>: DATABASE ACCESSION NUMBER: AK105769
  ref <309>: DATABASE ENTRY DATE: 2002-08-28
agccacacattccacagccgcgacgcgacaccggaaacaaacgcaggtagcaactgcaaggggcagttggctggagctcggtgatctgtgggtctgatcgcgatgggacgctcaccggagatggaggtggacgcgcgcagcggctactgcgccgccacccgcacgttccggagcaggcgcgccgacgtgccgctgcccgccgacccggaggtcgacgtggtcagcttcctcgcctcgcgccgccactcgggcgttgtggccctcgtcgacgccgcgactgggcgccggatcaccttcaccgagctctggcgcgccgtggccggggcggcatccgccctcgccgcgcaccccgtctccctccgcaagggccacgtcgcgctcatcctctcccctaactccgtccacttccccgtcgccgccctcgccgccatgtcgcttggcgccgtcctcaccaccgccaacccgctcaatacccccgccgagatcgccaagcaggtcgccgacgcccgccccgtcctcgccttcaccacccgcgagctcctccccaagctcccgcgtgcccacgacctccgcgtcgtcctcctggaatccgcccgcctccccggcgacagctccgacccgcggatcgtcgccaccatcgaggagatctccgccacgacgcccgacccggcgcgccgcaaggaccgcgtcacgcaggacgatccggccaccctgctctactcctcggggacgacggggccaagcaagggcgtcgtcgccacgcaccggagcctcatctccatggtccagatcatcatgacgcgattccgcctcgagggctcggacaagacagagacattcctctgcacggtgcccatgttccacgtctacggcctcgtcgccttcgccacggggctgctcggttgcggcgccacggtggtcgtgctctccaagtacgagctcccggagatgctgcgctcgatcaacgcctacggggtgacctaccttccgctcgtgccgccgatcctggtcgccatggtggcgcacccgaagccgctcccgctcgggcagatgcgcaaggtgctatccggcggcgcgccgctgggcaaggagctgatcgaagggttcagggagaagtatccgcaggtggagatcctgcaggggtacgggctgacagagagcaccgccatcggcgcgtccacggactccgccgaggagagccgccggtacgggacggccgggcttctgtctcccaataccgaggctaagattgtcgacccagattccggcgaggcgctgccggtaaaccgcaccggcgagctctggatccgtggaccgtacgtcatgaaaggctacttcaagaacgcagaggcaacacagtcaacgctgacaccagatggatggctaaagaccggtgatctctgctacatagatgaggatggatatctcttcgtagtggaccgcctcaaggagttgatcaaatacaaaggttaccaggtgcctccggcagaactggaagctcttttgttgacgcacccagaggttacggatgttgccgttataccgtttcctgatagggaggtcggccagttcccgatggcctatatagtgaggaagaaaggaagcaacttgtcagagcgcgaggtgatggagtttgtggcaaaacaggttgcgccttacaagaaggttagaaaggtggcgtttgtgacggacattcccaagaatgcatccgggaagatactgaggaaggatcttattaagcttgccacatccaaactatgaaatgccaatcaattatctactactccacaatatattaagcttgtcaagaatgcattcggcaagatattgaatacgttttggaattggcatagacactttagttgttgtgtaccctctttctcaatatggtgggtatttgtaaatgaagatatcatcagtcatgtgcatttcttctatacatgatctggtagagttacactgtatccattcttgtataatcaaataaaaaataatttccgagttcgagccttcgatgt

SEQ ID NO: 8422 - DNA, 1063 bp, Oryza sativa
  ref <308>: DATABASE ACCESSION NUMBER: AK105770
  ref <309>: DATABASE ENTRY DATE: 2002-08-28
ctaatttccatagagacacatcatctatgcagtcaagtgtgaacccaagtactgaatccatttgggcccagcagccgtttgaacaattactcggtgtatcaagagcagagttgaatatgaagctcttgaaactggaaggatcaggatggctctttgagcaaaatggtggctgtgatgaaaaattaattgatcaagttgctgtagctgagagagtttcacaacataccactgaaaatcagttatctgctgatctccagctccatagttctgatgaagacttgcagccactgcaaaggaatgataacagggatgccaattgcatgagcctactgcccaagtgtggagatgattgtgtttggcaggcccccctgattgtcagttttggtgtttggtgcatccgccagattctgaacctgtgccttgtcgaaagtaggccagaactttggggcaagtatacatatgttcttaatcgtctccagggaatacttgatcctgcattttccaagcctcagaaacccatgaaaggatgcgtatgccttcaaaaagttgccaagcccatctctggtactttcaccactgctggtatgatcttggagatgattaaagacgtggaacaagccatttctagccgcaagggccgaagcggcacagcagcaggagacgttgcttttcccaaagggaaggagaacctagcttctgtccttaagcgatacaagcgtaggctctcgaacaagacatctgcaggacaatagcgtggcagcgagctttcttttgtttcttgtttgtatagggttcttggggctgctccacaaagttctgtttttttgtgctcctcaaaccttgggttttttcgatgcacacgatctccagagtgcctgagagcttcttgatctttggtcatttttgcacatgttgtttatgaagtggccaagggtgaatggtataccttgtttattcatcttatcagcgagatctcaacagtagatgatatttgctggagcagcaacattgtaaagttctttttccagatgaacattctgaagtccgctggcttggctttctg

SEQ ID NO: 8423 - DNA, 1564 bp, Oryza sativa
  ref <308>: DATABASE ACCESSION NUMBER: AK105771
  ref <309>: DATABASE ENTRY DATE: 2002-08-28
ctcctggcggcctagtattttgcaagagcagagtgagagtaggagagcttgagttgaggccttgtgggtttgcacacagaacagcttgagaaaatgtcacagtgcccaactcatgtcgctctccggttgcttgctctgctcttcctgcttccagctgcgtggtccgcgacgttcacgatgaccaacaattgcggctacacggtgtggcctgggctgctgtcgggtgccggcacggcgccgctgtcgacgacagggttcgcgctggcgcacggcgcgtcggcgacggtggacgcgccggcgagctggtcggggcgcatgtgggcgcgcacgctctgcgccgaggacgcgacaggcaagttcacctgcgccacgggggactgtggctcgggtggcatccagtgcaacggcggtggcgcggcgccgcccgccacgctcatggagttcacgctcgacggctccggcggcatggacttcttcgacgtgagcctcgtcgacgggtataacctgcccatgatcatcgtgccgcagggcgggggcgccgcagcgccggccggaagtggcggcggcagcggcggcaagtgcatggccacgggctgcctcgtcgacctaaacggcgcgtgcccggccgacctgagggtcatggcggcgagcaccggcaccggcgccgccgctcccggcggggggcccgtggcttgccgcagcgcgtgcgaggcgttcgggtcgccgcagtactgctgcagcggcgcgtacgggaacccgaacacctgccggccgtcgacctactcccagttcttcaagaacgcgtgccctcgcgcctacagctacgcgtacgacgactccacctccacattcacctgcaccgccggcaccaactacgccatcaccttctgcccaagcaccaccagcgggaagtactccggcggtgagaacccgcaggcggccggcgtgccgtccaccaacgacacgatggtcgtcctcggcgccgagcagctctccaccgcctcctccgccgccgcccatgctgcgccgcagctcacgctaccactactaccactcgtcgtcgtcgccgccctcgttgccgccatgatctaggccggccggtacaccgtacacgtacaaaggtggcaatcaccaccatgcctactcctctcgccgctgtacgtgccgcggggcccaccagcggctaatcctgctccggaggtgtcctaatccggcccgtctcttgtggcgtgaccgaggcagagataagattctccgaacagagcacgaggaaaggttggacagtgctacgacgactgaaaaccgatcgagaagggagaaaacaagagttgtatccacaccgatcgcagctttcttctcgattagtttatgtcataggcttagagattacagagtggtagttagtgatgtactgttggttttagtcttctcttttcctacgcttccttgagttgttgagcggaaacgaatagatgatgtatttactcgatcaccgtttgttcgtcgcgatcacggatgattgcggcggcgactttgatcagctgggaaaagaaagggcacggcc

SEQ ID NO: 8424 - DNA, 1726 bp, Oryza sativa
  ref <308>: DATABASE ACCESSION NUMBER: AK105772
  ref <309>: DATABASE ENTRY DATE: 2002-08-28
ctgatgctggacctgcctctgttgcttctggagaggataatggtgcagttgacccagaaacaaatggtcttgatgaaagagtagtgattgacagtattaatgatcgtgagtcatctgtgcttcctgatgatcttagtgcagaattacagccatctgagcaaaattttaaccgagaaggcgacccttctgtggtggatgatcaatcagccgtcagcagtaatttctctatgcaagctttcttgcaaggaaaacctaagatgaaagacttagctgttgaaacatttccatctcaagttgatgctgagaagatgaatgccagtgagaataacatgaattatgttgatgatggaggcaatgtgttatcatcgaaattagaggacatcacagagagtgactggacaaggctggagaattatgcaagtaccggagaaaaagttgaggtggagctgataaactgcagctcgaaaggatttgttgtatcactccattcattgataggtttcttaccgtatcgcaatcttgctacaaaatggaaattcttagcttttgagacttggttaagacaaaagggtggcgatccttcactcttcaagcagagtgtgggcatagaagaaagttttgaggtcaatgacaggaacatagaatcagtatctagctcagattcagaacttgctgtgcaggatcaaggttctatgccatctaaggaaaaatttgaagatcttcttcgaacatataacactgagaaatctaaattcttatcatcatttatcggtcaaagactccgtgtttcggttgccctggctgacagaaaatccaagaaaatatttttctctatgaagccaaaagaaagtgaagaattgattcagaaaaagaaaagtctcatggctaagctcaatgtgggagatattgttgaatgcactatcaagcgatttgtttactttgggatatttgttgaggttgaaggagttcccgcatcaattcagcagtgggaagtgtcttgggatgaaaccttggacccatcagtttcttacaaaattggtcaggttgtggatgctaaagttattcaactggactataataataaccgcatatttttgtcacttaaagatgtaaagccaaatccttcagtaggcgcattggaagctgtcattggtgaggaactatcactgggtggagctcttgaacctgcagaagcagattttgagtggcctgaagtggatgctctcatggaagagatgaaaaatattgaggaagttagggatgtttataaaggacgattcttgcgaagcccaggactagctccaacctttcaggtgtatatggcacctttggttggtcagaaatataaactccttgcacgctatggaaataatgtccaagaggtgatggtggagacatcattagacaaagaacagttgaaagaggcagttttagcgtgcacaaacagggtgagctgatgatcagcgtctccgtgctgtagtatttttccttcttttagcttgcgaagcagatggttgtacagaattgttgtggcagtccaattttgcatccttgtagcatgcttttgagtcgtttacacctgattttcttccttttcaagttgaaaataccaggtgatatgtagtcctagctcaactttgtagaggatgacaggtgtaaatcgccttgatacgttactacggaattgcaacagaattcgatttgcatctttcacggtgctagaatt

SEQ ID NO: 8425 - DNA, 1789 bp, Oryza sativa
  ref <308>: DATABASE ACCESSION NUMBER: AK105773
  ref <309>: DATABASE ENTRY DATE: 2002-08-28
agagcaaaggcaagaagacgccatggccacggacacctcatggctcctgctcctcgtcgctctcgtcctcccgctcgtcgtcctcctcgcgcggcggcgccggagcggcggtggcagccgccgcatcccgcctggcccgctcgccgtgccggtgctcggaagcctcctgtggctgaggcactcctcggcgaacttggagccgctcctccagcgcctgatcgcgcggtacggccccgtcgtgtcgctgcgcgtgggctcccgcctctccatcttcgtcgccgaccgccgcgtcgcgcacgcggccctggtggagcgcggcgccgcgctcgccgaccgcccggacgtcacgcgctcgctgctcggcgagaccggcaacaccatcacgcgctccagctacggccccgtgtggcgtgtcctccgccgcaacctcgtcgccgagacgctgcacccgtcgcgcgtccgcctgttcgcgcccgcgcgctcctgggttcgccgagtgctcgtcgacaagctcgcggacggcgcgcgccccgagtccgagccgccacgcccgcgcgtggtggtggagacgttccggtacgccatgttctgcctcctcgtgctcatgtgcttcggcgagcggctcgacgaggccgcggtgcgcgccatcggcgccgcgcagcgcgactggctcctgtacgtcgcgaggaagacgagcgtattcgcgttctacccggcggtcaccaagcacatcttccgccgccgcctccaaataggcctcgccctgcgacggcagcagaaggagctctttgtgccactcatcgatgcccggcgagcgcgcaagaaccatatccagcaagccggcggcccaccggtgccggagaaggagacgacgttcgagcactcgtacgtcgacacgctgctcgacgtaagcctccccgacaccgacggcgacagcgccctcaccgaggacgagctggtgatgctctgctccgagttcctcaatgccggcaccgacacgacggccaccgcgctgcagtggatcatggccgagctggtcaagaacccatccatccaatccaagctccacgacgagatcaagtccaagaccagcgacgacgagatcaccgaggaggacacccacgacatgccgtacctgaaggccgtcatcctcgagggcctccgcaagcacccgccggcccacttcgtgctgccgcacaaggcggcggaggacgtcgaggtcggcgggtacctcatccccaagggcgcgacggtgaacttcatggtggccgagatgggaagggacgagagggagtgggagaagccgatggagttcatccctgagcggttcctcgccggcggcgacggcgagggagtggacgtgacgggcagccgggaggtccggatgatgccgttcggcgtcgggaggaggatctgtgccgggctcggcgttgccatgctacacctggagtatttcgtggcgaatttggtgaaggagttcgagtggaaggaggtggccggcgacgaggtggacttgaccgagaagaatgagttcaccactgtgatggcaaagccgctccgtgctcagcttgttaaacgggcttagtttttttttttttgagtgtctgtaagacggaactggatcctctgacgtgaactgctccgtgacatggtcactaacaagtgggtccgcgagtggtggggttcacatgtcagtcaccacgtctctctgacttcacgtcagaggatcccaatccctaagacatgcatgcgcatctttctaccatatgattaataccatagattcatg

SEQ ID NO: 8426 - DNA, 985 bp, Oryza sativa
  ref <308>: DATABASE ACCESSION NUMBER: AK105774
  ref <309>: DATABASE ENTRY DATE: 2002-08-28
agaatacccctcatccccaaaagccccaaacccgaggaggcgagaggaggaggaggaggagctcgtcggcggcgagcgatggcggcggcggtggcggagctgtgggagacgctgaagcaggcgatcgtggcgtacacggggctgtcgccggcggcgttcttcaccgccgtggcggcggcggcggcgctgtaccacgtcgtgtcggggatcttcgcggggccgcccccgccgccgccgccgcggccgagggacgagcccgaggcggagccgctcccgccgcccgtgcagctcggggaggtctccgaggaggagctccgccagtacgacgggtccgatcccaagaagcccctcctcatggccatcaagggccagatctatgacgtcacgcagagcaggatgttctatggacctggtggaccttatgcgctattcgctggcaaagatgccagcagagcactcgctaagatgtccttcgagccccaggatttgaccggtgacatctctggtcttggcccatttgaactcgacgcattgcaggactgggagtacaagtttatgggcaagtacgtgaaggtcggtaccgtcaagaagaccgtccctgttgaagatggtgccccaagcacttcaccagaaacaactgaaaccgccgctgccgctgagccagagaaggcgccagcaaccgaagagaagccgagggaggtaagctcggaggaagtaaaagaaaaggaggatgctgttgccgctgctgcacctgatgaaggcgccaaagaaagttagaacactccagtaatccccattgcagcaataatttgtgtaattggatgtgcaatctgcactagcacataggacctggagctggaggtgctagtgcttattattattagttgttactgggagtattagacatgagatcacctggggtttattccccttttgttaagtctctgttaataactatatgggtgaataatatagctgccttttt

SEQ ID NO: 8427 - DNA, 1372 bp, Oryza sativa
  ref <308>: DATABASE ACCESSION NUMBER: AK105775
  ref <309>: DATABASE ENTRY DATE: 2002-08-28
atcacccaagtcctcttctctcttctcttctccgccgccgcctccatccgcggcgcatcccatctcgccccggcgactcgtcggcgtcggcgtcggccatgggcggcgactggcaggagcttgcccaggcggcggtaatcggcctcctcttcgccttcctcgtcgccaagctcatctccacggtcatcgccttcaaggaggacaacctccgaatcacccgctccacgccgacctccccctccgccgcggacacccccgccgccccggccccacctccggcctccctcgacggcggccatggggacaccagcgacggcagcggcagcgacagcgacagcgactgggagggcgtggagagcacggagctcgacgaggagttcagcgccgcctccgcgttcgtcgccgcctccgctgcgtctggcacgagcgtccccgagcaagcccagcttcagctctatgggctctacaagatcgccaccgaggggccctgcaccgcgccgcagccgtccgccctcaagctcaaggcccgcgccaagtggaatgcttggcataaattgggtgctatgccgacagaagaagctatgcagaagtacatcacagttgtggatgagctattccctaactggagcatgggttcgagcacgaaaaggaaagatgaagataccacagtatctgcttcaagttcgaagggaccaatgggacctgtatttagcagtttaatgtatgaggaggaagatcagggaaatgactctgaacttggcgatatccatgtttcagcaagggaaggagcaattgatgacatagcgaagcatctggctgctggtgtagaagtcaacatgagagatagtgaaggcagaactccactgcattgggctgtcgaccgtggccatctaaattctgttgagattcttgtcaatgcaaatgctgacgtgaatgctcaggacaatgaaggacaaacagcgcttcactatgctgtcctctgtgagcgagaagatattgctgagttgcttgtcaagcatcatgctgatgttcaaatcaaggatgaggatgggaacacggtgcgggagttatgcccttcaagctggtcttttatgaacctggcaaactgacgacacgatgccctctgcactcttttggttgcctaccagcaagaaaccgcactgtctatgttagccaaactagatgagttgttttacgaacctcatcgaataggtcactgtcaaaaggatatttctgtattagtgaaaggagattatcttgtactgcctatacagtttacactgctagtttgtctgtgctgaacatcaatgttggccaggtctgtaaatcatgggcacctaatttctgaatgagcatgatcggacttctcttc

SEQ ID NO: 8428 - DNA, 1200 bp, Oryza sativa
  ref <308>: DATABASE ACCESSION NUMBER: AK105776
  ref <309>: DATABASE ENTRY DATE: 2002-08-28
gatgctgaacgagtcgatgggggagggggacgccgcctacgccaagcgcgtgctgctcaccgccgccggcgacgacgtctcccgggggatcgcctccaccctcgccacccatggctgccgattggttttggtcggcgacgagggcgccctggctgggacggcggaggaggcgcggcgcggtgggggcggaggagatgcggtcgctgtggtggggctggatctccacggctgcgacgaggcggccgtcgacgcggcggtgggcacggcgtggcgctgcttcgacggcctagacgccatggtgaactgctactcctacgagggtgaagtacaagactgcctcaatataagcgaagatgagttcaagaagacaatgaaagcgaatgtaatgacaccttggtttctagtaaaggcaattgcaaagcgactccgggactcagaatccagttgtggagggtctgttgtattcttaactcagattattggtgctgagagaggattgtatcctggtgctgctgcatatggtacaagtttaggtgccattcaccaattggtccggctgtcagcaatggagctgggcaagcacaagatgagggtgaacgcggtgtgccgtgggctgcacctgggcgacaggttcccggtgtgggtggggaaggagaaggcggagaaggcgacgggggaggtgatgccgctgcggagatggctggacccggagaaggacgtggcgtccacggtgctgtacctggttggggacgagtcccggtacatgactggcagcaccatattcgtggatggcgcccagtccatcgtgcgcccgcgcatgcgctccttcatgtagatcatcacatcaccgtacgtgataataagcaactactagtaatagtagggagatccataacaataacaaggagagctccatcatgggtttctgctctgtagctgtgtgttcagatgaacaatttgctgtctgtaatgatcgagaagacagtacaaagttgtgttctgagattagtatgtacgccgcaggcaacgtgccatgatctgagccttctggtatatgtacgatctcggatacgtcagctcttatttgaaaaacactctcatagctgtatgtaagatcatttttttttgacatatgacaagttaaatgtatatggttaaaagagttataaaaatatttcgtctaaagtgaaaacagtgatt

SEQ ID NO: 8429 - DNA, 1539 bp, Oryza sativa
  ref <308>: DATABASE ACCESSION NUMBER: AK105777
  ref <309>: DATABASE ENTRY DATE: 2002-08-28
acccctcctctcaggctctcactcgcgctgcatgccacactgcttcttcttcttctctctctctagctagctagctagcttctctgtaggctgtagctgcggtggcaatggcggcggcgaggttgtgggtggttgcggtggcggtggcggtggcggtggcagtgatggcggcggcggtggaggggaagagctacaacatcacgaagatcctggcggcgcacccggagttctccaagttcaacgagatgctgagcaagacgaggctggcgtacgacataaaccggcggcagacgatcacggtgctggcggtggacaactcggcgatggcgtcgctggaccacttcaccctccccaccatccgccacatcctctccctccacatcctcgtcgactactacggctccaagaagctccacgccctctcccatggcgccaccgcctcctcctccatgttccaggcgacggggtcggcgccggggacgacggggtacgtgaacatcacgtcgcacaagggcgggaagatcgacttcatctcggaggacgcggacgagggcgcgaagccgtcgaggtacgtgaagtcggtgaaggagatcccctacgacatctccgtgctccaggtgagctccgtgctgtcctcctccgaggccgaggcgcccgtcccgccgccggcgccggtgaacctcaccgagctcctctccaagaagtactgcaagtccttcgccggcctcctcgccgccaacgccgacgtcttccgcgccgtcaacgagaccaaggacaacggcctcaccctcttctgccccgtcgacgccgccgtcgccgccttcatgccctcctacaagaacctcaccgccaaggccaagaccgccatcctcctctaccacgccgtcccggactacttctcgctgcagctcctcaagtccaacaatggcatggtcaccacgctcgccaccgccagcgagtccaagaaggactacagctacgacgtccagaataagggcgagaccgtcacgctcgacaccagggtcgtcaactccgccgtcaccgccaccgtcggcgacgccgagccgctcgccgtctacgccgtcaccaagttcctcaagcccaaggagctctacaaggtcgtcgaggcccccgcgcccgcgcccgagccgtccaagaagcacaagtcggcggccgacgacagcagcgacgactcgtcggacgattccggcgacgtcaaagcccacaagggcgccgccgctccggcgccgctcgcccggtgggtgaccgccgccgcggccgccgccgtagcagcattgatgctaatggcttgatgcatgagtcagtcaatctacactctacagagcagagtgtgtcgaatttgttttttttttttcctttttggtatggctggtcaattacaaataagaaacatagatgtgtgaatgatttgtagttctttgagttttttctttctttctgtggtggtttgatgtaattactttgtaattaatatagttgtccataatccacggaaaaagctaagaatgatttcatcat

SEQ ID NO: 8430 - DNA, 1242 bp, Oryza sativa
  ref <308>: DATABASE ACCESSION NUMBER: AK105778
  ref <309>: DATABASE ENTRY DATE: 2002-08-28
cgccacacctcgcagttcgtagcagcgaataagcgagctccatttgattctttgattacaatggagtccaccaaggtctcggcgatgctcctgctcgccatgctcgcgctctcctcctccccgctcgccctcgcgtgcggctcgtgcggctccggcggtagcggcagtgcaccgtcgggcggcggcggcagcgcgccctcgggtggtggtggtggtatcggaggagtcgtcggaggaatcgtcgggggtgtcgctcccgtcgtcggaggaatcgtcggcaaagttcctcctgtcgtaggaggagttgtcgggggagtagctccggtcgtcggtggaatcgtcgggaaagttcctccggttgtaggaggagttgtcgggggagtagctccggtcgtcggtggaatcgtcgggaaagtccctcccgtcgtcggcggtgtcgtcggaggtgtcgccccggtcgtcggtggagtcgtcggtggcgtcgccccggtcgtcggaggtgtcgcccccgttgtcggtggcgtcgtcggaggcatcgccccggttgtcggaggaatcatcggcggcggcagcggcggcggcggctacagcccgagcccgagcccgccgaagcgacacggcgggagaaaggcgtgcccgccatcgccgacgccgacgccgtccaccccgacgccgtcgtcctcggacacgtgccccatcgacgcgctcaagctcggcgtgtgcgtggacctcctcggcaacgaggtgcacatcggcgacgcccacgtgacgtgctgcccgctggtgaaggacatcgccggcctgtccgccgccgcctgcctctgcaccgccatcaaggccaaggtgctcgacatcagcatctacatccccatcgcgctcaagctcctcgtcaactgcggctgcgacgtcccgcctggctacacctgcgcctaagccatcctcatgcacgtcacgtcccaaaccatgcacgtcacgtcccaagccatgcacgcattcattattctctctcgagtacacagtttagcttcaatcaaattaaggtcggtcgttaatttggtcaaatcggtcgggtgatgaagccactcgcttctgggatgttcaattattcagtgaacttcttttttattggatttgcttttcttgttttgcaatgttaatttgtacatgtagtggctccggaaattgtcatcaattgtactgtatgcatgtattgtaaaactatttaatttaattcccagatgt

SEQ ID NO: 8431 - DNA, 1190 bp, Oryza sativa
  ref <308>: DATABASE ACCESSION NUMBER: AK105779
  ref <309>: DATABASE ENTRY DATE: 2002-08-28
aagcagcccagcccggcggccgcggtgcacgcgcgcgcgacgaccacgccgacgccgacgccgggggaagacgagcagcaggggagcgccctcgaagccgagaggagggggaggaggaggacgacgacgaggcgcgcggcggagggcgccatggacaccttcttcctgtcgcacggcgcgcccacgctgtccatcgacgacaccatcgcggcgcagggattcttcaagtcgtggctgccggcggcggtggcgggcgcggagttgccgcgggcgatcctcgtcgtgtcgggccactgggaggcggccgcgccgacggtcaacgtcatccgcggcaacaacgacaccatccacgacttctacggcttccccaaggctatgtacaagctgaagtaccctgcgccgggcgctcctgatctggcgatgaagaccaaggagcttctggagcaagccgggttcgggccggtgaaggaaaaccacagccgcgggcttgaccacggtgcgtgggtgccactgatgttcatgtacccggaggcgaacgtgccggtgtgccagctctccctgcagagcggccgcgacggcgcgtaccactacgagctcggcagggcgctggcgccgctccgcgacgacggcgtcctcgtcctcggctccggcagcgcgacacacaacctccgcaggatggggcccgagggcacgccggtgccgcagtgggcggcggagttcgacgggtggctgcaggaggcgctgctcggcgggaggcacgacgacgtgaagcggtacgaggagaaggcgccgcacggcagggtggcgcacccgtcgcctgaccacttcctcccgctgcacgtcgcgctcggcgccgccggtgagggggccaaggcggagctgatccaccgcagctggagcaacgcctcgctctcctacgcctcgtaccgcttcaccaccgccaagaactgaaaaccggtcgacgcgatgcacgccggctcgccgcatgcaaccacgtgtttgcttgtaacatatttgactcgaacaataatccccgtgggctcacgtagacgtgtgtgccgtgttcgtgtttgtatttctcggagccgtggcttggggttgtttacttgttttttttttttttgtaagattgggttgggcctgggcctgggcctgggccgtggcacagccttatggcgttaattggtgtt

SEQ ID NO: 8432 - DNA, 1058 bp, Oryza sativa
  ref <308>: DATABASE ACCESSION NUMBER: AK105780
  ref <309>: DATABASE ENTRY DATE: 2002-08-28
acacctgctttccaatcgcagctgcctcccatggcgaccaccgcctccctcctccctcctctcctcccggccccttcctcctccccccgccacctccacccctcccctcgccacctccgccccttgccaccgatccgcctcctccgcgccgcccgccgccgccaccccgacgccgtcgtcgtcgtcccggacgcccgcccctgggtcggcgacctctcgggcgccgccgcgtcctaccgggacggcagggaagaggacgacgacgacgcgggggaggaggatgacgaaaacgacgacgacgacgaggaccgcagcctggacctcctggtccgcttcctgcactcggtgttcaggaaggtctcccgccgcgcgcgccgcgccgccaggtgaagttctcggtcaacggcgtgcttgttctcacgtttctatgggtcctaaaggggctacttgaggtggtgtgcacatttggaagtatggtgttcgtgaccatccttcttgttcgtggaatatggtctggagtgacttacataagagaaaaccgatatagctatattcgccagattgataatgatgacaaccgatggagcagagtacagactgctggctaatcatttgatttccttgactacatacatacactttgcaccaaagggatcatcagtaaacctttcctcactgttaagacagcatgctaccagttcagcaccaactgccaacagctgttgctatacagcagagttgaacaagaacaaaaggaatcccatgtattcgtcgaataagtggaattttcttcctctgcacaaatgcaggagggatggttgagctgaacaagattaatacgcgtgtaaaacaatccagcacactgatgaatgagagctgctgctgtgatgcattttctgctactcttttcttgaagagatgtatcggtccttattagtgtatgtattgttccatgctgttacaactagccggtgtagaaaaactcatgtttgttgtattgaaaggtggtgcacgatacctttttggttaaaaagtgaatatcatttcgatttcatttg

SEQ ID NO: 8433 - DNA, 1415 bp, Oryza sativa
  ref <308>: DATABASE ACCESSION NUMBER: AK105781
  ref <309>: DATABASE ENTRY DATE: 2002-08-28
aaaaagctaatagtaatagctaaggttagctgaaacgtacgtgttgccgtgcatgcagctcgcctgtgtgtctctggtgcccccgtcgccctcgctgcccccgacacgtctccccctctccacgcgtcgccgtcgtcttcctcctcccctcgccgtggtggctatatacaccgccgcggcgatcaccttgcctccttctgtctgtcgatctgtccgtcgtcgacgacgtctcgatcgatcggtggtggtggtggtggtggccatgagtctcgtttgagaggtgagccgccggccgggccattgatgagagcggcggcgtcgtccgggcgacgcgatgtccgttgtggcggctgcggcggcggcggtggcggtggcgccgccgtcgtcgccgtacgggatgtgcggcggtggtggtgggggtggtggggcgaggaagaggaaggacgtggtgcagcagctggaggatctggctggtggggtagtgggggatgatggcggcggcggcggcggcggcggcgacgtcgtgcacgggctgttcgtgctggagacggtcgaggagaaggcggaggaggaggaggaggagcggtcctccattggcgccgactccgaggatgaacaggatgatggtgaggaggaggtggagagcaaggcgtcgtcggcggcggtggcggccgagacgtgtcggaggaagacgaagacgaagtgcggcggcggcggcggtggcgcgctcgcctgcctcgacgccctcgacgacgcgctcccaatcaagcaagcattgtttcttcgatcgaattggtcaattagctagctgtatctctcgcgctaatggtggatgggtgcaggagggggctgtccaacttcttctccggcaagtcgaggtcgttcgccaacctgcaggacgtggccgccgccggcgcaaccacggcgagcctcgccaagccggagaacccattcaacaagcgccgccgcatcctccgctgctcctccatccgccgcgtctcctccacctccctcaccgcgctcccgcccttcctgccgccgcaccaccatccaccgccgcccgacgacggcggcggcggcggcggcaatggctgaggacaacgacgaggaggaggaggaggaggatgaaatgatgaaaagaatcaaattcagtgaggacaaattaattaagcagagatggataatatggatggatcccttttgtaatagtttgggatctcatctcatcaaatcaaccatcaaaaataccttatattagtgcttaggtttcttgatttcttcttctcttatattagctgcatgccaatcctacctatgaacaaactcactgttaattagttgcataattgcattgaccaagagatgagagcatcatatcatgcaccaaatacacttatggagaactcctattgaac

SEQ ID NO: 8434 - DNA, 1640 bp, Oryza sativa
  ref <308>: DATABASE ACCESSION NUMBER: AK105782
  ref <309>: DATABASE ENTRY DATE: 2002-08-28
aatccaccccactccattctctcatctcatccgtgaccacactccactctcatccagagcaatggcgttgcaaacgcagccggtaccaaatgcgtcacctcttcatgttcttcggtccgtatgcgtcctcctcctggccgcgtcggcgacggtggcggcgcggcgccacggcccggcggcgcccatcgccgggcagagcatgtacctggcgccgagctgccgcgcgcacacggcgtcgctgacggacttcggcggcgtgggcgacggcacgacgtcgaacacggcggctttcaagtcggcggtggaccacctgtcgcagtactccggcgagggcggcggcggggcgatgctgtacgtgccggcggggaagtggctcactgggccgttcaacctgacgagccacttcaccctgttcctccacagcgacgccgtcatcctggggtcccaggacatgggcgagtggcccatcatcgatcccctcccgtcgtacggccgcggccgcgacaaggccggcggccggtacgcgagcctgatcggcgggtccaacctgacggacgtggtgatcaccggcgcgaacgggacgatcgacgggcagggggcgatgtggtggtccaagttccattcgaacaagctcaagtacacgcgtgggtacctgatcgaggtgatgcactcggacacggtggtgatatcgaacgtgacgctggtgaactcgccggcgtggaacatccacccggtgtacagcagcaacatcgtggtgcagggggtgacgatcctggcaccgacgcactcgcccaacaccgacggcatcaacccggactcgtgctcccacgtccgcatcgaggactgctacatcgtgtccggcgacgactgcgtggcgatcaagtccgggtgggacgagtacgggatcgcgtacgggatgcccagccagcacatcgtggtgcggaggctgacgtgcgtgtcgccgacgagcgcggtgatcgcgctgggcagcgagatgtcgggcgggatcagcgacgtgcgggcggaggacataacggcggtgaactcggagtcggcggtgcggatcaagacggcggtggggcgtggggcgtacgtgcgcgacgtgttcgtccgggggatgtcgctggacaccatgaagtgggtgttctggatgacggggaactacaagtcccacccggacgacggctacgaccccaacgccatccccgtcgtggacaacatcagctaccaggacgtggtggccacgggggtgtacaaggaggccgccaggctggagggcatccagggcgcccccttccgcggcatctgcatcgccaacgtcaccgccacgctctccaagtcgcgcaagtacccgtggacctgcaccgacatcgagggggtgtccaccggcgtcacgccggcgccgtgccagccgctgcagggggcgcacgatggcgcctgcccgttccccacggacacgctgcccatcgaccagctcgtcatgcagcagtgcgcctactccgtcccggcctccatctagctgatctggctgcagcctgcagcgctgtagctgtagctgtgaccgtcgttactactacaacactagcctctgcgtgcggtcttctgaaacaaaaacaataacccagagtgacctttctgac

SEQ ID NO: 8435 - DNA, 1640 bp, Oryza sativa
  ref <308>: DATABASE ACCESSION NUMBER: AK105783
  ref <309>: DATABASE ENTRY DATE: 2002-08-28
gtagatagtcgtcgttgtttttttgccggcggcgagatggggtcgttgccggcggcggcggaggcgcggccgcacgccgtgatggtgccgtacccggcgcagggccacgtcacgccgatgctgacgctggcgaagctgctatactcccgcggcttccacgtcaccttcgtcaacaacgagttcaaccaccgccgcctcctccgcgcccgcggcgcccgcgcgctcgacggcgcccccggcttccgcttcgccgccatggacgacggcctcccgccatccgacgccgacgccacccaggacgtcccggccctctgccactccgtccgcaccacctggcttcccaggttcatgtcgctcctcgccaagctcgacaacgaggccgccgccgccgccgccgcggacggcgcggcgcggcgcgtcacctgcgtcgtcgccgacagcaacatggcgttcggcatccacgccgcgcgggagctcggcctccgctgcgccacgctctggacggccagcgcgtgcgggttcatgggctactaccactacaaacacctgctcgaccgcggcctcttccccctcaaaagcgaggctgacctcagcaatgggcacttggacacgacggtggattggatcccgggcatgaccggcgacctgcggctgcgcgacctcccgagcttcgtgcggagcacggaccgtgacgacatcatgttcaacttcttcgtccacgtgacggcgagcatgtcgctggcggaggcggtgatcatcaacaccttcgacgagctcgacgcgccgtcgtcgccgctgatgggcgccatggccgcgctgctcccgccgatctacaccgtcggcccgctccacctggcggcgcggagcaacgtgccggcggacagccccgtcgccggtgtcgggtccaacctgtggaaggagcagggcgaggcgctccggtggctggacggccggccgccgcgctccgtggtgtacgtcaacttcgggagcatcacggtgatgtcggccgagcacctggcggagttcgcgtgggggctcgccggcagcggctacgcgttcctgtggaacttgcgccccgacctcgtcaagggcgacggcggcgccgcccccgcgctgccgccggagttcgcggcggcgacgagggagaggagcatgctgacgacgtggtgcccgcaggcggaggtgctggagcacgaggcggtgggggtgttcctcacccactccggctggaactcgacgctggagagcatcgccggcggcgtgccgatggtgtgctggccgttcttcgccgagcagcagaccaactgcaggtacaagcgcacggagtgggggatcggggcggagatccccgacgacgtgcggcgcggcgaggtggaggcgctgatacgggaggccatggacggggagaaggggagggagatgcggcggcgcgtggcggagctcagggagagcgccgtcgcggcggcgaagcccggtggccggtccgtgcacaacatcgataggctcatcgacgaggtgctcatggcttgagaaataatatgtatttttgctatatttgtgcattttgcttaaagaattattacacggaggacgcacacgtaacagtaacacaccagaataagtcggaaggttctatgttg

SEQ ID NO: 8436 - DNA, 1773 bp, Oryza sativa
  ref <308>: DATABASE ACCESSION NUMBER: AK105784
  ref <309>: DATABASE ENTRY DATE: 2002-08-28
aaacactcgagctcacacttcctcaaatcctccaacacctcgatccattcgcagtagctgcgaggtgtctgacatggcgtcggggcagaaggtggtgaagccgatggaggtgtcggtggaggccgggaacgccggggaggcggcgtggctggacgacgacgggcgggcgcggcggacgggcacgttctggacggcgagcgcgcacatcatcaccgccgtcatcggctccggcgtgctgtcgctggcgtgggcgatcgcgcagctgggctgggtggccggccccgccgtgatgctcctcttcgccttcgtcatctactacacctccaccctcctcgccgagtgctaccgcaccggcgaccctgccaccggcaagcgcaactacacctacatggacgccgtgcgcgccaacctcggcggcgccaaggtcaccttctgcggcgtcatccagtacgccaacctcgtcggcgtcgccatcggctacaccatcgcgtcgtccatcagcatgcgcgccatcaggagggccggctgcttccaccacaacggccatggtgacccgtgccgcagctccagcaacccttacatgatcctcttcggcgccgtgcagatcgtcttctcgcagatccctgacttcgaccagatttggtggctgtccatcgtcgccgccgtcatgtccttcacctactccggcatcggcctctccctcggcatcgtccagacaatctccaatggcgggatccagggcagcctcaccggaatcagcatcggcgtcggcgtcagctcaacgcagaaggtgtggcgcagcctgcaggcattcggcgacatcgccttcgcatactccttctccaacatcctcatcgagatccaagacacgatcaaggcgccgccgccgtcggaggcgaaggtgatgaagagcgcgacgaggctgagcgtggcgacgaccacggtgttctacatgctgtgcgggtgcatgggctacgcggcgttcggcgacgcggcgcccgacaacctcctcaccggcttcgggttctacgagcccttctggctgctcgacgtcgccaacgtcgccatcgtcgtgcacctcgtcggcgcctaccaggtgttcgtccagccaatcttcgccttcgtcgagcgctgggcctcccgccggtggccggacagcgcgttcatcgccaaggagctccgcgtggggcccttcgcgctcagcctcttccgcctgacgtggcgctcggcgttcgtctgcctcaccaccgtcgtcgccatgctcctccccttcttcggcaacgtggtgggtctcctcggcgccgtctccttctggccgctcaccgtctacttccccgtcgagatgtacatcgcgcagcgcggcgtgccacgtggcagcgcgaggtgggtctcactcaagacgctcagcgcgtgctgcctcgtcgtctccatcgccgccgccgcgggctccattgctgacgtcatcgacgcgctcaaggtgtacaggccgttcagcggatgattcttctgattctctcttgctgctttgagcagagcatccactggtaaaaagtggacagtaattttctttttttacagtctatggacgtagtacagtaaaaaagtgtgtacaactgtacaagggagcagtagaatccttgcaggggtaaaatactgagatgtaactactgagcattttgtagcgctcaaacaggtacagaggggaaaaaattgaacccagattgtatggaggttggcgtaatataattgagccgcagccaaaaaatgaaattc

SEQ ID NO: 8437 - DNA, 1709 bp, Oryza sativa
  ref <308>: DATABASE ACCESSION NUMBER: AK105785
  ref <309>: DATABASE ENTRY DATE: 2002-08-28
aatagagtgttgcgccgaacgaacactactgctgcagacggtgatcagctagagagcgagagtatggcgacgctggcgccggcgctggtgctcctgccggagtggggctccggccacctcatgtccatgctcgagtcctgcaagcgcgtgctcctcgccggcgccggcggcggcagggagttctccatcacgctgctcgtcatgcgcccgcccaccgacgaggcgggctccgaggtcgaggcgcacgtccgccgcgaggccgcgtcgggcctcgacatccgcttccaccgcctccccgctgtcgacccgcccgccgacgccgccggcgtggaggagttcatcgcgcggtacatccacctgcacgcgccgcacgtcagggacgccgtcgccgggatggggcgccccgtcgccgcgctcgtgctcgacatgttcgccgcgcccatggtcgacgtggcgcgcgacctcggcgtgccgtcctacgtcttcatgtcgtccaccggcgccatgctcgcgctcatgctgcacctcccagtgctccacgaccgggtcgccgtggagttccacgaggtggacggggaggtggacgtgcccggcctgccgcctctgccgccggcgtccatgccgtgcccggtggtggacaagaagagccccaactacacgtggttcgtgcgcctcggcgaccgcttcatggacgccacgggcatcatcgcgaacaccgccgacgagctcgagccggggcccctcgccgccatcgcggacggccggtgcgtgccggggcgcgccgcgccgccagtgtaccccatcggccccgtgctctcgctcggcggcaacgacaagagggacagctccgagccgccgcacgagtgcatcgcgtggctcgacgggcagccgccggcgtcggtggtgttcctctgcttcgggagcatgggctggttcgaggcggcgcaggtggtggagatcaccgccgcgctggagcgttccggccaccgcttcctctgggtcctgcgtggcccgccgcccgccgccgagtcaggcaccggcgcgcccgacgggtcggagcacccgacggacgcgaacctcgacgagctcctccccgaggggttcctggagaggaccaaggggaggggcatggtgtggccgacgtgggcgccgcagaaggagatcctcgcccacccggccatcggcggcttcgtgacgcacggcgggtggaactcggtgctggagagcctgtggcacggcgtgccgatggcgccgtggccgctgtacgcggagcagcacctgaacgcgttcgagctggtgcgcgacatgggcgtggccgtgccgctcggggtggacagggagcgggacaacttcgtggaggcggcggagctggagcgcgcggtgaggtcgctgatggacgatgcgtcggaggaggggaagaaggcgagggagaaggcggcggagatgaaggccgtgtgccggagcgccgtggcggcgggcggcggctcgtcgcacgccgcgctgcagaggctctccgaggcgctgcaccagggcgcggcgctcccgaagaactgagcatacgtgaaaattgttgcacgtcacgttttcgaagtcgaagtaacaagagatgatgccgcttgtactgtttgtgccatatgcgtgtcttgtttgcactacagtaacactgaaatgcagtcttgtactcgggtcattattaatgatgattttct

SEQ ID NO: 8438 - DNA, 1521 bp, Oryza sativa
  ref <308>: DATABASE ACCESSION NUMBER: AK105786
  ref <309>: DATABASE ENTRY DATE: 2002-08-28
attgtcatgaaggcgtttactccatgggccgtcgcggcgctcgcgctgctggtgccgcactctgcaacctcgtgcagcgactttctgctcaatgcgtcttcccccagcaccgtcatcagtgcacgcacaatggactttgaggccgatttgaagactgtcgttgaagtgatcccgcgcggtacgaccttccaggagctgcccgtgctcgggtgcgtcgaatgcgccgacctcgagtggcaaagcaagtacggatttgtggcgttccaaatgttcggcgtcaacgccgctgccgatgggctcaacgagcgcgggctctcagccgcctggctggttctcggtgagacgcaatacccgacgccgcagaacagtgagtccaatgacacgaacccggccaagcccattgtgacctcggtgtgctcgtacttgctgggcaactttgcaaccgtggacgaagttcgcgcagggctgcagacctttgacgtcgccgagtttgacgagcgtatccaggtgccgctgctccactcgacggcgctgggccgcatgccgctccacgtgagcgtccacgacgcccagggcaagagcctcgtgatcgagtttatcaagggcaaaaccaacgtatacgacaacctgaatgccgtgctcaccaacgaccctccgcttgacgagcagctgaaaactctcgaagtcaatggcttcaactcgttccccggcgggtacggatcggtcgagcggttcttgagggtctcggtgctcaaccatcacgcgccgtccggctattcaaacgccgtggaaggtgtgtcatcctacacagtcgcgactgaggagcagcgtggcgtctccgacgcactacatatcctcaacacggtcgtgcgaccgccgctcagcgaagccaccgagtggaacgtcgtgcgcgaccacgcgcgccgcaagctctacatccagtcgacgcaaaacatggtgctccgccagatcgacctcacgcagctcgacttcggcaacgcctcgagtcgccacttgattccggtcacgttcggcgactggtttgtcgacgtaacgccagcgttgaaggactctgagaaccacgccaagaccatcgatctaccgccgcgtacagagctggaaaaattgcttcagcaacttctccatggtggaggaggcggtgctgctggcgatgtgccgcccccatcgacggtccagctcgaggccacacgcgagcctggagcggcggcattgcctccgagtggattttggtcaggtctcgcgagtggtgtaagcctcgcggtagtggggatgacactgttcaatgttatcacgagtgcgcatcgccgtcgcatgtaccaaccgatcgctgacccgcaggaagtgcgatacacggcgtgagagagagagagacagacagagagagagagagagagagaaagaaagagagagagagagagatgccagtcgggagcacaaaaggaactcttgtgcagcagaatacaattccaaacgggagcgtgaagcataccgttaagagcc

SEQ ID NO: 8439 - DNA, 1133 bp, Oryza sativa
  ref <308>: DATABASE ACCESSION NUMBER: AK105787
  ref <309>: DATABASE ENTRY DATE: 2002-08-28
acacatggctaccaccgccgcgacgaccatggtggcggcggtgcaccacccccgcccctgcttccgcgtgcgcgccgcctgggacatgaacccgagcgcctcccccaagcccaaggccaagcccccgcctcccccgccgccgccgttgccgaccgcccccgcccccacccacgccgacctcttcgcccgccacagcaacagcgagggccaagtgccaaagaagaccacaagtatgggatttgaaaggtggtggttaccacctccgccagaggtgaagaagccccgttcgctctacaacgctgcatcattggcgtacttgggggactgcatatatgaactttatgctcggagacatttcttctttccaccactgagcatcaatgactacaacaagcgtgtaatggatgtcgtgaaatgtgaatcacaggaccttctgctgaacaaacttcttggagaagattttctaactcaagaagaaagggacatacttcgttggggaagaaatattgttagcagcaagacacgtaccagaaaacgtgctggaattgcagtttataatcgagcatcttcacttgagacactgattggatatctttacctcacaaatttcaagcgcttggagcaattgatgttccagttaggatttacaagtggtgcttcctcacatcatattgcagatgagctagtctcaggctttaagaaaaagaactccacttctgtacaatctcagcaacaagcagcgcagtgaatagtttctgtattgcagcaaacatggtatgatctaaacaatagttatctggtgaccacaaccagcacaaaaattcatttagttttggtgtatgacatccaaaagtggttgctcaatgaatgaatagcaattaccgtttgtctgtcaaacaagtatcgagtgaattgagcaatgtacatgtatgcaaatatcattcagtgcaagaaaatggtgtcacttccaggagggtgtggcggttctgatctgtagattctgaggtggcaagccgttgtgttattactactcattaggttgatataggtcgtggtatctttgacaccttgtgtatgaaggagctgcgaaactgcaagatatgctgaatgatttgatgcagagttttagcacg

SEQ ID NO: 8440 - DNA, 967 bp, Oryza sativa
  ref <308>: DATABASE ACCESSION NUMBER: AK105788
  ref <309>: DATABASE ENTRY DATE: 2002-08-28
aagaagcgagcagcagagctcagcgtttggagcgagatgatgagcagcagcagcagcttggtgtccgccatttctgcgtcaccgtctgccactgcaaaagctcgccttcgtcatgacgatgcagcaacagcaacaggagcatggcggggcccgggccactgacggagatcgagcccgacctgaacgaggaccccattgataagtggcgcaccaacggcgtcagcccggacgacttcgagtatggagtgtatgatggtcaccacacatataatgaaacccaagataagaagggcttttgggaggatgtctctgagtggtaccaagaagctgaacctcctcagggcttccaagcactgatctcctggttgtttcctcctgcaatcatccttggcatggccttcaatgttccgggggagtacctctacatcggcgcagcagtgttcgtcgtcgtgttctgcgttatcgagatggacaaaccggacaagccacacaactttgagccggagatctacatgatggagagatcggctcgcgacaagctcatcgccgactacaacaccatggacatctgggacttcaacgagaagtacggcgagctctgggacttcaccgtcgacagaagagatgagattgtgaaatcgtcttagatatggtattcagaaatggggggtcacatttgttagatgcagctgcagaaacagttcagaaaatcagaaccactccaaagaaaagcagggtggcaaagctgcaagatgagtctcttcaaaataaagaactttgagatgaaatgatgtgtgtatggatcatctcatctactgtaaggcctgctttctatgtctctgacagtctcaactctgaagttctcagccaggtacaaaaggagactgaaaattctgtcatgtgtattttgttttccccccaatgtaatggagaaaatcctgtgaatgacatcactaattcaatagat

SEQ ID NO: 8441 - DNA, 1189 bp, Oryza sativa
  ref <308>: DATABASE ACCESSION NUMBER: AK105789
  ref <309>: DATABASE ENTRY DATE: 2002-08-28
aactaagctaagtgggcagtgggcaccaccatgtcgtcgtcgtcttcctcgccggcgccgccgcacgtcgtcgaggactgcctcggcatcgtgcagctactcagcgacggcacggtgacgcgttccggcgactactccagcatctcgctcatgcgcgacgtcccgatcgacctgcccgtccagtggaaagacgtcgtctacgacgccggccgcggcctccgcctccgcatgtacgcgccggcgaaccacggcggcgaggaggggaagcttccggtgctcgtctacttccacggcggcggcttctgcatcgccagcttcgagctgcccaacttccacgccggtgcgctccgcctcgccggcgagctcccggccgtcgtgctctccgccgactaccgcctcgcccccgagcaccgcctccccgccgcgtacgaggacgccgtggccgtcctctcgtggctccgcggccaggccgccgccgccgccgacccgtggctcgccgcgtcggccgacttcgagagggtgttcgtctgcggcgactcgtgcggcggcaacatcgcgcaccacctcaccgtcggctgcggctccggcgacatcgcgctcgacgcggcgaggctcgccgggtgcgtgatgctctggccatacttcggcggcgaggagaggatgccatccgaggcgccgccgccgccgccggagggcgacgcgtcgccgtcggcgatgggcatcacgctgttcgaccagatgtggcggctggcgctgccggcgggggcgacgagggaccacccggcggcgaacccgttcgggccggagagcccgccgctcgacggcgtcgcgttcccgccggtgctcatcgtggaccccgagctggacgtgctccgcgaccgcgtcgccgactacgcggcgaggctgcaggccatggggaagcgcgtcgagctcgtcaagttcgaagggcagggccatggcttcttcgtgctcgaccccatgagcgaggcctccggcgagctcgtccgcgtcgtcaggcgcttcgtgcacgccggctaggtgatcgtccgaagtaaaccaagatatggaactcggatgacttgtgtactactccagtgttctagcgcgggagatttgcagcttgatcctttcgtcttcatcttgtcatccgtagccaatatttcaattttataaattgtttttatagttg

SEQ ID NO: 8442 - DNA, 1310 bp, Oryza sativa
  ref <308>: DATABASE ACCESSION NUMBER: AK105790
  ref <309>: DATABASE ENTRY DATE: 2002-08-28
atagcggaaccgcaggtttcctctctcccctagttcgccggcggcgtcaaaccctagcgccgccgccgccgccatgaaccaccttcgaaaccaaatccttcttctccgcgtccgctcctccagcacctcgctctctcccctctcccctctccaccgcctcttctcctcctccaccgccgccgcatccatcgccgcagaacccttcgccgtcgaggactacctggtcaccacctgcggcctcaccggggaccaagcgcggaaggcggccaagactctctcccgcctcaggtccccctccaagcccgacgccgccgtcgccttcctctccggcctcggcctctcgcgctccggcatcgccgccgccgtggccgccgacccgaggttgctgtgcgccgacgtggagaagaacctggccaagcgcgtcgccgagctcggtgagctgggcatctcgcgctcccagatcgcgcgcctcatcccgctcgcccgtcagtccttccgcagcagctcgctcgccacgaaccttggcttctggctcccggtcttgggctctttcgagaatgtgctcatggcgctcaaggcgaacggagcgattcttggctccgacgtcgagaaggtggtcaagcccaacctggccctcctccagcaatgtgggatacatgtctgcgatttcccccatacacgcctgcccactgtgctctgcaggccacccaaccatgttcaagaagctgtggcacgcatcggtgagtttggcgtgccacagtactcaccggtgttccgcaatgcgcttgtgccatttgcttaccaaaacaaggagaagctcgctgccaaaattggagtccttgaaatgtttgggtggtcagaggacgatctctcgatgactatgaggaagggtcctgtcgtcatgaacatgtctgtggaaaggctgaggaaaaatgtggagttcttgacaagggatgttaagctcgagacgcgttacattgctcgaaggccaatcatgatcagttatagccttgagcgtcggttgttaccccggcatcgcttgctcaggtttctcagtgcaaagggattgcttgatggtgaattggacttctattcagcggttgcattgactgagaagaagtttcttgacaagtttgtgcattcttgcaagtgtagcattgcagatcctgctaatgcttatgcttctagctttgttggggatgttctgtgaatttattgtctgagaggacaacaggaaaatgggctcattcttgtgctgggagggtactgacaggattgttgtgttggaaagatcaagggtttagacttat

SEQ ID NO: 8443 - DNA, 1830 bp, Oryza sativa
  ref <308>: DATABASE ACCESSION NUMBER: AK105791
  ref <309>: DATABASE ENTRY DATE: 2002-08-28
atcaacggcgtcccggcctgcgccgacgcgcgcctcctcacggagaccgtccgccgcgactggcagctccacggctacatcgtctccgactgcgactccgtccgcgtcatggtcagggacgccaagtggctcggctacaccggcgtcgaggccaccgccgccgccatgaaggccggcctggacctcgactgcggcatgttctgggagggcgtccacgacttcttcaccacctacggcgtcgacgccgtccggcaggggaagctcaaggagtccgccgtggacaacgcgctgaccaacctctacctcacactcatgaggctcggcttcttcgacggcatcccggagctcgagtccctcggcgccgccgacgtctgcaccgaggagcacaaggagctcgccgccgacgccgccaggcaggggatggtgctcctcaagaacgacgccgcgctgctcccgttgtcgccggagaaggtcaattcggtggcactgttcgggcagctgcaacacatcaatgccaccgacgtcatgcttggagactacagaggtaagccttgcagggtggtgacgccgtacgacggcgtacggaaggtggtcagctcgacgtcggtgcacgcatgcgacaagggatcgtgcgacacggcggccgcggcggcgaagacggtggacgcgaccatcgtcgtcgccggcctgaacatgagcgtggagagggagagcaacgacagggaagacctcctcctgccgtggagccaggccagctggatcaacgccgtcgccgaggcctcgccgtcgccgatcgtcctggtgatcatgtccgccggcggcgtcgacgtctccttcgcccaggacaaccccaagatcggcgccgtcgtctgggccggctaccccggcgaggaaggcggcacggccatcgccgacgtgctcttcggaaaatacaatccaggaggaagattgccgctgacgtggtacaagaacgagtacgtgagcaagatcccgatgacgtccatggcgctgcggccggacgccgagcacggctaccccggccggacctacaagttctacggcggcgccgacgtgctctacccgttcggccacggcctcagctacaccaacttcacctacgcgtcggccaccgccgccgccccggtcacggtcaaggtcggcgcgtgggagtactgcaagcagctcacctacaaggccggggtgtcctcgccgccggcgtgcccggccgtgaacgtggccagccacgcgtgccaggaggaggtcagcttcgccgtcacggtggccaacacgggcggcagggacggcacccacgtcgtgccgatgtacacggcgccgccggcggaggtggacggcgcgccgcggaagcagctggtggcgttccggcgggtgcgggtggccacgggcgccgccgtcgaggtggccttcgcgctcaacgtgtgcaaggcgttcgcgatcgtcgaggagacggcgtacaccgtcgtgccgtcgggagtcagcagggtcctcgtcggagacgacgcgctgtcgctgtccttccctgttcagatcgacctgcaggcggcagcatagcagcataggttctctgcaattcttggagttcgttggattcttttgctggggtggtaaaaggtaaaaaaaaaatcgaagcaagtgtaattagtttacaccacgctatagatgaaacttttacaaagcacattgcatcattgggaattaattggaacaggaattttcatttttagttttgctcaatgtattactgtgatggcatgttattcagcaatgttacactttttttttcaataatggaaatcaatcattagcagtgtt

SEQ ID NO: 8444 - DNA, 1560 bp, Oryza sativa
  ref <308>: DATABASE ACCESSION NUMBER: AK105792
  ref <309>: DATABASE ENTRY DATE: 2002-08-28
atcctagaccaccacgatcacttcatgccgttcctggacaagatcaacaagttggacggtaacttcatatatgcgagcaggaccattctgctcctgaaggacgatggcaccctgaagcccctggcgatcgagctgagcctgccgcaccccgatggccagcagcacggcgccgtcagcaaggtgtacactccagccaacaccggcgtcgagagccaaatctggcagctcgccaaggcttacgcctccgtcaacgactctgcttggcaccagctgatcagccactggctgaacactcacgccgtgatcgagccgttcgtgatcgcgacgaaccggcagctcagcgtggtgcaccccgtgcacaagctgctgagcccgcactaccgcgacacgatgaacatcaacgctctggcacggcagacactcatcaacgccgatggcatcttcgagaagaccgtcttcccaggcaagtacgcgctcgagatgtcctccgtcgtgtacaagaactggaagttcaccgagcaggctctccccgtcgatctcgtcaagagaggggtggccgtgccggacccgacgagcccgtacaacgtccggctgctgatcaaggactacccgtacgccgtggacgggctggtgatctggtgggcgatcgagcggtgggtgggcgagtacctggccatctactaccccaacgacggcgtgctccgcggcgacgaggagctgcaggcgtggtggaaggaggtgcgcgaggtcggccatggcgacctcaaggaccaggactggtggcccaagatggacaccgtccaggagctcacccgggcgtgcaccatcatcatctggatcgcgtcggcgctgcacgcggcggtcaacttcggccagtacccgtacgcggggttcctcccgaaccggccgacggtgagccggcggccgatgccggagccgggcaccgaggagtacgcgaagctggagcgcggcggtgacgaggccgacctggtgttcatccacacaatcaccagccagttccagaccatcctcggcatctcgctcatcgagatcctgtccaagcactcctccgacgaggtctacctcggccaacgcgacacgccggagtggacgtcggacgccaaggcgctggacgcgttcaagaggttcggcagccggctggtggatatcgagaaccggatcaaggacatgaacggcaactcggcgctcaagaaccggaacgggccggtgaagatgccgtacatgctgctgtaccccaacacgtcggatgtcaccaaggagaagggccaagggctcaccgccatgggcatccccaacagcatctccatctgagtctcgcgtgcattctttagatcgatatacgtgtgctattgctagtgttgcgcgtttgccgtcgtcgatttgtttcattgtttgtatcagtgtgcattaccgtgattcttcgtagttcagggtctcagggataagtcgttgcaaatgtgagtaaccttgaggcatggataatttcattaggaattattcacatggaataatgaaagttaataaaatcattttgctttc

SEQ ID NO: 8445 - DNA, 1251 bp, Oryza sativa
  ref <308>: DATABASE ACCESSION NUMBER: AK105793
  ref <309>: DATABASE ENTRY DATE: 2002-08-28
acgtacgctacttggactagcccttcacatccgcggagatcccaagaagacacgagtagtactcgcagacaaattctcctcctcctgaaaatccagtgaactgcagcagcagcagacgagctagcaaccatggcgtcgtccacggcagccgacggcgacgatgaggtggtacgtgagttcggcccgatcctccgggcctacaagagcggccgcctggagcgccccctcgtcgcgccccccgtcggcccgggccacgacgccgccaccggcgtccactcccgggacgtccacctcggcgactactccgcgcgcctctacctgcctcctcccgccgccgccgccgagcgcctccccgtcgtcgtctacgtgcacggcggcgggttcgtggcggagtccgcggcgtccccgagctaccacctcttcctcaaccgcctcgccgccgcctgccccgcgctctgcgtctccgtcgactaccgcctcgcgcccgagcacccgctcccggcgggctacgacgactgcctcgccgcgctccgctgggtgctctccgccgccgacccctgggtcgccgcgcgcggcgacctcgaccgcgtgttccccgccggggacagcgccggcggcaacatctgccaccacctggccatgcaccaccaccacgacgcgccgccgcgccgccgcctcaggggcgcggtgctgatccacccctggttctggggctcggaggccgtcggcgaggaggcccccgaccccgaggggcgcgccaggggcgccgggctgtgggtgtacgcgtgcccgggcaccaccggcatggacgacccgcggatgaaccccatggcgcccggcgcgccgccgctggggcggatggcgtgcgaccgggtcatggtgtgcgccgcggagggggacttcctcaggtggcgcgcccacgcgtacgccgccgcggtggccgcggcgaagggcggcgcggcggtggaggtgctggagacggccggggcgggccacgtcttccacctgttcgaccccgacggcgacaaggccaaggagctgctcgacaggatggtcaccttcgttaacggcgccggcgccgacgccgcgtgatctccgagttagcggccgcgcgccattgtttttgcttttgcgtgtgcgaaaaaaattccctactttgatttgatgaactctgccaagctgtgattgaataaatgtgtgatttttatggttgctgatgcataatgtgttaatgaaatgcccgaatttcct

SEQ ID NO: 8446 - DNA, 1567 bp, Oryza sativa
  ref <308>: DATABASE ACCESSION NUMBER: AK105794
  ref <309>: DATABASE ENTRY DATE: 2002-08-28
gtgcgtatccccgcgaaacgcctcgtcgcgttcatatttgctcacggctcgcgcggcactcgcgagagcacctcggcgttagtacccatcaatgcctccctcctcctcctcctccgccaccaccaccagctcgccgtctcgtctccctcctccgcttcgcctcctctgatcacctcgctcgccggcgacgccgcgatcgccaccgcaccgcagggcattgtgtcgtcgaggggagagatgaggcctctgtacctgcgcagcagcggcagcttcaagaagctgctcctctccatcagccaccgcggcgccaagaacggcaatggcgacgccgccgccaaggagagatacacgcccgccgccgccgcggcggcgccggagtcgccgcggaagccggcgtggcggtgcttctcctacgaggagatccaccgcgccacgaacgcgttccacgagggcaacctggtggggaagggcgggtcgtcggaggtgtaccgcggcgagctccccgacgggcgggccgtggcggtgaagcggctgatgggcgcgtgggcgtgcgagcggcgggagcgcgacttcctggcggagctcggcacggtggggcacgcgcgccaccccaacgtgtgcgccctcctcggctgctgcgtcgaccgcgacctctacctcgtcttccacttctccggccgcggctccgtctccgccaacctccacgacgagaagaaggcgccggcgatggggtgggcggtgcggcgcgccattgccgtcggcacggcgagggggctggagtacctgcacaaggggtgccagaggaggatcatccacagggacatcaaggcatccaacgtgcttctcaccgacgacttccagcctcagatttccgatttcgggctcgccaagtggctgccgtcggagtggacgcaccgggcgatcgccccgatcgaaggaacattcgggtgtttggcaccggagtactacacgcatggcatcgtcgacgagaagacggacgtgttcgcgttcggcgtcttcctcctggagatcatgaccgggagaaagccggtggatggcagccacaagagcttgctcagctgggcgaggccgttcctgaacgaggggaggatcgagtcgctggtggatccgaggatcggcggcgactacgacggcgaggaggcgcggcggctggcgttcgtggcgtcgctgtgcatccgctcgtcggcgaagtggaggccatccatgaccgaggtgctggagctgctggaaggcgtcgagatccggcaagaacggtggacgatgcccgaggcagtggaggacgacgacgacgaggagctatggagattcgatgacctggatgacgaagacgacgaagatgaagaggagttcaacactgcatccccatcttcttgctcatcatctttgagcaattagtagttagtaatagtatctaagattgtgagtaagcttgtgatgttgttacaagatgaaatttttgatagttactctccactgggcccacttgtaaatagaaaggattttcatcttatcatcatccaacaggctatgaaaagcaagtagtacc

SEQ ID NO: 8447 - DNA, 1301 bp, Oryza sativa
  ref <308>: DATABASE ACCESSION NUMBER: AK105795
  ref <309>: DATABASE ENTRY DATE: 2002-08-28
tcccccctcccatcctcttccactctctcctctccccttcgtggcggcggcggcggcggcggcggcgtgacgaggaggagcaatggcgatggcctcctccgcctacgccccagcgggcggcgttggcacccactccgcgccgggcaggatcaggccgccgcgcggcctcggcttctccaccaccaccaccaagtcgaggcccctcgtgctcaccaggcgtgggggaggcggcggcaacatctccgtggctcggctgaggtgcgcggcgtcgtcgtcgtcggcggcggcgaggccgatgtcgcagccgcggttcatccagcacaagaaggaggcgttctggttctaccgcttcctctccatcgtctacgaccacgtcatcaacccgggccactggacggaggacatgcgggacgacgccctcgagcccgccgacctctacagccgcaagctcagggtcgtcgacgtcggcggcgggacggggttcaccacgctcgggatcgtcaagcgcgtcgacccggagaacgtcacgctgctcgaccagtccccgcaccagctcgagaaggcccgggagaaggaggccctcaagggcgtcaccatcatggagggcgacgccgaggacctccccttccccaccgacaccttcgaccgctacgtctccgccggcagcatcgagtattggcccgatccgcagcgaggaatcaaggaagcttacagggttttgaggcttggtggagtggcttgcatgattggccccgtgcacccaaccttctggctgtctcgctttttcgctgacatgtggatgctcttcccgaaggaagaggagtatattgagtggttcaaaaaggcagggttcaaggatgtcaagctcaaaaggattggaccaaaatggtaccgtggtgtccgaaggcatggcctgattatgggatgctctgtgacgggcgtcaaaagagaacatggagactcccctttgcagcttggtccaaaggttgaggatgtcagcaaacctgtgaatcctatcaccttcctcttccgcttcctcatgggaacaatatgtgctgcatactatgttctggtgcctatctacatgtggataaaggaccagattgtgcccaaaggcatgccgatctaagggagatgaactgagctgcaagagaggatagccaatatctgaattaggcttctctatattaggcactttctgtcagttctgtatttacttctgttgtccctgttgttatgtacttcttttactgtggttcttgtttgtggggaaataatattatgagaccttgattaagctc

SEQ ID NO: 8448 - DNA, 1511 bp, Oryza sativa
  ref <308>: DATABASE ACCESSION NUMBER: AK105796
  ref <309>: DATABASE ENTRY DATE: 2002-08-28
aaagggttgcttctccactaaaaaaattcatcagcaaatgctccactactatactattcagctcgatcgcactagcttagctaagcttgcttaattagctcaattacctaactcgtattaagaacactaacacaaacacatacacaatccgaacacagctgcttcttctccaactagctacctacctagctcgcttcctttggctctcaagcttctcatcgtacgtctccaatggctgctgcttctactgggaataatgggagcccgccggtggcgcttctggtgctgatggcggcggcgatggtggccgggtggttcgtgaacgccgtccggccgccgccgccgacgccgtgcggggcggagggcgggccgccggtgacggcggcgagggtgcgggtgcgggacgggaggttcttggcgtacgcggagtccggcgtgaggcgggaggcggcgcggttcaaggtcgtctactcgcatggcttctccggcggccgcatggactcgccccgcgcttcccaggcgttgctgaaggagttgggggtgtacatggtggcgttcgaccgggcggggtacggcgagagcgaccctgacccgaggaggtcgctgaggagcgcggcgatggacatccaggacctcgccgacgcgctccagctcggccccaagttccacctcatctgctcctccctcggctgccacgccgcctgggcctccttcaagtacatcccccacaggttggccggggcggcgatgatggcgccggtgatcaactaccggtggccggggttgccgaggggtttggcacggcagctgtacaggaggcagccggtgggtgaccagtggtcactgagagtcgcctactacgcgccatggctgctgcactggtggatgaaccagacctggctgcccacctccaccgtcatctccggctccggctccttccccaacgccctcgacgagaagaaccgcctcatggccctctccaccggactgttccagaagaaggcgaggatggcgacgcagcagggggtgcaggattcgttctaccgggacatggcggtgatgttcggccggtggccggagttcgagccggcggagctggagaagccgccgttcccggtgcacctgttccagggcgacgaggacggcgtcgtgccggtgcagctgcagcgccacatctgccgccgcctcggctggatcagctaccacgagctcgccggcgtcggccacttcctctcggcggtgccgggcctcggcgacaggatcgtcaccacgctcctgccggcggcggcgtaacagctcagcgacggcacaggcaaaatgctgaagagaagcattttgtgtgagctcagctacactgtaccgtacaaaagagattgatgagattatggatgatctatatagtattatcattaagatttaagagggcaaatgactgatgccattgtacatagattctcaacatctttaccagaaaacaaatcccaaccaactcctgcaatttacatacagct

SEQ ID NO: 8449 - DNA, 1745 bp, Oryza sativa
  ref <308>: DATABASE ACCESSION NUMBER: AK105797
  ref <309>: DATABASE ENTRY DATE: 2002-08-28
gattaatctgttcgttctcaaatacttgccacctcgcccggtcgccctgtcccgggggcgacgcgggcggcgaacaagccacgccgcccgcccttctcctcccctccccagcctcgccgccgcccgagccgccgccggcaaagccgggcggctgcaaggacggcggcggcggggctctctctccctcgctcgcggctaagacggtcgggacgtcggcacggcacgagctcagggcatggcgtcggcgccgaccagatccggtgccgtggcatccagatccggtgcggtggtggccggatccggtcccccagtgacgggaggcggcgtcctggcagctcggcggcgaggtttggtggtgggtttgggcggcggcgacctggcgcgaccaggcggcggcgacctggcgggagacgctgccggagctgcctccagtaccgagcacggaggcgtggccagacgacggatgcggcggtggaggtgccgcgagagccggtggtgacgccggcgatgcgggaggaggcaacgacgcctctagccagatctggctggcggtggttgcggctgccaacggcggcaatgacggcggtggcggctgtggcggcatcgactgcggcggctggctggcgaggcagcggccgtggtggtcgaggcgtcgtggaggcggtcgcgcggcctcgtgggtggcgaggcctgccatgcaggtgtcgtggaggccggcgacgtgtggctgtcgtggaggccagcgtcgtccggcagcgggagggcgtcatggagaccggcggcggtgtggagtcgcggtcggcgacatggagctcgcgggcggcgacagcgggtgctggtggctgtaggctgcgacagcggacagcttgtggtgatggccgtggcgatcgtggacgtggctgcggcggaggaggtgaggatggtgatggcgaggtggctgggcgttcggcagcagcggctgcggtggcggagaccacggtcaccggaggcatggcggcttcggacggctagccgagggcgtggcagacggttgcatctggccagcgtggcatcgtttggaggaggggtcggagaccggcttggcgcagaggcgcagccgatggcagcggaggccggctcggggcaaaaggcgcgggcggcggagatggaggccggcttggtgcgagaggcgcagccgatggagggaggccggattggcgcgagaggtgtgtccggtggaggaggccggcttggcgcgagaggcgcggccggcggtggacgaggcgacctcggtgtgaggaagagctgccgatgggtgtagcgcggtcttcgacgcacgaaggctggccggcgggggacgccggtgcaggggtcccacatgtcggcagagcttgagtggtggtggagcatcggtgcgtcagccgtggattcgcaggatgccgggcgtaagcctagtcttggctccttgagccccgacggacggcggcaacggttttccgtcgcttctcttcttgaaggcgtcgttttggcatcccctagggggcgatcttcgtctatgttcctttgttggtctagcggcggtcggtcacgctaagcggcggccgattcggtgctagccttctcccgggttgtgtgttggcgctgtcgatgtgtgggtggtggtatatttttttcctttttcctggttacgaccatccaaggttgtaatcttataatttttttctgctctatcattataatttcgcaccgtctcgtgcgagtcgttc

SEQ ID NO: 8450 - DNA, 1141 bp, Oryza sativa
  ref <308>: DATABASE ACCESSION NUMBER: AK105798
  ref <309>: DATABASE ENTRY DATE: 2002-08-28
aaatcactgcaactcagcagcaagcaagctaactccattttgctttgcattgccaccatgagagcgctcgccgtggtcgtggtggccacggcctttgcggtggtggccgtgcgcggcgagcagtgcggcagccaggccggcggcgcgctctgccccaactgcctctgctgcagccagtacggctggtgcggatccacctccgcctactgcggctccggctgccagagccagtgctccggcagctgcggcggcggcggcccgaccccgccctccggcggtggcggcagcggcgtcgcctccatcgtgtcgcgctcgctcttcgaccagatgcttctccaccgcaacgacgcggcgtgcccggccaagaacttctacacctacgacgccttcgtcgccgccgccaacgccttcccgagcttcgccacaaccggcgacgccgccacccgcaagcgcgaggtcgccgcgttcctggcgcagacgtcgcacgagaccacgggcgggtgggcgacggcgcccgatggcccctactcgtggggctactgcttcaaggaggagaacaacggcaacgttgggtccgactactgtgtccagagctcgcagtggccgtgcgccgccggcaagaagtactacggccggggacccatccagatctcctacaactacaactacggcccggcggggcaggccatcggctccaacctgctgagcaacccggacctggtggcgtcggacgccaccgtctccttcaagacggcgttctggttctggatgacgccgcagtcgcccaagccgtcgtgccacgcggtgatgacagggcagtggacgcccaacggcaacgaccaggcggcggggcgcgtgccgggctacggcgtggtgaccaacatcatcaacggcggcgtggagtgcggccacggcgcggacagcagagtcgccgaccggattgggttctacaagcgctactgcgacatgttgggcgtcagctacggcgccaacttggactgctacaaccagaggcctttcaactcctaatagctcgttctagcttcaagctttgcactgataaccactgatcggatgctttacatcgatgaataagaattcatccgagcagacaaataatacaatcatcagtaatgcccac

SEQ ID NO: 8451 - DNA, 1257 bp, Oryza sativa; identical to SEQ ID NO: 2118
  ref <308>: DATABASE ACCESSION NUMBER: AK105799
  ref <309>: DATABASE ENTRY DATE: 2002-08-28

SEQ ID NO: 8452 - DNA, 1598 bp, Oryza sativa
  ref <308>: DATABASE ACCESSION NUMBER: AK105800
  ref <309>: DATABASE ENTRY DATE: 2002-08-28
agcagctcaaaaccccgcaacaacccaaccctcgtgaccaacccatctccccaccaaccccggccgccgccatgaccggcgccgtctccaagctcgccgccccgaggccggcggccgccgcgccgctcccgccggcgtccgtccgctccgcgttcctcgcctccgccccctccccgcgccgcttctccgtctccatcgccgccggccgcgccaggagccccatcattgcgatggcttctgccaaggaaggaaatggtgccccaacgaagaggacaacccttcatgatctctatgatctccagggtcagtccccgtggtacgacaacctctgccgtcctgtcaccgatttgctgccccttattggcagcggcgtccgtggagtcaccagcaacccatcaattttccagaaagccatctcgacttccaatgcatacgatgaccagttcaagcagcttatattagctggaaaggacgcagagagcgcttattgggaacttgtcatcaaggatatccaagatgcgtgcaaactttttgagcctatctacgaccagaccgatggggcagatgggtatgtttctgtggaggtctcccctaggctggcaaatgatacccagggaactgttgaagctgcaaaatggttgcacaaagtggtcgacaggcccaatgtctacataaagatccctgctaccgcagaatgtgttccttctatcaaggaagttattgctaatggcattagtgtcaacgtcacacttatcttctcgattgcaagatacgaggctgtgattgatgcttacattgatggacttgaggcctctggtttgagtgacctatcccgagtgaccagtgtagcgtccttctttgtcagccgagttgacacacttattgacaaaatgctcgagaagatcggaacacctgaggcacttgccctcagaggaaaggctgctgtagcacaggcaaagctagccaaccagctttaccagaagaaattctctggcccgaggtgggaggctttggtcaagaaaggtgccaagaagcagaggttgttgtgggcatctaccagtgtgaagaaccctgcatacccagacactctttacgtggatcctctcatcggacctgacaccgtttctaccatgcccgaccaagctctgctggcattcatcgaccacggcacagtttcgaggacaatcgacgcaaacgtttcggatgctgaaggtgtatacagtgccctggagaagctgggtatagattgggatgaggttggcaagcagctagagctggaaggtgtggactccttcaagaaggccttcgacagcctgcttgggagcttggaggagaagggcaattccctcaagaagaccgtgagcctgtaggtgcaaagatagctgaaatgttttgaacgctggcaatggcaagtgaacgattactaaataaatgctctaccttgctggctctctccctctctcaaactctcttgtgatgtgctgctctcgaatttctgggtcagcttttgtattctaggcgctcttggctgctatttgtgtaactgaggttgcgaactgctatgcattttctgataaattgttgggcaagttgatttc

SEQ ID NO: 8453 - DNA, 1453 bp, Oryza sativa
  ref <308>: DATABASE ACCESSION NUMBER: AK105801
  ref <309>: DATABASE ENTRY DATE: 2002-08-28
aaggcgccaacgcctcccaccagccacgattcccagtttcctaccaaaaacttgtttctcctccacgtcggtcgagtccgagtccaccgctccggccgccgtctccatggccgcctcctcctccaccgccgcagcgtcatccatgtccggcgccaacggaggaggaggaggagggagcgtgttcccaggccctcccccgccgacgccgtcgaaccaccaccacgcgctcccgtcctccggcgccgcgggtgggggcacggacgccgcgctctcgacgatcctccagcgcctgctcctatcctctccggcgccgattctacgctccccgctctcctctcgctccagggccccgccgtcgctgccgcctctcgtttcgcttggctctagcggcacccttcgtctcgacgccgccgccgacgtggggtacttccacctcgagggacacggcgtcccttcccagctgccgtcctccgcgctcgccgagctctccctcgtcgacgcgtccgcgcgccgcgcgtcgaacctcctcacgctcggattcacggaggaggatcagcaggaagcggacggcgccgaggaccccgccctggtgttcgacgtcgacgacgagggggagatgggcgcgctcccggctgcggcggcggagtacgcgcggcggatgcgggacgtgggcatgcaggtggtggcgatgatgtccgggtgtcccgaggtgggcttcggggaggcgccgttcgcggaagggaggaggaaggcgaggtgcttgatgtgggtctccaaggttgccgctggcgaggcggcgcctccggccgccgggaaggcgaaggcgtacccgtacgtcgtgggcatccattgccagtgggaagcgtccgggaaggaggcggcgccggcgagctgggtgatggacgacggcggcgagtggacggccgtaggcgcgcgcgacggcgcactccttgtcaccatcggcaacattgctcaggtgtggagcaatggaaagctgaagaaagtgagagggatggctcgccccgtttcttctgcacccggagcagggcacggcgccgaggctgaccgcttgtcagtcaccgtgctgatcactctccccttggacagtgtcatctcgccattggtcccggtcacggatgccggagaagagggcggcgacgacgaggtggatggagccggcgatgatggggatgggtggagatttcactcgtttttactcgaggaccttgcgtggagggtgtataatgggcggcttcagttcaaggacccgctggtccggtatcggatataagatttgtccatggtcgtcggcatgttgcatagctttgttttgtttgttggtgtgtgtgtggattggttgtaatcctagtattggagtggtttgagcacgagtgaatcattcatcgtgtgaaaaaaatatacgaactgaaccaggaaatggctcattttcgtg

SEQ ID NO: 8454 - DNA, 1423 bp, Oryza sativa
  ref <308>: DATABASE ACCESSION NUMBER: AK105802
  ref <309>: DATABASE ENTRY DATE: 2002-08-28
agaagaatcccagctaccaaatcgaacctaccaactcattcccgatcgatcgatcttaaaaaaaaactaatcgtaacttttctctctctctcctatctttagaactagcaggtagcaactgcttcgagtgtagtctggtgaacgtacgatctttcgttcgttcatcaagatgaccgtgatcgacggcgccgtcgctgccgacgccggcggcgcagccgcggcggtggtgcagccggggaacgggcagaccgtgtgcgtgaccggcgcggccgggtacatcgcgtcgtggctcgtgaagctgctgcttgagaagggctacactgtcaagggcaccgtcaggaacccagatgacccgaagaacgcgcacctgaaggcgctcgacggcgccggcgagcggctggtgctctgcaaggccgacctcctcgactacgacgccatctgccgcgccgtcgccggctgccacggcgtcttccacaccgcctcccccgtcaccgacgaccccgagcagatggtggagccggcggtgagggggacggagtacgtgataaacgcggcggcggaggccggcacggtgcggcgggtggtgttcacgtcgtcgatcggggcggtgaccatggaccccaaccgcgggcccgacgtcgtcgtcgacgagtcctgctggagcgaccttgactactgcaaggaaaccaggaactggtactgctacgggaaggcggtggcggagcaggcggcgtgggaggcggcgcggcggcgaggggtggagctggtggtggtgaacccggtgctggtgatcgggccgctgctgcagccgacggtgaacgccagcgtcgcccacatcctcaagtacctggacggctcggccagcaagttcgccaacgccgtccaggcctacgtcgacgtccgcgacgtcgccgccgcccacctcctcgtcttcgagtccccttccgccgccggccgcttcctctgcgccgagtctgtcctccaccgcgagggtgtcgtccgcatcctcgccaagctcttccccgagtaccctgtccccaccaggtgctccgacgagaagaaccccaggaagcagccgtacaagatgtcgaaccagaagctccgggacctggggctggagttccggccggcgagccagtcgctgtacgagacggtgaagtgcctccaggagaagggccacctgccggtgctcgccgccgagaagacggaggaggaggccggcgaggtccagggcgggattgccatccgagcatgaggaaaacagcagagcaaaagagcaggaaaaatgtccatatcgtgttagtgtttaccgtgctgtaaaaccaaagtagtagtgttcgctggtttgtctggtctgaagccctgtaatacacccctgttgttgttacatgtgcaccagagtgaccgaataagtatttctatg

SEQ ID NO: 8455 - DNA, 1391 bp, Oryza sativa
  ref <308>: DATABASE ACCESSION NUMBER: AK105803
  ref <309>: DATABASE ENTRY DATE: 2002-08-28
acacttcccgcgactccgcgctcacaagaaccggccatttcttggcagcttcttcttcttcttcctcctcgcgctcgctcacctctccattgttgtcgattgtgttgtactggtaggaggatgaggggccgggcggcggtgttcgcggcggtgctggtcgtgttcctggtggcgtgcaccgccgcggcggcggcggcggcgattaccatatcgaggaagcaccagcacaggccggcgtccggggcggcggcgaaggcggcgtgcgacgtgttcgcggcggggagctgggtggtggacgagtcgtacccgctctacgactcggcgacctgccccttcatccgcgccgagttcgactgccgccggtacggccgccccgacaaggagtacctcaagtaccggtggcagcccagcccgccgtgctccacgcccaggttcgacggggtggcgttgctgaggatgtggagcgggaagaaggtgatgttcgtgggggactcgctggcgctgaaccagtacgagtcgctgctgtgcatgctgcacgccgccgcgcccaacgcccggaccaccgtcacgccggcgtcggggaaggtcgatcccctcaccaccgcccgcttcgaggagttcaacgtgacgatcgtgtactacctgacgcactacctggtggacattgtcaacgagaaggccgggcgagtactcaagctggacgccatcgaccaggcacgcaactggctcagcgccgacgtgctcgtcttcgattcctggcactggtggccgcgctccggcccgacccaaccatgggactacatccaggagggcaacacggtggtgaaggacatggacaggacggaggcgttcagcaaggcgctcaacacctgggctagatgggtcgacgccaacctcctccagaccaacaccagagtcttcttccagggcatctccccctctcactacaggggccaagattggggcgacacggcgagtgcgacgtgcatggggcagacgcggccggtgaacggcacggcgtaccccggggggccgatcccgcagcaggcggtgctgaggagcgccctcgccggcatggcgaagccggtgtacctgctggacttcacctacctgtcgcagctgaggaaggacgcgcacccgaccaagtacaacggcggcatcttcggcgacgactgcacccactggtgcgtcgccggcctcccggatacctggaacgtcctcttctacgccgcgctcaccggccagcactgatggccggctgctgacctgctgtcatcacggccggtgatatgattgagataggatatagtggaaataattaatcaacaggaaaaaagaattatagatacagattgattttatataggtctatatggaaagaatttttctcg

SEQ ID NO: 8456 - DNA, 1783 bp, Oryza sativa
  ref <308>: DATABASE ACCESSION NUMBER: AK105804
  ref <309>: DATABASE ENTRY DATE: 2002-08-28
aaaaaaaccccttcctccccttccttctcctcacttttcgcggcaacctcagtgaagtcagcgaggtgatagcgccagcaaaaccctgaacccctccaaccaccgcagccgcaattccgccgccgccgcagccacgttggccggcggcctactgggggtgctggaggcgcgattgatgagccctgcagccgacgccgcgggcagcgatgcacaggctcgtaccccgcgccgccgcctccttcctcggcgccccgccgctgctcaccacccaggcgggcccgcttctcgccgcgcgttcgggcccaccaaaccctagccgcctccgcctccgcctctccccgtggcggctgctgcgctcgaggagggggctctcctgctccgccgatgcggcgaagaggtgcggggatgatgatgccgaggaggatggcgagcagagcgtcgccgggggaggtgggagccgtccggtggtggataggaggcagagaagtcggggcgatgcggcgatggggagcggcgagctgctcgcgattcctggagtcgggccgcgcaacctgaggaagctcgtggacaagggattcgatggcgtggcacagctcaagcagctgtacagggataagttctttggcaagtccaatgagaaaatggttgagttcttgcaaagttctgttggcatcatacacaagaatcatgctgagagtataactttgttcattaaagaaagtgttggtgaagagctgaaaggaactgactcaccaaatgtttccaaaaataagaggctgaccttttgtgtggaagggaacatcagtgtcggaaaaactacattccttcaaagaattgccaatgagaccatcgaattacgtgaccttgtagagatagtgcctgaacctattgctaaatggcaagatgttggccctgatcacttcaacatacttgatgctttctatgctgagccacagaggtatgcatacactttccagaattatgtgtttgtaaatctaagagctagtcccgacacttgccacaaaagaatgatggttcggaaaagatctgaagagggtggtgttactcttgattaccttcgaggtttgcatgagaaacatgagagctggctgcttccttccaaaggacaaggtcctggtgtattatcggtcagtcaagttccagtccatatggagggctctttgcctccggatataagagaacgagtattctacttagaaggagatcatatgcattctagtatccagaaggttcctgctctggtcctcgactgcgaacatgacattgattttaacaaggatattgaagccaaacgacaatatgcccgacaagttgcggagttctttgaatttgtaaagaaaaagaaagaagatccttctgcggagtcaagtggtggtgataagagtaccaacaaacagattatgcttccccacagaggtggtttgtgggttcccgaaggtaaccctttaccaggatctgctctgaactctctggatttcagaagagcaatgtcttccttcctctcagcttaggggccaacatcccatatgaaatagccaattcctggccaccatatgttccagtattacaaattctgaatggtccatcgtcacatctgcgtctcagatagccttgaactgacgaccctgtaaatgctgaagatttattgaaatataggtttctgtatagcgctagccaatgctgtacaatagtagtatcaaactcgtccatgtaaatgttcactcttcttcgtcgtcaataaaaggcgtccctgtaaatgatt

SEQ ID NO: 8457 - DNA, 1350 bp, Oryza sativa
  ref <308>: DATABASE ACCESSION NUMBER: AK105805
  ref <309>: DATABASE ENTRY DATE: 2002-08-28
gtccgggactccggcgctgcgacgacgacacgttcagagactccgggctcccgccggcgagaggccgagggaagtccaatccgtgttgaaggcacagatgtcatcctgtaccatggcctctttaatttgttcacagataaaattaagcaaagcacatattaggaacaggagacagattcatgagaatggacaaatcagattgcctaaatctctttattggaaacctctacactctggccattttgaaaatattgtcttgcgatgcactcaaaatttgtcttgggaggcctcccttccatatgcctctgcagaagatggtgccaacattattaagggaactgaagttgttgaacctattgatacagaagaagcaccagaaattccgatcctccagagtgaccaggattttgtggaggtgataaaagaaccttccatgcagctgacaacttttaaactgccaatttggcttttagggccttcaattctgttggttacgagtatagttccaactttatggctaccattgtcttcagtgtttcttggtcccaacattgccggccttctatccctagtgggacttgacttcatttttaacatgggagcaatgctgtttttccttatggctgatgcttgtgggcgtccggaggccaattcatccgaactgataaagcagatcccaacttcttacaggttctggaatctggctgccagcatagtaggctttcttgttcctttggccctgtttttcgcatctcataagggtactctgcagccacatataccattcattccgtttgcagtgctgcttggaccatatctcttgctcctttctgtacaagttttgactgagatgcttacttggcactggaaatcgccagtttggttggtggcccctgtggtttatgagggttaccgagttctacagctgatgaggggtcttcagttagccgatgagatcactgcgcctggatggatggtgcaaagtcttcgtggtttggtgtcatggtgggttctggttctaggcatccaactgatgcgcgtggcttggtttgctggactcaaatttgcaagcacttcaaggtacggagcaagtgatgataataagtaaattcggacaagaaaaaaatgttcaggtttacatgttttgctcatgcctctgccatctgcagcacgaaatgctattctgatgctactcctggcaccgtctggggttgctcacaggtgccttcttcatcaactagttcagtagatcgtatagacgaacaattatcagactgtgtgtaatcactcttgtacatacaaagtttttttttataatacagaaatatatgtctttacatttcctcggtg

SEQ ID NO: 8458 - DNA, 1404 bp, Oryza sativa
  ref <308>: DATABASE ACCESSION NUMBER: AK105806
  ref <309>: DATABASE ENTRY DATE: 2002-08-28
atatcgttcaagatgccgccacgaaacggcaacctcgtcctcgccgccgccgccgccgcgctgctcgtgctgctggcgtcgccgccgtcgtgctccgccgcggcgcctcgtcgtcgggaccccgtggtggttcccgtcaccagggacccggccacctcgctctacaccatccccgtcaggtactacgacaacctcgtcgtcgacctcgccggcccgctcgtctggtcgacgtgcgccgccgaccacctgccggcgtcgctgtcctgccaggacccgacgtgcgtggtcgccaacgcgtaccgtgctccgacctgcaaggtcaccggcggcggcggcgactgcagcaagaacgtgtgcacggcgtacccgtacaacccggtgaccgggcagtgcgccgccgggaaccttgcccacacgaggttcatcgccaacaccaccgacggcaagaaccctctgatccaggtctccgtcaaggccgtggcggcgtgcgcgcccaagaggctcctggcgcggctgccgcgcggcgccacgggcgtcgccggcctcgccgcctccggcctcgcgctcccggcgcaggtcgcgtcgtcgcagggcgtcgccggcaggttcctcctctgcctcccgaggctcgggtacggccagggcgtggccatcttcggcggcggcccgatatacctcggcgaagggctgccggacttcacgacgacgctggactacaccccgctcgtcgccaagagagacaaccccggctactacgtcaccgccaacgccatcgccctcgatgacgcgcggctacccctcccgagcggcgcgctcgccgccggcggcgtggcgctgcgcaccgccgtgccgttcggccaactccggccggacgtgttccgcccgttcgtccgggagttcgagaagggcctgaaccggagcgacgcgaaggtcgccgccgtggcgccgttcccgctctgctacagggcgtcgatgctggggaacacgcggatcggctactttgtgccggcggtgaggctgatgctcgccggcgggaagaactacacgatgacggggaccaactcgatggtggacgtgaaggggggcaaggcgtgcctggccttcgtggagatgaagtccggcgacgccgccagttcgccggcggtgatcctcggagggttccagatggagaacatgttgctgcagttcgactcggagaagaagcggctcgggttcgcgaggctgccgttctacacgtcgtgcagtaacttcaatttcaccaagactcagtagataatttacttacttaccactgtttcgcggccatgtaactgtaactgtaatgtcggtgtccggcatgccatatgcccgtatctgtcacccatttaagaactttgcttttaatatatagtccatctaccatct

SEQ ID NO: 8459 - DNA, 1803 bp, Oryza sativa
  ref <308>: DATABASE ACCESSION NUMBER: AK105807
  ref <309>: DATABASE ENTRY DATE: 2002-08-28
gatgaacggtttagtgctgttgagcgtccaagggagcgtgaagacttatttgagagctatcttatggaactacagaagaaggaaagagccagggctgctgaagagcacaaaaggcacatagcagaatatagagcttttctcgagtcatgtgaattcataaagacaagtacccagtggagaaaagttcaagaacgtcttgaggatgatgaacgctgttcccgacttgaaaagatcgatcgactggagattttccaagagtatataagggatctggagaaagaagaggaagagcacaagcggatacataaggaacaagtaaggaggcaagagcgcaaaaatcgtgatgaatttcgcaagatgttggaagaacatgtagctgaaggaatgcttactgcaagaactcgttggcgtgattactgtgcccaggttaaagattcctctgtgtacttggctgtggcctcgaacataagtggttcaatgccaaaagatctgtttgaagatgtaatggaggagcttgagaaacagtatcaagatgacaaagcccgaattaaagaagcagtgaagtctggaaagattcctatgacgacttcatggacactagaggatttcgaaactgctgttacggaggatgatactttgaaaggaataacaaacataaacatgaagcttatttttgatgatcaagttgaaaggctcagggaaaaggaggtaaaggaagcaaagaagcgccagcgtctgggtgaaaatttctcagatcttttgtactcaatcaaggaaatatcagcttcttcaacatgggatgattctaaagcactattcgaagatagccaagagtacaaggcattggacagcgaaacatactctagagagcttttcgaagagtgcgttgtccacttgaaagaaaggttaaaagagaaagagcgcttgagggaggaagaaaaggcaagaaaagagaaggaacgtgaagagaaagaacggaggaaagagaaagaaaagaaggagaaagaacgcaaagaaaaagaaagagacaaggagaaagaaagagaaaaggacaaaggaaaggatcggtcgaggaaagatgagatggatattgatgctgttgatgcagatagccatggctcaaaagacaagaaaagagaaaaggacaaggaaaagaagcataagagacaccaccatgacactgcagatgatgtgagctctgaaagggatgagaaggatgactctaaaaagtctcgtagacatagcagtgatcgcaagaaatcaaggaagcatacccatgcttcggactctgatagtgaaaatcggcacaaaagacacaaaaaggatcgagatagctcccgcagaaatggcacacgtgatgaccttgaagatggtgaacttggagaagatggggagattcattagtcattcgtttctccgctgagatttatcacaatacagtcccccctcctgttttggacatatgaaatggtgcattttgttggcaactataaatgctttcctccagagaaggacaatttctttatggggattatcttcttgtcttgatctggcttgttggaaatggacaataatagccttcattgtttggatgctcacaatgtagtcatgaaggttcttgtactgcaaaacttttgttgcctttagttatcttcttatccccttccctttgtcagtctgggtataggttgtatttgctataggagggggagggctgtaaagtgtttagtggctgaaaaagatcctttagaaggttaggtgcgaaatgcatgcaatgctgaggtttataactgaatttcgttg

SEQ ID NO: 8460 - DNA, 1381 bp, Oryza sativa
  ref <308>: DATABASE ACCESSION NUMBER: AK105808
  ref <309>: DATABASE ENTRY DATE: 2002-08-28
aaaaaaaaaaaaaaaaactccctccctggaatcctctcgtcgtcggcgtcgccgccgccggatgcgccacgctctactgcatgctcctcctcgttgactgcagagataaattggaagagaaagaatctgaagaaacctaccatggtcactatacatatggtgatttgggtgaaaagtgttttggcactataggtcgatgcttgacagaaatcctcatccttgtttcccaagcaggtggatctgtagcttatctaatattcattggccaaaatcttcattctgtcttcagccagttgatgtcaccagctgccttcatctttgccattctcctgcctatgcaaatcgctctatcattcatccgttcactatcttctctctccccattcagcatatttgcagacgtctgcaatgttcttgctatggcaattgttatcaaagaggatcttcagctttttgatcacccatttgcgaatagaagtgctttcaatggactttgggcgataccattcacttttggagttgcggtcttctgcttcgaaggattcagtatgactttggcactagaatcatcaatggcagaacggagaaaattccgctgggtactttctcaagcagttgtcggtatcataattgtctatgcatgttttggagtttgtggttacttagcctatggggaggccactaaagacatcataacacttaatcttcccaatagttggtcttctgctgccgttaaggttggtctttgcatagcactggtattcacatttccagtcatgatgcacccaatccacgagattgtcgaggaaagattccaatcaagtggatgtttcccgaagctctcgcacaaggttcgcggggctgaatgggtgggcctgcactcaagccgcatcgtcatggtaactatcctgtctgtggtggcatccttcatacctgcgttcgggtccttcatctcctttgtcgggagcacggtttgcgcgctgctctccttcgtgctgcctacgatcttccatctgagcattgtgggttcctcgatgagtccgtggcgacgctggggggactacggtttccttctcttcggccttggttttgcgggctacgggctcattagggctctcttctcacattgactgatgatccaaatggcaaagaaccacaatgcaggattcaactgcagaatatgtccaatctgggaagtgggaacgaaggcattgagatgagatgtatttactgcctttgttgttcagggtgtaatatatgtgatgccaagatctaggattatgtgataatgatcttttgttggtgtaagttatatgtatattaccagtgtcacgcagtgacgcaatggatcatgctatccaatcaattttcatatgttctt

SEQ ID NO: 8461 - DNA, 1910 bp, Oryza sativa
  ref <308>: DATABASE ACCESSION NUMBER: AK105809
  ref <309>: DATABASE ENTRY DATE: 2002-08-28
aagagctctagtggctaaagctgaactggatgctttatcgaaaatgactgataagattcttcttgagcttgataatattcggattttactgcaagcaacagttgaacttgataaggttgcagctcgtgcaaaatatagtatagcatatgatggtacatatcctgatctctatttacccaacttcgtaaatggaacagtcagtactgctacaggcgggtctatcagtacaatttcctcagctcacctctctaagaaggcatggaaactgtgcatgccaaatgcataccatccattattgctccaacaacaccaggaaaatctgcatcgtgcaaaaaaggatgtagcaagtgccacagcagaaatccggaggaggaggatatatggacaagacaatgtagaagaagatcaactggcatctgacctcgatttaatgaaaattagggtctcccagatggagaaagaccgtccagtaccagtagattttttcattgctgaaggaactactgtattggtcataactggtccaaacacagggggcaaaacaatcagcttgaagacagttggtctggcatctttaatggctaaaataggtttatacattctagcttctgaaccagtaaaaattccgtggttcaatgctgtttatgctgacattggagatgagcagtctttgacacaatcactctccacattttctgggcatctaaagcagatcggagccattcgcgcatggtcaacttcacaatccttggttcttttggatgaggttggagctggtacaaatccacttgaaggagctgctttggggatgtctcttttggaatcttttgctgaagctggttcctttctgactctagcaacaactcatcatggagaacttaaaacgttaaaatatagcaatgatttgtttgagaacgcgtgcatggaatttgatgaagataatctaaagcccacatttcggattctctggggaataccaggacgttcaaatgcaatcaatattgctgaaagacttggtttgccctcggacataatagaaagctcacgacagttacttggaacagctggtgcagagataaacgcgttgataatggacatggaaaatttcaaacaacaatatcaacatcatcttcaagaggcacaatattatgttatgcagtccaaggagcttcacaataacttggaagtggcacagaagaacattatagaccacacttctgctcaaagaaaaagaaaggcgagagtaatttcagagtatgctgttatggctcgttccattatacgtaagaagtttcagcagttccgcgaatctgcaatagccaaaagagtgcttgaagaagagaaagctgtgcagaacgacaaacctgagagattgaaggaccctgaaccaacgagtactcctgctgtcaaaaaggcacagaacacaaacatcagcatggccacaacgaccgaaggtgaagataatgggattccggaagttggagatttattatgttcctaagctcaaaaacgaagctactgttgtcaaaatagactcatcgaagaacgaagtgcaagtccaagctggtataatgaagctcaaactaaaattcaaagatgtcaagattcagaagaggatctccagataaaacggctgcgctaccacctgcattggcagagataagtatgtaaaccttgtttttatacagttacattgcttttctctgccgcgtctccattctcactgtatacatctagtcatttatacacagccatgcaattgtagtagatcttcagttttcatgcagcatgtttccatcatgttatagaagttagaacccgtagaatccatctggaattgaacttgaaattgtttgaacgatcgttcgaagcaaattcgctaacaaataaagaatgtccgggaattttgc

SEQ ID NO: 8462 - DNA, 1376 bp, Oryza sativa
  ref <308>: DATABASE ACCESSION NUMBER: AK105810
  ref <309>: DATABASE ENTRY DATE: 2002-08-28
gagaagccaatccgcgaagctaccaaaccgagccaaaattttgatcgatcgatcggccggccggtgtctttgttgaggcgtgcaaggctcgtgctttcgccgagagggattaattagccgcgcctccagcatctccggcctccatagagatcccagcttataattaaagctgtcaagagtcgttttggttgttaggcttaaagttaactactgctggctagctaggactaagagatccgagggagcagacatggctgctgctacttcgaccatgtccctgcttcctcccatcacccagcagcagcggtggcacgccgccgactccctcgtcgtcctcgcctcccgctgccacaactctcgccgccgccgccgctgccgctacgtcgtgccgagggcgaggctgttcgggccggcgatcttcgaggcgtcgaagctgaaggtgctgttcctgggggtggacgaggagaagcaccagcacccggggaagctgccgcggacgtacacgctgacgcacagcgacgtgacggcgaggctgacgctggcggtgtcgcacaccatcaaccgggcgcagctgcaggggtggtacaacaagctgcagcgggacgaggtggtggcggagtggaagaaggtgcagggccacatgtcgctgcacgtccactgccacatctccggcggccacgtcctcctcgacctcatcgccggcctccgctactacatcttccgcaaggagctccccgtggttctgaaggcgttcgtccacggcgacggcaacctgttcagccggcacccggagctggaggaggccacggtgtgggtctacttccactccaacctcccacgcttcaaccgcgtcgagtgctggggcccgctccgcgacgccggagcgccgcccgaggaagacgacgccgtcgccgccgcggcggccgaggaggcggcggcggagcagatgcccgcggccggcgagtggccgcggcggtgcccggggcagtgcgactgctgcttcccgccatacagcctcatcccctggccgcaccagcacgacgtcgccgccgccgacggccagccgcagcagtgacggcggcgccgccgcgattcgtagattagcgaattcgtttggttgccatggtacacctacacgcatgcaatgtcgccaaatgacgctgcgtgctttgcgttaaattctttaattattcgtagtggcatttagctcagctcagctcagctctgcaattagcacatatttgattagctttagggaatgagtgtggtgagcttgtaaatagaagaacactagtagatggcaagcaaatggaaacgatcgatgatgcagtagatgttactgcaaaaatggcaattattagatgaagtcgacacac

SEQ ID NO: 8463 - DNA, 1522 bp, Oryza sativa
  ref <308>: DATABASE ACCESSION NUMBER: AK105811
  ref <309>: DATABASE ENTRY DATE: 2002-08-28
aaaagcgtcgtcctcaacctcaaacctcgcaattttctatctgttctccctaccaggcgctatttattcagattgagctaatcagccaccaaactcgcagaattgtggctgttttcttcctctccagcttccaatctgatcgttgtcagtgtggttattggagcagttgccatcgatcatggtcgccaagatcaagcgacagatcggcggcctctcactcctcgctaagcttggtttgcttctgctcgcgctgctgctgcttcttgctgctatcttgctgttggtgttcttgctcccgcgtcaccatcggaggccgttgccgccggggtcgccgccggtgaacgcctccgaccccgacaacatcgtggcgtttgatttctcgccgttccttatactgtacaagagtgggcgcgtccaccggatggatgggacggaccgcgtccccgccggcgtcgacgaggccaccggggtgacgtccaaggacgtcgtcatcgaccggagcaccggcgtcggcgcccggatgtacctaccgccggcgaaaggtgcggggaagaaggaccttgccggcgcgctgcccgttcttgtgttcttccacggcggcgcgttcgtcatcgagtcggcgttcacggccaagtaccacgactacctgaacaaggtcacggcgaaggcgcgcgtcgtggcggtgtccgtggactaccgcctcgcgccggagcacccggtgccgacggcgtacgacgactcgtggcaggcgctgaactgggtggccaagaacggcaggtccgggccggagccgtggctgcgggaccgcgggaacatgtcccgcctgttcctcgccggcgacagcgccggcgccaacatcacgcacaacatggcgatgcgcgccgggaaggacggggggcagcttgagggcggcgtggccatcaccggcatcctcctcctcgacccctacttctggggcaagaaccccgtgggcgcggagaccacggacccggcgaggcggcgccagtacgaggcgacgtggtcgttcatctgcgacggcaagtacggcatcgacgacccgctggtggacccgctgtccatgccggcgccggagtggcggaagctggcgtgctcgcgcgtggccgtgacggtgtccgacctcgacgacttcaaggagcgcgggaaggcgtacgcggcggcgctccgcgacagcgggtggggcggcgaggtggaggagtacgagaccgccggcgaggtgcacgtctacttcctcgacaagccctcgagccccaagtccgccaaggggctgaccttcgtcgccggctacctgagccacgagtagcaacagcagcacaacggcatgggtgtcagattggtcgcagacttgcagtacatgattgattgataattactcattagtggagtaccagctagtacagttgtctacatgtcttcttgtcttgtgcatctatagatttctccattgtttgatcgatcggtcatccggatccagttcatgatgagtacagtgaaattgctgggg

SEQ ID NO: 8464 - DNA, 1473 bp, Oryza sativa
  ref <308>: DATABASE ACCESSION NUMBER: AK105812
  ref <309>: DATABASE ENTRY DATE: 2002-08-28
gcaacgcaacgaactccttccaagctcctcgccaatggcgtcctcctccgccctcgcttcctcccccttcctcccgcccctctcaaccccaaaccctagggccctctccctccgcctccccgctcgccgcctccccgtggcgtcctccgcggctccctcgggcgctgccgctgcggcgtcggcgagggagcgccgccgcttcctggagcggtacggcctcaaccccgacgacttcgaggacgatgccgaggcggaacccagggaagagaggagaagggataggcggaaccggcggtcgggtagaggggaggcggaggatgctccggcgaaggcggcggctgagcctcgggagacgcataaaatgcttcaggtgttaggaggaaaagtacgcagaagaaaattactttcaccaaaagataggaatgttcgtccaatgatggaagttgtacgaggggcagcctttgacattttacagtcagctggtggttttccggcttcgcttagacctggtcgatggttagacttgtatagtggtactggatctgttggaattgaggctatgagccgtggatgttcagaggcacattttgttgagatggatccttgggttgtttctgaggtccttaaaccgaatctggagtgtactggatttcttgatgtttcgcacatacatatgatccgcgtcgaaaacttcttggccaatgctgaaaaatctagtggtaaatatccttcttttgattatattagtgtaacaccgccatatcttgaggtaaactacagtacactactcgatcaacttgcaaggtcaccattggttggagaagattgcttcattctcgttgaatacccactgaaaacagacatggccgaatcatgtggaagccttataaaagtagctgacaggaggtttggtaggacaaacttgctaatttatgggccaacctgggctgagaagaagaggagatcttgagatgatttgtgagacattgaggtatgctaattactggaaaggaacgctgtctcgacagtgtcaccgcactcttgaacagcaacgagtggctcagctcctctcgaaactatcaacagtgaaattcatggaacatcctgtggagatgatggactactgtctagtacactggaagattgtatgagggagagacagagagtacttctctttcattatagttcaccaatccacatcccagaagaagaaaatgatcactggctcactgcgtttcaaggcatcagcatcaagccaccatgcgatagtgacctatctccacgttgctacgagcctgactctatctagcattgtaggtcatgcctcgccggtgatatgatctgagccgtacatttatgcattcagacattcagtacactggctctagctgcacaggcatttgtgtgctcaatctccatagaacaacatgattatgttgcttattgatcggtggatgcaataagtttataagc

SEQ ID NO: 8465 - DNA, 665 bp, Oryza sativa
  ref <308>: DATABASE ACCESSION NUMBER: AK105813
  ref <309>: DATABASE ENTRY DATE: 2002-08-28
gcttagctcttgtccatccatcgatctcctcctcttcacaagcaagcgcgagaggagacacctccatcgatccatggccgccaccgcgaccgccgttgcggcgtctctgtccgtggccggggggctcgggaggccgctggctcgcgtctcgtcgccggcggcgccgatgaaagccgcctccccggcggcggcacggcgggccgtcgtcgtccgggcgtcgtcgtcgggggagccggtgaggagggagaaggcctcagctgctgccgcggcggcggggatagccgcggtggcggccgtggcggcggcgctggcggtgcccgaggtggcggaggcggcgccggcgctgtcgccgtcgctcaagaacttcctgctcagcatcgcgtccggcggcgtcgtgctcgtcgccatcgtcggcgccgtcgtcgccgtctccaacttcgaccccgtcaagcggacctgatcgatacagctgcttctttgcgtagctgtgacgtatgacatgagatccatggcttcaaattctgtatgctacaagagaacggtagtgcagctgcatgaaacttttgctgcacgtgtacgtacgtgtttgtgttggcttaattaattcgatttcatgatgcgtatgtgcaattgtaaacttgtaattgagtttttccattagtagt

SEQ ID NO: 8466 - DNA, 629 bp, Oryza sativa; identical to SEQ ID NO: 5504
  ref <308>: DATABASE ACCESSION NUMBER: AK105814
  ref <309>: DATABASE ENTRY DATE: 2002-08-28

SEQ ID NO: 8467 - DNA, 1312 bp, Oryza sativa
  ref <308>: DATABASE ACCESSION NUMBER: AK105815
  ref <309>: DATABASE ENTRY DATE: 2002-08-28
ctctcgccttgtcaccttacttgcttggctactactacttcaccacgcacagctggttggttggttggattagctagctactaggatcagtgcttcgcttctctctctctttgcgttgccgtcgtcgtcgccgctggtggtggtggtggttgttggtgagggagagatggaaggaggaaggggggtgacgagggtgctgctggtggacgactcgccggtggacaggagggtggtgcagctcctcctcagcagcagcgcatgcgccggctcattccacgtaatcgccgtcgacagcgccaagaaggccatggagttcctcggcctcaaggaagaaggcaaggagcaggccatcgacatggtgctcaccgactactgcatgcctgagatgactggttatgagcttctcaaagccatcaaggcgctgagccctctgaagccgatcccagtgatcgtcatgtcgtcggaaaacgagccccagaggatcagcagatgcatgaatgctggtgctgaagatttcatcgtaaagcctcttcaaagcaaggacgtacagcgtctcaggaactgctcgccggcgaacacgcagtgctgcgacgccgggagcgacggcaagccgccgctgctgctgctgccatcggaccacgtcgtcgtcgacgccaccgccgcgtcgccgccgccgccgccgtcccggcgtcgggcgcacttcgctggagttgccatggtcctgcactcgtcgagcgtcgagctgtcacattacttccctttcctcttcaagttcatcctgctggtgtacgccatcctgtgcctgggtgagctgctgcacagatggtcaaacggctgcttcctcaacctgtggtgtgcttgacgaatgaagcaaccggtgcagtccaaatgcaaaggcaggctgcaactggcaaagctctttcttgtttgcgatagctttctgcactgaaagagcagcatggagaggaggttaatgttacaacagatgatgatgatgatgatggaagttttaggtagattgtttgctttgagattctaacctggagcttggttcttcttggcctttgattgatgagaggagggaggaagaaccaatccttgtatccttgtacaaaaagcataatgaggcagtatctgatgtcctttttggttgggatcttggctgatatgtcgatgtgacattcagagagctttttccttgccctttcctttcgccgatggcaactcctcacctgtattgtagttcagatcccatgagaaaagaactacacaagttgactaatgcagcatcaggttcttctgatgggaaaag

SEQ ID NO: 8468 - DNA, 588 bp, Oryza sativa
  ref <308>: DATABASE ACCESSION NUMBER: AK105816
  ref <309>: DATABASE ENTRY DATE: 2002-08-28
actccaatcaccaccgcttcttctcctcctccatttcctctcgttcctctctctctctctctctctcgtgcggcgagccaccggaatcgtcgtcgtcggcggccatgtcggggcgcggcaagggaggcaaggggctcggcaagggcggcgccaagcgtcaccggaaggtgctccgcgacaacatccaggggatcaccaagccggcgatccggaggctggcgaggaggggcggcgtgaagcgcatctccgggctcatctacgaggagacccgcggcgtgctcaagatcttcctcgagaacgtcatccgcgacgccgtcacctacaccgagcacgcccgccgcaagaccgtcaccgccatggacgtcgtctacgcgctcaagcgccagggccgcaccctctacggcttcggcggctgatcgatcgtacctccatcccccatctctcccatgttgtctggccgtggaatccaccttgttcagttcgccgtttagttttgtagggtttacctgaatcatgaaactgtgaagcagatgatgtttgcacctgggatttgaattgaaacatgtttcagggccaatgttatggatc

SEQ ID NO: 8469 - DNA, 1334 bp, Oryza sativa
  ref <308>: DATABASE ACCESSION NUMBER: AK105817
  ref <309>: DATABASE ENTRY DATE: 2002-08-28
aacccccatcgccaccaccaccaccaccactcgcgaactagacagaaaccgcaagaaaccaaacaccttttggctcctccactagtagcaactactcgttgtcgtcgtcgtcgtcgactcgtcgtggtagtagtagtcttcttcgcgtgacgccatgggaggaggaggaggagttgaggcggattgcgacaggatcagggggccgtggagccccgaggaggacgaggcgctgcggcggctggtggagcggcacggcgcgaggaactggacggcgatcgggcgggagatccccgggaggtcggggaagtcgtgccggctgcggtggtgcaaccagctctcgccgcaggtggagcggcggccgttcaccgccgaggaggacgccaccatcctccgcgcacacgcgcggctcgggaacaggtgggccgccatcgcgcgcctcctccagggccgcaccgacaacgccgtgaagaaccactggaactgctccctcaagcgcaagctcgccgtcgccaccaccaccaccaccaccaccaccggcgccgccgccgcgccgggagtggtcgccgatgccgccgagctcgtcgagcggccgtgcaagcggttcagccccacgccggacagcccgtcggggtctggttccgggtcggaccgcagcgacctcagccacggcggcgggttcgggcagattttccggccggtggcgaggaccggcgcgttcgagcccgtcgactgcgccatcagccggcggcaggaggaggatcccttcacctcgctctccctctcgctccctgggacggatcagcggttcaaccacgacagcgcccacagccacttccaagaactcccgtcctccccctcgccgccaccaccacctccccccgccgccgccgcctcgacgacacagtacccgttcaccccggagttcgccgccgcgatgcaggagatgatccgcgccgaggtgcacaagtacatggcgagcgtcggcgtccgcgccgggtgcggcgacgccggcggtgccgacctccacatgccgcagctggtggagggcgtcatgcgcgccgccgcggagcgcgtcgggaggatgcactgatcaaaaacctagcgtccattagaatctctactatcgtttcaactttttttttccttaaaaatttgtttccaaaactgctgtgaaaaccgaaacagcagtccgaaacggaagaaccaaaaaaaaatgcgaggagagatgggaaagaaatgtttcgagctacgaaaaaaaaccgaaaagctcggctacctatgtacaggaaatggaaatggaaatgcaaatgggggaagtgagtggtgaatcatgc

SEQ ID NO: 8470 - DNA, 1377 bp, Oryza sativa
  ref <308>: DATABASE ACCESSION NUMBER: AK105818
  ref <309>: DATABASE ENTRY DATE: 2002-08-28
aaaccctagatccgccgcctccccgctcctccgtctccgactccggcgacgcccgcgcggccacgatgccgaacctcgagtgccggatgtacgagccgcggttcccggaggtggacgcggcggtgatgatccaggtgaagcacatcgccgacatgggcgcctacgtctccctcctcgagtacaacaacatcgagggcatgatcctcttctccgagctctcccgccgccgcatccgctccatctcctccctcatcaaggtcggccgccaggagcccgccatcgtgctccgcgtcgaccgcgacaagggctacatcgacctctccaagcgcagggtctccgaggaggaggcgcacgcctgcgaggacaggtacaacaagtccaagctcgtccactcgatcatgcgccacgtcgccgagaccctcgggatcgacctcgagccgctctaccagcgcatcggatggccgctgtaccgcaagtacggccatgccttcgaggccttcaagctcatcgtcgccgaccccgatgccatcctcgactcactcacctacgaggagaaagagaccggcgctgacggacaggaggtgactaaggtggtgcctgctgtcacccctgaggttaaggatgccctagttaagaatataaggaggaggatgacaccacagccacttaagatccgtgctgatgttgagatgaaatgtttccaatttgatggggtgcttcacattaagcaagccatgaggaaggctgaagctgctggtaatgataattgtccagtgaagattaagctagttgcacctccactttatgtgctgaccacacaaactcttgacaaggaccaaggcatttcagttctcactgatgcaattaaagcttgcacagctgagatcgagaagcgcaagggaaagttgatagttaaggaagcaccgagagctgtgagtgagagagaagataaactgttcaatgagcacatagaaacccttaacgagcaaaatgcggaggttgatggtgatgctgacagtgaagaggaggaagatacaggaatgggtgacatcgaccttacaaattccggtgtcaacgcggattaaagttccgctatttgatttggatgagttttgttgtatagcaccagccaatcttaagtcgtcctatttgaaaagagttcgttaggttctggtggctgtgacccctttgaattcactgatgcgcgttgtctggggtgtttgcgttttggggttgaggtcgtgttggagaattgctcgagtagcatctaattttttcttgggatcgaaacataattctgttgctatacatcgtctttgattggccacttctattgcccgttgtttttcattcaaaatatcattactgatgattact

SEQ ID NO: 8471 - DNA, 1552 bp, Oryza sativa
  ref <308>: DATABASE ACCESSION NUMBER: AK105819
  ref <309>: DATABASE ENTRY DATE: 2002-08-28
agtgttcttccttctccaaaagaagcctcaataagtttgcctgccctaagtgtgctgagatcatccttaatagcgatgatgctaaatcaggtgaacctatcgttgacagaaccactttttggccatccatcttccgttgagctgttgaggttccctggaggaattacagtaattcctgagcagtctggttctgtatgggcggatcctcttttcaactttgtgttgaacaattccatttatcagatcttgggtaatattacagagctaaaggaccagttgaagcttggattgaacttgaggtcctacgagaaagtatatttgcagttcaggaatgagattggatcttcagttgatgccccggcaactattgaggcatctgttctagatgggagcagcattcttttaccatatagattgaaacaactagctcagctaatcaaagaacccaatgcaaggaaccttgggcttaatcactctgtatttggtaaagtaaaaggtgttcaactgtcatcatacctacagcattcgatctcagatttatctccgagtccatctccttcaccatctccatccccatccccatctccatctccatctccattcccttcttcaagtgtaccaccatctttctcaccatctgggagcatccattaccctgcacctccaacatatatgaacccaagtcttcctcctcaagcttcaccccctttgcctgacacaaatccttgctttccatgtttcaattgtgaccgcttttcttccgctggtagcccaacaggcaaaccaccttgttttcgcagagaccctaagctacctccatttatacactccccgcagccatctgttgctccttccccatatctttctccagcttttccaccaattcctggtcatgtagatcctcccaatcatttacctggtgcagtccctggaccaacttatcaaatgatgtcaataccttcaccctcattgcctgtgtttcgaccttcaatggctccatggaagaagcgacgaaaaaccaagtcccccccttcaattgccccttccccatattctctccattcctgaagtgagacttggctggtgccctggactgtttgcctacagagttaccagtgcacaaggtggttgtggttgcaaagtttgcttcttgaaatctcctgaagcatggagttgcaatcgtgagcgatcgtactgcaaaggcaggtttatgaatgcaatcatgagcaatcatactgcaaaaaggcaggttttgcttatcggttacttctaactgtatggtggtttctcgcacttcagagttggagtataactgtagatataggtctgtattatgctaatttaccagggtttttatgtcacgaaggtgactgccctacgcctctaccaaatatcaagtttctcaccgaagggttgggtgcttatggtagaggagaatgtaatgacttaccatagtcgaattgatgttgtatcttgcgatacgactgttcgtttcctgtaacatcatcatatactgagcataatacgatacatttacacccgtctttctgcg

SEQ ID NO: 8472 - DNA, 1249 bp, Oryza sativa
  ref <308>: DATABASE ACCESSION NUMBER: AK105820
  ref <309>: DATABASE ENTRY DATE: 2002-08-28
catccatgcgttgcagcaggagaggggataagaatcacagattcccatcacctcaaatccacccccatgaaaagccgcattagctgagcaatttatcagtgttgcactgtactcctctcctaattaagatcgtgtcatgcttccttacattccttggcatttgtcagtgttgttgtcattgtcgttgtcatcatcatcatacatcctctctctgaacttctcttctcttctctgaacactgtctggtagcttcatacaccttggcttggctcttggctctctgcttctcctacagctcaacgacacgacatgccattccttcttccttgagatcgaggagagaattgagataagtcgataagaagaagaagaagaagggtcttgtctcctcttgtttctatatgggaatcaggcggcggtcagagaggttgctaagggcaatggcgtgctgcaggatagttcttgtcttcttcttcttcttcttcttcttctgcgtctgcgtcttggtggcgacgacaacgacgatggatgctgtgaagggtacgagtgctgcggccgctggcggcggcggcggcgggaggtggacggagttgacggcggggtcgccggcgaggtactcggccggtgcagacgagttcagaggcagcaagaggaggatccccaaggggcctgaccctattcacaacaggcgtgccgggaagacgacggttgcgccgcggcggagagactagccggagaagaagaagaaagcccttcttccagtgagcatctggatgagactgaaggagctatatgatgtgcactagccagctctaccggcaatgcataagatggaggatcattggctttgtgcaaagaggtagctagcttctcctttactgaagaggattttggtagtgggggtatgtacaaaagttgcaatcttccctctcaagaaatctgccatttttttgaccaatctttcgcatattcttccatgatttgatttgaatctatggtgattcctcttttttctttctttctttcccttttttcttgtgtgtaattaagaagccagagatgccgaattggccatcattctcttgccaagagtcccttctgttcttattgtcagtataggttcagacttcagagcggccaacctgacaagctgttcgatgatgtatattcaactcagttcgtgtgtgtgtgtgtgtgaacaattcattgttgttttgcaatttcactgcatcaaatgttactattcatc

SEQ ID NO: 8473 - DNA, 1414 bp, Oryza sativa
  ref <308>: DATABASE ACCESSION NUMBER: AK105821
  ref <309>: DATABASE ENTRY DATE: 2002-08-28
catcgccaagggcgggccgagggagccatggcacgacatccactgccgcgtcgagggccccgcggcctgggacgtgctcgacaacttcgagcagcggtggcgcaagcaggccggcaggggcaaggacagccttctggtcaccctcgaccggagcatggccgcgcgcgacgccgaccaggccgacccggagcactggaacgtgcaggtgttccgctccatcgacggcggcgcggcggcggggttcccggagagccccgacgaggccgcggcggcggggctggtgtccggcaaggaccaggtgatcgagcgcagcatccaggacgcgtacatccacgcgatccggcgcgcccgcgacttcatctacgtcgagaaccagtacttcctggggagctcgtacgcgtggcgcggcggcaagggcggcgtggcgagcgtggaggggatcaacgcgctgcacctggtcccgagggagctctccctcaagatcgcgagcaagatcgccgccggcgagcggttcgccgtgtacgtggtggtgccgatgtggccggagggcgtgccggagagcgactccgtgcaggccatcctggactggcagcggcgcaccatggagatgatgtacagggacgtggacgccgccatccaggccaaggggatccgcgccgaccccaccgactacctcaacttcttctgcctcggcaaccgcgagcgcctccccgtccccggcgggtacagctacgagccaacggagcgccccgaccccgacaccgactacatgagggcgcagaacgcccgccgcttcatgatctacgtccacgccaagacgatgatagtggacgacgagtacatcatcgtggggtcggcgaacatcaaccagaggtcgatggacggcgggcgggacacggagatcgcgatgggcgcgtaccagccgagccacctggcgtcggtgaaccggccggcgaggggccaggtgcacggcttccgcctcgcgctgtggcacgagcacctgggcagggcggctgcggcgtcggccgccggcgaactcctccggccgtcgagcctggcgagcgtgaggctcgtgaaccaggcggcgcggcgccactgggacgcgttcgcgagaggcgacggcgacggcgcgccgccgacggaagacctcccgggccacctgatggcgtacccggtgcgctggacgggctgcggcggcagcgacggcagcgacggcagcgacggcaagctcgtcgcggcgacggagacgttcccggacaccaaggcgaaggtgctgggtgccaagtctgacgtgctcccgcccatcctcaccacatgaggatgaggaagtccccatgcgtcgtcatgctgtgcttgctgagtgcagaaatgttcgtttacgtgcaatgcaaggtggttgtgaacttacaagtgt

SEQ ID NO: 8474 - DNA, 2009 bp, Oryza sativa
  ref <308>: DATABASE ACCESSION NUMBER: AK105822
  ref <309>: DATABASE ENTRY DATE: 2002-08-28
ggcgccgcaaaccccctctcgacttgagcgagcgagagatggaggaggatcaaggagggaagccacccgctccggatgccggcggcggcggcgggggaggggagagcaagaaggggagcccgtgcgaggagtgcggcgagcagccatggaagtaccggtgcccgggctgctcccgcctcacctgcagcctcccctgcgtccaatcccacaagcgccgcaccgcctgcaccggcaagcgcccccgcaccgaccccgtcccgctcgccaacttcgacgaccaccagctcctctccgattacagctttctggaggagacgaagcaggtggcggagtccgcgcatcgcctcatcggcgccttcggccgcaactacggtggattcggcggtgcgcagcttccgaagtggctcttttacctccgcaaggcggcgcagcggcgtggtatctggctccagttccttcccaggggcatggccaggagggagcagaaccgttcaaggcacaaccacagaaaggattgcatatactggacgcttgaatggaaatttaattcaacagatgttgtcctgactgaccacaacatagatgagcataccagcttgctatcatcattggaaaaacatctgagtcctggaccttggaaaaatcagctcacaccatatcgcaatacagatttgcgtgatctcaaactgttcattcaaaagtctgccaaggaatcaacttcaccatatcgccaactcaacatagaagaaccattgggtccacaactgaggagcattaaaattgtcgagtacccaactattaatgtctttcttccatcagacagttgtgatttcgaagtagaaaagtttgtcaacaagcttcctgcaagtgagaagccccctggcagctcgaccgatagcccagatctagaaggcactgagtttcatgaggaagaaatagaagaaggagaattggcaccagaaacacaagttatagacctcaaggaatgtggagcttcacatgcctctaacctagcttcagcgaaggatacaagtggatctaaggtagacaccaagagagattcttctgtgctgtcatatatacgcagtcttggattagatggtcaacaaaaagcactaactgaacgaagcaagatggcaccaaatacaacatctggggcttccaagactaaaaattgcatgaaagtctatccgatggacatggaggaaagtggggatgctggggtgatctcggagaggcagggcatagaatgtaagaaccaggcagcttcgcatcctggtaatcttacacctgtggaaggtacaaccgtatctaagatagatagcaacacagattctttagtgccgtcttccatcagtattctagcatctgatggcttcagttgtcctcaggttgaacataatcaacaaagcaggctgacgccaaattcaactcctgaagctctgaaaaggaagtcttgcatgaaagtttacccactggacaccgagaaaaatctggggttattttcagaggttcccaacttgggctttgagcaagaaatcggaaatgcttattcagatttgtttggggacataaatcctgatgatttcctcaactttgatcttgaaatgatggatgaagatgaattggcagggataacgtcgccacttaagctgtgggatgatttggaggaaggggagattccaaccgcttgatcattgtgactgtgggatgatcttaagccagtctagcaaatgagctttgcaggacaggagttctttttctctagaggcaatcagattcatctgttagcctttttcttgatgtattattcgtcagaagttttgtccaagtttctttgttcttttgcgccttgcactgcagcatagggtgcctggtgttcttcaagccaaaggtgccttttttgatagctgcagtaattttgggggtgtaaccttgttgttgctatctttcggaatggaatcaatgaacaatgttaatggatgtgaaaacatgtcagtttgttgctg

SEQ ID NO: 8475 - DNA, 1638 bp, Oryza sativa
  ref <308>: DATABASE ACCESSION NUMBER: AK105823
  ref <309>: DATABASE ENTRY DATE: 2002-08-28
acgaatgctgctgcacatgaggatgctcaagaggtagtagaggaggaaaaggaaacaaagcggcatttgaatgtggttttcattggtcatgttgatgctggaaaatcaactgccggagggcaaatacttttcttgagtggtcaagtcgatgacaggaccatccagaagtatgaaaaagaagcaaaagataaaagccgagaaagctggtacatggcttacattatggacacaaatgaggaagagcggctaaaggggaaaactgttgaagttggtagagcccactttgagacagaaactacaagattcactattttggatgcaccgggtcataaaagttatgttccaaatatgataagtggtgcatctcaggcagacatcggtgttctggttatatctgcccgaaaaggtgaatttgaaactggttacgaaaaaggaggacagactcgtgaacatgtactgcttgcaaaaactttaggtgttgctaagttgatagttgtcatcaataagatggatgaaccaactgtaaaatggtctaaagaaaggtatgatgaaattgagtcaaagatggttccttttctcagatcttcagggtacaatgtcaaaaaagatgttcactttttgccaatatctggtcttttgggaagcaatatgaagaccaggatggataaaagcatttgtagttggtgggatggtccatgtctttttgaagtcctggattgtattgaagttcctttgcgtgaccccaaaggtccagtcaggatgccaataattgataagtataaagatatgggcactgtagtgatgggaaaaatagaatctgggaccatcagagagggtgacagtttgttggtcatgccaaacaagactaacgtgaaagtcattggcataagtttggatgagcacaaggtacgccgtgctggacccgctgagaatgtccgtgtcaaattgtctgggattgaagacgaggatattatggctggttttgtgctctcaagcattggtaatcctgttggtgctgtcactgaatttaatgctcagttgcagattctagagttgcttgacaatgctattttcacagctggctacaaggcagtgttgcatatccactctgttgttgaagagtgtgagattgttgatcttatagaggaaattgatatgaagaaaaagaaagaagctgatccaaagaagaaaaaaccaaagcggaagcctctttttgtgaagaatggtgcggttgtagtttgccgcattcaggtgaataatttgatttgtatagagaacttctctgattttcctcagcttggaaggtttacacttcgaacagaaggtaagacggtggctgtagggaaggttgttgctattccaccagctggcagcccaacattttcagcttaagtcaattttgaacaggatggatgtctcttgagagcttctggaagcaatgacattgcttgagcatacattttttccggcccggcttgaaaatcatcaatcatttaggcatagctgttattattaagatgggttgcataatttatagctcttgttacatgtttgtgaggttgtaaaatcagtatgggtatatccctgccctaaccttccaatttgaataccagtgttgcaaaggtttttcgtgtgcac

SEQ ID NO: 8476 - DNA, 1660 bp, Oryza sativa
  ref <308>: DATABASE ACCESSION NUMBER: AK105824
  ref <309>: DATABASE ENTRY DATE: 2002-08-28
aaaaaaaaactacactcctggggaaacgagaggtggtgttgatcgaagtgatttgaaacctcttattatcaatcaacctgagggcccgagcttccgcattaacggatattttgtggaatggcagaagtggaacttccgtattggcttcacccctaaagagggtttggtcatctattctgttgcatatgttgatggcagccgtggacgtcggccgatagctcataggctcagctttgttgagatggttgttccttatggagatcccaatgaaccacattatcgcaagaatgcttttgatgctggagaagatggacttgggaagaatgctcattctcttaagaggggatgtgactgtttaggtttcataaagtattttgatgcacacttcacgaattttacgggtggtgtggaaacaattgagaattgtgtatgtttgcatgaggaagaccacggaatcctttggaaacaccaggattggagaactggtttagcagaagttaggaggtcaaggaggcttactgtttcatttatctgcacagttgccaactatgaatatggtttttactggcacttttatcaggatggcaagatagaagcagaagtaaaacttactggaattcttagtttgggagctctgatgcctggggaatcaagaaaatatggtacaaccattgctcctggtctgtatgcacctgttcaccaacacttttttgttgcccgtatggacatggctgttgattgtaaacctaacgaggctcataatcaggtggttgaggtaaatgtgaaagttgaaaatgcaggcacacataatgtgcacaacaacgctttctatgccgaggaaaaactactgaagtctgagctgcaagcaatgcgagattgtgacccttcatctgcacggcattggatcgtaaggaacacaagggctgttaatcgtactgggcagccaaccggctacaggctcgtgcctggttcaaactgtttgccgctggctctacccgaggcaaagtttctgaggagagcgggtttcctgaagcacaatctctgggtcacgcagtacaagagcgacgaggtgttccctggaggggagttccccaatcagaatccacgtatccacgagggcttagctacctgggtcaagaaggataggcccctggaggaaactgacattgttctctggtatgtgtttgggctcacccatatcccaaggctggaggactggcctgtcatgccagtggaacgcatcggcttcatgctcatgccacatgggttcttcaactgctcgccggcggtcgacgtgcctcccggctcctccgacgctgacatcaaggaagccgagtcgcccaaagccatccagaacggcctcatctcgaagctctgaagagctttccgctgctcttcgtttcgaagaaatgcaactgtggcatgtcactgctacgtatgcttctcgtcactatattgccccaaataaaagctactcccatggtgttattcctgtgttctgtactgttatgactttcctgctgcgctgtttgatttgtgaaatgtgtcctgttgcgccatttgatttgtgaacttgagccacgtctggtgaaatttgggatggctgacgttaatgcctgtattaataaaagcgcgtgttagacagccttgtcatgtgctt

SEQ ID NO: 8477 - DNA, 1345 bp, Oryza sativa
  ref <308>: DATABASE ACCESSION NUMBER: AK105825
  ref <309>: DATABASE ENTRY DATE: 2002-08-28
gcgtaatagctcactgatcgagcgcccttgcgctgaagatgaacggggctaagcgatctgccgaagctgtgggatgtcaaaatgcatcggtaggggagcgttccgccttagagggaagcaaccgcgaaagcgggggtcgacgaagcggaagcgagaatgtcggcttgagtaacgaaaacattggtgagaatccaatgccccgaaaacccaaggtttcctccgcaaggttcgtccacggagggtgagtcagggcctaggatcaggccgaaaggcgtagtcgatggacaacaggtcaatattcctgtactaccccttgttggtacggagggacggaggaggctaggttagccgaaagatggttataggtttaaggacacaaggtgaccctgctttttcagggtaagaaggggtagagaaaatgcctcgagccgaggtccgagtaccaagcgctgcagcgctgaagtatgagccccgtggactagccattgcttctccacgaggctcataccaggcgctacggcgctgaagtatgtaacccatgccatactcccaggaaaagctcgaacgaccttcaacaaaggggtacctgtacccgaaaccgacacaggtgggtaggtagagaatacctaggggcgcgagacaactctctctaaggaactcggcaaaatagccccgtaacttcgggagaaggggtgccccctcgcaaaagggggtcgcagtgaccaggcccgggcgactgtttaccaaaaacacaggtctccgcaaagtcgtaagaccatgtatgggggctgacgcctgcccagtgccggaaggtcaaggaagttggtgaactgatgacagggaagccggcgaccgaagccccggtgaacggcggccgtaactataacggtcctaaggtagcgaaattccttgtcgggtaagttccgacccgcacgaaaggcgtaacgatctgggcactgtctcggagagagactcggtgaaatagacatgtctgtgaagatgcggactacctgcacctggacagaaagaccctatgaagctttactgttccctgggattggctttgggcctttcctgcgcagcttaggtggaaggcgaagaaggcccccttccgggggggcccgagccatcagtgagataccactctggaagagctcggattctaaccttgtgtcagacccgcgggccaagggacagtctcaggtagacagtttctatggggcgtaggcctcccaaaaggtaacggaggcgtgcaaaggtttcctcgggccagacggacattggtcctcgagtgcaaaggcagaagggagcttgactgcaagactcgactgtacgtattttcgac

SEQ ID NO: 8478 - DNA, 1793 bp, Oryza sativa
  ref <308>: DATABASE ACCESSION NUMBER: AK105826
  ref <309>: DATABASE ENTRY DATE: 2002-08-28
ctcgccgcctccggccacgccacaatgtccaccaccaccaccaccaccgtcacagaacccgacaatgccgaagcctcgccatcgccgtcgctgctgtacccggcggcggcggaggcgtcggccgcggtcgccgccctcctcgcggacctccggctgggccacgcggcgcacacccgcgtctccgccacgcggctgtccggcggcgagcggcgtcgcgtgtccatcgggctcgccctcctccgggaccccggggtcctcctcctcgacgagcccacctccggcctcgactcctcctccgcgcacgtcgtcgtcggctgcctgcgcgccgtcgcggccgcgcgcggcacgacggtggtgctctccatccaccagcccagctcgcgcctcctctccgccgtggactccctcctcctcctctcccgtggcgccgtcgtgcaccacggctccgtcgactccctcgacgccgcgctcctctcccacggcctcgccgtgccggcgcagctcaacccgctggagtttgccctcgaggtactcgaccagatgccccacccgtccgcctcctcccctgagcccaagacgacggaggagctcgccgccgtgacgtcctccaagtcgtcgtcgtcgtcaacctcgccgtgctcgaggatacacgaggtggtggtcctgtacaagcgggcatggaaggtggtgtaccgaagcaagcaactgctgctgaccaacttcctggagtcggtggtggtggggacgctgctggggagcatctacatcaacgccggcgacggcgagggcggcgcgcacaagcggctggggctgttcgccttcacgctgacgttcctcctgacgtccacgacggagacgctgccgacgttcgtgtcggagcggccgatcgtgctggcggagacggcgtcggggctgtacaggctgtcgtcgcacgcggcggcggcgacgctggtgttcctcccgtacctcctggcggtggcgctcctctactccgcctgcgtctacctcctcgtcggcctctgcgcgtcggcggcggcgttcgcggcgttcgtgatggtggtgtgggcggtggtgctgacggcgaactccttcgtgctgttcgtgagctcgttcgcgccggactacatcgccgggatgtcgctggtgtcggtgtccctcgccggcttcttcctcttctccggctacttcctgtccagggggagcatgccgccgtactgggtgttcatgcactacgtctccccgtacaagtacgccctcgacgccctcctcgccaacgagtacacctgcgccgccacccgctgcttcggcgtcgccggccccgccgccggcgactgctccgagaccggcgccgacgtgctggcggagaaggggctcacggccaaggagcggtggaccggggtgcaggtgctcttcggcttcttcctcctctacagagttctctactgggtggtgctcagccgccgagccgccagggccaagaggtgacccatccatcgtcacctccagctcaggcgacggcgagcggccgcaccgtacgtacgtacgtgtgaacgcgtgcatggagacgaagtggggcccatgcatgcgcatgcaagtcaaggtatgacgtcaacaatggcgtagacaaggtggtgatcgagttaattaactggtaattaagctgctgctgctgctatactgataagtgatgatgtgtatattttatgaacataaaaaaacgagccttttatatgtgtaatgatgagtggttgatagtgcgatcttgacttgaaaatcacgatcgaattacttct

SEQ ID NO: 8479 - DNA, 1341 bp, Oryza sativa
  ref <308>: DATABASE ACCESSION NUMBER: AK105827
  ref <309>: DATABASE ENTRY DATE: 2002-08-28
gtgctccagcgcgccgccgccttctcccgccggagccgctcgactcctcctagagcgcgccagcccgctgccgccgcctcccgctggagctgctcgcctcctcctcgcgcgcacccgccggagccgcctcaccctacccgccgctgcctgcttccctgctcgcgccgcgccgcgccgcgatggagaggaaagagaggcgggttctgcacttctgctccccctaccccgctgactcctcgcgcgcgccggcgcgcgggccggacatccgggtgccgcctgccggaaaggggatatgaggtggcggagagtcttgctaggaggagagggggccattggaggagggctggaggtcgctgcgcatggcccgtcagcatcggcgaggttgactgggcaagaggcgagcgccaacagaggtgccggggaggagcaggccgccggcgcggtcataggagagggtgccgaccggaggcagagccgacgacccctaggaccgccacctgtgccaccactgctgtcatcatcaacatcctgtatgatttttcattgttgttgttatcagggatgcgctggaacgagggcacaggactagggccgttggacatcattcatgctagcagatagggacaccagcaacaccagcaacaggtgaggttgatgttctatattcatgcttgcaatgtgtttgatgaaatgcttagctagcactagcatcatctcctgtttacaatttgacaatttatagatgtcatactgaccaaatttctggttgattgtttgctgctttcaaattaacaattcaatggttcttagtgtattctacttaacctttgcatttgtactactgtaattctgaaggtagaaaacaagatttctactgaacttcgtcgatttaagcaaagcttttgaacatatggtcatccattgaggctcccgcaattccagtttgcaaagcttttgaacatatggtcatccattgaggctcccgcaattccagtttgcatgttctgccatcattttggatcatattttccatgcttatggaaggacaaaatgaactgtagtttttgttggcagtgatctccattggatgtcccgtctcttagctggccgtcaatgatacaaccaggtcacgcatgaggtagcagtcccctccaacccagttgctgaagacttgtctcatctggtttcattgatgcgtgcgagtgaggcacatgctgtccaggtcaaggtacagtaaaacatcagcttatgagatctgaaagcaacaaaagggtaccaactttacacccatgtaaaatacagtgatttcagtccgttctatgtagctattttgatttcttc

SEQ ID NO: 8480 - DNA, 1253 bp, Oryza sativa
  ref <308>: DATABASE ACCESSION NUMBER: AK105828
  ref <309>: DATABASE ENTRY DATE: 2002-08-28
aaacgccgctccgtccggccacctccccttcctcctccatcatctcaccgggtgcgcttcccctccccttcgtacaacgaagatttgctattcgccagggcccaaccacggttatagctcacgtagccgctacaggcttcttcgccgcctcgtctcctcctcgatctcccttcctccctagaaaatctctcggatctcgccgagagctagcggctggctggcggcggtggcgcggtggcagcaaagtgtacgctttgcagttgctgccggcgcggcgcggcagcggtgacgacgaagagggaggaggagagaggctgtgtcgggtttgtgttgtgtttgtgtgtgtagtgtgagatctggagacggccgggaggatggcgcgcggcgggagcttctcgcggctgcggctgcgcgcgggggtcgttgtcgccgccgccgccgccgccctgctcctcttcgccgtcgtcgcgccgcccgccgcggcgctcaacatcggcctccagtccgccggcgacggcgcgagcaaggccgggttgtgcagccgcacgtgcgagtccgaccactgcacgacgccgccgttgctgcgctacggcaagtactgcggcatcctgtacagcggctgccccggcgagcagccgtgcgacgagctcgacgcctgctgcatgcaccacgacaactgcgtccaggccaagaatgactacctgagcacggcgtgcaacgaggagttgctggagtgcctggcgaggctgcgggagggctcgtcgacgttccaggggaacaagtgcatgatcgacgaggtcatcgacgtgatctcgctcgtcatcgaggccgccgtcgtcgccggcaggctgctgcacaagccttagcttacatagcctcagccgtgctgcaggcaccacccctgccggcggcgaacggcggccggatcgacggcatgggcggcgcgaaggatgagcagtattgtcctctaacttcgaatcactgacgtgtaggtccagtagatgtggggcctacatgtcagtcagtcacagtcaataatgaccgtactacagaggataaagtgcttgtgcgttattgggtgggtggtacatgttttgcttgcttggtgtgtgtcagtgtgtgtgtgtgtgtgcagcttagctagcaccgggctggcggctgcgtgcgtcgccttcaacttcacagttcacgtgggctcccccttgacagaggcccagacttacgacaaatatatgcagatcacaaatattact

SEQ ID NO: 8481 - DNA, 1503 bp, Oryza sativa
  ref <308>: DATABASE ACCESSION NUMBER: AK105829
  ref <309>: DATABASE ENTRY DATE: 2002-08-28
ggaccttccagacgttcggcttcccgtcggcgaccaactcctcttccttttcgaacaccaccggcaacgcgtcggcgcagactgtccccggcgaggcggccgcgggcggcgccgcctctcgcaagaagaggttcgggctcgccctcggcatcctcggccccgtcgcgcttgccgtctccttcgtcttcttcgcctgggtgtccatcaggaagctgatagagctcacctcccggaagaacgccggcttcttgcccgagctggtgaaggggccgaggaagttcagctacaaggagctcagcgccgccaccaggggattccacgcgagcagggtcatcggcaaaggcgcgttcgggacggtgtacaaggcggctatgccggggacggccaccgcatccgccgtctcctacgccgtcaagcgatccacgcaggcgcaccagagccggaacgagttcgtcgccgagctctccgttatcgcctgcctccgccacaagaacctggtccagctcgagggatggtgcgacgacaagggcgagctgctgctggtgtacgagtacatgcccaacggcagcctggacaaggcgctctacggcgagccctgcacgctgtcgtggccggagcggtacacggtggcgtccggcatcgcgtcggtgctgtcctacctccaccaggagtgcgagcagcgggtgatccaccgggacatcaagaccagcaacatcctgctcgacggcaacctcagcccgcgcctcggcgacttcggcctcgcccgcctcatggaccacaacaagagccccgtctccaccctcaccgccggcaccatgggctacctcgcgccggagtacctccagtcgggcaaggccaccgagcagaccgacgtgttcagctacggcgtcgtggtgctcgaggtgtgctgcggccgccgccccatcgacaaggacgacggcgggggaaagaacgtcaacctcgtcgactgggtgtggcgcctgcacggcgaagaccgcctcatcgacgccgccgacccgcgcctcgccggcgggttctaccgcgacgagatgctccggctgctgctcgtcgggctgagctgcgcgaaccccaactgcgacgagcgcccggcgatgcgtcgcgtggtgcagatcctgaaccgcgaggcagagccggtgcccgtgccgcggaagaagccgctgctcgtgttcagctccagcgcgtcgatcaagctgcaggagatcgcctttgcctgcggcgacgacgtccgcggcggccttccggcggcggccacgtcgccgaggtctgagggcggcgacattgaacgctagctgctgacactgatcactgaagcagagtaaaggataatactgagtatgaattactaatactagtgtgattcttatacacgattgatggattgtatttgtgatgtgctcctaaggggaatataagtaataatccccgctgttgtacgagttttgaaatacttatacatctaccactaccaaggtgtgtttcagc

SEQ ID NO: 8482 - DNA, 1496 bp, Oryza sativa
  ref <308>: DATABASE ACCESSION NUMBER: AK105830
  ref <309>: DATABASE ENTRY DATE: 2002-08-28
aaaaaaagaagaaaccgctcttgctgtggctcaacggaggtcccggatgctcatccgtcgcctatggcgccgcccaggagctgggcccgtttctggtcaggagctacggcgaaaatctcactctcaatgcctactcatggaacaaagctgtgaatctgctgttccttgaagcgcccgtcggcgtggggttctcctacacgaaccggacatctgatctccgacgcctcggcgatcgtgtgacggcgcaggactcgtacagcttcctcctaaactggctgaacaagttcccagagttcaagaatcgggacttctatattgccggagagagctatgctgggcactatgtcccacagctcgcagagctaatctacgacgggaacaaaggagccagcagagacagagtcatcaacatcaaaggtttcatgatcggcaacgcggtgctgaacgacgcgacggaccagatgggcatggtggagtacgcgtggagccacgccatcatctccgacgagctctactccgcggtgcgccgggagtgcgactcgttcaaggaggaggaggacggcggcaagccaagcaagggctgctccccggccgtccgcgccttcctcagggcctacgacgacatcgacatctacagcatctacaccccgacgtgcctctcctcctcctcctcctcccccgcgtccgcatcgccgcgccgctcgtctcccgggctcgtcgccgcgccccgcctcttctccaagcacgtaaaagaggcgtggcgcaggatgcagcgcgtgccggcggggtacgacccgtgcacggaggagtacgtgaaggggtatttcaaccgcgaggacgtgcagcgcgcgctgcacgcgaacaggacgggcctgagctacccgtactccccctgcagtgaggccataagtaaatggaacgactcgccgtcgaccgtgctccccatcctgaagaagctcatgggcgccgggctgcgcatctgggtttacagcggtgacacggacgggagggtgccggtgacgtcgacgcggtacagcctgaacacgatgaagctgcggccgcggctgatgcggaagaccgccggcgatggcgccggcgaagagtcggagtggggcgggtggcgcgcgtggtacgacaggcagcaggtgggcgggtgggcggtggagtacgaggaaggcctgacgctggtgacggtgcgcggcgccgggcaccaggtgccgctcttcgcgccccggcggtcgctcgccatgctctaccacttcctccgcggcagctcgctgcccgcttcgcgctcccgctgatgagcactgctgcccaagtgcagccatagctttgctaactttgctcgattggatagggaaggcaatggttttaagtgtgtagcattccgtgaacaattgggaattgttgttctcggctggtacaagcaccctctgtaacccgcatgctactacggttatcatacgcagcagttggaacctttacgttccggtgtc

SEQ ID NO: 8483 - DNA, 890 bp, Oryza sativa
  ref <308>: DATABASE ACCESSION NUMBER: AK105831
  ref <309>: DATABASE ENTRY DATE: 2002-08-28
attcgataagcgaggggctgatgctgtgtttgccttccaattgagaaatccagtacataatgggcatgccctgttgatgaatgatactagaaggcgcctcttggaaatgggcttcaagaatcccattctactgctgcaccctttaggtggcttcacgaaagctgatgatgtcccgttgcctgtgagaatggaacaacacagcaaggttttagaagatggtgtccttgatcctgagactactatagtgtctattttcccctccccgatgcattatgctggtccaacagaagtgcaatggcatgcaaaggcacggattaacgctggtgccaatttctacattgtgggtcgtgatccagctggaatgggccatccaacagaaaagagggatctgtacaacccagatcatggaaagaaggtccttagcatggccccaggtttagagaaactcaacatattgcccttcaaggtagcagcatatgatacagtggcgaagaagatggcgttctttgatccttcacggagtaaagattttctgttcatctcaggaaccaagatgcgggcttttgcgaaaagtggagagaaccctcctgacggtttcatgtgccctggtgggtggaaagttcttgtggactactacaatagtttgcaaaccgaagaagcggctgtggcaactgtatgagaaacctactggtttgctgagattgttcagtcgcggcaggcacaagatcttcagatctctcagagatatttttttttaggttgatattgattgatgcgatgaaattgttattccaattcatcaatttttgtaatgtggtatcatgaagcttgacattggaactcactagtgctgggtaaattgagctgaaattccattgtcattgttctgc

SEQ ID NO: 8484 - DNA, 526 bp, Oryza sativa
  ref <308>: DATABASE ACCESSION NUMBER: AK105832
  ref <309>: DATABASE ENTRY DATE: 2002-08-28
atttcagctggcgagcgtgaggatgctgccatgggcgaaggccaacatcaacccgacggggcaggcgctgatcatctgcacggcggccgggatggcatacttcgtcgccgccgacaagaagatcctctcgctggcgaggaggcactccttcgagaacgcacctgaacacctcaagaacacctccttccagggcaccggccgccctcaccctgccttcttcaggccctgaacaattagaacagcatatgcatgcatgaatctgaaacttgatcacagtatctagctctcgatcgatccctgtgtcatataataatcgatgtacgcccctgcagaaccatttagagctgcttctgtagagcagtggtgttagtactcatctctgtcgtatctgccattagccacctaattaaatacatgtactgctatcttgcactggggctcactgcatgtaacactactgcagagtgcatgcactcctcataatgttcagaaatcacaagtggtactactatatattccgaccact

SEQ ID NO: 8485 - DNA, 2079 bp, Oryza sativa
  ref <308>: DATABASE ACCESSION NUMBER: AK105833
  ref <309>: DATABASE ENTRY DATE: 2002-08-28
gagcgatggtggaagtggcaagttcggccgagacgagacgacacgacggttgcttccttcctaaccaactccccaaccaagcctccctccctcgccggagctctcgccaccccgcggccgccgccgccgccgcgaaacggagcatttggttaattgcattgcgtccgcgttgggtttgcgttgcatggtcacgcgcgcgcacgcacgcacgcggctttgggttttttttggcgcataaatattccgcggctgctgctgctgctgccgcttcctgcctgtccctgagttgtacccgctctattttttttttctctctctttcttctccatctctcctccttccttcctaacctctccccacctacctccctgccgcctgatcctgatttccccaattgaggccagcgtcgagcacctgcacacacgcacacgctcgctgctgcgcctcgattctcgtcccagatccgccactcccttccccaattcgccgtcacctgcagctgagtgttgcttgctcgagctagctggtggttcttgccttgcagggcgaggcagtggtagcttgcgagctttagctgcgggagcggttggctttggttttggtttggtaaattggttgcgtgtgcgtgtgcgtgccatgagaagatgatgcgcgccaaggcgaaaggtacattcccaccggcggcggcggcgatgaaggagagctctgctcctccgccgcctgctgctgcggcggcggcggcgagggaggatgagtgggaggtgcggccaggtgggatgctggtgcagaagaggagcccggacggcgacgccccggccgcgcccgtgcccaccatccgcgtcaaggtcaagttcaacggcgtctaccacgagatctacatcaactcgcaggcgtccttcggtgagctgaagaagcagctgtcggcgccgacggggctgcacccggaggaccagaagatcgtttacaaggacaaggagagggactccaaggcgttcctcgacatggccggcgtcaaggaccgctccaagatggtgctcctcgaggacccaacggcgcaggccaagcgcctcctcgagcaacgccgcaccgacaaggccgagcgcgccgccaagtccatctcccgcatcagcctcgacgtcgacaagctcgccaccaaggtgacggctctggaggccatcgtcggcaagggcgggagggtggtcgacgccgacgtggtcacgctcacggaggcgctgatgaacgagctggtcaagctggacgccatcgccgccgagggcgaggtcaaggtgcagaggcgaatgcaggagaagcgggtgcagaagtacgtggagtcgctggacgccatccgcgccaagaacgcggcgtcgcacaacaaggccagcggcaacggccacgccaagccccgggcgccgcacctcccgccgccggtgtcgcagcggcggcagttccaggcgccgccgcccgccgcgccaacgacaacgaagaccgccgccgcgccggcgccgccgcccacggcgagctgggagtcgttcgacctgctgtcctcgatgccgtccacgtcgtcgtccaccgtgacgaccaccatggccgccgcgacgaccaccaccaccacctcgccgatcccgcggttcgattgggagctcttctagctcgctctcgctctccctctcctcctcctccgatgggtacactactctacactacactacactacacacttcaccttttctttgtccattcatctcgtgagctcattcgatcggtcgcactagcacctgatcgatcagcagcgctcgccattgtttctttgatttcttctgttcattcttcctcttctttcttttttcttcatgttccttttttcatttcgagagtatatctacaaaaacaaaaaagaagaaacaccatgggtgatcgagtgtgttcagtacgtatgtcatcactcaagtcagttcatcaatccaatgcatggtcagtcacacagccaaaaaagaaaaaagtgggtggtatcatgacgaagaattttccggtgacactatatatatacaaaaaaaacagcatgtatatgtgattcgaaac

SEQ ID NO: 8486 - DNA, 1512 bp, Oryza sativa
  ref <308>: DATABASE ACCESSION NUMBER: AK105834
  ref <309>: DATABASE ENTRY DATE: 2002-08-28
tggattacaagtgcagtagaagcagcggcagagacgagtgctgcaaggtggagagccgtcatcagcagtgcacagagccggagagcccttcctacaggttagctctcaggagcctcttctcgtgcagaaacagcagcagcagcagccacgccggccaccaccaccaccgcgccgccgacggcaagaagctcggctgcaattccgcctccatctgcaaggtcaagcaagacaacccgatgcagcagcacatgcgcagggcggaggatgagctcaaggtgaaggacaagccgccggtcgccgagccgtactgcaagcgcagagcttcggtgagcgcgtgcaacatcagcagcgagcggtcggtgaagaagtcagtgaagcagcagcagcaggaggcgagcagcagcttgcagtcgtcggcgtcgatatcggcgtcgtcgtgttcgtcgacggcgggtggtggggggtcgttccgggggatgcagcagttgagcctgaggcggctgtcggggtgctacgagtgccacatggtggtggatcccatcagcggcgtcttccgggacagctcctccatgagggccaccatctgctcctgccccgactgcggcgagatcttcgtcaggcccgactccctccacctccaccagtccatcaggcatgcagtgtcggagctgggggcggaggacacgagcaggaacataatatcgataatattccagtcgagctggctgaagaagcagagccccgtgtgcgccatcgaccgcatcctcaaggtccacaacgccgcccgcaccctcgcccgcttcgacgactaccgcgccgccgtcaaggccaaagcaatggcccaccgccaccctcgctgcaccgccgacggcaacgagctcctccgcttccactgcgccaccctctcctgcgacctcggcctccacggcgccacccacctctgcgaccacctctcctgcgccgcctgcgccatcatccgccacggcttcaggccgcccgcgccgggggccggcatccgcaccatggccaccagcggccgcgcccacgacgccgtcgtctcgtccgggtcggagggcgaccgccgggcgatgctggtgtgccgggtgatcgccggccgggtgaggagggaggaggcggcggcggcggcggcggaggaagaggaggaggagtacgactcggtggccgggacgacgccggggctgtactccaacctggacgagctggacgtcttcaaccccacagccattctcccttgctttgtcgtcgtctacagggcctgatcgattagtgatcattaaccaataataataatcttagctagcatcatttccttcactcttcgttaattgcatgtaatcaatcgatcgatcgatgatgatgatgatcccatttataattaattaattcatcgttaatgtctgattattgtactatctgatcgatcgatcggtattgactagtgatcagcgtatcaatcaatttgtacaatcagatagatgtttgttagtttct

SEQ ID NO: 8487 - DNA, 1888 bp, Oryza sativa
  ref <308>: DATABASE ACCESSION NUMBER: AK105835
  ref <309>: DATABASE ENTRY DATE: 2002-08-28
tactatctgtatatgacaagaactatgacccaagtgcagaactggctattcttggaagattgtcagaaaagctacacttgatgacaatcaccgatctcacgcaagaatcactcgccttacatgagatggtcgcatccggcggtggtcaggacccaggagaacacattgagagaatgtcaatgctactgaagaagattaaggattttgtgcaaacacagaaccctgacatggggcctcctatggcttccagggtattggattcaaatggggattcaaggcctataaccattcctgacgagttccgatgtccaatttctcttgagctgatgaaggatcctgttatagtgtctacagggcagacatatgagcgggcatgcattgagaaatggatagcatcaggccatcatacctgcccaaccacgcaacagaagatgtcaacctcagcattgacgccaaactatgtccttagaagtctcatttcccagtggtgtgaaaccaatgggatggagccaccaaagcgctcaacccagcctaacaagcctacgcctgcatgctcttcgagtgaacgtgctaacatcgatgctctgctatctaagttatgctctccagacactgaggagcagagatcagctgctgcagagcttcgcctccttgcaaagcggaatgcaaacaaccggatttgcattgctgaggcaggtgccattcccttgctattgagtctgctgtcctcatctgacctacggactcaagaacatgcagttactgcccttctgaacctctccatacatgaggacaataaggcaagcatcatatcatctggtgctgtcccaagcatagtccatgttctgaagaatggcagcatggaggcacgggagaatgctgcggccacactttttagtctctcagtgattgatgaatataaagtgacaattggagggatgggggctatccctgcgcttgtagtgctgttaggcgagggtagccagcgggggaagaaggatgcagcagcagctctcttcaacttgtgtatataccaagggaacaagggacgagcgattcgagctggccttgtgccactcatcatggggctggtgaccaaccccacaggagcgctcatggatgaggctatggcaatactctccatactatccagccaccctgagggcaaggcagcgattggggcggcagagcctgtccctgtgcttgtggagatgatcggaagcggaaccccgagaaatcgagagaatgctgcggctgtcatgctacatctgtgcagtggagagcaccatcttgtgcatttagctcgtgcgcaggagtgcgggatcatggtcccgttgcgggagctggctttgaacggcaccgatagggggaagaggaaggctgtgcagctgctcgagcggatgagcagattcctagtccagcaacaagaggaacaggagtcccagtcgcaagcctccgcgcaggtccctcctcaggccacccctgagcaggtcccggaaaatgacatccctgaacaattggacagcccagcgtctcaataccctatggttgtatgaactcgatgatgagcgagtcatcgtcgcaatcctatcaaatgtcggattgagtagcatcctggtcactttgcattctgctcatgattcatggcatgccgaccaattgaggtttttccacaagcttgaactataaggtttccatgcttgtgtgctgaaactcccaggttgtgagaatttgtttaggcagcccaggatgttgagatagatgtgtacagtttcttaaacatgcagctgctatatgtagacaacataatgcaaggttttcccatgtatatcctgaagactgtaataccatatgtaaaagagaagtttcaaatgcggatttgagcagt

SEQ ID NO: 8488 - DNA, 1511 bp, Oryza sativa
  ref <308>: DATABASE ACCESSION NUMBER: AK105836
  ref <309>: DATABASE ENTRY DATE: 2002-08-28
gacacacacaatggcacagccacgcactcacgtcgtaggcggcctccgcgccctccgaaccgcgatcgtctcgccgtcgccggcgccgcccgcaggcgagcgcgctctacctctcaccttcctggacgcgcagtggctcagcgcccaccccgtcgagcgcgtcttcttctaccgcctcggccccggcggcgacgacgtcgacgccgtgctgtcccggctggtcgagtcgctggcccgggcgctccacgccttctacccgctcgccggccgcgtccgcctcacgcccggcgagaccaaccggtacgagctcttctaccagcccggcgacggcgtggcgttcactgtcgccgagcacgacggcgtcggcgtcggcgtcgatgagctggcggacacggacgagccgagggaggttgccaggattgccacgttcgtcccggagctcccgaagggcggcgcggtgctcgcgttgcaggccaccgtgctgccgcccgaccgccgtggcctcgctctcggcgtcaccgtccaccactccgcctgcgatggggtgagctcgacgcacttcctccacacctgggccgccgcctgcgccggcgaccgggtgctcccggagccacccgtcattgaccgcacgatcatccgcgaccgcaacgacatgtacgacgcgttcgcctcacccgcgagcgaagccaaacatgcgttcgattcgcccgacgtcgccggcaagctcctcgccaccttcactctgtcgcgacagcagctgcagaacgtcaaggacgccgtcgccggcgaggccgcacgtcgcggcgtggcgccgccgcgttgcacgtcgctcgtcgccacgctcggcctcacgtggctgtgcttccgccgcgctgggcccgacggcgaagaagggcctcgcggtgacggccgcgcccacctcgtcttccccgtcgaccaccggtcgcggctggagccccgcgtccccgaaaagtacctcggcaactgcatcggcccgggctttgccacggcacacgagacggagctcgccaccaccaccaccaccgccgatggcctcttcacggcttgcgccgcggtcgccgccggcatcgacgaggcggtgcgcggcgagccgacatactgggagcggtgggtggagcgcatcaccgaggcgtgcgcggacgacatgtcgctgtccgtggcaggatcgacgaggttcggcgtgtacgacatggacttcgggttcgggaggccggcgaaggtggatgtcgtgtccgtggcgaagaccgacgcgatgtcggtggccgaggaccgttccggctccggcggcatcgaggtgggtatcgctctgtcgccggcgcgcatggagcggttccggaggtggctcgccgacgccatcgccctgctctcctcgtcttcccactgcaactagctagagtggaatctgcaaaaataattaagtattttgcttgaattctagaactttgaatttattaccctaaaaaatctaatcctttgaatcttttggtatc

SEQ ID NO: 8489 - DNA, 1822 bp, Oryza sativa
  ref <308>: DATABASE ACCESSION NUMBER: AK105837
  ref <309>: DATABASE ENTRY DATE: 2002-08-28
gatccggagattcccaaataggtcaaccttttgaactgcctgctgaatccatgagcaggcaagagacaacctggcgaactgaaacatcttagtagccagaggaaaagaaagcaaaagcgattcccgtagtagcggcgagcgaaatgggagcagcctaaaccgtgaaaacggggttgtgggagagcaatacaagcgttgtgctgctaggcgaagcggttgagtgccgcaccctagatggctaaagtccagtagccgaaagcatcgctagcttacgctctgacccgagtagcatggggcacgtggaatcccgtgtgaatcagcaaggaccaccttgcaaggctaaatactcctgggtgaccgatagcgaagtagtaccgtgagggaaaggtgaaaagaacccccagtgggtagtgaaatagaacgtgaaaccgtgctgagctcccaagcagtgggaggggaaagtgatctctgaccgcgtgcctgttgaagaatgagccggcgactcataggcagtggcttggttaagggaacggaacccaccggagccgtagcgaaagcgagtcttcatagggcgattgtcactgcttatggacccgaacctgggtgatctatccatgaccaggatgaacccaacccaccaccgcctcgccgcggtcgccggcgagaggcgccgcgctgcgcgcgtcgagaggatcgcctcctcctcctcctcctcctccggcagccatgtcctccatccacttcttcccggccacctcccaggccgccgccccgtcgcgccgccccctcaccaaaccctccccaaaaccccccgccgccaccgccgcgtaccaccgcggcggagacaacgagccggtgctcttcccgcgcctcttcctcaggaggcgtgcccggcccgccgcggcgccggccgaggcgccgccggtgggccccgacggcagcagcagcggcggcgggggaggaggaggggaggggggcgggggcggaggggacgacgaggaggatgaggggacgaggaaggggctgctgccggagtggctcagcgtcacgacggacgacgccaagacggtgctggccgccatcgccatctcgctcgccttccgctccttcgtcgccgagccgcgcttcatcccctcgctctccatgttccccaccttcgacgtcggcgaccgcattgtcgccgagaaggttcataaaggaaaactagttgtcaatggtgaagttagaaatgaagagttcattcttgagccaccttcttatgacatgaacccagtgcaagtacctgagaactcagtttttgtaatgggagataaccgaaacaacagttatgattcacatgtgtggggccctcttccttctaagaacatattggggagatccattttccggtattggcctcctggccgaatagggagcactactactgattgcctcatccctgagacaaatccaagctcgcttattgatgtcaaactggcaaagtagaagttcaggcattgattattgcagtgtgaagtttgcgcttcatgtaagctcctattctttaatattccctctctcctggaaattcggaggaatatttgacagcaggccacgtagaaattagaaaggagaacacatttggttctccttgatgtcacaaagaatgctagcaactagcatgagcatagaaaccattttgtttcaaggtttctgcgactctcgctctttgttgtatattaagactgtaaggatgttgccttagtgattcgcatcaaatgattcttcttgtacatcacgttttgtagcaccacgtgtgtatcatcctcatacagtgcttgac

SEQ ID NO: 8490 - DNA, 1548 bp, Oryza sativa
  ref <308>: DATABASE ACCESSION NUMBER: AK105838
  ref <309>: DATABASE ENTRY DATE: 2002-08-28
acacaaacgcctctacgtacactctacccacaccacctcgctcactcgctcgctcgatcaccgcgacctcactcgatcgctctgatcacctatggcggcgcgggcgttcgtcgccgtggtggtggtcgtcgtcgcggccttattcgtgggcgcagcctcgagctcggcggcggcgcaggcggcggtggacacgggggcggccgcgggggtgccgtcgtgcgcgtcgaagctggtcccctgcggcggctacctcaacgccaccgcggcgccgccgccggcgtcgtgctgcggcccgctcagggaggccgccgccaacgagacggcgtgcttgtgcgccatcctcaccaacaaggccgcgctccaggcgttcggcgtcgcgccagagcagggcctcctcctcgccaaacgctgcggcgtcaccaccgacgcctccgcctgcgccaagtccgcctcctcctccgccaccgccgccgccgccgccgccggtaacacacataattccatcaatttcctcaatgttttgatctcgttaattaattcctctcgtcgacgatcacggcgtgatccatgcggctagattgctgctactaattgcagtggacatacgtacagtggttgatgcggtttgactgctactgcttttgtttgtttgtttgtttgtttgtttctcctagctagagtaataatggtctgaattattgcttagtttaacactaacagtgctcctctcctcgctggagagtttgtcgtttgatgcaccaactctagctagctagtgccagctaaagcatgcagttgtctctccggtctcacaagaatccgaggcacctgataattgagagatcgcaaattaatcatggatcacaatttaatcatggcctccaattcatgatctctggcattttaatcagatcacaaaaactgatatgatcatttacagagggatgctgatctgaactctcttcaattcctgcaggtgccggcactgcaggtagcactgctgcttcttcagcttccactggaaacgctgcatctacaggtacctgtgcttaattagaacaacaattttcgctgtcaactcagaacatcacaattcagattatgtttcagttttccacagtatgaactggcagccaaattaaaacctctctgtatgagatcatttcaagcttgcttagaaatttccagtgattcacagacatgtagctgtaatttgtaactgagcctctcttttgtttgctgaatcttgcagcggccaagccaacggcgagcggaggcgcaacgcatcgcctgagcttgatcagtgcatcgtccttggtaggctccagcttcatctggtggacgatcatggcgcagtagtaattaagatccagaagagcagtttcaagtttgctagttggtcactactatatgatgaggaagtacataggattgtattggcaaaattctttcttctgtagattgctgttcttcgccggtcgatcagttcctcggttgaatcagagttgtttaattctgtactgtccaaataaaacatgcttaatcatc

SEQ ID NO: 8491 - DNA, 1228 bp, Oryza sativa
  ref <308>: DATABASE ACCESSION NUMBER: AK105839
  ref <309>: DATABASE ENTRY DATE: 2002-08-28
accacggaaacactcattctcggtgtctctcactcgctctgtacgtacgttgccgcctgcccatggcgtcgcggtcgctgttcgcgttgctggtagtggcggcggcgatgtgtgcgtcggtggcgtcggcattgcggagcagggcggcgaccgacccgaacatggaggtgaagttcgacttcacgccgtttctgatccagtacaggagtggcagggtgcagaggctgatggggacgacggtggtggcgccgtcgctggacgtgcgcaccggggtggtgtccaaggacgtggtcgtcgaccggagcacggggctcgcggtgcggctgtaccggccgaagcaccggggcgggaggctcccggtgctcatctacttccacggcggcgcgttcgtcgtcgagtcggcgttcgacccggtgtaccacaactacctcaacgcgctcgcggccaaggccggcgccatcgcggtgtcggtgaactaccgcctggcccccgagcacccgctccccgcggcgtacgacgacgcgtggacggtgctcaggtgggtggccgccgacatgcagcgcggcgcggactcgtggctcgcgaggcgcggggacgcgtcgcgcctgttcgtggccggggacagcgccggcggcaacatcgcgcacaacctcgcgatgcgcgcggggcagcacggcggcggcgcgacgatccgcggcgtggcgctgctggacccgtacttcctggggaaatacgtcgacccgacggcgcagcgggcgtggggtttcatctgcgcggggaggtacgggatggagcacccgtacgtgaacccgatggcgctgccggcggcgtcgtggaggcgcctcgccacctcccgcgtgctgatgacggtgtccgacctcgaccggctcggcccgtggcagcgcgcgtacgtggacgcgctccgtggcagcgggtggcccggggaggcgcggctgtacgtgacgcccggcgagggccactgctacttcctcaacaacctcgagtcgcccaaggaagccatgcatatggccacgctcgccgcgttcattaaccgcgacacctagcaagcacatcactagcagcagctctgaattctgatccatcttcaacgtggcagctcagctacacacccgagtaaagccatactgtaatgagtactcctagtaaccacatatagcttatagtgttactaccatttttttctgtctttcttcatcgaggcagatcg

SEQ ID NO: 8492 - DNA, 1255 bp, Oryza sativa
  ref <308>: DATABASE ACCESSION NUMBER: AK105840
  ref <309>: DATABASE ENTRY DATE: 2002-08-28
ttgctatgactggtgatggagtgaatgatgcaccagctctgaagttggctgacattggagttgctatgggcattacagggactgaggttgcaaaagaagcttcagatatggttcttgcagatgataacttcagtacaatagtcgcagctgttggtgaagggaggtcaatctacgacaatatgaaggcatttataagatatatgatctcttcaaacatcggggaagttgcttccatatttctaacgtcagctttaggtattcctgaaggtctcatccctgtgcaacttctgtgggtcaatcttgttacagatggtcctcctgcaacggctttggggttcaacccacctgataaggatatcatgaagaaacctccacgaaggagtgatgactcgttgatcactccatggatcctattccgttatatggtcattgggatgtacgttgggattgccacagtgggagtgtttatcatttggtacacacatggctctttcctgggaattgacctggctggtgatggtcactctcttgtctcgtactcccagctctcaaactggggccagtgctcctcatgggagggtttcaaggtgtcaccattcacagcaggtgcccgtacattcaacttcgatgtgaacccatgtgattacttccagggcggcaaaattaaagcgacaaccctctccctgtctgtcttggtggccattgagatgttcaactcgctgaatgcgctgtcggaggatggtagccttctgagcatgcctccgtgggttaacccttggcttcttctggcaatgtcggtttcattcgggctgcatttcttgatcctctacgtgccattccttgcccaagtctttggtattgtgcccctaagcttcaatgaatggcttttggtgatagcagttgctttcccagtggttctcatcgacgaggtccttaaatttgtggggcggtgcttgacagcccgtgccagaaaacaatcaggaaagcagaaggaagattagatgctagtcatcagtgttttagatttctagttatgtcacgaggaaccaacacctgatgtagcacaaacattattttttctcgagttccaaaggctctcgttctttgttgagagaatgtttgcgaacatgactatgcagcgaacttaggtaccctatagaactcataatcaggcagcgacacagaccgcatttattcattgtaactaagattgttatttgtgaatgtgctggagagacagcatgtttgcctgctc

SEQ ID NO: 8493 - DNA, 1972 bp, Oryza sativa
  ref <308>: DATABASE ACCESSION NUMBER: AK105841
  ref <309>: DATABASE ENTRY DATE: 2002-08-28
aacaaacatatatcacgctgctacttactaacactgaaacctcagctaagataattaacttagctagttgtctcaggattatattcagcagatcagaaagcaagttaattagttagtactgtaataagttgctgctgccatggatggcaagaagccatatgtgatcgccatcatcatacaggtgatctacacggggttgtatgttgtttccaaggcggccttcgatcaggggatgaacaccttcgtcttcatcttctatcgtcaggctgctgccactcttctcttgctgcctctcgccattattctcgaaaggagaaatgcgccagccatgtcgcttcggctgtttaccaagcttttcatgtatgctctgctcgggaacacaataaccatgaacatgtacaacgtaagtctcaagtacacctcggcgacggttgcatctgccaccagcaactctgtgcccgtcgtcaccttcttcttggctgtcctactaaggcttgaagtgatccggctgaggaccttgtctggcgtggcgaaggcggcgggcgtggcgctgtgcctcgccggcgtgctcgtcatcgcgctctacgccgggccggcgatcagcccgttgaaccaccaccgcgccttgagcggcggcgtccatggagcagagagcagcgtggggacggggacgagggcgaggtggatgaaggggacgttcctgatgctgctatccaacacgacatggtcgctgtggatcgtgctccaggcgtcgctgctcaaggagtaccccaacaagctgctcgccacgctcatccagtgcgcgctcagcacgctccagtcgctgctgctggcggcggcggtggtgcgggccgacccggcggcgtggcggctgcgcctcgacgccggcctcctcgccgtcgcctacacgggcttcgtcgtcaccggcgtctccttctacctccaggcgtggtgcatcgagaagaagggccccgtgttcctggccatgtccaacccgctctgcttcgtcttcaccatcttctgctcctccttcttcctcgccgagatcgtccacctcggcagcatcgtcggcggcgtcctgctcgtcgccggcctctacagcgtgctctggggtaagagcaaggagcacaacatcaatatgcagctcacgctcgccgccgccgcttctaccgaacaagtgaaacagcggcaagaggaagatcacaagatggagatcgccggcggcgacgagcaggaggagatcaagcagcagcagcaggggaaaatggcggcgtcgccggagcaacaagtgtagctagcttttgtacctaataaatgacataattaattagctagaacctaataagttgttagtgttgataaccgagagatatacctcgtgtcaatctaaagacgatatgattaattaagggagtatttagatcaaaaaaaaaaaaaaaaaaggccatggcctactggattcaaagcacttttacacctaggttacttggggtgctacctgattctgatgagaaggtatttctgaaacaaggtccttacggtcactatatccaggttggagaggatataaaaggagtgtctcggaaaagagctcctctttctgaagtgaaagatattgactcaatcactttagaagatgcaatcgagctattgcagtatcccaaaatcctgggaaaacaccctgatgatgatcttcctgtacttgtaacacattctaaatctggatttagaatcagacacaggagaactcttgctccattgccgaagagcgcagacccaaaggagattacgctcgagcgtgcattgaagcttttgacaggtaaaaacgtgataaggtttggtcgccctaagggaatcaagaacccagaaccccttgaataccattcgtaaacatctaatattgtaaaagagatgtttttagtctaacaagatcgcttatcgaacgcgaaatttacggtgattcctgaccggc

SEQ ID NO: 8494 - DNA, 1617 bp, Oryza sativa
  ref <308>: DATABASE ACCESSION NUMBER: AK105842
  ref <309>: DATABASE ENTRY DATE: 2002-08-28
aaggggtaatgtcagaagcatcatttccagaggatctgctttccttggagatggctgacagattggaatggctggttgagcaaaagaaaattgctgacatgatcttctcagagcatcggaaagttaaagatatcctagcctcaactgaccttccacatgcagtcttaactggtgagctcgattcacaaatccattggcttctcaattcactgtaccaggctaaagaggatgcagcacggatgcaggatgagtcctctgctatgctgcacaaactggcttcacatgaatccaagttgaattcaatgcatgaggaagttgaccgcttgacaatagctctacttgaagagaagcaggaaaaggacatacttgcaaatgaacatgctgaattgatgtccctgtaccatgctgctagtgatcaattgtctgttgtctcgtcgcggtatactgagcttgtgaaggcatttgcagaggtttctgatgtccaattggaagaccatgaaatcctggacggtggcaaattagttgaacagtgcctcgccaacatccaaggaagagcaaagtcctctcctgttgagtgtgaaagtttcgagaagcttcaaacacaagtttataccctagatcaggaattaacattatgtaaaataattcttgaagaagacaaggctgatagatctgagatgatgaggctatctggtgaattacaaagaatggtacaggaaactgacgcactgaaaaatgaaaaggactcattacagaaagagcttgaacgggtggaggaaaaatcatctttgcttagggagaaattgtcaatggctgttaaaaagggcaagggtttggtacaggaacgtgaaggactcaagcaagtcctagatgagaagaaatctgacatagagaagctaaaacatgctctggatgaaaacagagatatctgatgctgaagatttgggaccagcggggaaggcatcaatttcatctgtccctacggctgcgcattctagactaatgcgaaaaggctcatctgaccatcttgttctgaatattggccgagagtcggaacgactaattactgcacaagattctgacgacaaagggcgtgtatttaaatcactgcatacatccggcatgattccagcacaaggaaaacagattgctgatagggttgatggcatctgggtctcagggagccaaattctgatgaaccggcctcgtgcaaggctagggctcatggtgtattggctcttcttgcacctatggttgataggcagcatcttgtgaccattgccctcgtagcataattgtacaatactagcagatatattcacagttttattttctttcttcttaacttaactatacctggtacatatggcattcttttcatttccctgccctctgctctgaaattgtactcgagcagtacgtgttgagttccgcacacagaatgtaatacgtgcagaatagaacaatactagtaccattctttgttacgctgtagaagtggatgtttctgttgtaaccatgataaattcatcatggtttcttcgggaagcatgatgggaataatatgaaattgaaatgtttcttggttgtaatgaaagcgttcgaaagtttgagctt

SEQ ID NO: 8495 - DNA, 824 bp, Oryza sativa
  ref <308>: DATABASE ACCESSION NUMBER: AK105843
  ref <309>: DATABASE ENTRY DATE: 2002-08-28
aacgctacgctgtgtttctctggtttggggagctttggaatgaactgaggcagcagcagaggacggagccggcaagccatggctccctccgccgccgccgccgccgccgccgccgccgccgccgccaccgcctcgccgctgtcccgtctcctgctcagcctcccaaaccccagcgtgaaacttcccgtgtcttctccgagccggaacgccggcgccgccgtggccgccaagaacagcacccccgtcgtcgccctccgccggcgcgaggccgtggccgccgtgctgtccgcatccatcctctcccgcgtgctccccgcggcggcggaagcgtccggcggcgagtgcccgctcgaggtggcgcccaacggtctcgccttctgcgaccgcgttgtcggcaccggcgccgccgccgagcaagggcagctcatcaaggcgcattacaccgggaggctggaggacggcacggtgttcgacagcagctacaagcgcgggaagccgctcaccttccgcgtcggcgtcggcgaggtgatcaaaggatgggaccagggcatagtgggcggcgaagggatcccgccgatgctcgccggtggaaagaggtcgctgaggctgccgccggagctggcctacggcgcaagaggagccgggtgcagaggctgggagcccacctcctgcgtcatcccgcccaactccactctcctcttcgacgtcgagtacgtcggcagagcagtcggatgatctctccctgcagatttggtttcttgtgttgattgatgtatgcagaatgttcagagtatatatcgataccgagttgagagtttcagact

SEQ ID NO: 8496 - DNA, 1763 bp, Oryza sativa
  ref <308>: DATABASE ACCESSION NUMBER: AK105844
  ref <309>: DATABASE ENTRY DATE: 2002-08-28
gtggacaactagatcatctaaacaagataacgaattatcattaatccctgatttacagatgttgtgggcttccgattgtccaaagttgaaattcctgccttatccaccaaggagcttgacatggttcatagagaatagcaatcacgtgttgccagaacatgggtttgggaaccttacatctgctacttatccacttcatctttccatcgagcgtgcacccaattctcgcgaaatgtggcgtagggctcagcacctttcttcaatcgagtctcttactctcatgtctatagctggccttagagccctgccagaggctattcagtgcttcacgtccctctggagactcagtatattgggatgtggtgagttggagacgctgccggaatggctaggagattatttcacttgtctggaagagatttcgatcgacacttgcccaatgctgtcttcactgccggaaagcatacgacgcctcactaagctgaagaagttacggatcaccaactgccctgtattgtcagagaagtgccaaggagaggacaggcacaagattgctcatattctagagcccatattcctgtaaaagaagctcccacctagatcagcaggcatacaggccgagatgtagcatgcatggttggctgatactgttagcagggtaagtttacaaaacttttaaggtaatatgaaaaactatttgatctttcaccagcggatctatatttgaactagagggctgggacctcatacgtgcaggcaattggaccgtaaagcgaaagcggctgcttatgtacatatattcctcgactacatatgctgcttgtgccactaccagacttcatacttcagagctatcctgagggtggttatttttccgtgatttgttggtcactttttggctattgaaatacttgggctggtataagcatcataaatttcgcttttgcatccaaagaagttgtgcattaacagtagcacccgttaattttcaggaaattaagtgaggttaccttgcccaggctctgctagtagcaaagaatcttgagacttattgattaaaggttcttgtaacagcaaactggagatctaaaccactggatttccgttggcacttgtctctcttgaagaaacgaaagggttggctcagttgtcgttcatcactctcagtggctgcttaccaggctggattaaatctcgatatctgtttgtcagtaagacaagttagcagatggtacatctgcttgtgtgtaatcacatcattaatgtcagcaatgaatatctgatacccaagaggcacctgtatgaaaaaagaatatacatatcttgtcgactgcaatgttgcaaacacatccatgaaaagatgctctgagtgatcctgaactggatgtaacataacggtgctttctcagaaagaaaatgagagagaggaagatcctgagcctggcaagaacagctatgcaactgtgcaagtacaagccttgaaatcttgaaaggtacatcctgtcgatttcactcctttttgccctgtattcatgagccgtgaagaggagacatctcattgcaatcctgaattttgggagtgtgtgtggcaggtgctcaatttgtttggtctttgtcctatgaggtttaggttaggttcctggctcttcaactttgacctgtctgtatgagggcaggtcagctggaatttcttggaatttttgcaagttgtgtacttcacttgtactaccgaatcagccaaattttaagcagtatttgttact

SEQ ID NO: 8497 - DNA, 1574 bp, Oryza sativa
  ref <308>: DATABASE ACCESSION NUMBER: AK105845
  ref <309>: DATABASE ENTRY DATE: 2002-08-28
acaaaaccgctcccttttttttccctttctttgtttgtcagtgtccactgccatagcactacactggtggcgatactgatacgtgcagagaagcaaaccaacgagttctctcactcgctataagtgggagcctctatcttatctccacttcttcttcagacttctcaaagaagaagagtcaggctcctcttcctcggcatcctcctcctgaattctccttctcggatcacctcttctcttcacctcctctctctcccatccgctgcaaccgccgcttacaaacgagagtttaattggtattttagtcttctgcacatccatcgagctcatcatcagattgaaacaaataaagtgaagtatttgatcacttatatggccctcaagacgctgcaagttccatctagctttgcaaggccgatcaaccgcagcttcatcggttcttcttcttcttcgtcgtcgtcgtctcagttttctctgcggccaaagcctgcatcggcacggctcgccgcaagtgtcgccggagagaggcgcctcgaatgcaggggcggcagcagcctgcacggctgcgtggacgagggcgccgcggcggcgtcgaggaggcggcaggagcaggcggtggagatccccatcgttctgttcccgtcggtggtcttccccggcgcgacggtgcagctccaggcgttcgagttccggtaccggatcatggtgcacacgctgctccaggagggggtcaccaggttcggcgtcgtgtactccggcggcggggtggggggcggggtggcggccggcgaggtggggtgcgtggcgcacgtggtggagtgcgagcggctcgtcgacggccggttcttcctcacctgcgtcggcggcgaccggttccgcgtcgtcggcgccgtcaggacgaagccgtacgtggtcgcgagggtccagcccctggccgacgcgccgcccagccaagaacgcggcggcgacggcggcggcgacatggtgcgccacctcgtggagcgagtggaggagcagctcaagaacgtggcggcgctgtcggacaagctcgggtggagccagccgccgctgccgttccgcgcgacttgctccccgtcgtcgctgtcgttcgccgtggcgagggaggtcgtggaggaccgggaggagcagcaggcgctgctccggctggacgacgcggcggcgcggctggcgcgagaggggaggtacctggagcggaggagcaggtacctggccgccattgcggcgatcaaggacgccctcggtggccacctctactgcaacgacaagtagagacgacgacgatcgagtgagtactccgttaataaccggccactggtgaggactcccatggccataggtttctttggttttgtttggcttctctgcttcagaattcagagttcagagttctaatgtaaatatttttgtaagttcctcgagctgttttttgtggtgaaaactttgcattgagtagatgtatttaggagtacttcataatgtacagaaggattgatgtaccatctgcaggttactcatcaggtgataaataagagtacaccatgtaacattgtagc

SEQ ID NO: 8498 - DNA, 1888 bp, Oryza sativa
  ref <308>: DATABASE ACCESSION NUMBER: AK105846
  ref <309>: DATABASE ENTRY DATE: 2002-08-28
gcggagaatcttctttcttcccgaccgttcgacgcggctgcgccaaccgaaagcgtctcgccgcgccgccacgtctcgccggagcgcgcgcgcgcacacccacccgaacgccgccgccatgtcctgctgcccctgcaccaccaccacctcgtctcccctctccctgccacgccccgcttgcagaggcaggtggtccggcggcggcggcagcagcgccaacgccgccgcttggagggcgcgtggaggaggagcgaagcggagtttggtagtcgcggcgagcggcagcaaggatgagacggcggaggggaaaaagcaggaggaggagtcggagttcaacccgttcgggttcgtgacggacaacccgtcgagccgcggcgccatccagctgccggagtcgcccgcccaggacggcaatgtcggccagatgctctacaggatcgaggacaaggggagggagttcggctcaagagtgaaatcaggaaagctgcggtggtttgtgagggaaacaggttccgctggtgcacgacgtgggactgtcgtgtttattcacggtgctccatctcagtcatttagctatcgtatggttatgtctcagatggcagatgctggctaccactgctttgctcctgattggataggatttgggttcagtgatatgccacagcccggatatggattcgactacacagaagaggagttccacaagtcactcgatgagcttcttagtactttaaatatcactgagccattcttcttagttgtccagggatttcttgtaggttcatatgggctaacatgggcactaaagaactcaagcaaagttctgaaggtagcaattcttaacagtccactcactgtttcttctccagtgcctggattgtttaaccagctaaggttgccactttttggtgaatttacctgccaaaatgctgttttggctgagagattcattgaagcaggtagcccctatgtgctaaagtcggagaaggctgatgtatacagattaccatatctatcaagtggtgcacctggatttgcattgcttgaagctgccaggaaagctaacttccgagatgtattaagtagaatttcagccgggtttgcatccaacagctgggaaaaaccaatattgcttgcatgggggatttctgataagtacttgccactccccatagctgaggagttccagaaaggtaatcctgcagccataaaattggagccaatagaaggagctggtcatatgcctcaagaggactggccagagaaggttgtgacggccctaagatccttcttgtagagtttggcactatactttttttcctgtacaagtcacaggtaaaagtttgactataagttacaagatatgcctaaatatgcctctaacatgcaaacagccgacggcaaaatcaatatcaggaagggatggaaggcagaggaggactcattgatagtccaagcggagatgcatgagcatctgttacgcgcacagcaagccaggatcgaattgttccagctccgtttctgccggtataagattccctgatcccgactcctgcctgatcgtcggagattggcggcttcaggaagggggtccatttctgccagtcaagattccctgatccttcaggaagggggtcgccatgtcgagattgcttgccgcctcctagaggagccgcgagcccacgcagcagcatcgacagctccggcttgccggcgtatcaccattgtcgcacggcggctagggccagcgacagtagcggatgcagcaagcgagaccacgtacctgcgttggccgcggttttgcaaaactgtgttgtagggggttttcagaatttgggagacgacattaacggaatactgttccaacgaaatagctaatatttgcagc

SEQ ID NO: 8499 - DNA, 1250 bp, Oryza sativa
  ref <308>: DATABASE ACCESSION NUMBER: AK105847
  ref <309>: DATABASE ENTRY DATE: 2002-08-28
ctatatcagctatgggatgtcgttgcttgaggaaaatgggcatgatgagattgtcatcaaagctatgggaagagccatcaataagacagtcatggttgttgaattgatcaagagaaggatcggtggtcttcatcagattacatctactgaatcaattgacatcacggacacttgggaacctttggaagaaggccttctccccctagagaccacccggcatgtatcaatgatcgccataacattatccaagaaagcactggatacgttatctccagggtaccagccacctatcccagctgaagaagtgagacccgcttttgactatgaacacgaagaatctttccccactaatcgtggaaactcctttatacacctcttctctctcctcccctctcgctcccgtttcttctcacatcggcgagttcgcaacctcctccctccaggctccacttcccagacgaatcggcggcagcggcggcggcggcggtgatggagtgcgttatcggggtcgtcggccgcgacttcgcggtggtggccgccgacacatcggcggtgcagagcatcctggtccacaagaccgacgaggacaaggtgatggtgctcgacagccacaagctgatgggcgcgtccggagagcccggcgaccgggtgcagttcaccgagttcatccagaagaatctccacctgtatcagttccgcaacaacatcccgctcagcaccgccgccaccgccaatttcacccgcggcgagctcgccaccgccctgcggaagaatccgtactatgtcaacgtgttgcttgctggatatgattcggatgttggtgcctctttgtattacattgactacatcgcaacattccataagatcgaaaagggtgcctttgggtatggctcctacttctgtctctcgctgatggacaagttatatcgtccagacatgtcagtcgaggaagctgttgatcttgttgacaagtgcattaaagaaattcggctcaggttggtcgttgctcctcaaaacttcataatcaagattgttgataaagagggtgctagggagtatgccaggcgtgcatacaccgacagtccaccggaagctgcaacatcagaagctgcaactgtagcagcctgagttgtatctgccatatgggtgtgaaccttaggtttccgagtacaattgctatgtaatcacaagtactgggatctgagaactttgttgcaaatttacttcctcttttatttgtgttatttatc

SEQ ID NO: 8500 - DNA, 1722 bp, Oryza sativa
  ref <308>: DATABASE ACCESSION NUMBER: AK105848
  ref <309>: DATABASE ENTRY DATE: 2002-08-28
atcatcaaagaacttaaagggcaccaataaagatagctgacccacaattaatctggcaaactattttccgaatctctccaaaagatttcatctatgtacacaattgcaaacaatgggtggcgctcaaggtcaacccgtagttcgtagctgttttttctgctcatatcattcataaaaattaggatattcaaattttgaggccttcgacctcatcagattttggtgaaccatgttaaactttgaggcaaaaactctacacatttcataaataatactccatatatcagaactcaattatgcagcatttggttattatgccactcacaattttgcctcccgagggaatatccaagtcgcatccaaatcctggccgtccgccgtcgtcatcaacggcaggagctcattcggcctcacgcacccgaaggtgctccccctcagcgagcagcgctgcgcccgtgtgtgccactcgtcgccggtgccgtcctcgaggaagaagacctgatcggcccaccggtcgccggcgacgcgcaccgccctggagcaccaccgcccgacgaacagcgcgcggccgccggactcgtcgccgatggttttcacccgcctccaccgcgacctccggaagtcggccctgaacacggcgaagcgatcctgcagctccgccgtgtgctgccacggctgcgtcctcaccatcgacgagcgctggacctcccggcgaacgagcagcagctcgccgccggagtccacgaggtagtgcagcgtcacgcggaggagggcggccgcccccggtggcttgccgttgatcacgcggtcgatgcgggacacggccggtggctcgccgtcggcggcgagcgtcacggcgaggaggtcctcgttgtggtcgacggcgtagagcttgccctggtagaacgccgtgtctttgatccgcctccagccgtcgccgccgctgacggaccacgccggcgcccccggccggcacaccgcgagcttgccgtgcctcccttcgccgaccaccgccgccaccacgtcggcggccggggacacggcgagcttgagcaaggacgccgcggcctgcggctcgccggtgttctcgcgcgggagccacgtcggcctgcaccaccgcaggtctcgctcgtcgacggcgacgatggggtcgtggcggacatggagacgggacacgctggggagcggcgccatggcggcggccttggagaaggggtcgacgagcaggtacgcgccgtcgtcgtggcgccggtacaggagccactcgccgcaggagccgagccagccggcggcggcgggcagccggaacggccgcgcgtcctccgggaagaagccgcggaagctgccgtcggcgaagcagaggcacggcgacagcggcggcggcgcgcggtgttcccgcgcggacgtgcgccacgagcggcacgtggcgccgaagcagatgcggtcggcgtaggacgggaggcggcggaggacctcgccggcgatgtccagcgggaggtcccgccacgacgacgccggcggcgagcacggcgacgtcgtccgcgcccttttgcgcggcctctgcaccatctcgtctgcgcgcaaaagagaacaaatgagggcacccaagttgtctctctagtctcggacacgtatatttatagtctactgaccatttccgattcgtttacggcttacggcatttggtaatttccgattcgaacaacagaaatcttggtcgtc

SEQ ID NO: 8501 - DNA, 981 bp, Oryza sativa
  ref <308>: DATABASE ACCESSION NUMBER: AK105849
  ref <309>: DATABASE ENTRY DATE: 2002-08-28
ggaggaggaggaggcggaggagtgggagaggcggaagagggggaggaggaagaggaggaagaggaggaggaggcggggaggggaggaggaccccgtggatgtgctcggggaggaggtgatggggcgggtgatggagctcctggacgcacgcagcgtggcacgatgcaccgcggtgtcccgcgcctggcgcggggtcgccgccgacgaccgcctctgggcacccaagtgtgctgaattgatggcgggaaaggcacacattcctcgtttgactatgatacccactgcatcaaaattgtctacctattcaatggccatcgcggatggcaaacggactcggatcacaaaagaggacctctgcgatcatgattgggaattccgtttcactatagcagcaccagaatattggagaaacctggatccatcatggaaacataccggtccaccaatgcgacgttacttccaccctgatggttaccacagcgcagatcctcatgatgctgtatggggtggccatgagtgcacgtacacgatcataacaagctttgctggtaatggatgtatcagggatcattatgtgaggatcaatcggtggccaccgatgaaagtttcaaggaaggaggattggagctgggagctatccaaccatctttaccgctacaacagcatccctgacactgacaagaagggatgtacaggtcctctgttccccgtttggtgaatgaatccacttctatggtagtagcagtgaccggtaatagtcgcgatctccaactcatagaaactggcctcggatcgttcctgaccctgaggaacgtgataacgagaggctctgtttggcagttatgagctatgaacaccaatggagattaagcttacttatgtggtatactggtatgtaacgtactcctatatagtactacatgatttcctgtgcgttgctgctggaattggtataaaacttatgtttgcaaatttgatgat

SEQ ID NO: 8502 - DNA, 1387 bp, Oryza sativa
  ref <308>: DATABASE ACCESSION NUMBER: AK105850
  ref <309>: DATABASE ENTRY DATE: 2002-08-28
aaggctggttaagcccaaaaattgttggtgtattttcggactatgctgagttttgtttcaagacatatggcgatcgagtcaagaactggtttacgtttaatgagccaaggatagtagcagcacttggccatgatacagggacagacccacctaaccgatgcaccaagtgtgctgccggtgggaactcagcaacagagccatatattgttgctcataatatcatcttatctcatgctactgcagttgatagataccgtaacaagttccaggcaagtcagaaaggcaagatcggaatagttctcgattttaattggtatgaacctctaactaactcaactgaagaccaagcagcagctcaaagagccagagacttccatgttggttggtttcttgatccgttaataaatggacaatatccaaaaaatatgcgagatattgtgaaagaaagattacctactttcacgcctgaacaagctaagctagtcaagggctccgcagattattttgggatcaatcaatatactgctaactacatggcagaccaaccagcacctcagcaagcagcaactagctactcatctgattggcatgtttcatttatctttcaacgaaatggcgtaccaattggacagcaggcaaactctaattggctttatatcgttccgactggcatgtatggagctgtgaactacataaaggagaagtataataatccaacaatcatcatatctgaaaatggaatggatcaatctggaaatctcactcgtgaagagttcctgcatgacaccgaaaggattgagttctacaagaactacctcactgaactgaagaaagccatcgacgatggtgcaaatgtggttgcgtacttcgcatggtctcttctcgataacttcgagtggctgtcaggttacacatcaaagttcggcattgtctatgttgatttcactactctcaaacggtaccccaaggactcagccaactggttcaagaacatgctgcaggcatcagggcctggctcaaaatctggttcaggcacttcagattctcaagttggttcagcaacttcagcaagccatccagttggttcagccatctcaagtagccatcggctcttgcttcccctgttggtttccttgcattttcttttcccttccttcttcatgtttttatccctgtagaagtagcaatttagcagtgattaataagtagtggatgccagcagtatgttcgctttaaaaaatgtgctgcagctaagaggagctgagagagaccaacctgaaggccatcttgtttaattttcgcgtgcttttcgccagtagtgagcactatgattcaaaaccagatttgtagtacttgtggtgattacgctattgtgtgtttcagtgtt

SEQ ID NO: 8503 - DNA, 1888 bp, Oryza sativa
  ref <308>: DATABASE ACCESSION NUMBER: AK105851
  ref <309>: DATABASE ENTRY DATE: 2002-08-28
gcgccgccgatgcggaatcgcggatgcggtccacccgcagatctcgaccatcagcccaacccacggtttccccgccctccacaccccaacctcgtccgctccgtcgccgacgacgactgcctcctaccccatgtatataacccccgccactcctctcgatgttgaggtaaatcgagtgagtccgcaagtcgttcgcgattcttgatcgagatctgtcagggtgataaaggtttagaacggtgctgagtttgttaatcttgggagaaaagggaaactgctctcgagtatggagatggtgttgccagtcgcgaacgcgactgctgcagcacttgcgcgggtttctgctatgttcaatgccccgcttgctcgtgctgttgtctttgggattcatatcgatgggcacttggtcgtcgaagggcttctcattgccgcaatactcttccagctctccaggaagagctacaagcctccaaagaagccactcactgagagggaggttgatgagctctgtgatgagtggcaaccagagcctctctgcccacccatcaaggagggagctcggattgaggctcctacattagaaagtgctgctggaccgcatacaattgttgatggaaaagaagttgtaaactttgcgtcagcaaactaccttggtttgattggcaatgaaaagatactcgattcctgtattggttcggtggagaaatatggcgttggatcatgcggacctcgtggcttttatggaacgattgatgttcaccttgactgtgagactaaaattgcaaagttcctgggaacgcaagattcaatcttgtactcctatgggatatcaaccatcttcagtgtgattcctgccttttgtaagaaaggagatataattgtagctgatgagggtgttcattgggcagtacaaaatggtttgcagctttcaagaagcactgttgtttatttcaagcacaatgacatggcttcacttgcgagcactctggaaaaactaactcatggaaacaaacgtacagaaaagattaggcgctatattgttgtggaagctatttaccagaattctggccaaattgcacccttggatgagatagttcgattgaaggagaaataccggtttcgtgttattttggaggagagtcattcttttggcgttcttggcaagtctggacgtggccttgctgaacattatggagttcctattgaaaaaatagacattatcactgctggaatgggaaatgcattagctactgatggtggtttctgtacaggaagtatcagagtggttgatcatcagcgtctaagcagctccggttatgttttctctgcctcgttaccaccatatcttgctagtgcagcaatttctgctgtggaccacctggaggagaacccatcggttcttgccaatctaagatcaaacatcactcttctgcataaagagttgtcagatgtacaggggcttgaaattgctagtaatatattgtcacctattgtcttcctcaaattgaagacatcaacaggttctgctgttgctgacctggagctccttgaggttatttcagagaaggtattgaaggaagattcagtcttcattgcagcgacgaaacgatcgagtttggacaagtgtcgtcttccggttggaatccgcctattcgtatcagctggtcacactgaatctgatatcctcaaagtatctgaatccctgaaaagggttgcagcatcagtgctctagtgacaaactgacaaccttgcatctggcatgatgtgttctacagttacgtacaaatctgtatgctcgttgatctggctcaatttgctgtcgtgtctagcagaattacaaataaaattttgtaaaacagtttgaattaaaatatctggtagttttgtt

SEQ ID NO: 8504 - DNA, 1564 bp, Oryza sativa
  ref <308>: DATABASE ACCESSION NUMBER: AK105852
  ref <309>: DATABASE ENTRY DATE: 2002-08-28
aactaaacctatcacaactcaagacacaatagttcaactcgatccatagacgatcatcatcttcttcttcttctcctccagcatggctgcaacagcaacaatggcgatgcctttagctaataggcttcgttgcaaaccaaacaccaactcttcttcaccatcaagaacactatttggtagacgagtcaccatgatcagtagcagccgctggggtagtgctgtcagtggcagcgcgatcatgtcggcggcggccgacgtcgccgccgccgtgtggcgggaggaagacgaggagatgaggagctacctgtcgccggagaagctagaggtgctgacgcagatggagccgtgggtggaggagcacgtgctgccgctgctgaagccggtggaggcggcgtggcagccgtcggacctgctcccggacccggcggtgctcggcggcgaggggttccacgcggcgtgcgccgagctgcgggagcgcgccgccggcgtgccggacctgctcctggtgtgcctcgtggcgaacatggtgacggaggaggcgctgcccacgtaccagagctcgctgaaccgcgtccgcgccgtcggcgacctcaccggcgccgacgccacggcgtgggcgcggtggatccgcgggtggtccgccgaggagaaccgccacggcgacgtgctcaaccggtacatgtacctctccggccgcttcgacatggccgaggtggagcgcgccgtgcaccgcctcatccgctccggcatggccgtcgacccgccgtgcagcccgtaccacgccttcgtctacacggcgttccaggagcgcgccacggcggtcgcccacggcaacacggcgcggctggtcggcgcgcgagggcacggcgacgccgccctcgcccgcgtctgcggcaccgtcgccgccgacgagaagcggcacgaggccgcctacacccgcatcgtctccaggctcctcgaggccgacccggacgccggcgtgcgcgcggtggcgcgcatgctacggcgaggggtcgccatgccgacctcgcccatctccgacggccgccgcgacgacctctacgcctgcgtcgtgtccctcgccgagcaggccgggacgtacacggtgtcggactactgctccatcgtcgagcacctggtgcgggagtggcgcgtggaggagctcgcggcggggctctccggcgaagggcggcgcgcgcgggactacgtgtgcgagctgccgcagaagatccggaggatgaaggagaaggcccatgagagggcggtcaaggcccagaagaagcccatcagcatcccgattaattggatatttgataggcacgtcagtgtcatgctgccctaatttaattaagttgatttaattacccactggaagggtaattaattatgctatgctcgtgttcatatttcataaacgggccgttaccagaagtagaggtccgctagatttgagcagtaattcgtagggttatcttgctctggtaattgtatgcgtggtaagacttgctattccagttaattgttaatttgtgtctgtttatgcatggcttaaaaatagaattgc

SEQ ID NO: 8505 - DNA, 1289 bp, Oryza sativa
  ref <308>: DATABASE ACCESSION NUMBER: AK105853
  ref <309>: DATABASE ENTRY DATE: 2002-08-28
acgctcatcagcttatgtgcaactccagataccgacctagcagcttgctatctagagtatatatcaactcaactcaaggaggagaagaagaagaagaagaagaagtgagccatgaaggatggagtagcaggaggaggaggcgagaggccatgcatgtgctacttccacccgcgggaggaggtggtgggcgtgtgctcgcaatgcctccgggagcgcctcctcctcctcctcgcctccaagacctcgcctgccgctgcccacctcctcgccgaccgaccgctccaccgcaagaacagcagcatctctctccccaaggtgttcgcgctcggctcctccttcctccagcgcctcgactcctctcgccaccaccttcgccccgccccccacgactccgacgccaactccgacgccgacaccgcctccatcgctagcctcgatgattccttcatctccatcaagttcgaggacaacggcaaggctacgtgggacagccagaaggccgccgccggcgagaaaaagacagatacgacgaccacggcggtggtggagcacgtgaagcggggcggcgtaacccggtggcggaagcaggtggtggggcggctgctgcagctggcgcggtggaagaggtccggcaacggcaaggcggcggcgtgccaccagctggggatcgacggcaagaagacggcggagcggtcgtcgtccaaggggacgacggtgagggggagggggagggggaggagctggatccggatcctcaccatcaccaggcgcccacccgccatgcctctcagctaggagtagcttcttacctccctcactctcttcacgtactcttaatctcgtcggattgctctgaatatagtaatactcttcatttgtttactgtaactacatgcatattactacctagtactccgtagtagtatatgatatgatatccacggaggatcggattggaggtacatgtatatggactgacgaatgaatcacagctagcagacaaacaaggaaagcagctgcatgcagcattgtgttttctgtaatgtaatgcagagacatcgatccatctatccgtctcatccatcttcttcttgtttttttaacttgcaactgggaatgacgaggtttctgctcatcgatcttgaactttggccaagatggaaaaaaatgacttggagcttgtgtgtaaatatctgaatgttcattcatgtacttgtgtaaaactgcttttaagggcctcctatttttctggggaaaaaattatctatcagaagaatgttcattcatgt

SEQ ID NO: 8506 - DNA, 1746 bp, Oryza sativa
  ref <308>: DATABASE ACCESSION NUMBER: AK105854
  ref <309>: DATABASE ENTRY DATE: 2002-08-28
gtcaacgttgacatgcatgccattcaagaatcagataaagtgattgaagatgcagaagaaaaacaaggaatgcaaaatgaagacaatgttgttcaccatgatgaatctctggtcacaactcaaaaggaagaggcatcccaagtgcatactgatgaacaatacagtgcagacactaaaatggatgataccgcaatttcctatgcagaaatgacacatgaaaatacaagtacagagcccagagaagttgaagatacaaaggaaaagaaaggattcaatgactttccagaatttgttgtagaaacatccaaacaggatgatgttgaccaagactttagcattcatcaccaggttgaagatgaaaagtcggcagaaacagagaacaatagcgcagaatctgaagctgtgcaaccaaaacttgatataacgattgctgagacaaataatgacaataatttgtctacaatcaatcccttgcctgagcatgaaacagaaaatgcctcagatataaatcaaaacagacaatatcaggaagcaaccaatgaagatgctatcgacaacattgaaactggtcgtgtcgagaaaatggagacaagctatactgcaacaactgaagtggtcacactcaatgaagatatctgcgataaggctagtggagctgatggagtaccacctgatggaagtcttaagacatctgaggacaaccttgatgtttcatctgtagttacagaatcagagggagaaaatattaacaaggagacggaagatcacaagcttgctcttcctgtgcatcctacacaggatgaaaacacaactgagcagggatttggtttggaagatacagaaaaagagtccatgtcaccagagaaggcactgcctgctgaaccagaggagcaagaagagaatcaagtaaccaaagaacaagatgaagaagacaggcatgatgcagaacttggtgatgcacatgaagaagatcacaaagaagctgaacaagattatttgcctgtctctagtttcctgatgaacctaatattgggaaaagacaatgatgatccaaagaaagattcagaaaccgaggttgaaaaggagcaagaagaaacaacgaaggatggaagttgtttgatcgcttctcaacaagaagaaaatttggtggcatttcctatagaaaaatcggtggatgaaaaactcacctttgaacaagaaaaagaaaaggtagaaggctctgaagaaacaaaagaaccagtaaaagaacagagttatgatgtcgagatggacgtccaaaaatcattggaaactgatgaagagctcaaaaggaacacttgtgatttggaagcaccagtataccaagataatgcccaggatgaaatttctagcaaactgatatcagccaaggcagctgatccgatcaaaaaaatggaagctagagactttgaattggatgaagagtcatttgatacagtttgtcaggaaaacgtggaagcagcaacagaaattgaagacggaagcttgaatagggaccaagatgacataacaagcccaaaggcttcacaagaggatgctttggaggaagtaggaacagaacttccgcatgagtctttacatgaaaatagacatggtgcaaaggatgagcaaacactctccttgatagaacccgatacaggcaacgctgaaaaattgcctaacgaggctgacagtgttcaaagccctccttgcacagaacaagaagagtccattgaatcttcctatgtt

SEQ ID NO: 8507 - DNA, 1495 bp, Oryza sativa
  ref <308>: DATABASE ACCESSION NUMBER: AK105855
  ref <309>: DATABASE ENTRY DATE: 2002-08-28
actcttcttcctcccctccgcttctgctcccctctcaaaaccccacctccctctcctcctcctcctcacctccgccgcctccaaaccctaacccgcgcgctcgcctcctcctcctcagccatggcgtcgccgcccgcgaagaaggtgctggtgccgatcgcgagcgggacggagccgatggaggccgtcatcaccgtcgacgtgctccgccgcgccggggccgacgtctccgtcgcctccgtcgaccccggctccgcgcaggtcggcggagcctggggcgtcaagctggccgcggacgcgctgctcgacgacctcgccgacgccgaattcgacctcatctcgctcccgggaggtatgccagggtcttccaatcttagagactgcaaacttctggagaacatggttaaaaagcacgcaggaaagggcaaactttatgctgcaatatgtgctgcaccagctgtcgctctaggatcatggggtttgctgaatggattgaaggcaacttgttatccttcattcatggataaacttccttcagaggtcaatgctgtagaatcgagggtgcagattgatgggaactgtgtgaccagtcgaggaccaggaacggccatggagtattctgttgttttggtcgaacaattatatggcaaagaaaaagctgatgaagttgctggtccaatggtcatgcgcccccagcatggtgtggagttctcattgaaagagttgaattcaactagttggaatgttggtgaaacacctcagattcttgtaccaattgctaatgggacagaggagatggaagcaactatgataatcgacatcctcagaagggcgaaagcaaatgttgtcgttgcgtccttggaggaaactttggagattgttgcatccaggaaagtgaagatggttgctgatgttctgttggatgatgctcttaagcagcaatatgatctcattttgttaccaggtggtcttggtggtgcccaagcatatgcaaagtcagataaactgattggtctgatcaagaagcaagctgaggcaaacaagctatatggagctatatgtgcctcgccagcaatcgcccttgaaccacatggcctgctgaagggaaagaaggctacatcctttcctggtatgtggaacaagctctcggaccaaagcgaatgcaagaacagggttgtcgttgatggcaacctaatcaccagccaaggtccaggcacatccatggagttctctctcgccatcgtggagaagctgtttggtcgggagagggccgtcgagctcgccaaaaccatggtcttcatgtgagttgtgttgttacatactacgtgtaagacaacaccatagtcagactctgaatatgaggcatccttttgctcgtagctggtgtggtggaaagcacttcgtaatccttttttttggctttctcttccacaataacacgacgtcttgttatgtgtacaaccgtacaaatgcaataaaaagagatggatattgc

SEQ ID NO: 8508 - DNA, 1208 bp, Oryza sativa
  ref <308>: DATABASE ACCESSION NUMBER: AK105856
  ref <309>: DATABASE ENTRY DATE: 2002-08-28
aggcgcagtagaaggttagttttcattggctgtggtacaagttacaatgctgccttggctgcaagaccttttgtggaggaattaactggtattcctgtgactatggaggttgcaagtgacttgctggacagacaaggtcccatctacagggaagacactgcagttttcgttagccagtcaggggagacagcagataccctccttgctcttgattatgcactagaaaatggagcactttgtgttggcataacaaataccgtaggaagcacactatcaagaagaacacattgtggagttcatatcaatgctggttgtgagataggtgttgctagtaccaaggcatatacaagtcaaatagtagtcatggtgatggtggccttggctgttggatctgatcaaatatccacccaagttagacgtcaagctatcatcagtggtctttccaatcttccaagcaatgtcagcgaggttttaaaacttgataccgagatgaaggaactttcctcttccttgatcgattcagagtctctccttgtgtttggcagaggttataactatgccactgccttagagggtgctcttaaagttaaggaggttgcactgatgcacagcgaaggcatgcttgctggtgaaatgaagcatggaccacttgcactagtggatgaaaaccttccgatcatcgtcattgctacacgtgatgcgtgcttcagcaagcaacagtcagtgattcagcagctcctttctcgcaaggggcgtctgatagtgatgtgctcaaagggagacgcatctgcagtttgccctagtggatcttgcagggttattgaagttccagaggtcgctgactgtctccagccagtgattaacataattccgttacagctgctcgcataccatctgacagttcttcgaggatttgatgttgatcaaccaaggaatctggcaaagagtgtgactacccaatgagtagggggttctatcataagttgtatcagatccaatagagatcagacgttgtatcaaatccatcctatagagaataggttgtgtagctattgattgaatgttattactcatagccatttcgcagttatgtaattatttttagataactgagattcttgaggtggctagcattacaatattgttgatgaactccatcaatttttcatgtctgtgtttgtcctgactgatgatgcattgactcgctg

SEQ ID NO: 8509 - DNA, 1723 bp, Oryza sativa
  ref <308>: DATABASE ACCESSION NUMBER: AK105857
  ref <309>: DATABASE ENTRY DATE: 2002-08-28
agctgcagcagcactacctgtcagtactcggagtagcaaattatcaatctttgcatggacaaagctatggcgttcatcccgccgcgagacctcgtcgtcgtcctccccttcctcgcgcttctcctccccttgtacatctacctgaggtactcgaggagtgcaaaggctaacccgtcgcttcccaccgagtggccgttggtcggcatgctcccttccctcgttgccaacatccacaacctgttcgactacgccaccgcgctcctcgccgcctccggcaacagcttcgaggcccgcggcccgccgatgtccagcctccggttcttcgtgacgtgcgacccggacaacgtgcgccacatcttcatcaacaacttcgccaactaccccaagggcgaggagttcgcctccttcttcgacgtcatgggcgacagcttcttcaacgccgacggcgagtcgtggcgccgccagcgcgccagggtgcagcacgtcatgagcaacccgcggctgctcgcgtccatggccgcgtgctgccgcggcaaggtggagaagggcctgctgcccatcctggaccgcatggcgagcgccggcgcgccgttcgacctgcagcgcctgctcaccaggttcgcgttcgacgtgacggccatggcggtctttggggtggacacgtgccgcctgtccatcgacatgccgccgctcgacgtcgcgaacgccatggacgccgtcatggaggtcggcttcttccggcacaccgtgccggtctcttgctggaagctgatgaggagtctaagaatcggcccggagaggaagctcacagctgcacagcggttgctacgccggttcgtcgcggagatgatcgagaaaagacgagtagccggcggcgcctgcaaggccaccgacgacgagcaaggaggtgtaccgccgccggcggacatcgtgtcctcctacatcaacgacccggagtacgtcgacgaggacgggaaccccagggagttcatgtacgcgaccttcatcaactacatggtcgccgggcgcgacacggtcggcactgcgctgtcgtggctcttcttcaacctcaccgagcacccgcgcgtcgtggcgagaatcagggaggagctggagccgatcgcgtcgagcaaagccggcggcggcggcatggtggtgttcgaccccgaggagacgaagcccctggtgtacctgcaggcggcgctgttcgagtcgatgcggctgtacccgccggggccgatcgagcggaaggcgacgctggcggaagacgtgctcccgagtgggcacacggtgcgcgcgggggacaacatcctgataccggtgtactccatgggcaggatggcgagcgtgtgggggaaggacagcggcgagtacaggccggagcggtgggtgacggaggacggcaaactgcggcacgtgccggcgcacaggttcatgccgttcaacgccgggccgaggctgtgcctcgggaaggacatctcggtgctgcagatgaagagcgtcgccgccgccgtggcctggaacttcgacctcgaggtggtggccggccacgccgtggagcccaaggtgtcgatcgtgatgcagatcaagaacggcctcatggtgaaggtgaagaagcggtagatcgaccgtgtgccaattaacccatcggtgaaaacatatcgtacgtgtttgtacacgggcatgtacggttttcactatgcatggcctacgtatctctatc

SEQ ID NO: 8510 - DNA, 1634 bp, Oryza sativa
  ref <308>: DATABASE ACCESSION NUMBER: AK105858
  ref <309>: DATABASE ENTRY DATE: 2002-08-28
acatgcgctgctattagtagcagctgctaggtgtcctgctattttgttgccctgcttcctctaatcttcctcttcttcttctccttcaatcgtgtcgtgtcgtctccttgttcggttctttggtgcaggaagcaatggcgattcttcgtgtgtccgtgatgcggctggttgttgcggccatggctgttgcagctggtgttctcttcttctccggcgccggcgaggcgcgcgtgctcctcaccctcgacgacttcggcgccgtcggcgacggcattaccaacgacacgcaggccttcttggacgcctggaacgccgcctgcgcctcgacggagccggccgtcctcgccgtgccggccgggaagacgtaccagatctggccggtgcggctcgccgggccctgcaagaagaagctcaagctcatgatttccgggacgatcgcggcgccggcgagccccgacgagtgggcggggcgcgacccgacgaagtggctctacgtcttccgcgtcgacgacctgtccgtctccggcggcggcaccatcgacggcatgggcgccgagtggtgggcgcgctcctgcaagcgcaagaagaccaagccttgcagcacggtgtctgctcccaaggcgctgcagttcgaggagtgcaggcgggtgagcgtgcaggggatcacgatgcagaacgggccgcagttccacctgatgttcacccggtgcacggacgtcaaggcaagcttcctccgcgtcgtggcgccggagagcagcccgaacaccgacgggatccacctcaacgacaccacccatgcccagatcatggacaacctcatctccacaggagatgattgcgtgtcaatggttggcaattgctctgacgtccgagtgaaggacatatcatgtgggcctggacatggcatcagtatcggaagcttaggcaagaaccggaccactgacagaatagagaacgtgagggtggacacctgcttgctgacaaacacaaccaacggtgtacggatcaagagttggcagggagggatggggtatgctcacaacctgaggttcgagggcatcgtgatgaagaacgtctccaatccaatcatcatcgatcagtactactgtgaccaaccaacaccctgtgcaaaccagacgcaggcggtggaggtgcgcaagatcgagttcgcgggcatccggggcacgtcggcgacggagcaggcgatcaagctggcgtgcagcgacgccgtgccgtgccgggatctggagctgaggaacgtcaacctgaccatggtgggcggcggcgcggcgtcggcgttctgccacagggcgtccgggaaggcggccggcgccgtcgtgccggcgtcctgcctcgccaaggcgccccacaggatgctcggcgacgccacgccggcggccagagtcggttcttgatcgccgccggcaatgcccgatcctggcaacgatcaccggaaaaaagctgaagtataaataccgtacacgtaggtgtagaaactgttgccgtatttgggagagtgtatgagtacagagagttgtaagctgtatacgacgtttgtgtcaagaattttttagagggcattatgtgaagttaaaatggatacaaaaaaacataattttaccggagtttctgct

SEQ ID NO: 8511 - DNA, 1716 bp, Oryza sativa
  ref <308>: DATABASE ACCESSION NUMBER: AK105859
  ref <309>: DATABASE ENTRY DATE: 2002-08-28
agctagccgagcacgagcagagcgtcttgtgcgcgcgcatctgcatctgtatgcggcgccggcgatctcatcaattctgcgctgccggatcgagatcgagctaggccaataggccatagccaaaccatggcactcatgctcgcggccgcggcgagggagtggacgccgtgcgcggcgatggtggcggcgcagtgcatctacgcggccatgacgctctgggccaaggccatgttcggccgtggcgtcagccccgtgatcttcgtcgtctaccgccaggccatcggcaccctcgtcctcgtccccatcaccctcctcgccaacaggtatagcaataatcattgatatatacacttaaattgttcagtttcgatcatgtttagctgatcatcagtcagatcatcatcaccctcttctgttcaattgaaccattgatacacttaaatagttagttaaattgatcaatttggtcatgtctagctggtcagtagtcatcaccctcctctgttcgattgatcatgtttgtgtgcttgtgagaaatccagggcaaaagtgaaggagacgaggagccttgggacgacaggcttgttcttggtgtttgtgacggctttgctcgggcacggcgacggtaaaccagaacctgacctaccaagggctgcatctgggctcgtcatccatggcgacggccatgaccaatttgatacccgcgataactttcttgatggcagcgtcagcagggcaggaaagagttaacgtcagagaacggggcaccatggccaagatatccggaaccatagtctgcgtgggaggagccacggccatggcgttcttcaaaggcccaaagcttctgaactacacgcttggtgacctgaacatgctcctccacccgccggcgatcagcaagtgggttctcggcgcgctctgcctcgtcgtcagcagctcatgctggtcactccggctcatactgcaggtgccaatctgcaaattttatgtggatcctctgtctctgtcggcatggacctgcttcttctcgacgctgcaatgcgcagcgctcgccgtcttcctggtcccggacgcgaacgcatggaagatccactcgctcttcgagctctcgagctacgccttcgccggagtgtttgggtcaggcgtctgcttctacctgcaatcatggtgcatctcggtgagggggcccctctactcggccatgttcacccctgtctgcaccgtggtcaccaccatcgtcgccgccgccgttctccaggaggagctgcacattggaagcttgatgggagcagctgctgtgatcaccgggttgtacgtcgtcctgtggggaaaagcggacgacatgaagcggggcagcgagccggcgacggcggcggcggcggcgaagccatgcacggattcgtgtcgcgacgtcgagcgcaccgccgctgaggagcctctcctgctggcagacgccgtctcaagcgagcagctctgattgtttacacattacgacaacactagactattttgtatgattagtaaaaacggatcgacagatctgtgcagttttgctgtttatgactagtttacctgttgtctgttccgacattcgagcggccagcaaatggcctgatttgttaaagatgtggggccgaattgccgatgccatcatgaagtatgattgatactccctccgtctcattttaagtgtaaccataaattttttttatgccc

SEQ ID NO: 8512 - DNA, 2262 bp, Oryza sativa
  ref <308>: DATABASE ACCESSION NUMBER: AK105860
  ref <309>: DATABASE ENTRY DATE: 2002-08-28
aagaattcagctttcctctgcattttctgcaggtttgccattgatgattgatgatccatccatgcatctcaagcctcactccatcgtctccttccttgtgctgttgctactcttccacgcggcggcggccggtggtgatggcgatcagttcaggtacgacggcttcgccggcgcggcgctcgacctcgacggcatggccgtggtggagccggacggcaagctcatgctgacgaacgtcacgtcccagatgaagggccacgcgttccacccggcgccgctccggttccaccacccgccgccggcgaacggcaccgccgccgcggcgaggtcgttctcgaccgccttcgtgttcgccatcgccgccgactacgtcacggtgagcggcaacggtctcgccttcttcgtcgcgccgagcaagaacatgtccacggcgtcgccgagccagttcttgggcctcttcaacagcgagaacaacggcaacgccagcaaccgcgtcttcgccgtcgagctcgacaccatcctcaacccggagttccgggacatcaacagcaaccacgtcggcgtcgacgtgaacggcctggtgtccgtcgccgccgagcccgccggctactacgacgacgccaccggcggcgcgttcaagaacctgacgctcttcagcggcgccgccatgcaggtctgggtggactacgacggccgcgccgcggtggtgaacgtgacgctggcgcccgtcgaggtggccaagccgaggaggcccctcatctccgtcgccgtcgacctctcgccggtggtgaacggcacggcgtacgtcgggctctcgtcgtcgacggggccgttccacacgcgccattacgtgctcggctggagcttcgccatggacgggcccgcgccgccgctcgactacgcgaagcttcccaagatgccggtcgtgagcgccaagcggcggtccaaggcgctcgacgtcgtcattccggtggccgcgccgctcctcgcgctcgccgtggtcgccggcgtctccttcctcgtgtggcggcggctccggtacgccgagctccgggaggactgggaggtggagttcggcccgcaccggttcgcgtacaaggacctgttcgtcgccaccgccggcttcgacggcaagcggctgctcggcgtcggcgggttcggccgcgtgtaccggggcgtgctcccggcgtccgggacggaggtcgccgtgaagatcgtgtcgcacgacgcgaagcaagggatgaggcagttcgtcgccgaggtcgtcagcatcggccggctccgccaccgcaacgtcgtgccgctgctcggctactgccgccggcgaggcgagctcctgctggtgtacgactacatgcccaacggcagcctggaccggtggctgcacgaccacggcgcgccgccgctcggctgggcgcagcggctgcacgccgtccgcggcgtcgccgccggcttgctctacctccacgaggactgggagcaggtggtcgtccaccgcgacgtcaaggcgagcaacgtgctcctcgacggcgagatgaacgcgcggctcggcgacttcgggctggcgaggctgtacgaccgcggcgccgacccacagacgacgcgggtggtgggcaccatgggctacctcgcgccggagctcgcgcacacgcggcgggtcacgccggcgaccgacgtgttcgcgttcgggtcgttcgtcctggaggtggcgtgcgggcggcggccgatcgagcgcggcggcgccatgaccgccgccgccgacgaggacggccagctcgtgctcgccgactgggtgctcgaccggtggcacaagggcgacatcgccgccgcggcggacgcgcggctgtgcggcgactacgacgccaaggaggcggcgctggtgctcaagctgggactcctctgctcccacccggtggccgccgcgaggccgacgatgcggcaggtggtgcacttcctcgacggcgacgcgccgctgccggagccggagcccacgtaccggagcttcaccacgctggccatgatgcagaacgccgacggcttcgactcatgcgccgtgtcgtacccgtcgacggcgacgagcatcgacggcgcgtcctccgtcctctccggcggacggtgatggatcgaacaccaatactaactgaccctccttagaaacagtcaagttacaaacattttggaacctagaaatttcatttcatcatttgtaaactttcaaaacatgtacattcaaacacattctaatcagtatgtttctgacgc

SEQ ID NO: 8513 - DNA, 1599 bp, Oryza sativa
  ref <308>: DATABASE ACCESSION NUMBER: AK105861
  ref <309>: DATABASE ENTRY DATE: 2002-08-28
gaacacaaaagaaggggagaaggggaaggatagatagatcgccgccgccgccgtcgtctccgcccctctccagccaccagatccagcgaccatggggcagggcaccccgggaggcatgggcaagcagggcggcgcccccggcgaccgcaagcctggcggcgacggcgacaagaaggaccgcaagttcgagccccccgccgccccctcccgcgtcggccgcaagcagcgcaagcagaagggccccgaggcggccgctcgcctccccaacgtcgcccctctctccaagtgccgcctccgcctcctcaagctcgagcgggtcaaggactacctcctcatggaggaggagttcgtcgccgcccaggagcgcctccgccccaccgaggacaagaccgaggaggaccgatccaaggtcgacgacctccgcggcacccccatgagcgtcggatccctcgaggagatcatcgacgagagccatgccatcgtctcctcctccgtcggccccgagtactacgtcggcatcctctccttcgtcgacaaggaccagctcgagcccggctgctccatcctcatgcacaacaaggttctgtctgtggtcggaattttgcaagatgaagttgatcctatggtttctgtgatgaaagtggagaaagctccgctggaatcctatgctgacattggtgggctagatgctcagatccaagaaatcaaagaggcagttgagcttcctttgacccatcctgagctatatgaagacattggcatcaggccacccaagggagtcatattatacggagaacctggaacagggaagacactacttgccaaggctgttgctaactccacatccgcaactttcttgcgtgttgttggaagtgagcttattcaaaagtatcttggtgatggtcccaaactagtcagggaactgttcagagttgctgatgagctttctccctcaatagtctttatcgatgagattgatgctgttggaacaaagaggtacgatgctcattcaggaggggagcgtgagattcagagaactatgttggagcttcttaaccagttagatggttttgactctcgtggtgatgtcaaagttatactagcaacaaatcgcatcgaaagtcttgatccagcattgctacgccctggtcgcatagatcggaagatagaatttcctctgccagatattaaaactaggcggcgcatcttccagatacacacatctaagatgacattggcagatgatgtgaacctggaagagtttgtcatgaccaaggatgagttttccggtgctgatatcaaagcaatatgtactgaagctggacttcttgctttgagagaacgccgaatgaaggtgacacatgctgacttcaagaaggcaaaggagaaggtgatgttcaagaagaaggaaggtgtgccggagggtctttacatgtgatgtgctcactggtcgccagtgacggggtgggtaaccttgtaggacgaatatatatttgatttatcacataggctatgctgccttggtttgtaaaatacttgtgaaatttgttttgttacttcttgggatggagttggatagaacaaattgcattcctcatg

SEQ ID NO: 8514 - DNA, 1715 bp, Oryza sativa
  ref <308>: DATABASE ACCESSION NUMBER: AK105862
  ref <309>: DATABASE ENTRY DATE: 2002-08-28
gctcacctcgatcgagtagctgctgctgctgtgctagcttgctcgccggccggtgaggtcgacgatggagctgcacagatgctctctcctcgctctgctcctcgccgtgacatgctcggttgcagtggcgtatgatccgctggacccgaaggggaacatcacgataaagtgggacgtgatatcgtggacgcccgacgggtacgtggcgatggtgacgatgagcaactaccagatgtaccggcagattctggcgcccgggtggacagtggggtggtcgtgggccaagaaggaggtcatctggtccatcgtgggggcccaggccaccgagcagggcgactgctccaagttcaagggcggcatcccccacagctgcaagcgcaccccggccatcgccgacctcctccccggcgtcccctacaaccagcagatcgccaactgctgcaaggccggcgtcgtctccgcctacggccaggaccccgccggatccgtctccgccttccaggtctccgtcggcctcgccggcaccaccaacaagaccgtcaagctacccaccaacttcaccctcgccggcccgggacccgggtacacgtgtggcccggccaccatcgtcccttccaccgtctacctcaccccggaccggcgccgccgcacccaggcgctcatgacgtggaccgtcacctgcacctactcccagcagctggcgtcgcgctacccgacctgctgcgtctccttctcctccttctacaacagcaccatcgtgccgtgcgccaggtgcgcctgcgggtgcggccacgacggctaccgcggcaacggcggcggcgggaagaacgcccgcgccggcgacggacgcagcagacgcaacagcggcggcggcggagggcacagcggcggcaccgagtgcatcatgggcgactcgaagcgggcgctgtcggcgggggtgaacacgccgcgcaaggacggggcgccgctgctgcagtgcacgtcgcacatgtgcccgatccgcgtgcactggcacgtcaagctcaactacaaggactactggcgcgccaagatcgccatcacaaacttcaactaccgcatgaactacacccagtggacgctcgtcgcccagcaccccaacctcaacaacgtcaccgaggtcttcagcttccagtacaagcccctcctcccctacggcaacatcaacgacaccggcatgttctacgggctcaagttctacaacgacctgctcatggaggcagggccgttcggcaacgtgcagtcggaggtgctgatgcgaaaggactacaacaccttcaccttcagccagggctgggcgttcccgcgcaagatctacttcaacggcgacgagtgcaagatgccgccgccggactcctacccctacctacccaactccgctccgatcgggccgccgcgttccgtggccgccgccgcctcggcgatcttggtggtgctcctcctggtggcatgatcagaaaaatgtccccttttgctttgtcttcttgataattcccacatgtttggagagcagtgtaggtaggggcattttggtctattcatactggatattcagtcaaagaggaaatctgtgatattgtgttaactttgaaattgcctgatagatctccataatgtacaacacaatcaggctggaagagttttggtcagtccccagttaggccagccctgagaaatcacaccacaaacttttctgc

SEQ ID NO: 8515 - DNA, 1917 bp, Oryza sativa
  ref <308>: DATABASE ACCESSION NUMBER: AK105863
  ref <309>: DATABASE ENTRY DATE: 2002-08-28
acacagcaccgacctcacctctcgcacaggtcgcagcagagcagccgctggctcgctggccgtcgcatcggaggaagaagaagaagagggggagcgggaggcgtcctctctctctctctctcgatccaccaccacccatggcgggggaagaaggggaggacgaggcggcgtcgatcgagctgcagctggagcaccacctacaggagcagcgggcctccctcaccgccgtcgacgaggccctcgccgccgacccctccaacgccgacctcctcgaggtccatgaagaacttcttgctgcaattaaggatgcagaggagggacttctccatttgaaacgctctagactagtaaagcaaattgatgagatatttcctaaccaagagccaacatctgaagcacctgaagtagctgttgatccacccgatgatgttgagccagaaccattggagccacaggaattttcagttggatctaagtgtagattcaggcataaggatgggcgctggtataatggatgtgttataggacttgaaggctcaagtgatgcaaggatctcatttctgactcctacgtctgaaaacatgtcgatgtgcaagttttttctccagcaacgatgtcggtttggtagtaactgccgcttgtcccatggtattgtaattcctattctgtccctgaagcaattcactccgactagatggcagcagtccttggtaggatccagcatactggctgcttctgggcatcattctggcctttggagacgagctgaacttgagtcatgggatgacgatctgaaagttggccaggttgtttttcaagatgacgggagctctgcaaggcttcccagtgattctctttcaatctcagaatatgctgatgagagcgatgaagatggtgaaggaagctcaagtgatgaaggatctgattttagtgaggatggagatcaagaggatgaatctgttcatcagggtctaggccttttggaatccaaaaatttaagtggtgttcagacagagactgcgatctttgcaaagtgggagcaccataccaggggcgttgcctccaaaatgatggcaaaaatggggtaccgagagggaatgggtctaggtgtttctggacaaggcatgcttgatccaatcccagttaaggtactacccccaaagcaatctcttgatcacgctgtggctgcaagtgaggttaatgatagtgtaggccctggaaaaaaacgcagtcggggtgggaaaagaaagcgtgagaagaagtttgctgaacaggcaagggctgctaaagctgaagaagaagagaggtctgtcttcagctttatcaatagccaactagtgggtcaagatgttgcagaaggctcagccgtgaaatctaaaaaggattcatccggtgaggcaaatggacatgccaagaaggaagacagaagatccttgcttgcatacgatgacgaagtgaaagaactgaggagccgtgttgagaagctggaggaaatgatgaagcgaaaccgcaaggacaaggcattctacgaagcagcttcaaagaaattgaaacaaacccgaaaagctctagctgatgctgaagcaacgcatgcttcggcaaccaacgcggttgctagaaaggagaaagagaagaaatggttaaaattctaatgtcaattttcgatgcagtatcaattagcatctgccagtcaatcaatatccattttgatacctgaaggttgtcgtggcatgcgacttcagattgcttgttctttcatgccttatacagtgtgatctgtggctgtaatgttttaggagctctgttgtagggaaaatataggatgtgatatctagtttgtccgccagaagttcaggaccatattgtttcgagttctgaactcacaaacttatgctccctattgtcattttggtacct

SEQ ID NO: 8516 - DNA, 1368 bp, Oryza sativa
  ref <308>: DATABASE ACCESSION NUMBER: AK105864
  ref <309>: DATABASE ENTRY DATE: 2002-08-28
agcgcgacgccagggaacgcgtagggagagaaaagttcggttcttgagaaagaaaggggaatataagtgaggaggcgagagccagagatagagagagagagagagagagagatcggagcagctagctagagcatcaaaagcggccagccatggcgttggaggccaggttctttttggcggccgtgttcgccgtcgccgcgacgtgcttgtgcttatcggcggtggcctctgctttcgccgtgccgagcgtcgccttcgacgaagggtactcgccgctgttcggcgacgacaacctcgtccgctcgtcggatgataagagcgtccgcctcttgctcgaccggcgctccggttctgggttcatctcctcggattactacctccacggcttcttcagcgcgtccatcaagttgcccaaggcttacacggccggcgtcgtcgttgccttctacctgtcaaacggggacgtgtacgagaagacgcacgacgagctggacttcgagttcctgggcagccgttggggcggccagtggcgtgtgcagaccaacgcctacggcaacggcagcaccgcgcgcggccgcgaggagcgctacctcctccccttcgaccccaccctcgaggcccatcgctactccgtcctctgggcccccacccacatcatattctacatcgatgacacaccgatcagggaggtgatcaggcacccgggcatgggcggggatttcccgtcgaagccgatggcggtatacgcgacgatctgggacggttcgacctgggccacggacggcggcaagtacaaggtgaactacaagtacgcgccgttcgcctccgagttctccgacctggcgctgctcggctgccgcgccgacccggtgctccgcgccccgcgcgacggcggcggcgccgggtgcgccgagcccgacctgctcggcctcctcacggccgactacgccgtcatgaccccgcggaagcgcgccgcgatgcgcgcgttccgcgcgcggcacatgacctacaccgtgtgctacgacgcggtgcggtacgcggccgggccgttcccggagtgcgacgtctctgacgtggagaaggagtccttctcggcgtggggcgagtccaagaacgtcgtcatgaaggcgcgtggccgcgggcgccgccgaggacgcaaggccggcgccggagccatgtcgcgcctcgacgtgtccagcagctgaagtgtcaacttgggaagctaatggcatatgatggttactattacactactagattctattaattttgcggtattgattgattaattgtagtatggttttccatgtatgtatagtttgtaaaggtagtaggtgctagggattaagttcggtaccaatttcgact

SEQ ID NO: 8517 - DNA, 1475 bp, Oryza sativa; identical to SEQ ID NO: 232
  ref <308>: DATABASE ACCESSION NUMBER: AK105865
  ref <309>: DATABASE ENTRY DATE: 2002-08-28

SEQ ID NO: 8518 - DNA, 2059 bp, Oryza sativa
  ref <308>: DATABASE ACCESSION NUMBER: AK105866
  ref <309>: DATABASE ENTRY DATE: 2002-08-28
gtgcccaatacaattgtgaccgatcgatcgaggaagaagacgacgaccatgaggacgatgcttcctctcctcgttatcctcgtcgtcgggctccggctcgccggcgcgagccctccgccgcagccggtggcctgcaccaagggcaccaccgactgcacggtgaccaacgtgtacggctccttccccgaccgcaccatctgccgcgccgccgacgcgtcgttcccgcgcacggaggcggagctcgtggcggccgtggcggcggcggcggcggcggggcggaaggcgaaggcggcgacgaggcactcccacagcttccccaagctggcgtgccccggcggccgcgacggcaccatcatcagcacccggttcctcaaccgcacggtggccgtcgacgcggcggcgcggcggatcaccgtcgagagcggcgtcgtgctgcgggacctcatcagggccgccgccgccgccggcctcgcgctgccgcactcgccctactggtacggcctcaccgtcggcggcctcctcgccaccggcgcccatggcagctcgctctggggcaagggtagcgccgtgcacgagtacgtcgtcgggctacgcatcgtcaccccggccccggcgagccaggggttcgccgtcgtcagggagctcgtcgccggcgaccccgacctcgacgccgccaaggtctccctcggcgtcctcggcgtcatctctcaggtgacattcgagttgcagccgcagttcaagaggtcggtgaggttcgtgacgcgggacgactcggacttcgcggagaaggtggcggtgtggggcggcgcgcacgagttcggcgacatggcgtggctgccgcggcaggggaaggtgatctaccgggaggacgaccgcgtcgacgtggccacgccggggaacggcctcaacgactacctcggcttccgcgcgcagccgacgctgggcctcatcaccgccagggccgccgaggagcggctggagaggaacggcaccgacatcgcccgctgcctcgcggcgcggctgccgccgtcgctgttcgagctccaggcctacggcttcaccaacgacggcgtcttcttcaccggctggccggtggtcgggttccagcaccggatccaggcgtcggggacgtgcatcagctcgccggaggacggcctcctctcctcctgcacctgggacccacggatccgggggcccttcttgtacaactccggcttcagcatcgcgctgcccagggcggcggcgttcgtcgccgacatgatgcggctgcgcgacctcaacccgcgggccttctgcgacatcgacgccaagctcggcatcctcatgcgctacgtcaaggcgagctccgcctacctcggcaagccggaggactgcgtcgacttcgacgtcacctactaccggagctacgacgacggcgagccgcgcccgcactccgacgtgttcgacgagctggagcagatggcgctgcgcaagtacggcgccgtcccgcactgggggaagaaccgtaacttcgccttcgacggcgccgccgccaagtaccccaactccggcgagttcatcaaggtgaaggagagatacgaccccgacggcatcttctccagcgagtggagcgaccaggtgctgggcatcagcgggagccccaacatcgtcgacaagcgctgcgccattgaaggcctctgcgtctgctccgacgactcccactgcgcgccggagctcggctacttctgccgcccggggaagcttttcaaggaggccagggtctgctccaaagacaaatccgccgccgccggtgatgatgatctcctcgatgaattgtgatttattattatttgatcgaatttcgttcaagtcaaataatacatgcatggctagctagctctgcatgaaatgaaatgcaaatttatatttaattaatcaagaaaaagataagcacgtacgaaataatccacccgctacattgggatggcgtatgtggtaggtagtgatactgtaaattggttggcgtgatttgattttgagatgtaatgatgctttaatgtggacagtgtcagtggtttgg

SEQ ID NO: 8519 - DNA, 1432 bp, Oryza sativa
  ref <308>: DATABASE ACCESSION NUMBER: AK105867
  ref <309>: DATABASE ENTRY DATE: 2002-08-28
accacaccactccctccgcccctccgcatcgcttcctccgccgccacccccatggccaccgccaccaccacctcctcctcctcctccaattcccaaaaccctaaccccttcaacctcccgccatggctccgcagcctccgctgccccttcaccttcctctgcccgcccccaccgcccccgccgccccctcctcctccgccgccgccgccgcctcccccgctggaggtggtgtcgccgtccccgcggtggaggcggccggggctgagggtgaccacggagtacgacagcgaggaggccatgttcgcgcacaaggtgtcgtgcaaggtcgcgggcgggctcgccaagctgcggctgtcgttccagagcgacccgtcggggcaggggttgggggaggagggcgacccgcggcggcagctattcgtcgcgcccgtggtcgggctcatcgccaagaatttctccgtgctgtacgacgtcgaggcccgcaacgcgctgctcagcgggcagggctccctccccggcggcgccatccagctccgcggctcacacgatgtcaaggagcgacaaggagaagtctcagtgatcactaggctgggtgatccgtcttataaacttgagctatcatccttggtgccttacaatggtctgccgagagcaaccctccactttcctattggtcaagtgtcagttgaagagaggagaaacgaagcggatgagaaaatgttatccctttatggaattgcaaaatctaatttcttggatggcattcttactgcccagtacagtgaaaacgatattaatctgagatattgttataaggacaatgaactaactttaattcccagcgtgtccctgccttccaatgctgtatccttaggcttcaaaaggcggtttggtccttctgataagttgagctatcgttatgactttaccactgatgactggaatgctgtttataagcgcacagttggtaaagatttcaaagtgaaagctggttatgattctgaggtgcgagttggatgggcttcagtttgggtgggtcaagaagacggcaaggcaaagaccgcaccaatgaagacgaaacttcagctcatgcttcaagttcctcaggacaatttccgcaatcccaccttcctgttccgtgtgaagaaaagatgggatctgtagcatatgctacattatatactccatttgtatggggataccagtattgggtactcgggatttggccaacattttgttgtaagctgcgtaggatggcttgaaaaaaaaaatccatgaagcctttccaattctcatcatgtaattctgcctgctgtacataacggccatcgttcgttccgcacataagcaatttgatttccatgtaagattgttcacccctttactcgaagttctgggctaacttttccggagtgctatcggatcttcactc

SEQ ID NO: 8520 - DNA, 1563 bp, Oryza sativa
  ref <308>: DATABASE ACCESSION NUMBER: AK105868
  ref <309>: DATABASE ENTRY DATE: 2002-08-28
gatattggacatgttctaagatttgaatgcgtgtctgtggatgctgaaaaaaaggtacctgttggacctccaacttcaattatgacatcccgtgtgattccagcaccaactccaactccacgtcgccttatccaagtgaatggagatgttttgagtcacttagatttggacagccaaacatctttcgggacattctcagtgctgtcctacaatattcttgctgatgcatatgctacaagtgacgcgtatagctactgcccaacatgggcactttcttggacatacagaagacagaacttgatgcgtgagattattggttatcatgctgatatcatctgtcttcaggaggtgcaactgaaccacttcgaagatttttttttcacccgagcttgataaacatggatatcaggcactttacaagaaaaggacaacagaggtatatactggagctcctcatgccatcgatggctgtgccacctttttccgtagagacaaattttcacacgttaaaaaatatgaggttgagttcaataaggctgcacaatcattgacagacgcaattattccctctacccaaagaagagttgctttgagtcgattgattaaggataatgttgcactgattgcggttttagaagctaaattcggcaaccatggaactgacaatcctggcaaaaggcagcttctttgtgtggcaaatacacacgtaaatgtccatcaagacctcaaagatgtgaagctgtgggaggttcaaactctcctaaaagggttggaaaaaatagctgttagtgcggacattccaatgttggtctgtggggatttcaattcagtccctgggagttctccacatggacttcttgctatgggcaaagttgatcaattgcatccagatctggccatagatccccttggaattttacgccctgcgagcaagttaacccatcagcttcctctggtgagtgcatattcttcatttgcaagaatggtcggtgtcggctatgatttggagcaccagcggaggaggatggaccctgcaacaaatgaaccacttttcacaaactgcacacgagatttcactggaacggttgattacatattttacacagcggattcattgtcagtggagtcgttgttggaacttttggatgaggaaagtttaagaaaagacacggcccttccttctcctgaatggtcttcggatcatatagcactcttggcagaattccggtgcaagcctagaatcagacggtgacaccttaggtcgcgaatagatggttaacttcagcacccatgcggtggaacattcttccatggtgtgtgggacttgaggagggatggacgaaagcggatcctcggggaaggaccaccagcaccagcaggcttagggtagtggcctcatgaaagggaggcttgtaatgttgattacctcttacatttccaactcatgatgtttttaagcggccccattgtaatatcactttctatagaaggaaagatctcctgagagagagacatttttatgacagattcagatgccatcatggctaggccatttcaaatttt

SEQ ID NO: 8521 - DNA, 1475 bp, Oryza sativa
  ref <308>: DATABASE ACCESSION NUMBER: AK105869
  ref <309>: DATABASE ENTRY DATE: 2002-08-28
aaaaccctaggaggagagcacggtagatcccccatttccctcctcatctccgacgcgcatttcccccaaaagaggggagcaaatggcgtcggcggcgtgctcctcgtcggcttccgccctcgtccgcctcaccggcccgatccatctgtgcagcgccccgccccgtgggtccgcgcggcggcgccacgcttccgtgcggtgctcgttcgcgccggtggagacggcgaggataaaggtcgtgggcgtcggcggcggcgggaacaacgctgtcaaccgcatgatcggcagcggcctccagggcatcgaattttatgccataaacacagattcccaggcgcttttgaattcgcaagcgcaatacccgctacaaattggagagcagttaactcgtggactaggtactggtggaaatcctaatttgggagagcaagctgctgaggaatcaaaagaagccatagccaatgccctgaaggattctgaccttgtcttcataacggctggaatgggagggggtactggatctggtgctgctccagttgttgctcagatatcaaaggaagccggttatctcaccgttggagttgttacctatccattcagttttgaaggacgcaagcgctctcttcaggcgttggaagcattagagaagctggaaaggagtgtagacacacttattgttattccaaatgatcgattattagatgttgttgatgaaaacacgcccttgcaagatgcgtttcttcttgcagatgatgttcttcgtcaaggtgtccaaggaatatcagatattattacaatacctggacttgtcaatgttgattttgctgatgtgaaagctgttatgaaaaactctggaactgcaatgcttggtgttggtgtttcttccagcaaaaatcgggcccaagaagctgcagagcaggcaacacttgctcctttaatcgggtcgtctattgaggcggctactggtgttgtgtacaatatcactggtggaaaggacataaccttgcaagaagtaaacaaagtctctcagattgtgacaagcttggccgatccttctgcaaatataattttcggggctgttgttgatgaccggtacactggtgagattcatgtgacgatcattgccacagggtttccacaatcctttcagaagtcccttttggccgatcccaagggtgcaagaataatggaggccaaagaaaaggcagcgaacctcacctataaagcagtggcagcggcgacggtacaaccagcgcccgccgccacttggtctcggaggctcttttcctgaacacggttcaataggaaaactagtagtttgtgtaccttagattctcatggaattactgagttggcgctccaatcaggcttctatgtgttattctttttggatatgtaaacacttaacagttacacatagtgattagcttcacttttattgtatgtatcatctagatgaggttgaggtctaaaag

SEQ ID NO: 8522 - DNA, 1439 bp, Oryza sativa
  ref <308>: DATABASE ACCESSION NUMBER: AK105870
  ref <309>: DATABASE ENTRY DATE: 2002-08-28
cagaagaatcccagctaccaaatcgaacctaccaactcattcccgatcgatcgatcttaaaaaaaaactaatcgtaacttttctctctctctcctatctttagaactagcaggtagcaactgcttcgagtgtagtctggtgaacgtacgatctttcgttcgttcatcaagatgaccgtgatcgacggcgccgtcgctgccgacgccggcggcgcagccgcggcggtggtgcagccggggaacgggcagaccgtgtgcgtgaccggcgcggccgggtacatcgcgtcgtggctcgtgaagctgctgcttgagaagggctacactgtcaagggcaccgtcaggaacccagatgacccgaagaacgcgcacctgaaggcgctcgacggcgccggcgagcggctggtgctctgcaaggccgacctcctcgactacgacgccatctgccgcgccgtcgccggctgccacggcgtcttccacaccgcctcccccgtcaccgacgaccccgagcagatggtggagccggcggtgagggggacggagtacgtgataaacgcggcggcggaggccggcacggtgcggcgggtggtgttcacgtcgtcgatcggggcggtgaccatggaccccaaccgcgggcccgacgtcgtcgtcgacgagtcctgctggagcgaccttgactactgcaaggaaaccaggaactggtactgctacgggaaggcggtggcggagcaggcggcgtgggaggcggcgcggcggcgaggggtggagctggtggtggtgaacccggtgctggtgatcgggccgctgctgcagccgacggtgaacgccagcgtcgcccacatcctcaagtacctggacggctcggccagcaagttcgccaacgccgtccaggcctacgtcgacgtccgcgacgtcgccgccgcccacctccttgtcttcgagtccccttccgccgccggccgcttcctctgcgccgagtctgtcctccaccgcgagggtgtcgtccgcatcctcgccaagctcttccccgagtaccctgtccccaccaggtgctccgacgagaagaaccccaggaagcagccgtacaagatgtcgaaccagaagctccgggacctggggctggagttccggccggcgagccagtcgctgtacgagacggtgaagtgcctccaggagaagggccacctgccggtgctcgccgccgagaagacggaggaggaggccggcgaggtccagggcgggattgccatccgagcatgaggaaaacagcagagcaaaagagcaggaaaaatgtccatatcgtgttagtgtttaccgtgctgtaaaaccaaagtagtagtgttcgctggtttgtctggtctgaagccctgtaatacacccctgttgttgttacatgtgcaccagagtgaccgaataagtatttctatgaagttctctatgttc

SEQ ID NO: 8523 - DNA, 1666 bp, Oryza sativa
  ref <308>: DATABASE ACCESSION NUMBER: AK105871
  ref <309>: DATABASE ENTRY DATE: 2002-08-28
gacgccttccccgtcctcgatgctcccctcctccgccgcctcctcgccgccggcgccgccgccgtcgccatgggacgacgtctcctgggcggaatccacctcctcgactgttctccaacactacaactctctcccaaagaagggcaagccgcaggggcgggagtccaccgtcctcgccgccttcctcctctccactccgcagcaggacccccggaatctcactgttctctcgctggccaccggaaccaagtgtctcggcgccgctcgcctcaaccaccacggagacctcgtccacgacgcgcatgccgaggtcgtcgcacgccgcgcgctcctccgcctcatctacaccgagatcggccggagcggcgcttccgattggttggttgcttccggtgagaagtggaagttgagggatgggtaccaccttcatctctacatcacccagattccatgtatattcggtttgctgttcgccggttcgcatttttttttaggcttagccgattgtttgatcaattgaaatggcaaagttctacacatttagagttcaatggattccttggtttggtgaattttgcaggtggagtcatgcctgttccaccatctccctcagagttgctcagggaacagctggatagtgttaatggatgcgatgatgttgggtttgttcaaaggaagcctgggcgtggtgacactacattatcaatgagttgttttgacaaaataactcgctggagtgttgttggaattcaaggtgcattactgtctcacattcttgagcccttgtacctgtccaccattactattggacaatcacctactggtgcttctgatgggttttctgttgaaaataatatcaagaaagttctcgatgctcgactgtcctctctatccagcaaactgctgttgccttttaaattgaacaaggtcggagtggcaatgttgtgtactgatatacaaatcatctgctaacttctcatgacagtggatccgttttctttcctacagccactattttatgaggcacctatccctccaaaagagtttcaacagacttctggagatttgcaacctttgacatgcgggtagtatatggtactcgatatgctggaacaaatccggttttcatgaagttgtcttaggaacaactgggagaaaacagggtacatcttcaaaggcagcatgctcaccatccactgagtcattgctctgcaagagaaggttgctagaagcctttgtgttgattgaacatccattagtcaaaaagttccatcgcgaggaaatgtcctaccgtcaaatcaaggatatggctcatgaataccagcagacacttgagcttctcaggaaggctccattttttagccggtggagtgctaagcctgcatccctcgattcattcacggtttcacggtgagattaacccccaaatggctctttgagttcccccagaatgatgttttcagtgctagttttagtgttgaggtgtgttaactctgaatttgttcagaaaatgtgtgctcttcagccgatgcagctctgaactactgtacaagctgtcactgtaacaaacctacaaaacttttggcgttattaggttaagatatggataactcatgctgtcttgctcaaatttgtaagggggtaaattaaagtctcatttagactt

SEQ ID NO: 8524 - DNA, 1540 bp, Oryza sativa
  ref <308>: DATABASE ACCESSION NUMBER: AK105872
  ref <309>: DATABASE ENTRY DATE: 2002-08-28
cggttgctcttggctggttgtgttaattgatgtgttgtgtctacttttttgttacttttgtttcctttctcatccactgttacgtacggccaacttagtttcacatatatctgcatgtttaggtaaggtaatggagattttattttgatgaaccacagaagcttgtaataattcagacctcccccctcgccaccaccgccagccaccgcgcgagatcggggagagcgatggcggacggcggcggcgacggcgcgatgccggacccgacggtgcggaacctcctggagcaggagagcctcaagtgggtgttcgtcggggggaagggcggggtggggaagacgacgtgcagctccatcctctccatcctcctcgcctccgcccgccagtccgtcctcgtcatctccaccgaccccgcccacaacctcagcgacgccttccagcagcgcttcaccaagttccccaccctcgtccgcggcttcaacaacctctacgccatggaaattgatccaaaggtcgaaaatgatgacttcgctaatgaaggaatggaaggattcctttcagaactgacaaatgcaattccaggagttgatgaagctatgagttttgctgaaatgctgaaactggtccaaacaatggattactctgttgtagtttttgatactgctccaacaggtcatactttacgattgctccagttccctgcaacactagagaaaggtctagagaaaatgatggccttgaaaaataaatttggtggactgttgaatcaggcaactcgattgtttggtcttggtgatgaactgaatgaggatgcaatgctagggagacttgaaggcatgaaggatgtgattgagcaagtgaacaggcaatttaaagatccagacttgacaactttcgtatgtgtttgtattcctgaatttctttcattgtatgaaacggagagattggtgcaagagttggcaaagttcgagattgatgcacataatattattatcaatcaagttctctttgatgaggaagccgttgagtctaaacttctaaaggcacggataaaaatgcaacaaaaatatattgatcagttccatatgttatatgatgacttcaacataaccaagttgcccttgcttccagaagaggtatgcggcgtccaggctctgcagaacttttcacggcatttccttacaccatacaaggctgctctgaaaagaggtacagtggaggaggtggaacagagagtatcactactaaaatcagcactgcaagaggccgagtcagaactagatagactaaggaaagggaagcaggtagcataatcttttttcacatgtcaagtgcatgggaatgccaaaatcgtgaaaaaagcggaactagagagaaacatctcctttttgtctcgctacatactgcagtcgattttataaaattttatttttctccaaatgggatttttaaccttgttatagctattggcagaaagtgtacttctagagtgagacaaatgtgggattttgcccttatttattcaatgatcggtttgaag

SEQ ID NO: 8525 - DNA, 1161 bp, Oryza sativa
  ref <308>: DATABASE ACCESSION NUMBER: AK105873
  ref <309>: DATABASE ENTRY DATE: 2002-08-28
aactgactcagcctccgagataagccgcgccgtcgccgccgcagaaaccgcaaaagccatcgccgccgccgccgccgccgtggccatggcagcagcatgctcctccgccgccttcctcgcctacccgggcagcctaggagcagggccccgccccctccgcctcttccgcgcattcgcggcggcctcctcctccgggtcggggagcaagaagaaggcgaggaagtccaagggcgctgggaacaagggggaagccagcggcggtggaggcggcaaggggaaggggaaggcgctggagccgccgcccgcggtgatacgccgcgcgccggctgggagcgcgtcggtgttccagcagccggagccggggttcacccccggcggcggcggcggcgggaaggggccgacggaggaggagcggcggcagcggcaggccaacgagaacgccttcctcctcgcatggctggggctcggcttgatcatcctcgccgagggcctcgcgctcgccgcctccggtttcctgccagaagaatgggacagctttttcgtgaagttcctttatccatcgtttactcctacggtaatattgtttttgggcggtacggtcggatatggcgtcttcaagtacttcgaaggcgagaaaagcaatagctagatggctgcacaaaggtgagtaaaagaatgaggcgggttgaaacacgattagagagtaaatggttcatatttgccatggttagagtattgactattaccatcgtagctgcacaagacaccagtcagaggctttgcgcaaattgcagtgcgactgtgcaaattacaaattgcgcaatcataagcaaatggaaaaaaaaaactcaaatctagagtttcccgacatgatttcgcagaccatgcatatcgtggtcaagacaagaggatcattgataaatacagtttcttgaagcaagcaggtgcagagaagttgtaccctattttatgaggcatcacacaaatcagcggctggggaagctacgagctctggaactccctgtctgtcatcagtgtctagttcgtctctagctagttctcttgtacttcttgacttgttattgttgttcaggtcatctaactcctggggtttgttcagcgtgcaagtcaataaatttgtattgtgctattttgttaatg

SEQ ID NO: 8526 - DNA, 1530 bp, Oryza sativa
  ref <308>: DATABASE ACCESSION NUMBER: AK105874
  ref <309>: DATABASE ENTRY DATE: 2002-08-28
gtctcttccgcctcataaaacacgccacgcctcatctgactcttcttcccccttcctccctcccgagctccgcccgcccgcccgccgccgccgccgtcgagttcgccgcacctctcgcacggcccccaccccgcgcttccttcctcgtcggaccgcccgcgaccgcgagcctgcctcccgtccaagttgacgggaaccctcgccgcggaagaccgcggagaggtggggggccgcgtcccgaccccggcggtggtcgatcggttccggacgagaggagcgatgcagggcggcgtgtccggattccagaacgcgccggtgacgcgggccgtcgtcctcgccagcggcctcctctccgtcgtcttcagcgcccagcgccgcgcccgcgccctcgtcctctcccaccaggggattgtcaaaaacttccgtctatggaagttgtttgcatctgggtttgcctttcagtcaacaccggagctattgtttggagtctacctgctctattacttccgtgttttcgagaggcagataggctctaacaaatactcggtttttagtttattcactatctcagtatcattgcttcttgagatcctatctttggttctcctgaaagacaccaactacctcagcactcttgcatgtggaccttatggccttatatttgcctcattcattccattctttcttgacattcctgtcacatcacgatttcgtatttttggtgttaacttcagtgataaatcattcatatacctagctggcctgcagctgcttttatcttctgggaagcgttctcttattcctggtatttgtggtctgattgctggttctctctatcgtctgaacgtgcttggcatccgcaggatgaagatgccacaggttattgcatcatttttcgcaagaattttcgcaccttcttcgggaggttcatctaggccctccaggagtctggtcggaaacatgagttctcgtacaagccgtgctgtgcagaacaatcagccatctggattcgctcctgtcgtggagcccccagaatcttcaatcgctatgctggtttcgatgggctttgatggaaatgctgcaagacaggcgctaatgcgagccagaaatgacatcaacacggccacgaacatcctccttgaagcgcagactcgttgagctaacttaatgcgacttccctggaaacattgcgggcagaattggtgatatttctaagatgaggcaacatgctgaggtccattaggcagcagattggcgacgaaatggtgcgctgctaattttattcacttgccactggtaccatgatttgatgagaagttccactcggctcttgctagctgtcaggcgtctgcttaggaagtcagcaaacatttgccgtagttaacgggttatctatgtcaatatttaaatttctctcaccttacagatgatgtataattccaaattcagcttgtaggatagatgatatataaacattggaatcatagtgtaaaattctttagaaatttgtgcctcgtgatcagttctagc

SEQ ID NO: 8527 - DNA, 1788 bp, Oryza sativa
  ref <308>: DATABASE ACCESSION NUMBER: AK105875
  ref <309>: DATABASE ENTRY DATE: 2002-08-28
agttgttgacattcgctaccacgcccgagtctgcattgaaggtatcccgatgcatgcaagatcagaagacatggcggcaaagctcataggctgcaaaagctcagtgcactacatagaagaatactcccgtcgccggaacttcaaccgtacttttgatctttggatttggagcttagacttgagcaccatcccaaaggccacccagttcacaatcacaaggccagatagagaagcaagggctactgagatcccttttcctgacctggagccatcccagccggctccaactgatacaaagaaaggcctcacttatccggtcatcattcacatagacactgtccaggacctcttctctcgacagggtcgggtcttcatgtggcactatggagtgcctgatgatgtcacccggatgaggtcgatggctcacccaattcaagcctgcagaacccttccggcgccggagagaaggtctgatgatgaagacgaccacgagcagcgttcaagaaggaggcatagaagtcgctctctttggaaccgcttaggcggtcgttcgtcaagcaaaagcagagagcctggtcttgacaaccggagttcatacaatcaagagacaaggggaagacagagagaacgagctgctgacatcaatagaagtagaagccgacatctgtccaggtcggtcaaacctggagaaacaagaatcaggcgtcaatcggcgacacctccgcatctctctgaccctgctccagcagacaaggtttcctccccctgcaaacctttcagccattcaagagatagcagccctgaaaatgggcattgctctgcagttgcttctcctcctctcgaacctctctcacctgacatattgcctgtgtcacaggagcaaggggcgttgctcatgcttaaaaggcacctagatcctatgctgcatgaggctatggtgggaggttcaatttattcccctgacactactctgccacgccctgcttcccctgtttttgttctttcatctgctgcagaaccacaagagaacttagtggatgaggcccagcatgatgtggagacattcctagcagaggtgaccacgcccattcagcagccactgctgtctgcgccaggaacaaagctgcgtcgaccctgccgcaataaggtgaccactcctattcaaaggcatagtgcaagattggcactgaaagtcagacgcagtacaaagcttgaattaattgcacaagaaattcttgcaaagcaatttggtgttcttgatgataacaagcttttaagtgatcaaattaagaaactctatttgcagcattacaagaagccgctctccccagcagacatgaagacaatcacgaccctggtggaaaacggaggctgcaaaggagttcgtctgcgcgctaagaaggcggcctctatggtgccgatttgaagcagttgtcgcgtcaaaagttgccctacgtgatgatgatgttaggctgcttaagtagaagaatactgtccttgttctctgtattgcaaatgcgcacctcttcgtgtttctgccaatcttcctggctgtgtttcagaggtcgtcagctgagctccatcccaaccatcgcatacaaggccccctcagctgttgtgtcttttgtttatgtcgcagctagactgtttcattctaaactggaatgttagaggcttgaacaaccaagctagaaaaggaagtgttaagcttttggtagaacaaatgaatgcaacaatagtctgtcttcaggagacaaagatgaatgaaatcactgatgttgatgttct

SEQ ID NO: 8528 - DNA, 1449 bp, Oryza sativa
  ref <308>: DATABASE ACCESSION NUMBER: AK105876
  ref <309>: DATABASE ENTRY DATE: 2002-08-28
gcgtttcgcttccaaatgctgatggctacgctgcgtccggcgccggcgtcgatggtcgttctctgcgcggtggtcgtcgtcggcgcggtattcgtcgtggtggcggagggcggcggcagcgaggaggcggcggcgtcgacagggaaagcagcgatggtgccggcgctgttcgtgttcggcgactcgctgatcgacaacgggaacaacaacaacctggcgtcgttcgccaaggcgaactactacccctacggcatcgacttcgccgccggcccaaccggccgcttctgcaacggctacaccatcgtcgacgagctcgctgagctgcttgggccgccactggtgccaccatactcccaagcgtccgggcatgtgcagcagcttcttcagggcgtcaacttcgcctccgccgccgccggcatcctcgacgaaagcggcgggaacttcgtgggacggattccgttcaaccagcagatcgacaacttcgaggccacggtggagcagatcgccggcgccgtcggcggcaaggaggcggcggcgtccatggtggcgcggtccatcctcttcgtcgggctgggcagcaacgactacctcaacaactacctcatgcccaactacaacacccgccgccgctacaccccgcgccagttcgccgacctcctcgccgaccgctacgccgcccagctcaccaggctgtacaaggccggggcgaggaagtttgtggtggccggagtggggtcgatggggtgcatcccgaacgtgctggcgcagagcgtggagagccggtgctcgccggaggtggacgcgctggtggtgccgttcaacgccaacgtgagggcgatgctgggccgcctcgacggcggcggcctccccggcgcgagcctggtgttcctggacaactacggcgtgttcaaggccatcctcggcgacccggcggcgcacgggttcgccgtggtggaccgcggatgctgcggcatcgggaggaacgccggccaggtgacgtgcctcccgttcatgccgccgtgcgacggccgcgaccgctacgtgttctgggacgccttccacccgacggcggcggtcaacgtgctcatcgccagggaggctttctacggcggcgccgacgtcgtctcccccatcaacgtccgccgcctcgccgccctctgaatcgatccatcaaaccatcaatagcaataaacgaattagatatcgatgatcatgcatgatcgatgacagcatgcatgagagtgtgctcaccttcagctaattaagccactgagctgatgctacaagtatatttgatcagctatttatttttgttccttcaaccctgtcatgctaaatggcaggaaattagttgatactgtagatcacaagtactcctagttagcaataagctaactggatcatgcttatgcatgagcaaaactattgaaatggttgttgctacttgct

SEQ ID NO: 8529 - DNA, 1654 bp, Oryza sativa
  ref <308>: DATABASE ACCESSION NUMBER: AK105877
  ref <309>: DATABASE ENTRY DATE: 2002-08-28
tttttctcttctggattcttgccgatttttaggcttcctttgcttttctaaggccagaaagggttgttttgcaatacccttctagttcatcctctcaaatttttcttctttctattcaaaagctctttctttctttgcaccctttgtttctctacttttattgaggaacagggctgatttttcacttcttgcatccaaaaagcaccccttttttctttcctgtttttaagatttccatacccttgccatcttcatcttctacctccatccagtcctcatggccgcagcaatagacatgtacaagtataacactagcacacaccagatcgcatcctcggatcaggagctcatgaaagcgctcgaaccttttattaggagcgcttcttcttcctccgcttcctccccctgccaccactactactcttcttctccttccatgagccaagattcttacatgcccaccccatcttatcccacttcctctatcacaaccgccgccgccaccaccacctcgtctttctcgcagctacctccgctgtactcttcgcagtatcatgctgcttcacctgcggcgtcggcgacgaacgggccgatggggctgacccacctgggcccagcccagatccagcagatccaggcccagttcttggcccagcagcagcagcagagggccctggccggcgccttccttcggccgcgtggccagccgatgaagcagtccgggtcgccgccgcgcgcggggccgttcgcggcggtcgccggggcggcgcagtcgaagctctaccgcggagtgcggcagcgccactgggggaagtgggtggcggagatccgcctcccgaagaaccggacgcggctgtggctcggcaccttcgacaccgccgaggacgccgcgctcgcctacgacaaggccgccttccgcctccgcggcgacctcgcgcggctcaacttccccaccctccgccgcggcggcgcccacctcgccggcccgctccacgcctccgtcgacgccaagctcaccgccatctgccagtccctcgccacgagctcgtccaagaacacccccgccgagtcagcggcctccgcggcggagccggagtcccccaagtgctcggcgtcgacggaaggggaggactcggtgtccgccggctcccctcctccgcccacgccgctgtcgcccccggtgccggagatggagaagctggacttcacggaggcgccatgggacgagtcggagacattccacctgcgcaagtacccgtcctgggagatcgactgggactcaatcctctcataaacaagcagaagcagctactactagtctattactagtactagtagtagtcttcgtcaagctagagtcactcaactcaactagctgtgtaatcttctctgaattccgtggcttccatggctcggtggcattttagacgtcggccatggctgctgcgagtagcagtaactagtcagtactcagtagtagtaaggtcgttggtattacgtcgtcgtgcaagtgtcgttggtgtactcagtgatctgatctcctggttgagctgccggttgtttttttcacggcgcggccggtcgagaattaagctgtaatcccttgttacatgttggaaattcagtagcttatgtaactatatgtacctttctc

SEQ ID NO: 8530 - DNA, 1638 bp, Oryza sativa
  ref <308>: DATABASE ACCESSION NUMBER: AK105878
  ref <309>: DATABASE ENTRY DATE: 2002-08-28
aatctccccctttcatcagcgccatggctctctcctccttctccatgtccctccccttcgccaagctgccttccacctccaaatccacccgcttccttcccatccgggcctcctctgccgccgccgccgcctccccttccttcgatttgcgcctctattggacatccctgatcgccgatgtggaggccgagctcgacgccgcgatgcccatccgcacgccggagagaatccactccgccatgcgctacgccgtcctcccgggcgccggcaacgagggcaccgccaagcgcgcgcccccggtcctctgcgtcgccgcctgcgagctcctcggcgcgccgcgcgaggccgcgctccccgccgctgtggccctcgagatgctccacgcggcgtcgctcgtgcacgacgacctcccatgcttcgacgccgcgcccacccgccgcgggcgcccctccacccacgccgcctacggcaccgacatggccgtcctcgccggggacgcgctcttccccctcgcctacacccacgtcatcgcccacactccgtcgcccgaccccgtaccccacgccgtcctcctccgcgtcctcggggagctagcgcgcgccgtgggatccacaggcatggcggccggccaattcctcgacctcgccggcgccaccgccctcggcgaggccgaggtcatgaaggttctgacgaagaagttcggcgagatggcggagtgctccgccgcctgcggcgccatgctgggaggcgcggggcccgacgaggaggccgcgctgcggcgctacggccgcaccatcggcgtcctgtaccagctcgtcgacgacatccggagcgcgtcgggcaacggcaagatgaggagcaatgccagcgtcctgcgcgcgctgggcatggatcgagcgctcggcatcgtagaggagctcaaagcgcaggccaagatggaggccgacaggttcggtgacaagtatggcgaaagggtgcttcccttgtacagcttcgtggactatgcggtggagaggggattcgagctgcaggatgcagctacaacgccgtaggcacggaccgcgcagaccaaccttgatgctaccggatatttgaagttctgagcaagtggttatatatggagttatatgctgctgagatttgcgatcaccaacatcataaggatgcatcacgaacaagaacacaattgcctcaaaaattgtcttcaaagtattcccaaatacaaaaactgccacaagaacttgtgaactgaggaagacaaagaaatgtgttgttgctatacccagaataagtagccagagggcaaacacaattatcccaacaacaacattaaccatctggttgagcttgttcactgcagtctttgtatcattaagtgttagggcaagggctttgcgctctctaaatgcattcacctacagaagaatacatacaacaatattagcaagggcattttcagaactagctacgggaatgtttggattactgccattgttagccttgcccattttttgggggcaatggcaagatttggtcattgccaaaaaattttggtaaggtgcatgtttggattgttgccaaaatatgtaggtactggtatttcgtttggtgccaaagggataacaaaattttagttgc

SEQ ID NO: 8531 - DNA, 1012 bp, Oryza sativa
  ref <308>: DATABASE ACCESSION NUMBER: AK105879
  ref <309>: DATABASE ENTRY DATE: 2002-08-28
gtgggctttgccgctgctgtcccctgcttatcccctcctcctcccgggttcgcattccgtcgaacaccatgacggcggcggcggcggcagcggcggtgaccctcctccgcctccctctcgcccgactctcctcccacctccgctccctccctccccgtcccataccgccccctcggctccgcgtctacacctcccaccgcctcctctcctccctcctagctcccagccacgtccccgccgtctcgtccctggccgaggcggtggctgcgccggatggtgagggggtcgaagtggaggaggaggaggacgaggaggaggaggcagaggcgcgccccaccaccttcgtgctgccgcggctgccgcggccgaagctgagcgtgaaggagcggaaggagctcgcgtcgtacgcgcacggcctcggcaagcggctcaagtcgcagcaggtcggcaagggcggcgtcacgccgtccgtcgtcgccgccttcaacgacaacctcgagtccaacgagctcctcaagctaaaaattcatttgaactgccctggagagctgcctgacgtgatactacaacttgaggagtcaaccggatccattgctgttgaccaaattggtcgatctgtcattctatatcgtcctagcaccagtaagatgaaaaagagagaagaaagtgctaggaatagaacaagatttgtaagatctagagaaccatcagaagaacaacctagaagcagcacaagcaagagatttataaaatctggaggagcatttaggccacaacagaagagaagaccattagcatctaaggaatcgtcgtatgggcgaagatagatgccacattcaatccttcatcttgttttttttcattgtctagacttatggaaatcatgtaaactttagaccatctaatttgataatagatattagtgctgagtttttatcaaactatggtccaaccatatgctgtaaatttgtgtaggatcatttcctctttattcaaaaggaagttctaaagt

SEQ ID NO: 8532 - DNA, 1007 bp, Oryza sativa
  ref <308>: DATABASE ACCESSION NUMBER: AK105880
  ref <309>: DATABASE ENTRY DATE: 2002-08-28
actagtagcgtacactaccacagctagcaatggagacctcgtgcttccttacctccaatgcctcgccggtgaagagcatggtgatgccgtcgccggccggcgtcgtgaaggccaggccgcacgtgctcttcggcggccggcgggcggcgagctcgtcggtgaccacctgctgcagctacaacggcgagggcgcggcgccggcgatcgacccggactggcggtcgttcagggcgcagctctacttcaacgagcagtacgcgaagagcgtgaacccggcggtggcggcggtgagggcgacggcgacgacgccggagccggtgaagatcggcgacaagtgggcgcacccgctagtggagccggagaaggggtgcctgctgatcgcgacggagaagctggacgggtcgcacatcttcgagcgcacggtggtcctcctcctgtccgccggcgtgctgggccccgtgggcgtgatcctgaaccggccgtcgctgatgtcgatcaaggaggcgcaggcggtgttcgcggagacggacatcgcgggggcgttctcggggcggccgctcttcttcggtggcccgctggaggagtgcttcttcctgctggggccgcgggcggcggcggcgggggacgtggtggggaggacggggctgttcgacgaagtgatgcccggggtgcactacgggacgcgggagagcgtggggtgcgcggcggagctggtgaagcgcggcgtggtcggggtgagggacttccgcttcttcgacggcttctgcgggtgggagagggagcagctgcgcgacgaggtgcgcgcgggcttgtggcgcgtggcggcgtgcagccccgccgtgctgggcctcgccaccgtcgtcaagggcggactctgggaggaggtgcagggcctcgtcggagagaggagggtgtggtgactgattacttctcaagggtgaccattatgtaattaattaattaattaatctcttaattaactcgcaagtaaagtatttactcctttc

SEQ ID NO: 8533 - DNA, 1519 bp, Oryza sativa
  ref <308>: DATABASE ACCESSION NUMBER: AK105881
  ref <309>: DATABASE ENTRY DATE: 2002-08-28
atgcacagcagcagcagcttgtatcatcctactagtagtagcttgcaacaatggcggcttcaatgaattcgaagcttcccctggctcttgtgctcctcctgctgtgcggcggcgcatgcgtagcggtagccatgcccagtgaattgtccatagttggctactcggaggaggatctggcgtcgcatgagaggctgatggagctgttcgagaagttcatggccaagtaccgcaaggcctactccagcttggaggagaagctgaggaggttcgaggtgttcaaggacaacctcaaccacatcgacgaggagaacaagaagatcaccggctactggctgggcctcaacgagttcgccgacctcacccacgacgagttcaaggctgcctacctcggcctcaccctcactccggcgaggaggaacagcaacgatcagttgttcaggtacgaggaggtggaggcggcaagtttgccgaaggaggtggactggaggaagaagggggcggtgacggaggtgaagaaccaggggcagtgcggcagctgctgggcgttctcgacggtggcggcggtggaggggatcaacgccatcgtgaccggcaacctgacgcgcctgtcggagcaggagctcatcgactgcgacaccgacggcaacaacggctgcagcggcggcctcatggactacgccttctcctacatcgccgccaacggcggcctccacaccgaggagtcctacccgtacctgatggaggaaggcacctgccgccgcggcagcacggagggggacgacgacggcgaggcggcggcggcggtgaccatctccgggtacgaggacgtgccgaggaacaacgagcaggccctgctcaaggccctggcccaccagcccgtcagcgtcgccatcgaggcctcaggcaggaacttccagttctacagcgggggtgtgtttgatggtccgtgcggcacgcggctggatcatggcgtgacggccgttggatacgggacggccagcaagggacacgattacatcatcgtgaagaactcgtggggatcgcattggggtgagaaggggtacatccggatgaggaggggcaccggcaagcacgacggcctctgcggcatcaacaagatggcctcctacccaaccaagaacgcttaaattaaatcagtttcttaatttcaaggatacaaaataataacacaagaagaggactctcttaattcatcctgcttgtaaagttcgttgttgttatctcggcacttccaagtgtttctcagtactcgtattcattgttattcattttcaattcccatccacatttcaagattgtttgtctctcattatttttcatcggtgaaaattaaagatggtgatggatagatgtaataattactgggattccctctttgtttctttgtaatatttattaataatcggtggctactttggggcaaaaaaaaaaaaaatttagctataagtgatttggtcgatcgtgtctatggaacatatcgtcttaagttcggcatctc

SEQ ID NO: 8534 - DNA, 1236 bp, Oryza sativa; identical to SEQ ID NO: 4423
  ref <308>: DATABASE ACCESSION NUMBER: AK105882
  ref <309>: DATABASE ENTRY DATE: 2002-08-28

SEQ ID NO: 8535 - DNA, 1095 bp, Oryza sativa
  ref <308>: DATABASE ACCESSION NUMBER: AK105883
  ref <309>: DATABASE ENTRY DATE: 2002-08-28
agtcgtcgacccccgcgtcccccttcctctgctgggttcgcccgcacgcccgcccgcaccgccgcacgccgccggtcgcccctcctccccgccgacgctgagcaccgccggtccccgtcccgctaggcagcggcgccgccgtcctccgaccgagcccctcgccggttcctgctcctattgctcaagccattaggttgcatcgaaacagtatgagctctcatgattttgcaagaagggttccgaagaggcggcggactaacaagttgctttcgcaacttcttccggacctgaactcactcccagctgaaggagctgatgatgggggatcaccttccagtagtgtgctcgtctcacacgcccagacttctgctgtagctgtggctggaacctcgcagtatttggtgccagcagttgttgcggggccgcacattggaatgagtagttgtcccattatcgtggatgatatcaatgatgatgttgtgatttattctgcaagctcgttccctcaagtgaggcagcaggctccaaggacagaacctgttgtgaccatagaagatgattctgaaactacccctggacaagcaggggatgcagttgatgagcatgtggatatactactatctctgactctgggcaggtatcctaggcatggtcatcagagatcctccaacatcagcaccagccctgtgatacatataattgacacacctagcaatgcactccctgaacccgagaaggccgttccgaaggaaccaactttcaattgccctgtctgcatgaacgagctggtcgaaccgtcatcgaccatctgcggtcacattttttgcaagcagtgtatcaaggcctcaatccaggctcagaagaagtgccctacctgccggaggaagctgaccatgaacaacttccaccgcgtgtatctcccttctgcggagtaagccggtttccaccattctggaaatcagcgtccctcctcccaccctgactctcgccacattggcgttctgatgattgtatctgaaaatgtttgacaggcttgctagcataccgttttgctggagcagttttaacaggtgttgtactgttgttggatccgtt

SEQ ID NO: 8536 - DNA, 1371 bp, Oryza sativa
  ref <308>: DATABASE ACCESSION NUMBER: AK105884
  ref <309>: DATABASE ENTRY DATE: 2002-08-28
cagcggcgacgtcttcaagaggaacgccgccaagctcgccggcgtcgtctccagccacgccgcgtcaaaccaatccatggacttccagggtttcttgatgagagcaacgatggactccatcttcaccatcgcgttcggccaagacctcaacacgctggacggctccggcgaggggcgccgcttcgccgcggcgttcgacgacgccagcgagttcaccatgctccgctacctcaacccgttctggaagctgtcgaggctcctcaacgtcggcgccgaggcgatgctcaaggagaggatcaaggtcgtcgacgggttcgtgtacaagctcatccgtgacaggtccgacgagctctccaacaccaaggcacacgacactgattcgaggcaggatatcctgacaagattcatccaggcaacgactagcgattctgggacggttgattacaagtacctgagagacatcatattgaacattgtcatagccggcaaggacaccacagccgggtcgcttgcttggttcctgtacatgatgtgcaaacacccggaagtacaggagaagatctgccacgaagccatggaggccaccaacgccggcgaggccgcttccatcgacgagttctcgcagagcctgaccgacgaggcactgaacaagatgcactatctgcacgctgcactgacggagacgctcaggctataccctgcagttccactggataacaagcagtgcttctcagacgatgtattgcccaacggattcaacgtcagcaagggggacatcgtgttctacatcccctacgcgatgggccggatggagagcttgtggggcaaagacgctgaatccttccggcctgaacgttggctcgatgagaacggcgtctttcagcaggagagcccgttcaaatttacagctttccaggccggcccaagaatctgcctcgggaaggatttcgcgtacaggcagatgaagatcttcgcggccgtgctgctccgtttcttcgtgctcaagctgcgggacgagaaggagatcatcagctaccggaccatgattacactctccgtcgatcagggtctccatctgacggctatggcgagatgagggcacacactacagtctgggcacgcacagcagctggctcctgtactcatgcaagtgatagctccttgtgcataccaaaacgaacgagatctgcaaaccttaattatgtctgatcgtgaataacccgcattgcaccttagaataataagtgcatctgaactgcagtcagggtcagagtaacttattggagtgaactggtgttgtagggaacttcaattgtacaacttggagggcgcaatacaaatgaatggattaaatagtagaaagttgatttt

SEQ ID NO: 8537 - DNA, 1868 bp, Oryza sativa; identical to SEQ ID NO: 4431
  ref <308>: DATABASE ACCESSION NUMBER: AK105885
  ref <309>: DATABASE ENTRY DATE: 2002-08-28

SEQ ID NO: 8538 - DNA, 1100 bp, Oryza sativa
  ref <308>: DATABASE ACCESSION NUMBER: AK105886
  ref <309>: DATABASE ENTRY DATE: 2002-08-28
gcagaatgctgtgttaggcaaggtagagtacactagtcacaaggctcgctctcttgcttaagcttgtgagcttggaaaagagtagtatattgagctgttgcttcgcttgctttagtttgcttgcttaccaggagaaagatatgaggaaggaaattgtcatcaggctgcagagctctgagaagggccacaagaaagctatcaaggttgctgctgcagtctccggtgtggaatccgtgacgctcgccggcgaggacaagaacctgctgctggtgatcggcttcggggtggactccaacgacctcaccgagaagctgcggaggaaggtcggccacgccgaggtggtggagctgcgcaccgtcgacgccgacgagctcatgcgcgtcgccgccgccaaccagtacccgtaccgctactaccccggcgcgccgcccccggccccgtactacggcaacggcgggtaccctcctcctcaccagcgcggcggcggcggcggcggcagcggcggtggctactacacgccgatgacgatggccacgggtggctactacggcggcggcggcggcgggtacccgcagtacgggcagtcgtcgtcgtacccgcagtacgggcagtcgtcgtcgtactacccgccggcggcggcggcgacgacgaacacgcacaccgtcgtgcaccaccagtacgccaacaacgacccggacagctgcgccatcatgtagctgcaccagctagtgtacgatcgatgctgcttctgctcgcgcgcgagcatgccggccgtcgtcgtctcgatcgtcacgatgatcggatgatcggaggacatattgcgaccgaatctagtagctgattgtcccaatcgataactggcccaaagtacgtagatataccttgaattttctgtgtgatgatgaggccgatttgattccgtgtgattactgaacaacagacaggtacgtacctgttgtctgaaactctgaagtctgaacgttatatgtgcagtagtatatgtgtagtagctgctcccggcctccaagtgtatacggtgtgcaagtgtaaattaggtgtactagggagatatatataaggtgcaagcgactttatagttc

SEQ ID NO: 8539 - DNA, 1324 bp, Oryza sativa
  ref <308>: DATABASE ACCESSION NUMBER: AK105887
  ref <309>: DATABASE ENTRY DATE: 2002-08-28
gcagaggtgaaagaaaaaaaaaaagcagagacatcttctcgaaagcctgagcaccaatggcacggtatcttctccgtcctcccaccgccgccgccgccgccgctgccgccgcctcttcacaccgcaggaatggcacaacctcgccgcggggaccggttcttggcctccgggcgcttgcctccagggccggcaaagctcgccccgtgatggcggtggcgtcggagcagcccgccgcgaggggcaagtgccccaaggtggccgcccccaccaccggcccgattccggccgcggagctcctcggcgtcatccaggacgcagccagggccggagccgaggttataatggaagctgttaataagccacgcaatattcactacaagggagttgcagacctggtcacagacacagacaaattgagtgagtcggtcattctggaagttgtgaggaagaccttcccagaccacctcatacttggggaggaaggtggacttattggagatgccttgtcggagtatctctggtgcattgatcctttagatggaacaacaaactttgcgcatggttaccctagcttttctgtatccattggagttctgtttcgcggaaagcctgctgcttccactgtggtcgaattttgtggtggtcctatgtgctggagcactcgtacggtttcagcatcatctggtggtggtgcttattgtaatgggcaaaagattcatgtcagtaagacagacaaggtggaacaatcacttctggtaactggttttggttatgaacatgatgatgcatgggtgaccaacataaatttgttcaaggaatacacagacattagcaggggagtacgaagactaggttctgctgctgctgacatgtcccacgttgccctaggcattacagaagcctactgggaataccgacttaagccttgggatatggctgctggtgttctgatagttgaagaagctggtgggatggtgtcacgcatggatggtggggagtttaccgtctttgatcgttctgtccttgtttccaatggtgttgtacatgatcagcttttggatcggattggccctgccacagaagatcttaagaagaaaggaattgatttctccttgtggtttaaacccgacaaataccctaccgacttttaagttgaactcctcacccagagctattttatactactagaagaaaagagaaaaacagaggatcttatgttaaaatgccatgtacttgactgaatatttgtttattgaagtcctttgactcagccatcgacttttgttggttgtatgatttatttatggagagaattacccaaatc

SEQ ID NO: 8540 - DNA, 1058 bp, Oryza sativa
  ref <308>: DATABASE ACCESSION NUMBER: AK105888
  ref <309>: DATABASE ENTRY DATE: 2002-08-28
attgttcttgttgggaggaaggagacgaggcgcgcgaggcggcgagagggaggaggcattctagcatatacagatacagagccaggggaggtatggaggagggccttgcacgagcacgacgatgccaatagaagctgtggcggtcgcttctttaccgatggcgtcgcgcagcgccgccctgtgcttctcctccgccgccgctgcccggagccggagcaggagccggcacggcaggatggccgtcagctgcgacgccggggcctcagatctgctctattcctctctggctgccaagctgcttggccctcccaccagcttcgatgccggcaagctgacggtagagttcgcccacagccacgggaacagcagctccgggttccccagagcttacaccctcacccactgcgacttcaccgctaacctcaccctcgccgtctccgacaccatcgccgccgaccgccgcctcagggcggacgacgtcttcgccgagtggaagcagcagcaacagcaggagggcatggccctgcacgtgcactgcttcgtcagcggcgccaacctcctgcatggcctcgccgccggcttcaggtactacgtcttctccaaggagctgccgctggttctcaaggcagttgttcatggcgacgcattgctgttcgcggagcagccggagctgctggaggcgaaggtgtgggtgcacttccactccagctccaacgctaagtacaacaggctcgagtgctggggtcctctcagggaggctgcaaacgccgagacgacgcacaagaggcatgcgctggagcaactgcacaacgcaatcaccaaaggcacaagaaggcgtaggaggaagtggtctagcccggacgccatcttcagcgccctgctcgcccttctcctttgatgcatatcgggaaccccacacattgtcttctttttgctctgccttgtgcgcatcaattccaattctttcatccaccggacacttgacatgtatgtatagtatgtacccactccacgatcaacaaaatgagaaacgattgcctttccaagcattcctcctt

SEQ ID NO: 8541 - DNA, 1163 bp, Oryza sativa; identical to SEQ ID NO: 3699
  ref <308>: DATABASE ACCESSION NUMBER: AK105889
  ref <309>: DATABASE ENTRY DATE: 2002-08-28

SEQ ID NO: 8542 - DNA, 1012 bp, Oryza sativa
  ref <308>: DATABASE ACCESSION NUMBER: AK105890
  ref <309>: DATABASE ENTRY DATE: 2002-08-28
acgcacaaactgcacaatcaaatcaagcgttggagagaggaagaaggtaagctaagcaaagcaagcaaagctagagagaaagtgacagcagcaatggcggggggcgagcttgtgctgctggacttctgggcgagcccgttcgggcagcggtgccgcatcgcgctggcggagaagaagctcccctacgactactccgagcaggagctcctcggcgccaagagcgacctcctcctccgctccaaccccatccacgccaaggtccccgtcctcctccacggcgacggagacggccgcgccgtctgcgagtccctcgccatcctcgagtacctcgacgacgccttcccggacgccacccctcgcctcctcccctccgccgccgacgacccgtacgcgcgcgcccgggccaggttctgggccgactacgtcgacaagaaggtgtacccggtggggacgcggctgtggaaggtcaagggggaggagggcgtacgcgcggcggcgggggcgcgcggcgagctggtggaggcgctgcggacgctcgacggcgagctcggggagaaggaattcttcggcggcgagtttgggtttgtggacgtggcgctggtgccgatgatgccgtgggtgtacagcttcgcgaggtacggcgggttcagcgtggaggaggagtgcccgcgggtggcggcgtgggcgcggcggtgcatggagcgggacagcgtcgccggcagcctccgctcgccggaggagatctacgacttcatcggcctcctcaggaagcactacggcatcgacgactagctacgctattgtgtgtacaccttaatttggttgttattattactgctatttactcatttaactacttgtcgtaattaatcaaggtcgttcaaaataacttgtttaatttcgccggctggcaggttcaagtaatttgtatttgaagtttacaagcgtaaactgtactctccgatcattactttacactttaaaagaattaagaaataagaaagatagattc

SEQ ID NO: 8543 - DNA, 1170 bp, Oryza sativa
  ref <308>: DATABASE ACCESSION NUMBER: AK105891
  ref <309>: DATABASE ENTRY DATE: 2002-08-28
cgagaacgcggcggcggtgttcgacgcgatggacgacaagaacgcgtggacgtacagcgccatggtgtccggcttggcattgcacggcgacgggcgtaaggcgctggaggtgttcgacgcgatggtcagggagggccacaggcccgacgccgccgtgtacgtcggcgtgctgaacgcctgcagccgcgccggcctcctcgaggaagggctccgctgcttcgaccggatgcggctggagcacaagctgacacccaacgcgcagcactacggctgcatggtggacctcatggcgcgagcggggaggctggacgacgcgcgcgcgctcatcgggagcatgcccacggggccgacggacacggcgtggcggagcctgctcaacgcgtgccgcatccacggcaacctggagctcgccgagcgcgcgctgcaggagctggagcgcctcggcgccaccaacgccggcgactacataatcctctccgacatgcacgccagggcccacaaccgggacgccgccgcggcgcgccggacggaggcggtggacaggggcctcgcgcaggcccccgggtacagcgccgtcgaggtgcacggcgcgacgcaccggttcgtgtcgcaggacaggtcgcacccgcgggcggacgacatctacgagatgctgcaccagatggagtggcagctccggttcgaggggtacacgcccgacacgtcggagctggcgctggacgcaggcgaggaggagaagcggcgcgtggtcgcggcgcacagccagaagctggccatggcgttcggcctgctcagcacgccggagggggcgccggtgagggtcgtcaccaacctccggatgagcaaggagtgccacgcgtacagcgcgctcatctcggagatcttcgggagggagatcgtcgtcagggaccggaaccggttccaccgcttcaagcgcggcgcatgcagctgcagaaactactggtgagacggctgggctggcatagtggcatggcatctctctgtgattgatgtaaatatggacattttccttgtgtttcatgcaagtgtaagattaattcctttgttgtgtatgatccacaatgttagatcaattatagtattatactgttgtgcaatgaaaacaagactgatgagttatataaatgatggtaaatatgcatttcgagt

SEQ ID NO: 8544 - DNA, 1161 bp, Oryza sativa; identical to SEQ ID NO: 4429
  ref <308>: DATABASE ACCESSION NUMBER: AK105892
  ref <309>: DATABASE ENTRY DATE: 2002-08-28

SEQ ID NO: 8545 - DNA, 1013 bp, Oryza sativa
  ref <308>: DATABASE ACCESSION NUMBER: AK105893
  ref <309>: DATABASE ENTRY DATE: 2002-08-28
atccattcgccgccgccaccatccactcccccaccgtcctccgtcgccttctctctgaatcttggcggcggcggcgaccgagtgcgctcgagccggcggcggcggctcgcatccccattccgtcctccgccccctcctctctgaatctcggcggtggcggtgtccgcgcgcgctagagccggcgccggcgccggcggctcgcatccccactcgcattccgtccttcgtccccctcctctttgaatctcggcggcgaccacgcatgctcaagccgccggcggcagcagcgaccgcgcgcagtcgaaccggtggtggcggcggcgaccgtgcgcgcactagctggcggcggtggctagcatcccccctcggtactccgttctaggatctgcaggtttgtccacggcgacgacggcgccgctctggcgtgcgctgctatggacgcggccaccgccaaacagcagcagtgccaggatttcctcctccgttccaagagccggtgcctcggccctgctgcttcccggcttaccatccgcccccaccaagtgccttagcctcttgctgcagcaacagcacaacgacaaccaaagagtgaaatgtggggatggcaaagtcaggaatgtgatctgcagaaagatttgcttactgaagatgctgcagatccatctagctgtttgtggagtgaagcaaatcagaatgccagtgatgcttggaccatgttcgattagcaaactccatctagctgcttgtacatgtgttttttttaggttgctgggctcaaacatatgtgaactttgatggagaagtggccaaaatgctttggtggctgctgggtattgtcatgtgcttttgaacaggttttaattatgctgtatgagatatgctcaacaaacattatgttgtatgagatgtgaaggttgtaatgtgtttttagaatatttatgtgctgatctgatgatgatgatgagagaatgtaaattgatgatcggtaattaattttgtttaaattatggatg

SEQ ID NO: 8546 - DNA, 1182 bp, Oryza sativa; identical to SEQ ID NO: 2212
  ref <308>: DATABASE ACCESSION NUMBER: AK105894
  ref <309>: DATABASE ENTRY DATE: 2002-08-28

SEQ ID NO: 8547 - DNA, 1044 bp, Oryza sativa
  ref <308>: DATABASE ACCESSION NUMBER: AK105895
  ref <309>: DATABASE ENTRY DATE: 2002-08-28
atccaacctcacacagttcacacaaccacaagcttcaaagctccctactacttctcctcctccttcttctccggcgccggcgacgatgacgctgacgatcccggacgacgtgcgggcgaaggcggaggtgtacgtcggcgacgaggccgggcaggagaagacgcggctgctgctggaggagacggggctccccagcggcctcctccctctccgcgacatcatcgagtgcggctacgtggaggagaccgggttcgtgtggctgaagcagcggcggaaggtggaccacttcttcgccaaggccggccgccacgtcagctacgccgccgaggtctccgccgtcgccgagaagggccgcctccgcaagatcaccggcgtcaaggccaaggagctcctcatctgggtcaccctccacgagatcgccgtcgacgacacccccaccggcaagctcacctgcaaggccatcggcggcctctcccgcagcttccccgtcgacgccttcgaggcccccccgccgccgcccaagaacccctcccccgccgccggcgacaccaccaaggtcgatgaggagaagaagaaggaggaggaggtcgccggcgacgccgccgccgccgccattgacgagatcgaggggaagatgaaggagatgaacagcaaggaggtgcaggtgcaggccgagggagtggcagccaagaactgaagaagatcgatcgatcgatatacacagatcatcatacatctcatcatcatcatcagcagcagaagcagcagcacgagatctcactatcatatggagattcagatgagctagtagctgagatgatgagttattattaattaatcgttttatttggttctgaataatctgcatctgcatgcatgcactgctttaaattaattattattaagttgttactacttcttttcttgctgctgttaaacagagagaaaatgatatatatatatggagagatcgacgacatgtattattattgctatcatcatctgatgagattataatatgagcaatggaaatattatttattt

SEQ ID NO: 8548 - DNA, 1368 bp, Oryza sativa; identical to SEQ ID NO: 4442
  ref <308>: DATABASE ACCESSION NUMBER: AK105896
  ref <309>: DATABASE ENTRY DATE: 2002-08-28

SEQ ID NO: 8549 - DNA, 1314 bp, Oryza sativa
  ref <308>: DATABASE ACCESSION NUMBER: AK105897
  ref <309>: DATABASE ENTRY DATE: 2002-08-28
aaccaaaaacccaaccccgacgacccacgccgccacttctccacgctctctctctcgcgcgcgcaaatggcgtcgtcgaccagcctcgccgcgctgccctcgcagctcgcctcccccgcccgccgcgccgccctctcccggtccgctaccgcgcggccgcgccaccaccaccaccccctcctccgcgcaccgcccaaaggctgcaggctggtggtgacctgcaacgcgcagacggcggtcccgaccagcattgcgcagggcacgcccgtcaggccgaccagcatcctggtggtcggcgccaccgggacgctgggacggcaggtggtcaggcgggcgctggacgagggctacgacgtgcgctgcctcgtcaggccccgcccggcgccggccgatttcctccgcgactggggcgccactgtggtcaatgccgatctcagcaagccagagaccattcccgcgacgcttgttggtattcataccgtcatcgattgtgctacagggcgtcccgaagagcccattcggacggtagattgggaaggaaaggttgctctaatacaatgtgctaaggccatgggaattcaaaagtatgtgttctactctattcataactgtgacaagcacccggaggttcccttgatggaaatcaagcattgtacagagaagtttattcaggatgccggtctggattatctcatcatccgtttgtgtggtttcatgcagggcctaattgggcaatatgctgtgcccatactagaagagaagtcagtatggggaactgatgctcctacccggattgcttacatggatacccaggacgttgctcgactgacgtttattgccatgcggaatgagaaggctagcaagaagctcttaacttttgccggaccacgtgcctggacaactcaagaggtgattacactgtgtgagcggttggctggccaagatgccaacgttactactgtccctgttgcagtgttgagatttactcgtcagttgacacggttcttccagtggacaaatgatgtggctgacagactggcattctcagaggtcctctccagtgacacaattttctcagttccaatgaatgatacataccagcttcttggggtagattcaaaggatattctcaccttagagaagtatttgcaagattacttcactaacattttaaaaaaattgaaggatctcaaggcacagtccaagcaaactgacatattcttttgacaagaaggatatctacaaacctatggatatattttctgatgcagatctgtgcttcaaaacacagatgagtgaatacaaattttcttg

SEQ ID NO: 8550 - DNA, 1063 bp, Oryza sativa
  ref <308>: DATABASE ACCESSION NUMBER: AK105898
  ref <309>: DATABASE ENTRY DATE: 2002-08-28
atctctaatccctcttttttcggatcggcgaacctcgggggtacggcggcggtttgtgggtggcagcgacggcgggaggagagcggcgggcggcgggcggcggcggctgtggctcgtgctcggggatggatgcggcgacggtctcggcggggctgtcccccgctcgaatccggcgatgacggtcgtcctccgcccggatccattggcggcgggcgtccctcgcctggcccctcacggatccaccggcggcgagcgtccctcgcctggccccgcacggatccaccggcggcggggggaggagagtagcgtcctgaatcgattctcgtcggcggcggtggcgcccgctggatttgtcgtgaggatgacggtggggtcgttgccgtcattcctcccccaacgtcgactacacatccgggaggcgggcgatgcatccaggctgcgagggtcggcggtaggtggaccaggagcacacggctccagccatggcgccgcctcccacgccggtcatcctcatctgctgcttcttccacaatagatccaccgtccccctacgccgtcgccgcggatcaacacctgggaggttccatggccacagatcgtggtcgggaccggcagcagcggacttcaccggtgcgggcgtcgaggagagccacctcagcttcttccagcgctggtggtcgtcctccccaacggccttcatcttctcgccgtgagagccaggcggcgagtcgggatggcggtggcggggccatcttctctgcctccccgcgccggtggatgaggaacaggaggggatggggctggcacgtcgtccggcggcggcgcctgcggtgatccggtccctgctcccccgcctgctgttgctgctgctgctttcctctcttcttgctctggtttttctcctctcatggcggttgctctgtctagagattactcctcctttgaaatccttttcagttttggttggattaattggagttcgctttgctgcgcgattgcaattgttcttgattgatttgtttggctcataatagtccaaggcgctgtccttgttgctcttcgc

SEQ ID NO: 8551 - DNA, 1460 bp, Oryza sativa
  ref <308>: DATABASE ACCESSION NUMBER: AK105899
  ref <309>: DATABASE ENTRY DATE: 2002-08-28
aaagccttcagttcagcccccaccgatccgcacagccggagcccgggagaagtcgagaagatcatatacccacaccttactcgcgccgcgcgcgccgccgtcgacggcagcctcctcctcctcttcttcccccgtgccggcgttcgcgttgcctcctcgatcgcgccgcgccgcgccgcgcgcactccaggcgggcgagctggtttggagagggggcgagacgacctgactccgccctcgattggaatcgaatccaagattgatggcgatggagggaccaatcctgtgtcgtgcagtgatgcaagctaagctacctgtcacgatgatcagcaactcactgaccaagtctgggcagcttgggaccgcattcctgggttgtgtgtgtaaatacaggaatatcactagactcatttccccaatctatcagccggcacaaaagaactttgctactgtttgcggtagcttcagctcgtcgtccgatggtaatggatatatggctggaaactttagtgagagtgatgaagattatgttaattctactgtgctagaagcagttgaggtgagaagtggggcagagggatatgtaatcaagatgcgagatgggaaaaacttgagatgtgtgcacaataattctcaagggagaaatattccagaaagcgcaccacaacctgctattgttttgaggattgaagatggaagtgaaactttacttccaatcattgttttggaaatgccaagcgtacttctgatggctgctattcggaatgtccacattgcaagaccaaccatatatcaagttgtgaaggagatgattgataagatgggttatgaggtaaaactggttcggataaataaaagaattcaagaagcatactgtgctgaactgtttctgacgaaggtaggtgaccatacagaaagtatcacctttgatctaagaccttcagatgccataaacattgctgttcgctgcaaggttcctatacaagtccatagaagccttgcatacagtgatggcataagatcagtcgagccagcaagaatggcgatagcagccggcatgtctgacgggttgttgtttacagaacttgacagacctgatgggcagccatgtgtcgaggctcaagagtttggattgatccggaacatgctcattgcagctgttgaagagagatacaaagatgctgcaacgtggagggacaaactgatgctgctgaggtctaagcggaaaaactgggcctgaaagcgtggctcgtctcaatggtgtaaataaagacgaagcactgttgaatcccagaatgcattccagatgactgatactgtctatgtaattagatgtatatattatatggaactaagaactggattatgtaaattccgactgtttcagtctttcggagtaaagaataatctgtggaaaatctctgcatgttcttagttggcaagctcacctccattttcac

SEQ ID NO: 8552 - DNA, 1399 bp, Oryza sativa
  ref <308>: DATABASE ACCESSION NUMBER: AK105900
  ref <309>: DATABASE ENTRY DATE: 2002-08-28
atgcccgcatccaccggctccatcgccgtaccctaaccgtcctgtgccaccgtcgccttcgatcctccccgccgccatcgccgtcctcctccaccgcgtcgccgacggctccatcgccgtcccctaaccgtcccgtgccgccgccgccttcgctcctccccgccgtcctccaccagctccctcccccactgctcgcctcgccgccgccaccgcctccgtcaaaccatcgctggcgcagggaggactccttgcggcggactccgaaaccctagacactgcccccaacgccagtcacgccgtcctgtccaccgccgcgtcctcctcctccccatcacccgccgccaacgccaacgccaccgccaccgccaccaacacctactcctccgtccacccaccaccgacgccgaatccaccacccacccgcaaccgatgccgaatcccccgccgtcgagtccgcttcagatccccccgccgggccgactcctactcctcctccccgccgccaacgcctactcctcctccccggctccccccgccgttgatgcctactcctccgcgtcgccatcggctccaggttgtcgtcatcaggtggctcctcccgcggcgcccccactgccagcgccaccgccaccaacgccccatcctcctccccagtcgccgcaccacgcctccaccgccgacgcccccatcgccgccgtctcctcctgcctcatcacgtaggcgcaccctcgaccgatccctgccgccggaagtcctcaccacgccacttccccaccccgcccaaccaccgcgccgcctcgctcctctcccatcgccgatcccacgtccccaaatcaccgtggaatccacgccccacaagcccacgacctcccaggtctacaagccggattcatcatcgacctcacctccgcaggccggctgcatcaaccccccacatcccggcctcccactagaccaccgcccccatcccgcggcggccttcgtcgtcgactccgcttccccgtgcgcagcccacgtccacgccaaaagtccgtcgcctacgccacatctcgcgactggatccgctcctctccgtcgatctccaccacggtccctttcgcgccgcaccggaagctggccgccagtcctccggtcgtcgctggatgctgtcggcaggtggatgcagtactcgcccgtctcccctccatcactgagggacattcccatctacaaaagatctgaagtgaaatcttaccactggacacaagctcactcttcttcaggacgtcaggttccttcatcacccgggtactcttccctactgtgaaagtaagaccagtttcttctgtttgtcctgtttttacttgattaatttctgtgatatcaattttttaacatgcaatggaaatatcgttgatct

SEQ ID NO: 8553 - DNA, 1230 bp, Oryza sativa
  ref <308>: DATABASE ACCESSION NUMBER: AK105901
  ref <309>: DATABASE ENTRY DATE: 2002-08-28
aagctccaacagtagcgctagcttatcccctcctactcccccccctcatcctcctcctcctcgctcgcccatggccatggccaccacctccgtcacctcgctcgcgatggccatggccgcggccgcctccgccgacgccacccaggccccgcacaagctctccgccctccccttccaccacctcctcttctcccgcgcgccgcccctcctccgcgcctcccgccgcctccccctcgcgcccctcgtcgcctcctccgacgccgccgccgccgccgaggccggcgtcgaatggagcgagacggaggaggccgatgagggttcccaggaggaggaggaggaggtggtcgaggagcaggcggaggcggaggaggaggtggtggcctccgtggaggaggaggaggaggaagcggtggaggaggagttcgcggcggagccccccgaggaggccaaggtgtacgtcggtaacctgccgtacgacgtcgacagcgagggcctcgcccagctcttcgagcaggccggcgtcgtcgaggtcgccgaggtcatttacaacagagagacagggcagagccgtggatttgggttcgttaccatgagtacgattgaggaagccgacaaggccattgagatgcttaaccgctatgatatcaacggaaggcttctgaacgtaaacagggcggctccaaggggctctcgtgtggagagacctccaaggcagtttgctcctgctttcagggcttatgttggcaacctgccatggcaagtggatgactctaggctgctgcaattgttcagcgagcatggagaggtggttaacgcttcggttgtctacgatagagaatctgggcgttctcggggatttggttttgtttccatggcctccaaggaggagctcgatgatgctatttctgcccttgatggacaggaattggatggccgcccacttcgagtgaatgtggcagctgagcgaccacagcgaggcttttgattccatatggcgttggggagcatgtctgcacgtttgaacaagaatgctaaagtgttatgcgttaaggcggaagctgatggttgtcatttacagagcgcgcgttagcttcctgattttgagtcctcccgtcctttttatgtgtcttccaagctgatgttatgttaaattattctcaaaaatatgagttcaactttccaagtaggatatttataatgatgatgtccttagtattttttttccgtgat

SEQ ID NO: 8554 - DNA, 1500 bp, Oryza sativa
  ref <308>: DATABASE ACCESSION NUMBER: AK105902
  ref <309>: DATABASE ENTRY DATE: 2002-08-28
cacgcgattcccccatctctccgacagcgagcttcgtcgtcggctgtgcgcggccgcggcggcggcgctggtcgtgtgcttcccaaattctctcattccccagcgagcgatcaccatggggctccacaaggaggcgagctcgtcgtcgtcgcggctcgacgcggcgccgctgctgccgcaccacggccacggcggcggcggcgcggggcaccacctgtcgtcgcagcccaagacgttcgccaacgtgttcatcgcggtggtcgggtcgggcgtgctggggctcccctacaccttctcccgcaccggctgggtggccgggtcggtcctcctcctcgccgtggccgcgctcaccttccactgcatgatgctgctcgtcgcctgccgccgccgcctcgcctacgaccaccccaagatcgcctccttcggggatctgggcgccgccgtgtgcggccccgcggggcggcacgtcgttgacgccatgctcgtgctcagccaggccagcttctgcgtcggctacctcatcttcatctccaacaccatggcgcacctttacccggttggggattcgtcgccctcgtcgccgctcctcaccgccaaggcgatcttcatctgggtcatgctgccgttccagctggggcttaactccatcaagacgctgacgctcctcgcgccgctcagcatcttcgccgacgtcgtcgatctcggcgccatgggcgtcgtcctcggccaggacgtgtccacctggctcgccaacaagccccccgtgttcgcctccgccggacccacggagatcctctacggcctcggcgtcgccgtctatgccttcgagggcatcggcatggtcctcccgctggaggccgaggccgccgacaagcgcaagttcggcggcacgctcgcgctgtccatggcgttcatcgccgtcatgtacgggctgttcggcgccatgggttacctcgcgttcggcgcggccacgcgggacatcatcaccaccaacctcggcaccgggtggctgtccgtcaccgtgcagctgggtctctgcatcaacctcttcttcaccatgccggtgatgatgaacccggtctacgaggtcgccgagcggctgctctgccgcaagcgctacgcctggtggctgcgctggctcctcgtcatggtcgtcgggctcatggccatgctcgtgcccaacttcgccgacttcctctccctcgtcgggagcagcgtctgcgtcctgctcgggttcgtgctgccggcggcgttccacctcaaggtgttcggcgctgaggtcgggtggcccgggctcgccggcgacgtcgccgtcatcgtcgtcgggaccgcgcttgcggtgtccgggacatggacatcgctcgcacaaatcttcagttcttccgatgtgtaagcggttgacagtaatgcagacaatgcgcaggcaacgcagctagtagctcatgtgtatacattgaatttagcagaaaagaacattcagctggcatgctgattttgggc

SEQ ID NO: 8555 - DNA, 1255 bp, Oryza sativa
  ref <308>: DATABASE ACCESSION NUMBER: AK105903
  ref <309>: DATABASE ENTRY DATE: 2002-08-28
cgccacacctcgcagttcgtagcagcgaataagcgagctccatttgattctttgattacaatggagtccaccaaggtctcggcgatgctcctgctcgccatgctcgcgctctcctcctccccgctcgccctcgcgtgcggctcgtgcggctccggcggtagcggcagtgcaccgtcgggcggcggcggcagcgcgccctcgggtggtggtggtggtatcggaggagtcgtcggaggaatcgtcgggggtgtcgctcccgtcgtcggaggaatcgtcggcaaagttcctcctgtcgtaggaggagttgtcgggggagtagctccggtcgtcggtggaatcgtcgggaaagttcctccggttgtaggaggagttgtcgggggagtagctccggtcgtcggtggaatcgtcgggaaagtccctcccgtcgtcggcggtgtcgtcggaggtgtcgccccggtcgtcggtggagtcgtcggtggcgtcgccccggtcgtcggaggtgtcgcccccgttgtcggtggcgtcgtcggaggcatcgccccggttgtcggaggaatcatcggcggcggcagcggcggcggcggctacagcccgagcccgagcccgccgaagcgacacggcgggaggaaggcgtgcccgccatcgccgacgccgacgccgtccaccccgacgccgtcgtcctcggacacgtgccccatcgacgcgctcaagctcggcgtgtgcgtggacctcctcggcaacgaggtgcacatcggcgacgcccacgtgacgtgctgcccgctggtgaaggacatcgccggcctgtccgccgccgcctgcctctgcaccgccatcaaggccaaggtgctcgacatcagcatctacatccccatcgcgctcaagctcctcgtcaactgcggctgcgacgtcccgcctggctacacctgcgcctaagccatcctcatgcacgtcacgtcccaaaccatgcacgtcacgtcccaagccatgcacgcattcattattctctctcgagtacacagtttagcttcaatcaaattaaggtcggtcgttaatttggtcaaatcggtcgggtgatgaagccactcgcttctgggatgttcaattattcagtgaacttcttttttattggatttgcttttcttgttttgcaatgttaatttgtacatgtagtggctccggaaattgtcatcaattgtactgtatgcatgtattgtaaaactatttaatttaattcccagatgtaactcttgtttgc

SEQ ID NO: 8556 - DNA, 1456 bp, Oryza sativa
  ref <308>: DATABASE ACCESSION NUMBER: AK105904
  ref <309>: DATABASE ENTRY DATE: 2002-08-28
accacactccggtccacgccctccaccaccacccgccgccgccgccgcccaaaacccttctccctcccggcggccatggcgttcccgtcgccgaactccctctccgcggcgtcccaccctacgtcctcctcctcctccttccacctccacctgcagctgcagcaacccgtcccccacctccccttcccgcgctccctcccgctcaacctccccgtcctccgcctcgcccgccccctcctccctcccgccccgctagcctcctccggaagcggcggcatcggcatcggcggcggaggcgatgacgacgagggtcgcgacaacgcgggcggaggagacggcggcgacgacgacgcgtcggtcaacaggagggaggcgctgttcgtgctggcgcagctggggcggaagctcgagagcctcccggccgacctcgccgcggccatcgagggcggccgcgtccccggggagatcgtgcagcggttcgccgacctcgagaagtcgggactcttccgctggctgctccagttcggcggcttcaaggagcgcctcctcgccgacgacctcttcctcgccaaggtcgccatggagtgcggcgtcggaatcttcaccaagactgcagcagagtatgagcgaaggagggaaaactttgtcaaagagcttgactttgtgattgcagatgtggtcatggcaatagttgcagactttatgttggtttggcttcctgctccaacagtgtctctgcagccaccactagcagtaaatgcaggatctattgctaaattcttccacaattgcccagataatgccttccaggttgctttggctggaacatcatactcccttttgcagcgcgtaggagctattatgaggaatggtgcaaaactttttgcagtgggaactagtgcatccctgattggaactggtgtgaccaatgcactgataaaagcacgaaaggctgttagtaaggattttgaaggggaaagcgaggatattccaattgtatcaactagtgttgcctatggtgtatacatggccgtttccagtaacctcaggtaccaaatcctggctggagtgattgaacagaggatgctcgagccattactacaccaccacaaactagtgttgagtgcactgtgctttgctgttcgaacagggaacacattcttgggttctctactgtgggttgactatgccaagtggataggcatacaataggttcgaactttgaatatagatctgaaattgcgagtcattagcaaataccatgcagactctgaacacttacgactcccgtttggcgcaagaaaatctaggacagatttcggtttttatggaactgaagcccgaaggaaaagggtaatttgtcgaattcccatgaacaagtgattggattgttagtggtggtttgtgcgttctgttttgttgaattggattcctttgaagcaataattttgccgtc

SEQ ID NO: 8557 - DNA, 1266 bp, Oryza sativa
  ref <308>: DATABASE ACCESSION NUMBER: AK105905
  ref <309>: DATABASE ENTRY DATE: 2002-08-28
actacaacgccaaagcactgcactgcacaagcagcttcctcgccttcgcatctactactccccccaaaatggcgcatccggtggctgaggccgacgagaagagccccttcggccgcctcaccgcggaggagttctacgcgcgccacggcgtgctgcacacctcctccaccttcgtcaacccgcgcggcctccgcatcttcacccagcgctgggtccccgcggggggcgacgcgcccctcctcggcgccatcgccgtcgtccacggcttcacgggggagtccagctggacggtgcagctcaccgccgtccacttcgccaaggccgggttcgccgtcgccgccgtcgaccaccagggccacggcttctccgagggcctacaggggcacatccccgacatcgtccccgtgctcgaggactgcgaggccgcgttcgccccgttccgcgccgactacccgccgccgcttccgtgcttcctctacggggagtccctcggcggcgccatcgcgctgctgctccacctccgggacaaggagcggtggcgcgacggggcggtgctcaacggcgccatgtgcggggtcagccccaggttcatgcccccctggccgctcgagcacctgctgtgggcggcggcggccgtggcgcccacgtggcggctcgccttcacccgggggaacatccccgaccgctccttcaaggtgccgtggaagcgcgccctggcggtggcgagcccgcgccgcaccacggcgccgccccgcgccgccacggcgctggagctcctccgcgtgtgccgcgagctccagtcccggttcgaggaggtggagctcccgctcctggtcgtccacggcggcgaggacaccgtgtgcgaccccgggtgcgcggaggagctccaccgccgcgccgggagcaaggacaagacgctgcgggtgtacccggggatgtggcaccagctggtcggcgagcccgaggagaacgtcgacaaggtgttcggcgacgtcctcgactggctcaagtcccacgccgccgccgctgccgccgcgcgtggcgaggggcagcagtagttcggtcggtcacgcgtgccgcgtgcttgggtaattcatggcggattcaaagcaaaagtacgggggcgcaataaaaggttgtggagttgattggtgagacgagatcgatctggtcccggtgtatctccgtctctgcgtgtggccatgttccatctccgtgtctctctgctcgtattagtccatgaattgaatgccaaaaaaatttgcc

SEQ ID NO: 8558 - DNA, 1482 bp, Oryza sativa
  ref <308>: DATABASE ACCESSION NUMBER: AK105906
  ref <309>: DATABASE ENTRY DATE: 2002-08-28
atcctgttcccatctcaactgcggtcactcaccaatggctccgccgcttctcctcgtctcgctcctgctcatcggcttcgtcagcgccagagccatcacaccctcagctgaagcggcggcggtgttcccgaaggaagccctgccgaccaactccggctacctccccatcacgacaaccaacgcctcgctcttcttcgcctactacgaggccacgcacccgctcacgccgccggcctccacgccgctcctcctctggctccagggcggccccggctgctccggcctcgccggcaatttcttcgagctcggcccctacttcgtcaaccgcgacgcgctctccctctcgcccaaccccttctcgtggaatcgccggtttggtctcctcttcatcgacaacccgctcggcacgggcttcagcgccgcgccgtcccccgccgccatccccaccaaccagtccgtcgtcgccgcgcacctcttcgccgcgctgcagtcgttcttcgcgctccagccgggctcccgctcccgccccttcttcctcaccggcgagagctacgccggcaagtatatcccggcggctgggtcgtacatcctggccgtgaaccccacgctgccgacgcggctgcgggttaacctccacggcgtggccatcggcaacgggctgacgcaccccgtcgcgcaggtggcgacgcacgcggacaccgcctacttcatgggcctgatcaacgccaagcagaagcgggagctggaggcgctgcaggcgagggcggtggagctgacgaacgcggcgaggtggagcgaggcggccgacgcgagggggctcgtgctgtcgtggctggagaacgcgacgggcctggcgacgctgttcgacgcggcgaagaagcgcccctacgagacgggccccgtggggaagttcgtgaaccgggcggaggtgaaggcggcgctgggcgcgcgcggcgacgtggagtgggaggagtgcagcgacgcggtgggcgcggcgatgcacggggacgtgatgaagagcgtgaagccggaggtggaggcgctgctgcggggaacgcgcgtgctgctgtaccagggcatccgcgacctcagggacggcgtggtatcgacggaggcgtggatgcgggagctggagtgggacggcctgcccgccttcctcgacgccgaccgcgccgtgtggcgcatcggcgaggagctcgccgggtacgtgcagcgctccggcccgctctcccacgtcgtcgtctacggcgccgggcacctcatgccggcggacaacggccgcgcggcgcaggagatgatcgaggattgggtgttgcaggcggggctattcgggcgccacggcgggatgaagcgcgcggcctgactccgcactccgggcgccggcggaggccaacctgtggcctcatctcttgcggtgtcaaactctaatctgattttagaatcgagcagagtacatcgaggaatacaagcatttgagtctat

SEQ ID NO: 8559 - DNA, 1434 bp, Oryza sativa
  ref <308>: DATABASE ACCESSION NUMBER: AK105907
  ref <309>: DATABASE ENTRY DATE: 2002-08-28
accgatccagctcaaacacatcttcttcttcctgagcttagcatagttagcttgcgagctagctagctagccatggctgctcgcaagatagccatgtccacttcgtcactgctcttattgctgcttgctgctgccctgctgctcaccggtgatgcggcgagaatcctgcaggaagcggcttggccaccctacgattacccaaagcctgatcagccgccaccgttgctgccaacacctgatgttgtgccaaatccaaatcagcctcccctgcagcccacacccggtgttccaccactgcccaatcctgatgtgccaccgatgaataagcccgatgtgccaccgatgcctaaacccgatgggccacccattcccccggtacaaccatgtcctgatcagccaccacaacctaaacctgatgggccaccattgccaaatcctaatcaaccaccacaacccaatcctaatgggccgccaaagcctgatatgccaccgatgcctaaacctgatgggttgcccaatacttatgagccatcaagacctgaccagccacctcaacctatatctgatgggccaccactgcctaatcctaatgttccaccaaagcctgaccaaccaccacaacccattcctaatgggccaccgaagcctgatatgcttccaatgcctaaacctgatgggtcacccaattcttatgcgccttcggtgccggaccaatcaacacaacccaatccaaatgggccatcaatccctaaccaaccaccacaacctatacctaatgggccgataaagcctgaccagccaccgcagcccaatcccgatatgccaccaaagccagaccaaccaccccaaccttgccctgatgggccaccgaaacctgaccagcctccacagcccaatcctaatgggccaccgaaacctgaccagccgccacaacctaatcctaatgggccatcaaagcctgaccaaccgccaagacccaatcctgacatgccgccaaaacctgatcaaccaccacagccagagtactatgaacaaccaccaaagccggatgcaccccagatgccaccgttgccgaacggtgagatcccattttcaccatagccggaagaaagcgccggccactgaagccggagctgccggtcattcctgaggtgcacctcctggtaacgggagggcaaaaaccatgatgaccaccaagaggtccattcagattgattcgtccagattctacatttggtttcatttgtgtatttctttcctgtatcaacggcgtgcatgccatgtctgtcgtccgtgtagatgtgtgttacttgctgagtttgttgctatgagcagctcacatatctcttctctgagggtgtgagatcatatattcatatttgtttataataaatggattcaattatgtgtgtatatgagcacacacttgcattc

SEQ ID NO: 8560 - DNA, 1792 bp, Oryza sativa
  ref <308>: DATABASE ACCESSION NUMBER: AK105908
  ref <309>: DATABASE ENTRY DATE: 2002-08-28
agctcgatcgtcggcagccaggctaatcttgccatggatcgtcggctccttctctctgctctactgttcatcgctctggcttgcagctccaaccgcgtccatggcgcactcaacaggcacagcttccccgaggggttcctcttcggcaccggcacctccgcgtatcagtacgagggtgctgtcgacaagcgaggtcagaacatctgggacaccttcagccgcattccaggtaaaatcgcagatggtagcaatgcagatatagcgaatgacttctatcatcggtacaaggaggatttgaacctcatcaccgcgatgaacatggattccttccggttctccattgcatggagcaggattttaccaaatggaaccattagtggaggaataaacaaagaaggggtcgaattctacaacagcctcatcaacgaggtcatagctaaaggactgaagccttttgtcacaattttccactttgacactccacaggctttggaggataaatatggcggcttcttgagcgaaaacatcgtgaaggactacgtggattatgcggacctttgcttcagcctgttcggcgaccgcgtgaagctatggaacacgttcaacgagccgacgatcttctgcatgaacggctacgccaccggcatcatggcgccggggcggtgctcgccgtacgcgtcggcgtcgtgcgccgccggcggcgactccggcagggagccgtacgtggcggggcaccacctcctcgtcgcccacgccgaggccgtccgcctgtacagggccaggtaccgggcggcgcacggcggcgaggtcggcatcacgcaggtgtcgcactggttcgagccgtacgacgccggctccgccgccgaccggcgcgcgcggcggcgcgccctcgacttcatgctcgggtggttcatgcaccccgtggcgcacggcgagtacccgccggcgatgaggaggctcgtcggcggccggctgccggcgttcaccgccgagcagtcggagatgctcaggggttcgttcgacttcatcggcctcaactactacacctccaactacgccgtggccgcgccaccgcccaacaagctccacccttcctacctgactgacaattgggtcaacgcgacaggttaccgcaatagcatcccgattggtccaccggcttacacgccgatcttctttaactatccgccggggctacgcgagctgctgctgtacgtcaagaggagatacaacaatcccaccatctacatcaccgagaacggcactgacgaggcgaataacagcacgatccccatatccgaggcgctcaaggacgagacgcggatcggcttccactacaagcacctccagttcgtgcacaaggccatccaggagggtgtgaaggtgaagggttactttacatggacgttcatggactgcttcgagttcggcgatgggttcaaggaccggttcggcctcatctatgtcgaccgcgccacgctcgcgaggtttcgcaagaagtccagctactggttcgcggatttcctccgtcgatgatgatgattcaaatgcttcaagctcctgatcgacagtgattcgatccgatctatatctccagtgtactcgatgaagctagcttcaggcagctgcctttttttttcttttttcttttaaaataagagagagaggcaaggctaggcaggcagctgatagaattaccaaacctgatgtgtgcagtgtgctgcccaaataattgccatgtgcatggaaaatgattgtgttttctcatggatattgatttgattactggtac

SEQ ID NO: 8561 - DNA, 1053 bp, Oryza sativa
  ref <308>: DATABASE ACCESSION NUMBER: AK105909
  ref <309>: DATABASE ENTRY DATE: 2002-08-28
gtggacccgtttcaaaaaaaaaggaaagaaaaagaaatcgcttctaatctctacacccacctccgcttccgctccgccgcgccggccatggccgccgcgtccgcggccttcctcctcctcctcccggccgtctccccagccgccccgacccacccgcgcctcctcttctcctgccccccctaccgctcgcggcctcgccaccgggcacgcctcgcggcctctcggtcgtcgtccgatggcgagggcgacggcggcatcgtcacggggccagcggggggagggggaggcgtcttcctctcgccgcgcgcgctgtcgcagcgcgacgagctcgccgccttccgctacgcgcactccttcccgcacggccgcctcaccgtgcgggcgctcaccccggcgggcgacgacgacgagtccgacgcgctcgtccgcctcctcgcgtcgtccttcgccgagaacgtcaggtgggcacccgcgcagcggtacgagcagctcctcgcgttcgtcatccgccgctacctcttcgagcgccgcggcctcgccccgcacgccgccgtgctcgtggggtactaccgccccgccgccacgggagacggggatgaggaggagggcgagggcaacgaggacgacgacgactacggggagatggcgtgcacggcggaggtgtcgctggacgcggtgggcgcgcccggtgccccgcccacgcccacgccgccgcttgacttcccgtacatttgcaacatgactgtcaagacgtcgttgaggaggagaggaattggaaaacaacttcttaaggcatgcgaggatctgattatcaagatggatgccaaaaggcacgtatatctgcactgtaggataatcgaccaagttccattcaatatgtacaggaaagcaggatataacattgtccagactgacagtattttggtttggctgagcctccaaaaacgcaagcacttgatgagcaaggaattactgcaaacttctgttagcagcaggagtacagccaaagattttgatgataacaaattgacaagctgagcatggtagagaacc

SEQ ID NO: 8562 - DNA, 1512 bp, Oryza sativa
  ref <308>: DATABASE ACCESSION NUMBER: AK105910
  ref <309>: DATABASE ENTRY DATE: 2002-08-28
aagctgggccgcactctcacccgcttcctctccaagccccctttcaagcccaagcccaccaacccctcgccgccgccgcccccgccgccgccggggatccagcctcctccaccggcgctgcccggcatgccgcacggacgcccgccgccgccgttcccgggagggcgggacgcgttcccgcaggcggcgtcgacggtggtcccggacccggccaggttcttcgcgccggcgctgctctcgtcgccgctccccaccaactccttcttccagaacttcgtgctcaagaacggcgaccagccggagtacatccacccgtactcggtccgctccgccgccgccgcgctcaccctgtgctacccggcgcggaaccactccccgtcgttcgtcatccagacgttcgtcgaggacctgaccgtctccgcggcgtccgacgccgcggcggccgcggcggggcagaggcaccgggtcgccgcgttcgacgacctctcagtcaccctcgacgtctcgccgtcgctcagggcgttcctcgtcaggggctgcccctttgtcaccgtcgccaccgccgacgccgcgggccccgtcgacatctccgtcgcgtccgtccacgccttcatcgaggtggcctcctgcgacgacgcgctcaccaagtggcggctccggatgaacagcggccagaccttcctcctctacgcgtccgcgccgatccgcctcgcgcagtccagcgtcacgcagctgtcggcccccggcttctccggcgtcatccgggtcgcctacctgccggacccgtccatggaggcggttcttgatcagtacagccggtgcttccccaccgccggcgaggcctcgctgaaccgccccttctgcgtcgagtacacctggcgcaagcaagggtggggagacctcctcatgctcgcccatcccctccacctccgcctcctctccgaggattgctgcgtccgggtgctcgacgatttcaggtaccggagtatcgacggcgacatggtcggcgtcgtcggcgattcttgggttctccggaccgatccggtgtcccccacatggcactcgatgcggggcatcagcgacgacggggtgggcgaggtcgccgccgcgctgcgcaaggatgtggatgcccttgcttccagctccatcacgaccacctcctcctacttctacggcaaggcgatcgccagggcggcgaggttcgccgtaatcgccgaggaggtcggctgccctgacgtcatcccggcggtgcagcgattcttgaaggccaccgtcacgccatggctggatggcagcttccagggcaatggattcctctatgaacccaaatggggtggccttgtcacattgcagggatccaaggacaccggcgccgatttcggcttcggcatttacaatgatcaccactaccatttggggtacttcttgtacgccattgctgtgcttgccaagattgatccctcctgggggaggaagtacatgccccaggcctactccatggttgcagatttc

SEQ ID NO: 8563 - DNA, 1755 bp, Oryza sativa
  ref <308>: DATABASE ACCESSION NUMBER: AK105911
  ref <309>: DATABASE ENTRY DATE: 2002-08-28
aatccaccccactccattctctcatctcatccgtgaccacactccactctcatccagagcaatggcgttgcaaacgcagccggtaccaaatgcgtcacctcttcatgttcttcggtccgtatgcgtcctcctcctggccgcgtcggcgacggtggcggcgcggcgccacggcccggcggcgcccatcgccgggcagagcatgtacctggcgccgagctgccgcgcgcacacggcgtcgctgacggacttcggcggcgtgggcgacggcacgacgtcgaacacggcggctttcaagtcggcggtggaccacctgtcgcagtactccggcgagggcggcggcggggcgatgctgtacgtgccggcggggaagtggctcactgggccgttcaacctgacgagccacttcaccctgttcctccacagcgacgccgtcatcctggggtcccaggacatgggcgagtggcccatcatcgatcccctcccgtcgtacggccgcggccgcgacaaggccggcggccggtacgcgagcctgatcggcgggtccaacctgacggacgtggtgatcaccggcgcgaacgggacgatcgacgggcagggggcgatgtggtggtccaagttccattcgaacaagctcaagtacacgcgtgggtacctgatcgaggtgatgcactcggacacggtggtgatatcgaacgtgacgctggtgaactcgccggcgtggaacatccacccggtgtacagcagcaacatcgtggtgcagggggtgacgatcctggcaccgacgcactcgcccaacaccgacggcatcaacccggactcgtgctcccacgtccgcatcgaggactgctacatcgtgtccggcgacgactgcgtggcgatcaagtccgggtgggacgagtacgggatcgcgtacgggatgcccagccagcacatcgtggtgcggaggctgacgtgcgtgtcgccgacgagcgcggtgatcgcgctgggcagcgagatgtcgggcgggatcagcgacgtgcgggcggaggacataacggcggtgaactcggagtcggcggtgcggatcaagacggcggtggggcgtggggcgtacgtgcgcgacgtgttcgtccgggggatgtcgctggacaccatgaagtgggtgttctggatgacggggaactacaagtcccacccggacgacggctacgaccccaacgccatccccgtcgtggacaacatcagctaccaggacgtggtggccacgggggtgtacaaggaggccgccaggctggagggcatccagggcgcccccttccgcggcatctgcatcgccaacgtcaccgccacgctctccaagtcgcgcaagtacccgtggacctgcaccgacatcgagggggtgtccaccggcgtcacgccggcgccgtgccagccgctgcagggggcgcacgatggcgcctgcccgttccccacggacacgctgcccatcgaccagctcgtcatgcagcagtgcgcctactccgtcccggcctccatctagctgatctggctgcagcctgcagcgctgtagctgtagctgtgaccgtcgttactactacaacactagcctctgcgtgcggtcttctgaaacaaaaacaataacccagagtgacctttctgactgtgctgcttcacagcgctcgctctgcgtcatgtcagtgctgcctctccttgctctgcaattatgtaacttaaacttcagttcgtgaaatacaaatgagaaattagtcgtcagcc

SEQ ID NO: 8564 - DNA, 1645 bp, Oryza sativa
  ref <308>: DATABASE ACCESSION NUMBER: AK105912
  ref <309>: DATABASE ENTRY DATE: 2002-08-28
agctaactttctataattcgcacagtagcaggacagtcgccgcctccatcaatggcgaaaccgacggtggtggtgctgcccgtgtggggcgccggccacttcatgcccatgatcgaggccggcaagcggctgctccgcggcagcggcggcgcgctgtcggtcaccgtgctcctcatgccagcgccgacgccggatgcggcggtcgacatcgcggcccaggtgaagcgcgaggaggcctccggcgccgacgacatcagcttccggcacctccccgccgtcgacatgccgaccggccacaccggcgtcgaggagtggatctcccgcatactgcggagccacgcgcccaacgtgtgggccgccatcgccgggctcgactgccccgtggccgcgctcgtcaccgacatcttctgcacgccggcgctcgaggtgtcccgggagctcggcgtgccgggctacgtgtacttcccctgcagcgcgtcgatgctggcgctgctgctgcgctcgccggggctcgacgaggaggtggccgtcgagttcgaggagatggacggcgcgatccgcatccccgggctgccgccggtgccgccgtccgcgctcccgtcgacgatgctggacaggaagaagtcgacgtacgactggttcgtcgccaccggcaggggctacatgaacgccaccggcgtcatcgtcaacacggcggccgagctcgagcagagcgtcctcgccgccatcgccgacggccggtgcacgcgcggggtccccgcgccgacggtgtacccgatcggcccggtgctctccttccccccgccgccggaggagcagccgcacgagtgcgtgcggtggctcgacgcgcagcccccggcgtccgtgctcttcctctgcttcggcagcaaggggctcctgccgccgcccaaggtgcgggagatagccgccgcgctggaacgcagcggcggccaccgcttcctgtgggtgctgcgcggcccgcccaaggacagccggcaggggcagcgggtgcccacggacgccatgctcgacgagctcctccccgaggggttcttggagaggaccaaggggagggggctcgtgtggccgacgcgggcgccgcagaaggagatcctcgcgcacgccgccgtgggcgggttcgtgacccactgcgggtggaactccatcctggagagcctctggttcggcgtgccggtgctgccatggccgctcgacgccgagcagcacttcaacgcgttcaccctggtcgcccacctgggcgtcgccgtgccgctcggcatggacaggaggcgggacaacttcgtggaggcggcggagctggagcgcgcggtgaggtcgctgatggacgacgcgtcggacgaggggaggaaggcgagggcgaaggcggcggagacgagggccgtttgccggaaggccgtggaggagggcgggtcgtcgtccacggcgttccagaggctcaccgacgatatcgtccgaaggggtgccgttcaaatccgttaagtttgctggtttcaccgcagattatgtgcgcgcgcaatgagtcctctttactcaatccattcgatgtctcatgttgtgaacttgtgattcctgttggttgatccgtttggtatggtgtcgaataaaataaaggggaaataattct

SEQ ID NO: 8565 - DNA, 1657 bp, Oryza sativa
  ref <308>: DATABASE ACCESSION NUMBER: AK105913
  ref <309>: DATABASE ENTRY DATE: 2002-08-28
aggtagaaccagagaaaaagaacattaacgataagtaaagtaatggagaatagccaggtgtggctgctatggggagctctctccgtcgctgtcctcttctacctctccaccctgcgacgacgctacgccggcggcaaacccctccccccgggcccgacgccactgccgctcatcggcaacctccacctggccggcggcacgttccaccacaagctcagggacctggcgcgcgtccacggccccgtgatgacgctcaagctcggcctcgccaccaacgtggtcatctcctcccgggaggccgccatcgaggcgtacaccaagtacgaccgccacctcgccgcgcgcgccactccggacaccttccgcgcgtgcggcttcgccgaccgctccatggtgttcatcccgagctccgacccgcagtggaaggccctgcgcgggatccagggctcccacgtcttcaccccgcgtggccttgccgccgtgcgccccatccgtgagcggaaggtgggcgacctcatcgcctacctccgcgcgcacgccggcgaggaggtgctcctcggccaggccatgtacactggcctcctcaacctcgtgtccttctcctacttctccatcgacatcgtcgacatgggctcgcagatggcccgcgacctgcgggaggtggtggacgacatcatctcggtggtcgggaagcccaacatctccgacttctacccgttcctccggccgctggacctgcagggcctgcgccgctggacgacgaagcggttcaacagggtgttctccatcatgggcgacatcatcgaccgccgcctggctcacatccgcgacggcaagccgaggcacgacgacttcctcgactcgctcctcgagctcatggccaccggcaagatggagcgtgtcaacgtggtgaacatgctgttcgaggccttcgtcgccggcgtggacaccatggccctcaccctggagtgggtgatggccgagctgctccacaacccggccatcatggcgagggtgcgcgcggagctgagcgacgtgctcggcgggaaggaggccgtggaggaggccgacgcggcgaggctgccctacctccaggccgtgctgaaggaggccatgaggctgcacccggtgggcgcgctgctgctgccgcacttcgccgcggaggacggcgtggagatcggcggctacgcggtgccgaggggctccacggtgctcttcaacgcgtgggcgatcatgcgcgacccggcggcgtgggagaggcccgacgagttcgtgccggagcgcttcctggggaggtcacccccgctggacttcagggggaaggacgtggagttcatgccgttcgggtccgggaggcggctgtgccccgggctgccgctggcggagcgcgtcgtgccgttcatcctggcgtcgatgctgcacacgttcgagtggaagctccccggcggcatgacggcggaggacgtggacgtgtccgagaagttcaagtctgccaatgtgcttgccgtgcctctcaaggccgtgcctgtcctgatcaaatagtcggacgtacgactatattgttagccaggtcattaattgttccagagtactttggtttcactatatatatacgggacccagtggcacgagaataatatgcatatgcatatatatg

SEQ ID NO: 8566 - DNA, 1773 bp, Oryza sativa
  ref <308>: DATABASE ACCESSION NUMBER: AK105914
  ref <309>: DATABASE ENTRY DATE: 2002-08-28
atttttgcactccagactacaaacaagctagctaggatcaacaacaacaactcaaacaataatctgccgcccgccatggatcagcagctgcacctgcaggggactagtactgctacaactgttccattgcaaggtgaccctgcttctgatcaccacccacatctctcaatcgacataccaccagctgcagcaagcatgtcacctgcaccgacacaagctgctgcagatatcacacccacaccgaccacttcgattttgagcaccaaagcgagcacacctgcaggttcatgttccagcagaagcaccagcgttgccccaaagccgcaacgatcgtcatccttcatgctgaggcagactgtcaagagcctcttgccagtgggaagcttcaagtcgtcagtcaagttcttcaacgccagaatttcgaggacatcgtcgctcccggtgaccgatgtctcgcaggaacaagccgataaaacttcgactactcatgctgttgataaagcaggtcacatgtaccggtcacagtcgcttcccatgaacatgaagaaattgaataatggaaagagcttcaagagaatgaattcactcggcggtgtctaccgcgtagttccttcgacaccatcagtccccgtgacaagcagcaatgtcatcccagatatagtcccatctgaaccaggtgatgaagatggagaggacatagcagaggaagaggcagtatgcaggatctgcatggttgagctgtcagaagggagtgacactctgaagctggagtgttcatgcaagggcgagctcgctctagctcacaagcactgcgccatgaagtggttcaccatgaaaggtaccaggacatgcgaggtctgcaaggaagatgttcagaacctccctgtcacccttgttcgtgttcagagcatgcagcagcctgagcttcagaccaaccctgccaacgcatcaagatacgatcgcctcaggatgtggcagggagcgccaatccttgtgatcgtcagcatcctcgcctacttctgcttcttggaacagctgctggttgcccgtgatggtattgcagcgctggcaatatcgctgcccttctcatgtatccttggcctcttctcatccctcaccacaacaagcatggtggcaaggagatacgtgtggatctatgcgacaattcagtttctgttcgtcgtcttcttcacccatctcttctacagatatctccatttgcaagcggtgatatcaatcatcctggccacgtttgccgggttcggcgtagggatgaccggcaactccatcatcgtggagattatacggtggagggcggcgagggcggcggcggcgccgccggctcaaacccgtcatcgtcgtcgtcgtcatggtcgcaggcaacaacagccaccacctgcacaaccagctgcttcttcagctgccgtcgccgacgttgagaacccacctgtataatactcatcgatcgttacctgaaaggaaggttggaggccttgcaaactgtataaatttatttcaaactaggaagttaagttaataagtaggcatggagttgatttttttgctcaggatcgatgcatggatgcatgtcaattttatactatattttttcagttctttttatttttttttggagcttgtgtgaaagaatcagtcttagtatagtatatactagtataaaatgtgtcctggtgtacaaagtatgtcagacatgtatatctgcttgaaatcttgtattagtataaaactcttgagatgctctgctcttggctt

SEQ ID NO: 8567 - DNA, 1951 bp, Oryza sativa
  ref <308>: DATABASE ACCESSION NUMBER: AK105915
  ref <309>: DATABASE ENTRY DATE: 2002-08-28
aaaaaaaaaaaaacagaacgaagacagcggcatgcatcgcagcataggccggtcaagaagacgatggccctgacgaggcgcctcctcatcgatctctcgtcaagacgccgccttttcaacgccggcaaattctccaccacgcacaagaagaaaccagtgctccatgaagcggtgagtttggctggattcttgcgctgctcgcgcgcgctggtgtcgtggatggtggcggagaggaagatgcagccatcgccggcggcgccgccggcggcggagcaccggaggcgggcgctgctgcgctacgtggtgttcctcgcggtctccctcctcgccttctcctgctgggctctcgtcagctcgcggatcgacggcgccgtcctcgcggcgaccgccggcggcgagcatgacgaccacgatggcattattgttagaagcagcacccaagcggagatgccagcgagaggcgggaacgcgacgtcgcgcggcgccgtcgaggtgggtgtgggtactccggcggcgatgatcacccggcagccgtcgtcgggagagacgacgacgacggcggcgttggcggcgacgtgcgacgcggagagcgcgctgctgagggtgtacctctacgacctcccgccggagttccacttcggcatgctggggtgggacggcaaggcggccggcgcggcgtggccggacgtggccggcgacccgcgcgccgtgccgcgctacccgggcggcctgaacctgcagcacagcgtcgagtactggctcaccctggacatcctctcctccaccacctccggcgaccaccgccgccgccgtccgtgcaccgccgtgagggtgacgaacgcgagccttgccgacgtgttcctggtgccgttcttcgcgtcgctgagctacaaccggcagtcgaagtcgccgcacggcggccatgggagtggcggccggagcgacaggcagctgcagggcgagctggtgaggtacctggcgaggcgggaggagtggcggcggtggggcggcgcggaccacctcgtcgtgccgcaccacccgaacagcatgatggacgcccggcggcggctcagcgccgccatgttcgtcctctccgacttcggcaggtacccgccggacgtcgccaacctgaggaaggacgtgatcgcgccgtacaagcacgtcgtcccctccctcggcgacggcgactcgccggggttcgagcagcgccccgtcctcgcttacttccagggcgccattcataggaaaaatggtggaagggttcgtcagaggctgtaccagctgatcaaggacgagaaggacgtccacttcacctacggcagcgtccgtcagaacggcatcaggcgcgccaccaaggggatggcctcctccaagttctgcctcaacatcgccggcgacaccccctcctccaaccgcctcttcgacgccatcgtcagccactgcgtccccgtgatcatcagcgacgacatcgagctccccttcgaggacgtcctcgactactccgccttctgcgtgttcgtccgcgcctccgacgccgtcaagaggggcttcctgctgcatctcctcagggggatctcccaggaagaatggacggcaatgtggaggaggctgaaggaggttgcacaccacttcgagtaccagtacccttcgcagcctggtgacgctgttcagatgatctggggagctgtagctcggaagatgcatttggtgaagctgcaacttcacaagcgtggtagatatcagaggacattttctgaatcataaaaggttagggtagcaaagcatggaggagattcagagctataggttgcagtttttgatcaataattttcatgtggctggtaaagttctatggtcattttgcaatctaagttgcaaggactatgtgcagccagtctttgtccaagaggtaattattagacagttagttataaattatattattcttatt

SEQ ID NO: 8568 - DNA, 1711 bp, Oryza sativa
  ref <308>: DATABASE ACCESSION NUMBER: AK105916
  ref <309>: DATABASE ENTRY DATE: 2002-08-28
gacggagaagtagtttgggaaggtgttttctctcactcaatctcccagcaacgaatagcaacctaggttcccatcgcaactgaccgatccccagccgccgccgccgccgccgccgccgctcaaggaagcgcatcagatggcatcgccgtcgctcagggacgccgtgggcggcctcgaccgcgaccccttcgtctccctcctcgggaagctcatcggcgagtcccgccgcctgcagaacgacccgccggccctcgtcccgcaggaggacctcgtggcgcagcacgtggtcgacgcgctcctcccggtgtccatggagaccgggggcggcccgctcgtcgtgcggaaggtgagctacgccgagggccggagcaacgtcatcgtcgagtaccccggcaccgtccccggccgcgccatctccttcgtcggcatgcacatggacgtcgtccccgccaaccccgacgaatgggatttcgatcccttctcactaacgtttgacagtgaagacaaggacaaacttaggggccgtgggacaaccgactgccttggccatgtggcgctggttgctcagctcatgaggagacttggtgaggtcaagccggtgctgaaacattcggtcattgcggtgttcattgccaatgaggaaaactcacttatcactggcattggtgtcgatggccttgtgaaggatgggttgctggataagctcaagaatggacccttgttttggatagatacggccgataagcagccttgcatcggcaccggtggagtgattacatggcatctgaaggcaattgggaagctattccacagtggcctcgcacataaggccataaatgccatggagttaaatatggaagcactgaaagaaatacagactatgttttacaacgatttccctccacatgagaaagagaagctctataagtttgctaccccatctacgatcaaaccaacaaaatggagctatcctggtgggggtctgaatcaaattcctggagaatgtacaatttcaggggatataaggttgactcctttctacagcacgacatctgtagtgaagaaattacaagagtatgtacatgatataaatgagaacattgaaaagcttcctactcgtggtccggtatctaaatatgttcttcctgatgaaaacctccgaggaaggcttgagatcactattgatgaagatattatgaatggggtggcctgtaatctcgagtcgcgaggctttcaagcattatgcaaagcaactgaggaaattgtcggccacgtggaaccatattccattactgggagtctgcccctgattagggaattacaggatgaagggtttgatgttcagactgctgggtatggcttactcaagacataccacgcaaagaacgagtactgtctattttcagatatggcccaaggctttcaagtatttctgagcatcatttcacagttggaagcagatgtttgagtcttgttttagggaggaaaaaaatgagcgttcactggtacttattcctgttacttgttgctctaataaaggcactcacagtgcaagctacccaaaatgaggaacctcaggctaaggccacacctcctctcccacggtgcaaagatgctttagggtgttcttagtttttcatgtaaacccttgtcatcttctattctagtcctcacatgttttcaaacaacataacatacaaaatttaccact

SEQ ID NO: 8569 - DNA, 1587 bp, Oryza sativa
  ref <308>: DATABASE ACCESSION NUMBER: AK105917
  ref <309>: DATABASE ENTRY DATE: 2002-08-28
tagtcatatttcatcagttcctcgtaagaacagagaactcgagaggttgcgcttcagtgccgcgaagaaaggacgagctattccaccctcccggtcggtgcgtttgcgatgaagaagacggtggttctctaccccggcctcgccgtcggccacctgaaccccatgatggagctcgccgacgtcttcctggaccacggctacgccgtcgccgtggcgctcatcgacccgtcggtcatggagaacgaagccaacctcgccgccgccgtcgcccgcgccgtctcctccaagagctccaccatctccttccacacgctcccgggcatcccggaccctccctcgctcgccttcaacgatcagttcttcaagaactacttcgacctcgtgcgacgccacaacgagcacctccacgacttcctccgctccgtgcggggcctccatgccgtggtcatcgacgcatcgtgcgcccatgcccatgaagccgcgaggaagctgggagtccctgtcttgatgttctacccgtccaacgccggccacctcgccgttaacttgcaggctcctctgcttgttgacgggttcaagaagcatctgggaggagatagtactagtcctgtcgagttcttgggtgttcgacccatgtcggcttctcacttggctggcctttttgggccgattagcgaggtgaacaaggatttcgaggccatgatttttgccggtgcgcgcatgaaggcggagttcgacggaatcctgatcaacacgtccgtgtcgctggaggagcgggcgctgcgagctctcgccgacccgcgctgctgccccgacggcgtggtaatcccgccggtgtacgccgtggggccactggtcgacaaagccgccgccgccgccggtgatgagagcagccgacatcagtgcctcgtgtggctcgactgacaacccgaccgcagcgtcatgttcctctgcttcgggagcatcgccgacgcatgtgaacagtccgaccagcagctgaaggagatcgccgccggcctggacaagtccggccaccgcttcctgtgggtggttcgggcaaccagcacccaacacctcgacgcgctcctaccggaggtgttcttcgcaagaaccagcggccgcggcctcgtcgtcaacagctgggtgccccagccgagcatcctccgccaccgcgccaccgccgcgttcgtgacgcactgcgggtggaactcggtgctagaggggatcaccgcgggggtgccgatgctctgctggccgctgtacgcggagcagaggatgaacaaggtgctcatggtggaggacatgggcgtcggcgtggagatggagggatggctggaagggctggtgaccgccgaggaggtggagacgaaggtgaggctggtcatggagtccgagcatggaaggaaggttagagagcgtgtcgaggcgcacagagatggcgtggccatggcctggaaagatggtggctcgtcgcgtgtcgcgtttgcccgtctcatgtctgaattactcaacgtgtaaggttgaaaatagtatggaatttcccaattgtatcttactactccgttcaaaaatataataatttttcac

SEQ ID NO: 8570 - DNA, 1071 bp, Oryza sativa
  ref <308>: DATABASE ACCESSION NUMBER: AK105918
  ref <309>: DATABASE ENTRY DATE: 2002-08-28
atcaaagcacactagctcacacagtgaggtagcatagctagctaagccagcatggtctttaagaagaacgccatgtcttcctcggttctcttcctcgccgcgctgctgctgctctcgtccagctccatgagcagcgcggcacggtggctcgaggaggagtacccgccgcaccccaccgtgccggagttacccaagccggaggtgccgccgcaccccgccgtgccggagctgcccaagcatgaggagccgccgcaccccgtcgtgccggagttgcccaagcacgaagagccgcctcaccccgtcgtaccggagcttcccaaacctgagctgccgccacaccccgtcgtgccggagttgccaaagcacgaagagccaccacaccccgccgtcgtgccggagttgcccaagcacgaagagccgccgcaccctgccgtcgtgccggagtttcccaagcacgaggagccaccacaccctgccgtgccggagctgccacacccagctgtgccggagataccgcacccagccgtgccggagcttcccaagcacgaggagccgccacaccccgtcgtgccggagctgccaaagccggaggtgccacacgccgccgtgccggagttgcccaaacctgagctgccgccacaccccgccgtgccggagctgcctaagcacgaagagccgccgcaccctgtcgtgccggagctgcccaagcacgaggagccgccgcaccccgtcgtgccggagctgccgaagcctgaagagccgcaccaccccgaggtgccggagcatgaacagccgccgaagcctgagagccattaccccgaggtgccgatggccaagccatgatcggatggcgatgcagagattattgatcgggcccatcatatcgcatcctgaataatcatgggtttatttgtatatgtgtgtatgatatgatcatgtaaactgtggtgtttgctaggaatgtgtgagtgatgcttgatgtttcagccatccagttgttcttgttcttggaggatgtacttgcgtgtgctacgcttatatctatgcacacatcatctacccatgtaccat

SEQ ID NO: 8571 - DNA, 1139 bp, Oryza sativa
  ref <308>: DATABASE ACCESSION NUMBER: AK105919
  ref <309>: DATABASE ENTRY DATE: 2002-08-28
aggagtagaaaatagtagaaacatctctaaccagcaaagaacaggagccacacgaatctaatggccaccgctttccacaccatcgccgccgcccgcccccgccttcctctcgctgcgttcgcttgcctctgccccggcccccgccccgccaccagaaagcttagcctcacctccacggcggtctccaccatagactccgcgcccgctagttcgtcggacgccaagaagacgaccaccgtcttcgtggccggctcgacgggccgcaccggcaagcgggtcgtggagaagcttctggagaggggcttcggcgtggtcgccggcacgacagacgtgggccgcgcccgcagaagcctgccccaggacccaaacctccagctcgtgagggctgacgtcatggagggcacagacaagttggtcgatgcgatccgtggcgccgacgccgtcgtctgtgcgacggggttccggcggtcgttcgatccctttgctccatggaaggtggacaactttggcacagtaaaccttgttgaagcatgccgcaaggctggggttacaagattcatactcgtaagttccattttggtcaatggggctgcgatgggtcaactgttgaatccagcatatactgtgctcaacttgtttggtttagtgctggtcgcaaagctgcaggcggagaaacatatcaggtcatcaggaataaattacaccattataaggcctggaggcctgactgaacaaccaccaacagggaatatagtcatggagccagaggatacactttacgagggctccatatcgagacagcaagtcgcagaagtagctgtggaggcattgttatgccgagaggaatcttcctacaaagttgtcgagattgtcacccgagctgaagctcacaatcgtcctctcaaggatctgtttgcttctattaagcaaagctgagtaacggagcacaactgaacaagttgttccggccctgaacttcaaagggggctagcattattccagaaattgtatagtgatgtgtcagggtgttcatacctagttaggaaaaatagttgtcctaatatagtgatttaatgttctttactataaaatggaatacgcacacccacatcatcgttataaactataattctcacatc

SEQ ID NO: 8572 - DNA, 1170 bp, Oryza sativa
  ref <308>: DATABASE ACCESSION NUMBER: AK105920
  ref <309>: DATABASE ENTRY DATE: 2002-08-28
attcacattcactcgctgccaaccccaaccaccacccatggcgcctctcctcctcctcttcctcctcggcggcctctgcgccctcttctccctcgcctcctcctcgccagcgaccaagaagtgcggcgatgccaagaagcggagagaggaggagggggaggaggtggtggtggtggccaagaagaggccggaggaggagccgcggcggcctgacccggacgccgacctcgggatcgtgttctccacgttcgaccacgacggcgacggcttcatcacggcggcggagctggaggagtccctgaagcgcctcggcatcgccgtgtcgtccgccgccgaggccgccgccctggtggcccgcgtcgacgccaacagcgacgggctcatcgatatccacgagttccgcgagctctacgactccatccccaagcggcgcaagagccaccagcagcacccgctcccctccaccgccgccgccgacgaggaagccgccgccgctgacgaggagtatgaagcagaggaggaggagagggacctgagggaggcgttcgacgtgttcgacggcaacaaggacggcctcatctccgccgaggagctcggcaccgtgctcgagtccctcggcctccgccagcacggcggccgccccgccgtcgccgagtgccgcgacatgatccgcctcgtcgacagcgacggcgacggcatggtcagcttcgaggagttcaagcgcatgatgaccgtcgtcaaggcctagcaccaaggcgggcaatctccaacttctatcaaattcaaattcaaaaaccaaaattcggagcggattcgcaaaggcaagtaacctcaatttgttcttggacacgacgaggctcgcagatcgatcggcgggagagagaaatcaaagcaaaaaatcaattgtttgtgagtggagttgaagactaaccagcttcttcttctcgctcgctttgtgtttcttcccacctgttcttgatcactttctttggttttttttctctcttttttgcagtctaattaacctcgtaattcagtgcctgttttgactgacaagtttcaaatatatgcatgtaaatattagttcctgctacctactgtcaggttattaatttgtccaaaagaaacagtggctgaaatggaaaggtttaattgatattattagctgtt

SEQ ID NO: 8573 - DNA, 1474 bp, Oryza sativa
  ref <308>: DATABASE ACCESSION NUMBER: AK105921
  ref <309>: DATABASE ENTRY DATE: 2002-08-28
acggtgctcgttctgctcctcgcctgcgcggcggcgcgcgccgccgccgccgtcgtcaccgacgggctgttgccgaacggcaacttcgaggagggcccacccaagtcggacctggtgaacggcacggtggtgcgcggcgcgaacgccatcccgcggtgggagacgtccgggttcgtggagtacatcgagtccgggcacaagcagggggacatgctgctggtggtgccgcagggcgcgcacgccgtgcgcctcggcaacgaggcgtccatccggcagcggctcgccgtgaccaggggcgcctactacgccgtcacgtttagcgcggcgcgcacctgcgcccaggcggagcagctcaacgtgtcggtgagccccgagtggggggtgctccccatgcagaccatctacggcagcaacgggtgggactcgtacgcgtgggcgttcaaggcgaagatggacgaggtggcgctcgtcatccacaacccgggcgtggaggaggacccggcgtgcggcccgctcatcgacggcgtcgccatcagggcgctgtacccgccgacgctggccaaggggaacatgctcaagaacggcgggttcgaggagggcccctacttcctccccaacgcgtcgtggggggtgctcgtcccgcccaacatcgaggacgaccactcgccgctcccggcgtggatgatcatgtcgtccaaggccgtcaagtacgtcgacgccgcgcacttcgccgtgccgcagggcgcccgcgccgtggagctggtggggggcaaggagtcggcgctggtgcaggaggtgcgcaccgtgcccgggtggacgtaccgcctgtcgttcgccgtgggcgacgcgcgcgacgggtgcgcgggctccatggtcgccgaggcgtacgcggcgagggcctccatcaaggtgccgtacgagtccaagggcaccggcgggtacaagcgcgccgtcctcgagttcgccgccatcgccaaccgcacccgcgtcgtgttccagagcacgttctaccacaccatgaccgacggctcgctctgcgggccggtcatcgacgacgcctccctcgtcggcctccgcaagaagacggccggccggcggctgctcctgtaagacgaacggccgcgtggcatcgaacgccgtcgcattccctccattctatgaatatatgaatacaaggcgcggttaaacttgggggcagttggcacgaccaaagttgggtgctaaaatgggtagtattgctaggctcgtttttttggttttggtgtgtactctggtatatgtacgcgtgtgcgcgcgttgcatggttatactttggagctgcgctcgtttggtgttttgttgtgaagaggagaggtgatacgtggtgcaaggtctgtcacaaggggtttggttgatcaacttaaccggaggtgccaacctaaacgcaccatcagacattatgaatgggaagcattactagtgctcacttttttat

SEQ ID NO: 8574 - DNA, 1190 bp, Oryza sativa
  ref <308>: DATABASE ACCESSION NUMBER: AK105922
  ref <309>: DATABASE ENTRY DATE: 2002-08-28
atcacaagctcacaagttcacaacccaacacccaaaagcaaaagaaaagcagcaaccaaagatgtgcggcggagcgatccttgcggagctcataccgagcgcgccggcggcgaggcgcgtcacggcgggccacgtctggccgggcgacgccaacaaggccaagaagaagggcgcgcgcgccgacgacttcgaggccgcgttccgcgacttcgacaacgactccgatgacgaggagatgatggtggaggaggcggaggaggaggaggcgacctccgagcacaagccgttcgtcttccgcgccaagaaggcggcggcggcggcgtcgagcaggcgcaggaagccggcgcagtacaggggcgtgcggcgccggccgtgggggaagtgggcggcggagatccgcgaccccgtcaagggcatccgcgtctggctcggcaccttcaccaacgccgaggccgccgcgctcgcctacgacgacgccgcgcgcgccatccgcggggacagggccaagctcaacttcccttccgctaccacccctgacacccgcaagcgcggccgcgccaccgccgccgccgccccggccgtcaaggcgaccccggtcatcaacctcgtcgaggaggaggacgaggaggaggtcgccgccgccatggcgtccatcaagtacgagcccgagaccagcgagagctccgagtcgaacgccctcccggacttctcctggcagggcatgtcggcctccgacgagttcgccgtcgccgcggcggcgctgtcgctcgacagcgacgacgacctcgccaagaagcgtccgaggaccgagccggaggacaccaccgactccggctccggcgacgacaccgacgcgctgttcgacgcgctgctgttcgccgaccagtacaaccacttcaacggcggcgcctacgagtccctggacagcctgttcagcgccgacgccgtgcagaccaccgccgccgccgccgccgccgaccagggcatggggctctggagcttcgacgacggctgctgcctcgtcgacgtcgaggccagcttgtccttctaggctctagccgtcgtctccggcgaccctgtgactcgatcttgtaccatgtcatgtacatagaagagtggttttgccaagcaagcatgtgttcgtcctggttcctttcggtaatgaaaaattatgtgaggcttctcgttct

SEQ ID NO: 8575 - DNA, 1674 bp, Oryza sativa
  ref <308>: DATABASE ACCESSION NUMBER: AK105923
  ref <309>: DATABASE ENTRY DATE: 2002-08-28
tcttctgggacaccgtcggcgagaacctcaccaagcgcgtccgcgagaggatgctcgccgccgtgctccgcaacgagatcgcctggttcgacatggaggacaactccagcgcccgcatcgccgccaggctggcgctggacgcccagaacgtgcgctccgccatcggcgaccgcatctccatcatcgtccagaactcggcgctcatgctggtggcctgcaccgccggcttcgtcctgcagtggcgcctcgcgctggtgctgctggccgtcttcccgctggtggtggccgccaccgttctgcagaagatgttcctcaaggggttctcgggcgacctggagcgggcgcacgcgagggcgacgcagatcgcgggagaggcggtggcgaacgtgcgcaccgtggcggcgttcgggtcggaggcgaagatcgtggggctgttcgaggcgaacctggcggggccgctccggcggtgcttctggaaggggcagatcgccgggagcgggtacggggtggcgcagttcctgctgtacgcgtcgtacgcgctggggctgtggtacgcggcgtggctggtgaagcacggcgtgtcggacttctccaagaccatccgggtgttcatggtgctgatggtgtcggccaacggcgccgcggagacgctgacgctggcgccggacttcgtgaagggcgggcgggcgatgcaggcggtgttcgaggcgatggaccggaggacagagatcgagccggacgacgtggacgcggcggcggtgccggagcggccccggggggaggttgagctgaagcacgtggacttcgcgtacccgtcgcggccggaggtgcaggtgttccgggacctgagcctgagggcgcgggcggggcggacgctggcgctggtgggggcgagcgggtgcggcaagagctcggtgctggcgctggtgcagcgcttctacgagcccaactccgggcgggtgctcctggacggccgggacctgcgcaagttcaacctgcggtccctgcgtcgcgccatggcgctggtgccgcaggagcccttccttttcgcggccaccatccacgacaacatcgcgtacgggcgcgagggggcgacggaggcggaggtggtggaggcggcgacggcggccaacgcgcacaagttcatatcggcgctgccggaggggtacgggacgttggtcggggagcgcggggtgcagctgtcgggcgggcagcgccagcggatcgccatcgcgcgggcgctggtgaagcaggcgcccatcctgctgctggacgaggccaccagcgcgctggacgccgagtcggagcggagcgtgcaggaggcgctcgcctcctcctctggctccggccgcaccaccatcgtggtggcccaccgtctggccaccgtccgcaacgcccacaccatcgccgtcatcgacgacggcaaggtggcggagcagggctcgcactcccacctgctcaaccaccaccccgatggctgctacgcgcgcatgctgcagctccagcgcctctcccactcccacgttgcgccgggcccctcctcctcaacaacaacacacggcacctagtattcgttttgatacaacaacatgttcttcttttgctgtgtgttcttgctgctgctgctgctagatgttctaagaatgaattaatgaaatgaattactatactgct

SEQ ID NO: 8576 - DNA, 1293 bp, Oryza sativa
  ref <308>: DATABASE ACCESSION NUMBER: AK105924
  ref <309>: DATABASE ENTRY DATE: 2002-08-28
ggacgcgcaccaatttaaaggcggccgagatcgagccaaacgagggaaccgagccgagcgccaccacctcccacctcacgcactgcccagcctacctcagtgtacgcgcgcgcccgtgtactcgccgccgccgccgctgccgcttcagggacacgccaagaatctgcgggcgcggctgcttcgcttccacaccgcgcgggttagcggcgcgtttcgcgagcaaaggaagtgtatcgtgctattttctataatctggttgtggttgttggaaagatatttttgctaaagttttgatatcatcgtcgtagtttggatggcacccttggttattttggtgggtttatcgagctctggatgccgaactcgcctatgcttcatcaaaacggaagtataactggtgctacaaaagttccctcattgaaaaagaaagttaacaaagtcaagcattcttccaaagcttgattatgtttttttgaggctgaagggggagcatagaatttcatctggcatgcagatgtcaacaaatcctaaccactatccggtatttccacattcattccgcaaccaacatgtggtctcattccaaacaagcacaattgccaatggctcaggagccatcccagtttgcccagccagttcgggagggatgaacagcgatatgacattgctgaacaccacaccttcaacgattgtttcaacatcttcacccaacatgcttgctgattctaaccagagcctcaagtatgctgcaccaatggctgtggattggtcatatcctgagttacagctactgaacgacggcctccttaaatatgcaaatgaaccgggaatcatgaagtatatcaagatagcagctatgttaccagagaagacagtaagggatgtagccatgagatgccaatggatggcggcgaaaaaggaaaatacaagacgaaggaagaccgatgaacattatcttggaaaaaagacaagagatcgaaaggataaaatggtggagtcttcatgggctaccaatcgacaagttcagacaacagatattagaagtccttccaccttggcatgtaacacagttcgtgataatcaatttcagtctggaggttggtgtgtcacttatgaagttgctgtgtaattaactgtttccctttgcttttgccattttttatggtccatgtggttaacagcccaaaaatattttcactgcttttatgtgctcaggggctcagggcctcttgttctaaatgttatcatgaatggtgaagaatttccataaaattccatgcaacgttttgcgac

SEQ ID NO: 8577 - DNA, 969 bp, Oryza sativa
  ref <308>: DATABASE ACCESSION NUMBER: AK105925
  ref <309>: DATABASE ENTRY DATE: 2002-08-28
gatggagcagcggcgtcgtgtggccttggttgcttcggaatctcaccacccaacccgttcggattagatagcccgcttcctcctctctctctcagctcaccacacctcgagtcgccgccgccgccgccgctgctgctgcttacctcctccgcgccgcgcactccttgcactagcccatggcgacggctatgatggctgcgaccgccacctcgtgctcccctcgccgcgcgccggtcgtcgcgtcgtcgtccgtgcagccgcccaggcggcagcagcagcagcaaccgcggaggggattgaagcagctgccggggctcgtggcgacggcggccgtggccgtggccgcggcgccgctaccggcgctggcggagcagatggagaaggcggcgctgttcgacttcaacctgacgctcccgctgatcgcgaccgagttcctgctgctgatggtggcgctggacaagctctacttcacgccgctgggcaagttcatggacgagcgcgacgccaagatccgtgccgagctcggcggcgtcaaggacgcgtccgaggaggtgcggcagctggaggagcaggccgccgccgtgctgaaggcggcacgcgccgagatcgccgcggcgctcaacaagatgaagaaggagaccacccaggagctggaggcgaagctggacgaggggcgccgccgcgtcgaggccgagctcgtggaggcgctcgccaacctcgaggcgcagaaggaggaggccgtcaaggcgctcgacgcccagatcgcctccctcagcgacgagatcgtcaagaaggtgctcccatccgcgtaatggccgccccgccgccggccgttcttgcctcccaaacaccaaccatctctcgtaaagattttctccgtgttttatccgtgtgtatacgctgcttctcctaagaatgtaatttcagtgaacttctcgtgataagtataaaatcaatgatccttttgct

SEQ ID NO: 8578 - DNA, 1030 bp, Oryza sativa
  ref <308>: DATABASE ACCESSION NUMBER: AK105926
  ref <309>: DATABASE ENTRY DATE: 2002-08-28
gcacaatcggtcagtcgcacagataacaccgtagtatcagacaagacctcatctcagtatccagccgagaggaaatcaaaggaagagaaggggaaaagcaatggcgggcaaggacgacgacgtgaaggtgctcggcctggtgatgagccccttcgcgatccgcgtatgcatcgcgctcaagttgaagggcgtgagctacgagtacatcgaggaggacctcgccaacaagagcgagctcctcctcagctccaacccggtgcacaagaagatccccgtcctcatccatggcggcaagcccgtctccgagtcgctcgtcatcgtgcagtacgtcgacgaggcctgggcgccctcccccacgtcgccctccatcctccccgccgacccctacgaccgcgccgtcgcccgcttctgggccgcctacgtcgacgacaagatggtccctggtatggttggcgttttgagggcggcgacggaggaggagagggcggcgaaggccgacgagacgctggcggcgatggcgcagctggagaaggcgttcgccgaggtggccgcgaagaacgggaagcccttcttcggcggcgacaccgtcgggtacgtcgacctcgcgctcggttgcaacctgcactttctcgaagcgatccgcaggttgcacggcgtggcgttggtcgacgccggcaagaccccgctcctggcggcgtgggcggagcggttcgtggaggtcgaggcggccaagggggtggtgccggacgcggacgacgccgtggagttcgccaggaaagtccaggctcgtgtagcagctgctgctgcttccaccgctgccaagtgagtggaaaatcgttttcgattggatcattgggtttcttgtaataaagaaaaaatcgtgttattacagtgccattttcaagtcatggttagtttatttgtggggttattaatgtgtaaagtctggacatgtatgcgtgttatgttctctggttcatcgatcataagcagctatacagacatacagtgctagtgctattgccattgt

SEQ ID NO: 8579 - DNA, 2135 bp, Oryza sativa
  ref <308>: DATABASE ACCESSION NUMBER: AK105927
  ref <309>: DATABASE ENTRY DATE: 2002-08-28
aaggaaagactgcaaagaaaaggcctgtgtcaaggagagggtagtagcaccttgctctcctttgccttcagagaaaccggaagcaatggcgtctgctactctcctcaagtcatctttccttcccaagaagtctgaatggggtgccacccgccaggctgccgcccccaagccggtgactgtctccatggttgtccgcgctggtgcctacgacgatgagcttgtcaagaccgcgaaaaccattgcatcaccaggaaggggtatccttgccatggatgagtcgaacgcgacctgcggtaagaggcttgcgtcaattggccttgagaacaccgaggccaaccgccaggcttaccggaccctccttgtcaccgcaccgggcttgggacagtacatctccggtgctatcctcttcgaggagactctgtaccagtcaactgtagatggcaagaagattgtcgacatcctcactgagcagaaaatcgttccaggtatcaaggtcgacaagggtcttgtgccccttgctggctccaacaacgagtcatggtgccaaggtctcgacggccttgcctcgcgcgaggcggcatactaccagcagggcgctcgcttcgccaagtggcgcactgttgtcagcatccccaacggcccatctgaactcgccgtgaaggaggctgcctggggccttgcccgctacgccgccatttctcaggacaacgggctggtgccgattgtcgagcctgagatcctcctcgacggtgagcatggcatcgacaggaccttcgaggtggcgcagaaggtgtgggcggagaccttcttctacatggccgagaacaatgtgatgttcgagggcatcctcctcaagccaagcatggtgacacccggtgccgagtgcaaggacagggccacccctgagcaagtatctgactacaccctcaagctcctccacagaaggatcccccctgccgtccccggcatcatgttcttgtcgggtgggcagtcggaggtggaggcgacgcagaacctgaacgcgatgaaccaggggcccaacccgtggcacgtgtcgttctcgtacgcgagggcgctgcagaacacgtgcctcaagacgtggggcgggcagccggagaacgtgaaggcggcgcaggacgcgctgctcctccgcgccaaggccaactcgctggcgcagctcggcaagtacaccagcgacggcgaggccgccgcggccacatcgagggcaccgcctaccgcgccgacccggtcagcgacgaggccaagctcaaggtcaagttctacgtgcccccgttcctccccatcttccccgtcgtcggcgactactgggtgctccacgtcgacgacgcctactcctacgcgctcgtcggccagccctccctcaactacctctggatcttgtgcaggcagccgcacatggacgaggaggtgtacggccagctggtggagagggccaaggaggaggggtacgacgtgagcaagctgaagaagacggcgcacccggacccgccgccggagaccgagcagagcgccggcgaccgcggggtgtggtggatcaagtccctcttcggcaggtaggtaggtggtcgtgccagctgccatgccgtccagactccagagcttgatgccaccatgatcgtgtacattattattgcttcagttcaaaggctagttggtgaattctgttcaactcgtcggcctcggggaatcccccaagctgtgaacctgttcgttttctggattagtgtttaatgtgtccgttttgtgatgaattgtggatatctgcaaagactattgtgagttcagcgtgattgtacttagggtgtgtttggttgcaagccacactttgccacagtttgccacgcctaaggttaggcaaatttgacaggtgtttgtttgtagccacagttgtggcaagattcccctccaacaaattgggtcccacgtgtcaatggctcaaaaaagtgtggcaagattctcttaggcttagtaagttgtggctaacaatttgaccacctcaccttaggcaaagtgtggtaatttttgttggcaagtaatggtaaagtgtggctgggaaccaaacagtcccttaatttactagaagtactacagaatcagacgagtatttttgctcc

SEQ ID NO: 8580 - DNA, 1340 bp, Oryza sativa
  ref <308>: DATABASE ACCESSION NUMBER: AK105928
  ref <309>: DATABASE ENTRY DATE: 2002-08-28
cctctcgattctcaaagccaccgccgatggccgtcggcgacgacgccgctccggcggcgaccaagatctccatctccggcgcggctctcgcggcgctcctccagcgctgcggtatggccgacggcgactgcgacggcctcctctccgggcgcgcctcaaccaccccggctccgcccccttccctctccgactacgacgaccacgcgccggcccagtccgcccccgccatctccctctccatctccggccattcctccctctcccgcccctcctccctctccgatcccctcggtcgcttccacccctccgcctccgccgccgccgccggccccgcctcgatcggcttcttctcctcccgccgccgcaccgccctccgcccctccatgcgcgagctctccctcgcccactccctctccaaatccctcgcgctcgcccaccccctcctcttcctcctcgtctccccttcctcccccaacctctctacccactcctacgaccaccgcgccttcctcctcatcggctcccgcctcgtcccgacctcgctccatgtcgtcaatgtcggccccgtcttccgggaccagtaccactccttcgctcccgactctccgatgccgtggctgccgcttgcacagcactcctcgtcgtcgtcggcggcagcaggcgacgcgcacaccattggggagcagaatgcggtggatggggtggtggatgggttcgggctagggaagctgcaggggatcctgggctccgtggcggggcaggcggcggagatggatggcatgtatgcaggaatgctcaggaggctggagaagcttgccagggaggtggagaagagcaatctccttgtgcttaagcaggaaaatcggaacctgctgttgaggttcagatatgcagggttggaatagcgccaatgttttatcggtcttagcaaggatgtattatgctctacagactactggagtacaatatatcagcttcgcttaagctatctctaaaggtttgttaagacttaagagtcgccacgggatttgtatcattgtatggaagaaggcgcatggtaccgaggatgagaacgggggaacatcatgcggaaaactggtgtggaaggggcgcgtttgtgttgtttggtatgcgatggacaaggctgagctgcatcaccatcaaggcatcaagacctgcatttgttttctttgttgtcatcatccttgctggactcgtccttatttgttattcccacgatgttatttgttcagttcttgctatattggacaaaggctcttaatgacgatgtttggcaggaggctcaggtgggcccaccgagactcgcacaggtcaaagtc

SEQ ID NO: 8581 - DNA, 1243 bp, Oryza sativa
  ref <308>: DATABASE ACCESSION NUMBER: AK105929
  ref <309>: DATABASE ENTRY DATE: 2002-08-28
gcgagccgccaccaagccaaaccagagcactccgccgccgcgccatggcttccccgtccccgtcctcctcacctctccacccgcagcatcaacaccagcacccgcttcccccgcacccgcagccccagtaccaatccccaccgcctccgatgccgccgccgccccccgcggcgccactcaaagctatcgatctggaggtgaccgtcgtctcgggcaagcacctgaagaacgtcaactggcgccgcggcgacctccgcgcctacgtcgtcgcctacctcgacccttcccgccgcgccgccacccgccccgacgacgtcggcggctgcaagccggcatggaacgagcgcgtcgtcctccctctcccgccccacctctccccgcacgatccgtcgctgctcctctccctcgatgtcttccactccaagccctccgattcgcccaagccgctcgtcggctccgcccgctcccctctccgtgacctcctcttctcaaccaaccctaaccctagccccgattcccccgcctccgcgctgatcaccctcccgctcctccgcccctccggccgcccacaggggaagctccgcatccgcctcgcccttcgcgagcgctccccgcctcctcccgagccgcagtatccgcctccttcctcctccccctactatttcccaccccctccgcctcccgcatactcggccccgcctccgcctcaatacggctcggagcagtactaccgttccggtgggtactactctgcaccaccgccaccgcctcagtatgagtacaccgcagggccctctgccccggtggaatacaacaggcaatatgatcctagagcggggagtgggagtggaaatgggaggtatggagtaggcactgggattgcagtgggaacggtgacgggggcccttggagggcttgcaattgatgaaggtgtgaaatacaaagaggagaagtcggcagatcgggttgaagataaggtagtgcctgctggaagagatgacgactcaagggggtaccgtgagtattgattataggagttcatgtgggtgaggatgcactgtgagttggtccttctccatccctgccaatgtgggaataaaattgcagtgtggtattatgcttcgctctcttgtatatattttcttcagtgttgtgaattatcatgttacttatgcttatggcttgcgtcttatgacaaatttggtgtgtgttatgaatgttctattatcatatttaaaactgt

SEQ ID NO: 8582 - DNA, 1781 bp, Oryza sativa
  ref <308>: DATABASE ACCESSION NUMBER: AK105930
  ref <309>: DATABASE ENTRY DATE: 2002-08-28
gggtcacggtgtcagctgcgcccgcaccggcgacgagcacgacttcttccgggcggcgcagctcggcgacctcgacgccctggccgccctcctcgccgccgacccttccctcgctcgccgcgccaccctctacgaccgcctctccgtcctccacatcgccgccgccaatggccgcatcgaggtgctctccatgttcttggatcgcggggcgccgccggacgcggtgaatcggcacaagcagacgccgctgatgctcgcggccatgcacggcaagatcgactgcgtgctcaagctcctccaggccgacgcaaatatcttgatgttcgactcggtgcacgcgaggacctgcctccaccacgcggcgtactacggccacgtcgactgcctgcaggccatcctcgccgccgcgcagaccacgccggtggccgactcatggggtttcgcccggttcgtcaacgtcagggacgaccacggcgccactccgctgcatctcgcggccaggcaggggcggccggggtgcgtgcaggtgttgctggagaacggcgccattgtgtcggctttgacaggatcatatggcttccctggaagcacgtcgcttcatttggctgctcgtagcgggaacttggattgcatcaggaagctgcttgcctggggagctgatcggctccaaagggattcggctgggagaattccctattctgttgcgctgaaacggaaccatggagcatgtgcagctttgctgaaccctacatcagcagagcccatggtgtggccatccccacttaagttcatcagtgagcttgaaccagaagctaaggctctcctggaagcagctctgatggaagccaacagggagagggagaagaaaatcctgaatggcacaaagtactccctgccatccccttcgcccggtgatgacagtgccgatgacgatgcatgctcagaggtgagcgacacggagctttgctgcatctgcttcgaccaggcttgcaccattgaggtgcaagactgtggacatcaaatgtgtgcaccgtgcacgctggcactgtgctgtcacaacaaacccaatccgacgaccctgacaccgccctcaccggcctgcccattctgccggggcagcatctcacggctggtggtggcccaaacaaggtctgcttgtgatcctgacaagccgtcatccctgcagctcacccggaagcggtcgcgtcgatctcacaacctcagtgagggcagcagcagcttcaaagggctaccttcggccatgggctccttctcaaagcttggccgtggctcgagccgcatggcggacagtgacagcagcaacctggacaagcctgagcacgatctatgaaagcagaacaacgcacggacaatcgccgcatcatcctcaaaacatccgttggtatcagaaacccagatgaaaatccaatggctaatttggagcaactttgatccatggaaagttaaatagatagggactaaataagtagaaccctccactccccattgtctgtgtgcccaccctatttttcggcttgccgggttaagcttagcatatgcataggagctctgaaagaccagagagagagtgagtgagtgagtgagagcaattcatcatcaatcacacagtgagtgttggtgtggttaagggatgcatgcagcagagatgtgaaacggggttcatgttcgtcacctctaaagttagcctgccatggcatgtgagctctgcgccggcctgacccctcctcctctgtgtgatgaatcatgcccccatttttggc

SEQ ID NO: 8583 - DNA, 1509 bp, Oryza sativa
  ref <308>: DATABASE ACCESSION NUMBER: AK105931
  ref <309>: DATABASE ENTRY DATE: 2002-08-28
gaagatggcgccaccgtgcggccgcgtggtcctcttcccgatgccgtacccgggccacaccatccccatgttccacctcgccgccgtgctccgctcccgtggcttctccatcaccgtcctccacaccgagctcagagcgccggacccggcggcgcatccgccggagtaccgcttcgtggccgtggccgacggcaccccgcccgagctcgtggtgtccgaggacgccgcggcggtcctgacttcgctcaacgagacctgcgccgcgccgttcgcggaccggctggccgcgctgctcgccgaggagggcggcgtcctgtgcgtaatcgccgacgtgatgtggtacgcgccggcggcggcggcgccagagctcggcgtgccgctgatgctgctgatgacgagcagcgcgtcgagcttccggacgttcatggagtaccctcttctgcttgagaggggcttcttgcctgtcgacgatgcccaaaaggacactctagtcgacattctcccccctttccgagtgaaggatctacagcgcattgacacgacaaacctctacagcttcgccaacgtgcttgccaatgtagtcgccgcagcgcggctgtcatcagggctcatactcaacaccttcgacttcatcgagggtgacaacatttgcaggatccgcgacgagctctccatccctgtgtttgccattggtccactcaacaaactcataccactcgtcggaagaagcagctttcttcccccagattgtgattgcctgaggtggcttgacacacaagcccctagctctgtgttgttcgtgagcttcggcaccatggccaccattgatgctcaggagtttctggaggtggcatggggcttggctggcaccaagctaccatttctatgggtggttcggccaagccttgtccgtgggttacggctgcattccagtgagctccctagtgatttgcaggaagagatcaatggtcgaggcaggatagtctcttgggcaccgcaagaaaaggtactaggtcacccttctgtccgcgcattcatgacgcataatggatggaactcgacgatagagagtatatctgaaggcgtgccgatgatatgtaggccatgttttggagatcagatgggaaatgcgaggtatgtttgtgctgtttggaggttgggtgtggagatggaggtagggagtgttctgcagagggcaaaagttcaaactgctgttgagaaattagtgaatggggaggaaggtcaaaatgtgaaacagagaatgagaaatctgaggatagaagctgaaaaatgtgttagtaaaggaggatcatcagacaccggtctacgtaacttagtagattcgatattatcttttggaaaatgttgattatctgcacagatataacgtagtcatgtcttcgactaatacttgtagcctctttaaatgcggatggtattgagaagatcattaaatgttgtaatatctagttttcatctactactaataaccaggttcaaaaattgccg

SEQ ID NO: 8584 - DNA, 1258 bp, Oryza sativa
  ref <308>: DATABASE ACCESSION NUMBER: AK105932
  ref <309>: DATABASE ENTRY DATE: 2002-08-28
aaactcgcgcgcgcgcgcgagcggcgggcggcttttccgtgttcggtgtttcggtgcggcggccatatatacgcgcgcgcgctcgcgtactacgtgcagacgacggactagtgcgtgcgtgcgtgacgcgagaggctgagaggagcattttggcccttggtttctttcggttcttctgctcttttttgctggcgatggggtggtcgtcgtcaagggctatgctcgtggcgcgcgctgtggccttggcggtggtgttcctcgcggcggaggctcagctgtcgccggggtactacaacgcgacgtgccccggggtggtgtccatcgtgcgccgcggcatggcgcaggcagtgcagaaggagtcgcgcatgggcgcctccatcctccgcctcttcttccacgactgcttcgtcaacgggtgcgacgcctccatcttgctcgacgacacggcgaacttcaccggggagaagaacgccgggccgaacgccaactcggtgcgcgggtacgaggtcatcgacgccatcaaggcgcagctcgaggcctcctgcaaggccaccgtctcctgcgccgacatcatcacgctcgccgcgcgcgacgccgtcaacctgctcgggggcccgaactggacggtgccgctggggcggcgtgacgcgcgcacgacgagccagagcgcggcgaacaccaacctgccgccgcccggcgcgagcctcgcgtcgctcctgtcgatgttcagcgccaagggcctcgacgcgcgggacctcaccgcgctgtcgggcgcgcacaccgtcgggtgggcgcgctgctccaccttccgcacgcacatctacaacgacaccggcgtgaacgccaccttcgcctcgcagctgcgcaccaagtcctgcccgaccaccggcggcgacggcaacctcgcgccgctcgagctgcaggcgcccaacaccttcgacaacgcctacttcacggacctcctcagccgccgcgtcctgctgcgctccgaccaggagctcttcggcagcggcgccggcaatggcaccacggacgcgttcgtgcgcgcgtacgccgccaacgcgacgacgttcgcggcggacttcgccgccgcgatggtgaggctgggcaacctgagcccgctcaccgggaagaacggcgaggtacggatcaactgccggcgagtgaactcatcatgaacatgaaatggattcttgatgtacgcttcgtgaacgccataaacttattatcaaatcttgtttttaccaaaagcaaatgg

SEQ ID NO: 8585 - DNA, 1282 bp, Oryza sativa
  ref <308>: DATABASE ACCESSION NUMBER: AK105933
  ref <309>: DATABASE ENTRY DATE: 2002-08-28
atcacaggcaagctagctggctcaaactggtcatcgtcagaaatggctctcaagaattttcttgtccttggtgtcttcctggctgccctgctcatgttctccctggatgatgtagctcatgcaagagagctcactgaagccaatgaatctgagggaaagaatgtaaaacctacgggagggccaggggttgaggatcaaaagtggggaggtggatactaccctggtggaggatatggatatggtggtgggtacggtggagaatatggtcgtcctgggtacggtggtgggtacggtggaggatatggtcatcctgggtatggtggtggctacggcggtggatatggacgtgggtatggtggcgggtacggtggttcgggtggaggatatggcggtggatacggaggtggatacggaggtggatacggtggtggtgggggttacggtggaggatatggtggtggtggttggtactaagaagcagttgaatggtacataatatgcatgtttgtgtgtgctaaataagtcatgtatgacagatttgcttgaacatgtaattgcttcaatgtaattgcttcaatggtggtgtagtagtgagagctttgaagacccacctttgtttggtatttatgtttcatgcatgtattttagaatctagtattgtaatatggcatgtttgaaagtaattaaatctcgtccttctttcaaaaaaaatcccccacacacttgcacctcgtctcgctctcgcgccaagaaagcaccgcgagttcttcttcttcatcctccatggccacaaccgcgtcgctgtccgccgtcgcggcgcggccactgtccgtggcctggctcaagaagcccctgtgcgcctcgttccagcccgtgccgagggcgaggccggcggcggcggcgaggatggccgtgagggcgtcggcgtcgatgaaggagagggcgacggccgggctgacggccgcggccatggcggcggcgatggtcctccccgacgtcgcggaggccgcgcagggcagcctgacgccgtcgctcaagaacttcctcctcagcatcgtgtccggcggggtcgtgctcgtcgccatcgtcggcgccgtcgtcgccgtctccaacttcgaccccgtcaagcggacctgatcttctccttctccttcattcacagacacgcctcgatcgctgtcttgtatcgagatcatcgtctctttgcagtgttgttttggagattctgtaaactgatttacgatatggagatatggagttgttgatggttaattgcttccat

SEQ ID NO: 8586 - DNA, 1101 bp, Oryza sativa
  ref <308>: DATABASE ACCESSION NUMBER: AK105934
  ref <309>: DATABASE ENTRY DATE: 2002-08-28
accaccactgcacgaaaaccatctgatcgatcgatcaaaaaccgaatccaatccaacagtgttacacacacacacgatggtttcttcttccaatcccgggagaacgccgccgttggtggcggcgattgtgtgctccgtgctgctgctcgccggcggcgccgccggcaacttctaccaggacgtggacatcacttggggcgacggccgcggcaagatcctcggcaacggccagctcctgacgctgtcgctggacaggtcgtccggctccggcttccagtccaagaaccagtacctgtacggccgcttcgacatgcagatcaagctcgtccccggcaactccgccggcaccgtcgccaccttctacctgtcgtcgcaggggtcgcagcacgacgagatcgacttcgagttcctggggaacgcgagcggcgagccgtacacggtgcacaccaacgtgtacagccaggggaaaggcggccgcgagcagcagttccgcatgtggttcgaccctaccaaggacttccacacttactccgtcctctggaacccctcccacatccttttctacgtggacgggacgccgatacgggagtacaggaacacggaggcgacgacgggggtggcgttcccgcgggcgcaggcgatgcgggtgtacgcgagcctgtgggacgcggaggagtgggcgacgcagggggggcgcgtgaggacggactggtcgcgggcgccgttcacggcgtcgtaccgcgggctcgccgcgagcgggtgcacgtcgcaggacgccacggcgtgcgccaacccggggagcccgtggatgtaccagcagcagctggacagcgcgtcgcaggaccggctccggcaggtgcagagggactacatgatctacaattactgcgccgacacgtaccggttcccccaggggttaccgccggagtgcactgccaagtaggaaaaaaaaaggggcacttgaaactattttattgtagaattattctgtatctattgctgtatgtgttattgtcgtgtaaaaagtagtagagagatgggaaaaggatacgaggaagataataagtcgacgacgatggatgtataataagtttgtttgtc

SEQ ID NO: 8587 - DNA, 1648 bp, Oryza sativa
  ref <308>: DATABASE ACCESSION NUMBER: AK105935
  ref <309>: DATABASE ENTRY DATE: 2002-08-28
gtgctaataacctcctccactcgatcacctcctcttccccgccaagctcagcctgcctatccactcccactcccatggcggcaatcgatctctcctcccccgcaagatcatcgccggcgcctctctccccgcgccgcggctccctgcacctcctcctccgacgcccgcgccgacccaccctccgctgctccctcgacgccgcgccaaagcaggctcaggctcagggcccgcccgcggcggtcgcggcggaggaggcgcccaccgcgcgcaaggagtgctatggcgtcttctgcaccacctacgacctcagggcggatgagaagacaaagtcctggaagagcttagtgaatgttgctgtgtcgggtgcagcagggatgatatcaaatcatctgcttttcaaacttgcctctggtgaggtttttggaccggaccaaccaatagcacttaagttgttgggctctgaaagatcaatacaagcacttgaaggtgtggctatggaattggaggattcactgtatccattgctaagggaagtcagcattggtatagacccttatgtagtcttcgaagatgcagaatgggctcttcttattggggctaagcccagaggtcctggaatggagcgatctgccttactagatatcaacggtcaaatctttgctgaacaggggaaagcacttaactccgtggcatctcggaatgtgaaggtcatagttgtcgggaacccctgtaacactaatgcattgatttgcttaaagaatgctcccaacataccagcaaaaaactttcatgcattgacgaggttggatgaaaatagagccaagtgccagctggcactaaaagcgggtgtattttatgacaaagtatcaaatatgactatttgggggaaccactcaacaactcaggttcctgattttttgaatgctaaaattaacgggagaccagtgaaagaagtcattaaagacacaaagtggttagaagatgaattcaccaaaacagttcaaaagcgtggaggagtactcatacaaaaatggggcagatcttcagctgcatcaaccgccgtttccatcgtggatgctattaggtcccttgtaaatcctaccccagaaggcgattggttctctactggggtttatacgactggaaatccttatggcatagcagaggacatcgtgttcagtatgccatgcaggtcaaagggtgatggtgactacgaactagttaaagatgtggcaatggacgatttcctctgggaacggataaaaaagagtgaagctgaattgctcgccgagaaaagatgcgttgcccatcttactggagagggcaatgcattttgtgatcttcccggagacaccatgcttccaggagaaatgtagaatcattgttgcggtaaccctggcttgtgttatttcacaggggttttcgacggaaacacacacacacaaactactagtagctgagagaaacaactgcttgcagattacttgcagcagttatttatacgtatgtataataagtatttatttaataaggatgccacagaaatttcaactatgttgccgagtttgtacactataatacaatcaaccaaatgcaatgcggctgatcgtatagcatatacttctggattttcccagttttgcaaagg

SEQ ID NO: 8588 - DNA, 1240 bp, Oryza sativa
  ref <308>: DATABASE ACCESSION NUMBER: AK105936
  ref <309>: DATABASE ENTRY DATE: 2002-08-28
acacactctcttctcttgtctcgctgtggctcgctggacacaacacacacccacacccactcccccactctctctccggttcatgtcctgctgctccccatgtcgcccccactcgagctcgactacataggcctctcgccgccggtgcccgccgccgccgatgccgccgccgacaacgacctgaagggcaccgagctccgcctcggcctgcccggctcccactcgccggaccgctccccgcccgccgccacgctcgaccttctccccgctgccaagggcgccaagcgcgggttctccgacgaggcgcgtccgctgccggcgtccgccgccgccgccgccgccgggaagggcaagaaggcggcggccggcgaggaggatgaggatgcggaggaggaggacaagaaggtcgccgccgcgccgcaggcgcctgctgccaaggctcaggtggttggatggccaccaattcgcagctaccgcaagaacacgatggctactaaccagctgaagagcagcaaggaggatgctgaagcgaagcagggccaggggttcctgtacgtcaaggtcagcatggatggtgccccctacctcaggaaggtggacctcaagacctacaagaactacaaggacctgtcaactgcgcttgagaagatgttcattggcttcacaactggcaaggatggcttatctgagagccgcaaggatggtgaatatgtgctgacttatgaagacaaggatggagactggatgcttgttggcgatgttccatgggagatgtttgccaactcttgtcgcagactcaggatcatgaaaggttcagatgcaattggacttgctccaagggcagttgataagtccaaaaaccgcaactagaatggtttctgccccacagtcaaaagcaagatggagatcaaatgactgtagggaattttctgaaaaccaagaagtctaacagttttaagatggagtctgccttatggtctgtactacatggtttgctattgtgaaagttaaaaaaaaaggtgtcttgttatgttagcttcgccaaatctcctagggacataaactctatttgattgtgcccaagtctttgtacgtgtgttaatgctattcgtgtaaatggtttggacaccatgtgctactgctatgattgagcacccctacctactttgcaaaatgttgtcaatgaactgtttgttcgctacataaatgttcaatgaagcttgcaaatgtattgtccacc

SEQ ID NO: 8589 - DNA, 1101 bp, Oryza sativa
  ref <308>: DATABASE ACCESSION NUMBER: AK105937
  ref <309>: DATABASE ENTRY DATE: 2002-08-28
acatctccacctcccgcggcatcaccactcactccaccgccgcgcgcttgttcgcagctcttcctcctcctcgcattgcaggcggctgccgactgaatcaagatgaagcggaccatcatcgtcaaagtggacttggaatgcgagcgctgctatgccaagatcgacagggtgctcaccaggatcagagacaagggtgagttcgtcatcgacgacatcgagttcgacgtgaagcacaacaaggtgatcgtgtcggggcccttcgacccggacaagctcgcagacaagctctgctgcaaggcgtgcaagatcatcaaggagatcgagatcgtcgacctcccgccgccgcctccgccgccggcgccggagccggagccggagccacccaagaaagaagagccccagccaccgcctcctaaggaggaggagaagcccgagccgccgccggcggtgattatcgtggagccaccggcgccggcgcccgagccggagcccgagccgccgaagaaagagccgccgccgccgccgcctcccaagcaggagccatgcccgccgccgcccaaggtcgtcgaggtcccttacccctggccctacccctacccgttcccgtcgtggccgtccgactgctgctgccaccatggccacggcggctgccactgctgctcctgcgggaaggcgccggagccggcgccggcgccggcgcctccgccgccgcagtacatcccctgctacccgccgcagcagccctacccttgcggcgcctccgccgccgcagtacatcccctgctacccgccgcagcagccctacccttgcggcggctacaggatcgtctgcgaggaggacccctcctacgcctgcgccatcatgtgacctaatgatcatcgttatcttctccttaattaccttctccgatctctcctcctgtataattaagcacgcaccgtacagacacgcacatatatactacacatcctacacgtactcctctttatctactcttatacactccctctgtaactgttgatttccttacgtcccatttagaggtgaaaaataagtaagtatatatcgtcattaataaacagtcccaagtaaattcatgt

SEQ ID NO: 8590 - DNA, 1166 bp, Oryza sativa; identical to SEQ ID NO: 2082
  ref <308>: DATABASE ACCESSION NUMBER: AK105938
  ref <309>: DATABASE ENTRY DATE: 2002-08-28

SEQ ID NO: 8591 - DNA, 1429 bp, Oryza sativa
  ref <308>: DATABASE ACCESSION NUMBER: AK105939
  ref <309>: DATABASE ENTRY DATE: 2002-08-28
gctgctttgagctccatcaccagctgagctgcgaggaagagagagtgcgagagtgcgcggcagcggcagtgtagtgtcagtcactgggtgtgcgcttgcttgcttggattgaggatgacgtcatcgatgtcgccggcgccggcgccggcgtacgcgcaggtgatggaggacatggagaaggggaaggagctggcggcgcagctgcaggggctcctccgcgactcgccggaggccggccgcttcgtcgaccagattctccacaccttctcccgggcgatgcgggcgctcgacaaggcggcggtctccgccgccggaggagaagggtcggaggtgcagagcgaggtcacctgcgggggcggggccagcgccggcgggaagaggaaagcccccgccgccgaccggaaggccaactgccgcaggaggacgcagcaatcgtccgggaattcggtggtcgtcaagaacctcgacgacggccaggcatggcgcaagtacgggcagaaggagatccaaaactccaagcacccaaagtgagtggacttgtcccgacaaaaaacaatgtgttcgagactgtacagttggatgcgttgcgcgctgacgaggagttgtttggggtatgctacgtgtacagggcctacttccggtgcacgcacaagtacgaccagctgtgcacggcgcagcggcaggtgcagcgctgcgacgacgacccggcgagctacagggtcacctacatcggcgagcacacctgccgggacccggcctccaagcggggtcccgcctcatcagcttcgtcgccgcgccggcggcgccagtagacgctgccgcggcgccgacgaccagcacgatcaccacggtcaccgcgccgggcccgctgctgcagccgctcaaggtggagggcggcgtcggctcgtccgaccaggaggaggtgctgagcagcctcacgcccggcagctccgcggcgcgcggcggcggcggcggcggcggagtcgcgggtcccttcgggccggaccagggcgatgtcacgtcctccctgcactggagctacgacgccgtcgccggcatggagttcttcaagaacgacgaggttgtcttcgatctggacgacattatgggtttgagcttttgatcaccgaagaatcatggatggacacgggccgggtaaaacgatcgaaagaagatggattccacgcgtgtgtacagaaataattagcggcagcgcggatcttaatttggaacttgcaaagatactcctaattagcctggctagattagtttgtaaattccttgttgatgtgtcgtctcagctttaagctgcagacatgctagcaagtaacaacacgattagtacgtagtaatgtggttcttgattatgagctgggggtcttaaccttttttgtgtgacaagcaagagaagaggatttgggtacaatgt

SEQ ID NO: 8592 - DNA, 1209 bp, Oryza sativa
  ref <308>: DATABASE ACCESSION NUMBER: AK105940
  ref <309>: DATABASE ENTRY DATE: 2002-08-28
acaattccgctagtccgagtcaaaacaaaatcaaattcaaattcacgggataattcaaagatgctgcttaatccggcgtcgagagaggtggccgcgctggacagcatccggcaccacctcctggaggaggaggaggagacgccggcgacggcgccggcgccgacgcggcggccggtgtactgccggagctcaagcttcggcagcctcgtggccgaccagtggagcgagtcgctgccgttccggcccaacgacgccgaggacatggtcgtgtacggcgccctccgcgacgccttctcctccggctggctccccgacggctcattcgccgccgtcaagccggagtcgcaggactcctacgacgggtcctccatcggcagcttcctcgcgtcgtcgtcgtccgaggcggggacgcccggggaggtgacgtcgacggaggcgacggtgacgccggggatcagggagggcgagggcgaggccgtggcggtggcgtcgagggggaagcactaccgcggggtgaggcagcggccgtggggcaagttcgcggcggagatcagggacccggccaagaacggcgcgcgcgtgtggctcggcacgttcgactccgccgaggaggccgccgtggcgtacgaccgcgccgcctaccgcatgcgcggctcccgcgcgctcctcaacttcccgctccgcatcggctccgagatcgccgccgcggccgccgccgccgccgcgggcaacaagcggccatatcccgacccggcgagctccggctcttcttccccttcatcctcttcctcctcgtcgtcgtcttcctcctccgggtcaccgaagcggaggaagagaggcgaggccgcggccgcgtccatggccatggcactggttccaccaccgccaccaccggcgcaggcaccggtgcagctcgccctcccggcccagccatggttcgccgccggtccgatccagcagctggtgagctaagtggcgatgtggtagtggtagtggtgatttagccatcttgtgcgactgtgcgtgatcgattgctgcttgatgggtcgagcaagttcagaacagagcatcactctctgcagaatagaagaagttcatgaacagagcaatgcactgctccaagaaatgtgacgagttccaggcaatcacgccattgttcttggatgattgcgcagcaccagaaaaaagggaaaaaaaagattgtttgtg

SEQ ID NO: 8593 - DNA, 1214 bp, Oryza sativa
  ref <308>: DATABASE ACCESSION NUMBER: AK105941
  ref <309>: DATABASE ENTRY DATE: 2002-08-28
aaagctaagctaagccagccgaacaatggagaaggccgctggattcctctcctccctcctcggcggcggcgaggaggtgccgccagagccggcggcgacggtgaggtcgatcctgatataccccatcaagtcatgcaggggaatctccgtgccccaggccccaatcacctccactgggttccggtgggatcggcagtgggtggtggtgaactccaaggggagggcctacacgcagagggtggagcccaagctcgcgctggtggaggtggagatgccgccggaggcattcgccgaggagtggcggccgaccgccgattcctacttggttggaagagcacctggaatggacccattgaagatccctctcagtgctgaacaagccataattaatgatgtctctgtatgggagtggtctggttctgcttatgatgaaggagctgaggcggccgagtggttttccagttacttcgggaacccaagtcgtctagtgcgtttcaaagaagggtcggaaatcagaccaaccaatcctgactatgctcaaggctacaaaattatgtttacagattgcttcccgtttctgatggcctcccagggttcattggatgcactaaatgaggttctgaaagaacctgtaccgatgaaccgcttcaggccaaacattttggtggatggatgccacccatactcagaggatctatggaaaaccataaaaataaacaagttaacatttcagggtgtcaagttatgcaaccgctgcaaggtgcctaccattaaccaagaaaatgggatacttggcactgaaccaacagaaactctactgacattccggtccgatgaagttctacgtccaagccacaaaaacaaacggcaggtctactttgggcaaaatttagtctgcaaggaatctctgtctgcaaagggcaaaggaaggatcatcaaggtcagcgatccggtttatgttcttgagagattcccttcttccgatgaagctccagcatgagcaaaggacatactggcagctgttcagagacctagtagtactgtagaatgctgaatttctcggcatcattgtaaattttatgctgcaacaaggcttgagaaaatgtgttttattatgtggcagaataaacagtaccatctggcactgaaaactgttgctcatacaattgatattcagtgatcatagttattcctaatatagcaaattgcatatt

SEQ ID NO: 8594 - DNA, 1645 bp, Oryza sativa
  ref <308>: DATABASE ACCESSION NUMBER: AK105942
  ref <309>: DATABASE ENTRY DATE: 2002-08-28
acgccgcacccgctctcctgtctcgaacgtacacacacgcatcccaaatggcccacgtcatggccgcctccgagctcgtcaccgccaccatcaagcgccccttccagaacgacgacgacaacagcagcaacggcaacggcaacgccgacgggaagcccaaggcgcggcgccgggaggccgacccggcggcggcgctggccgcggcgcgccacgagttcggcgagcacggcggggtgaacatgtccatcgaggcgtcggcgacgttcacggtgatggagccggacaccatgcgccgcctcttctccggggagctcggcccggagcgcggcgacctgtacatctacagccgccacttcaacccgacggtgctggcgctggggcggcagatggcggcgctggagggcaccgaggccgcgtactgcacggcgtccgggatgtccgccatctcctccgtgctgatgcagctcgtcggcgcgggggggcacgtggtggcgtcgcggtgcctgtacggcggcacgcacgcgctgctgtcccggttcctgccgcgcgcgtccggggtgcgcacaacgttcgtggacgctgacgacgaggcggcggtgcgcgccgcggtgcgcccgggggagacgcgggtggtgtacgtggagacgatgtcgaacccgacgctggccgtggccgacatcccgatgctggcccgcgtcgcgcacgacgccggcgccaagctggtggtggacaacacgttcacgcccatggtcgtctcgccggcccgcctcggcgccgacgtcgtcgtccacagcgtctccaagttcatcagcggcggcgccgacatcatcgcaggggcgatctgtgggccggcgagcctggtgaacgcgatgatggacctgcaggagggggccctgatgctgctgggcccgacgatgaacgccaaggtggccttcgagctctcggagcgcctcccgcacctcccgctccggatgcaggagcactcgcggcgcgccgccgagtacgcgtcccggatgcgccgcctcggcctccgcgtcgcctacccgggcctccccgaccacccgcaccacgcccgcctcctcgccatcgccaacccgggctacggcgccggcggcatgctctgcgtcgacatgggcaccgaggaccgcgccaaccgcctcatgcaccacctccagaacaccacccgcttcggcctcatggccgtcagcctcggctactacgagaccctcatgtcgtgctccggcagcagcaccagcagcgagatgccgcccgaggaccgcgctcgcgccggcatctcccccggcctcgtccgcatgtccgtcgggtacaacggcacgctcgagcagcggtgggcgcagttcgagcgcgcgctctcgctcatgcagcagcagcagcagcagcatcccgaccgcgacgccgccgccaagtactgcaaggtgtgacgtcacgagccccgccattgatggtgcgcattagcgacgatccgatttgttgtatctgccccgtgttgctggtttgtatatatagtttattatgtaattactagtgctacctataagtaaggtttaagctgttaaactgagtactatctgatcgctctggttcagatagttgaatggcacagctaagctgcttgttctctggg

SEQ ID NO: 8595 - DNA, 1432 bp, Oryza sativa
  ref <308>: DATABASE ACCESSION NUMBER: AK105943
  ref <309>: DATABASE ENTRY DATE: 2002-08-28
gtgttccgtccacgcttgcagcagccgcgcggacggaaggggttgtgttttcgtgggccaaatggcggaggtgtgcacccctggcgccgccgaggcggagttgtggctccccgacgagttcttggacgatgatttcttcaccgtggaggagaaggcggcggttgcggccaagagcgagagcgacgaggaggacgggttggatggcctcgcgcgacgcatggccgacctcctcgccggcgagggtggaaagggaacgggttccaaggtggaggtgatggcggggtcgccgcagtcgacgctgtgcgggttggcggcttccggggaggatagccccaacggcggtgcgtcgcagttcagctcgccgccgtcgtcgccgctggagcagccgccgacggacccttgggacgttctctccgaggctgccgggcaggttgctcgcctgcgcatgaacagcatcccggtgccccagaagccccatgcgcatgccggccatggccgcttcgtcccacctgcgagaaacccgtctccgccggtgcaagcccagaagaccgccggtgccttccagttcgcgcccaacaacaacatgctcacccaacgccaggttcaagtcgctcatttccacctcctgaagcagaggcagctgttgaagcagcaacgggagcagcagctcgccgcggcagcagcggcggcgtggggaacgcaccgcgccggcgtcggcgtcggcgcgccgcttggtctgaactcctccggctggccaccgctgcagaaggcccaccagcaggcgtcgtccgcggccggcatgcgcgccgtgttcctcagccctcccggcggcaaaacggaacgcacgggcaccggcgtgttcatcccccgccaggccggcgcccccgccgagcccaagaaaaagccaagctgctccaccgtgcttctgcccgcgcgcgtcgtgcaggccctcaacctcaacgtcgacgatcttggtgcccgtccttgctttcccggcggtttcgttctcgaccacgacgctctggtcagtcggagcaatgcaatgctcaccacccagaagcgggtgcagcaccacctccacgcggccaccgcggcgccgcctacgcttgccgctgcgcgcgaggtgaatcttccccaggaatggacatactgaggcgcagatttgcttcgttcgtctgttctaatcccagtttaatggatcatatttaagaattattactgctactattattagtgctaggtaggtgttaggctagaattaggaatggcattggcagtagcatcagtgttaggtgttcttttgtatggtgatatattggttattttggaaggtgggtgatggatgcagatcaacagatgagaaatacatggcttccgtaggttgttcagggtattgacggtgatatatccaataataagtgttcttttggag

SEQ ID NO: 8596 - DNA, 1715 bp, Oryza sativa
  ref <308>: DATABASE ACCESSION NUMBER: AK105944
  ref <309>: DATABASE ENTRY DATE: 2002-08-28
actcccacaccatcagcgagcacctagcggtcgcatcgctagctgccatctcctggtgagatccatcgagacgcccggcacgacgacgatggtgtcgcggaggttcaagcccgtggaggagtgcagctcggatgggaggtcggagcagacggtggccgccgacttcgacggcacgctggtcaggtcgcggagcgccttcccgtactacctcctcgtcgcgctcgaggccggcagcgtgctccgcgccgtcgtgctgctgctgtccgtgccgttcgtctacgtgacctacattttcttctccgagtcgctggccatcagcacgctggtgtacatctccgtggcggggctcaaggtgaggaacatcgagatggtggcgcggtcggtgctgcccaagttctacgcggaggacgtgcacccggagagctggagggtgttcaactccttcggcaagcggtacatcatcacggcgagccccaggatcatggtggagcacttcgccaagacgttcctcggcgccgacaaggtggtcgggacggagctggaggtcggcaagaacggcaaggccacggggttcatggtgaagcccggagtgctcgtgggcgaccacaagaggcaggccgtcgtcaaggagctacgcgacgcggtgcccgacgtcggcttgggcgacagggagacggatttcgacttcatgtccatatgcaaggaggcctacctcgtgacatcaaggaagtacagcgcggtgcccaagaaccagctgctgagcccactcatcctccacgacggccgcctcgtgcagcgtccgacgccgctggtggcgctcgtcaccttcctgtggatgccgttcggcttcgcgctcgcgctcctccgcgtgtacgtcaacctgccactcccggagcggatcgtcttctacacctacaagctcatgggcatccgcctcatcgtgaagggcaacccgccgcctccccccaagaagggacatcctggcgtcctcttcgtctgcaaccaccgcaccgtgctcgacccggttgaggtcgccgtggcgctgcgccgcaaggtcagctgcgtcacgtacagcatctccaagttctcggagctcatctcgccgatcaaggccgtcgcgctgtcgcgggagcgcgagaaggacgccgagaacatccggcggctgctggaggagggcgacctggtgatctgccccgagggcaccacctgccgcgagccgttcctgctgcggttcagcgcgctcttcgccgagctcaccgaccgcatcgtgccggtggcgatcaacaccaaggagagcatgttccacggctccaccgtgcggggcttcaagctcatggacccctacttcttcttcatgaacccgcggccgacgtacgagatcaccttcctgaaccagctgcccaaggagctcacttgcagcggcggcaagtcgcccatcgaggtggccaactacatccagaagacgctcagcggccagctcggcttcgagtgcaccgccataacgcgcaaggagaagtacagcatactcgccgggaccgacggccgcgtcccttccaagaacaaggagaaggaaaagaactagcgagtcacagcctcctatcgatcggagtactccgtattcgcccagccgactagtgtcactcatggcttctatctattgtttacgatttattgttgtttttcaagaagttggtaaattacatattgtttccgag

SEQ ID NO: 8597 - DNA, 1088 bp, Oryza sativa
  ref <308>: DATABASE ACCESSION NUMBER: AK105945
  ref <309>: DATABASE ENTRY DATE: 2002-08-28
aacacacctaactaccacagcttgtgaactatcaagagtgagtagtagagtttgcagtgacaacgagatgaggagatcaatcctctcactgtgcttccatttggcgcttgtcattgcattggcagcaaatgttcctgacattgccaatggacgcgtgattgaagctaaatctgatccaaagccagcagatcccaagcctaaacctgacccaacaccaaaaccacaaccagagacaaagcccagtccacagcctaaccctcaacctaacccacagccagatccaaaaccatcaccgcagcctgatccaaaacctacaccacagcctgaaccaaaacaagatcctcaaccaaacccacagccggatccaaaacaatcgccgcagcctgacccaaaacctacaccacagcctaacccaaaacaagatcctcaaccgaacccacaacctgacccaaaaccaacgctgcaacctaacccaaaacaagatcctcagccgaacccacagcctaacccgaaaccaacgccacagcttgacccgaaacaagatcctcaaccgaacccacaacctagccccaaagctgacccaaaaccaaatccaaagcctaagccacaaccggagccgagcccaaatcctaagccggagccaaaacctgaacccaaacctgagccgagtcctaaccccaagccaaatcctaatcccaagccggagccacagcctgatcctaagccagaacccaagcctcagccagagccgtctcaaccaaagctgccaccactttcaccagcaatagctataattgtgcccgggaactgagtagacttggttgtttgctacgtatgatcccgcatacttttggtatgtactattgctctagtgactatttgtgtgtttttcgtgtgttgttcactagtgtgtccatgtggctatctatgtgttttcttaatgccgttgcatatgagcaggcgtgcttcttataataaagcatacatacatacatacatacatacatacatacatatatatatacacgtgtgttatgtatgtgcgtacataccatcaataaaaagagcatgtatccctgtgtgtcaat

SEQ ID NO: 8598 - DNA, 1367 bp, Oryza sativa
  ref <308>: DATABASE ACCESSION NUMBER: AK105946
  ref <309>: DATABASE ENTRY DATE: 2002-08-28
aaacaactcgccacaagttagctcaagctcgagacaaagagggaaccaacagaaaccaccacggcggcggcggcgcgacacatcaccggagagatggcggtggcggtggcggcggcggcggcggtgagcaggcaatggacgagggtgcggacgctggggcgcggggcgtccggggcggaggtgttcctggcggcggacgacgcgtcgggggagctgttcgccgtcaagtccgtgggcgcggcgggcgcggcggcgctgaggcgggagcagggggtgatggccgggctgagctcgccgcacgtcgtcccctgcatcggcggacgcgtggggcgcgacgggtcgtaccagatgttcctcgagttcgcccccggcgggtcgctcgccgacgtggcggcgaggtgcggcgggcggatggaggagtgcgccgtcggggagtacgcggtggacgtggccagggggctcgcgtacctccacgggatggggctggtgcacggggacgtcaaggcgaggaatgtcgtgatcggcggcgacggccgggcgaagctcgcggacttcgggtgcgcgaggtgggcggattcgggccggccgatcggcggcacgccggcgttcatggcgcccgaggtcgcgcgcggggaggagcagagcccagccgccgacgtctgggcgctcggctgcacggtcatcgagatggccaccggccgcgcgccgtggagcgacatggacgacgtgctcgcggcggtgcaccggattggctacacggaggccgtccccgaggtccccggttggctgtccgccgacgcgaaggacttcttggccaggtgcttgcaacggcgccccattgaccggagcacggcggcgcagctgctagaacacccgttcgtcgcctccgccgccggcgacggcaagccggaggccgcgaagtccaaatgggtgtcccccaagagcaccctggacgccgcattgtgggagtccgacaccgacgaggaggaagacgacgagctgtcgcagagcacggccgagaggatcggttcactggcctgcgccgcctcgtcgctgccggattgggactccgacgacggctggatcgatgtgatctccacccctaccgaagaatcctgcgagaccaccacctcgccggccgacgaggagacgacgactgacctcaacggcgacatcagaaccgcagaattcgagcttccccacattgacgtggacagcggcaatggcaacaccacccacaatgtgggagaagccaatgctcagcacattatttccccttcgaatttagttttcgatcaagtactatgtaaaacaccattttgtaacaaacacattgcaattgaattcataccatgttttctcctcac

SEQ ID NO: 8599 - DNA, 1111 bp, Oryza sativa
  ref <308>: DATABASE ACCESSION NUMBER: AK105947
  ref <309>: DATABASE ENTRY DATE: 2002-08-28
gctcagttcactcttatcagtgaattagaacatatacttgtttccttgacagctcgttatttagcatggctaggtcactcgctgctctcctactccttctggtcgccgccgcgggagacagccatgccgcgtcgccagcggagatgtactggaagatcgcgctcccgacctcgccgatgcccggcgccatccgcgacctcatcaacccggcgagctcagcggggtcagcttcgaaggaggacacggtgggcaacgtgttcttcctcgagaaggacctcttcccgggctccaagctgacgctccacttcacccgcgccaccgccggcgccgcgctgctcccccgcggccgcgccgactccgtcccgttggccaccgaaaagctcccggagatcctctcccagctctccgtccccgccggctccccggccgccgacgccatgagtgcgaggccgcgccgctcgccggcgaggcgaagcaatgcgcgacgtcgctcgagtccatggtggagttcgccgcgtccagcctcggcacccgcgacgtgcacgccgtgtccacggaggtcgacagggcagggccggcgccgaggcaggcgtacagggtggaggccgtgaggcccgtgccggtgtccggcggcgacatggtggcgtgccacggcatggcctacgcgtacgccgtgttcgggtgccacacgaccacggcggcggcgtacacggtggcgctctccggcgccgacgggactagggcggaggcgctcgcggcgtgccacgccgacgcggcgccgggggtggcggaggcgtacaagaggctcggcgtggcgcccgggagcgtgccggtgtgccacttcttgccacaggacgacatgctctgggtgcgtaactgagcgcgcgcgcgtgaaaggggataaaaattgtgtgatctcaagatagctccttcctatattttggagctatatgcgtatcatgtcttatcatatgtgtatgcgacgacccgaaatgccactactatacttgtggcagcatgttaataagtctgcatgtacgattcatcgatccatacatcttgtatgacaatgttacacggttgtatacaccactacgtaaaatattttctt

SEQ ID NO: 8600 - DNA, 1791 bp, Oryza sativa
  ref <308>: DATABASE ACCESSION NUMBER: AK105948
  ref <309>: DATABASE ENTRY DATE: 2002-08-28
ggtgcaattctcgaacgacccaaaaccttgaacaattcaatccttcttcagagagattcagagttgggttcagaatatatatacactagcacgagtgaatagtagaggagacagagatagatagagaggagagatgggcagcgaggtgaagccggcgaagcttggcctccggcgacacctcaacgccggcttcttcgccggcttcctcctcgtcctcctcacctacgtcatcgtctcgcagcagttcgccatggaaactcccacagctgtcactagcagggcgccgaggattgacgagaatgagtcggtgaccaaggctcgcgttgaaacagagaagaagagggagcaggagtggcagcggccaaaggacacgtctggtgccgtctcagcagaagagttctccaaaagagactcgacaaatgccaaaccgattgagaacggcaaggtagtgtgcggctcgaacgggttctactccgacacctgcgacgtcgacggcgacgtccggatcaacggcacggctctctccgtgacccttgttccggcgagccgccggtcggagcgccgccgcgagtggaagatccagccgtacccgcgcaggaccgtgtccggcatcgcggaggtgaccgtgacgcggcagcaggaccgggccgccgcgccggcgtgcacggtgacccacggcgtgcccggcgtcgtgttcgcgctcggcggcctgaccggcaactactggcacgacttcagcgacgtgctggtgccgctgttcgtggcgtcgcggcggtacggcggcgaggtccagttcctggtcagcaacatccagccatggtggctgggcaagtacgaggccgtcgtgcggcggctgtcgcggtacgacgccgtcgacctcgaccgcgacacggaggtccggtgcttccgccgcgtcgccgtcgggctccgcatgcacaaggagttcagcgtgaagccggagctggcgccgggcgggcagcggctgacgatggcggacttcgccgcgttcctccgcgacacctacgcgctcccccgcgccgcggcggcgggcgcgaggcggccgcggctggtggtgatccggcgcgcgcactaccggaagatcgtgaacatggacgaggtggtgcgcgcggcggaggcggcggggttcgaggcggcggtgatgtcgccgcggttcgacgagccggtggaggaggtggcgaggaaggtgaacgcgttcgacgcgatggtgggcgtgcacggcgccgggctgacgaacgcggtgttcctgccggcgggggcggtggtgatccaggtggtgccgtacgggcggctggagcggatggcgagggcggacttcggcgagccggtggcggacatggggctccggtacatggagtacagcgtcgccgccgacgagagcacgctgctggagatgctggggccggagcaccaggtggtgaaggacccggaggcggttcaccggagcggctgggacaaggtcgccgagtactacctcggcaagcaggacgtccgcatcaacgtcgcccgcttcgccgccacgctcgccgccgccttcgatcaccttcgaccatcacatagctagtgagtgagtgagtgagtgacacagatgttacagttgctgatagatatgatacaccacctcattggtcgcaatttggtacagaatgttcaacccatccttttttgtttttgttttggctcagtatatccatcatcattggtggagcgtatgaacatgcacattgattgtattgatttggtagagtacatgtatgtcaccgaattcatgtt

SEQ ID NO: 8601 - DNA, 1397 bp, Oryza sativa
  ref <308>: DATABASE ACCESSION NUMBER: AK105949
  ref <309>: DATABASE ENTRY DATE: 2002-08-28
aagcagaagcagctgtactttgaactggccatagtgtagtttgattcactctttgatagcttttgccgtttagctaattgtacagtgttgtacgtctgcattttgttgcattccactgtgacaagcatgaaggccgccatggctgatgaattcaagattgtgctcacgaggaaggagaggttcctctacctcgccaaagccgtcgtgttccttgtgatcttcgcgctcggcgtggtcgccggcctatggacggccaccgggcctcgccggtgctgcagcacatacaccaacattcttttcccgagcaccaccgtgtaccgctaccgcggcggcggcggcggtagcttctcggagttcgtggctccgacgcggctcatgcacgatatgacggacgagcagctgttctggcgcgctacgatggcgccggcgtcgtccggtggcgcgtacccgttccagcgcgtgcccaaggtggccttcatgttcctcgccggccgcggcgtcctgccgctggcgccgctctgggagcgattcttccgtggacacgagggcctcttctccatctacgtccacgcgccgcccgggatggtgctcaacgtgtccgacgactcgccgttctacggccggcagatccccagccaggaaacctcatggggatccataacactcatggacgccgagaagcggctgctggcgaacgcgctgctggacttctccaacgatcggttcgtcctcctctccgagagctgcataccggtgcagagcttcccggtggcgtacggctacctcaccggctcgcgccacagcttcgtggaggtctactaccacaagggcaagacgtgccgcggccggtacagccgccgcatggagccggacatcacgctgccgcagtggaggaagggctcccagtggttcgagctcaggcgagacctcgccgtggccgccctgacggacgccaggtactacccgctcttccggcggcactgccggccgtcgtgctaccccgacgagcactacctcccgacgttcgtcgccatgctccacggcgcggacaactcgaaccgcaccgtgacgtacgtcgactggtccagaggcggcgcgcacccggcgacgtacaccgccggcgacgtcacgccggagctgatcctgagcatcaggaggagcgaggtgccctgcatgtacaactcccggccgaccacggcgtgcttcctgttcgcgaggaagttctccgccgacgcgctggagccgctgctcaacatctcatcgacggtgatgcagtactagttctcctcgccgccaactattgtttgtaacataggatttcacacaacatattcaggtaccaattgtacctgtcaagcaaaaggggaaaaagaagaagaaagtgttcattttgcggg

SEQ ID NO: 8602 - DNA, 1635 bp, Oryza sativa
  ref <308>: DATABASE ACCESSION NUMBER: AK105950
  ref <309>: DATABASE ENTRY DATE: 2002-08-28
agaccagggagagatctgctgctgctgctctccaaccaatcaaccatgggctccgtgtcaccaccagcgccggaggaggacgcggccgccgtggagtcggccggggcggcggcgcgcatgttctggcatgagacaaagcggctgtgggccatcggcacccccatcgccatcggcaccatcaccaactacgccatcagctccgtgaccaccatgttcatcggccacctcggaaacctccccctcgccgccgcctccgtgggcctctccgtgttcgccaccttcgccctcggcttcctcctgggcatgggcagcgccctggagacgctgtgcgggcaggcgttcggagccgggcaggtgtccatgctgggcgtctacctccagcgatcctggatcatccttctcggcgccacggtcctgatggtccccgtgtacgtgctggccgagccgctgctcctgctggtggggcaggacccggaggtggcgcgcgcggcggggcggttcacgctctacatcctcccgggcgccttcgccttcgccgtgaacttcccgtcgggcaagttcctccaggcgcagagcaaggtgggggtgctggcatggatcggcgtggcggggctggcgttccacgtgggcatcacctacctcgcggtgtcggtgctggggtgggggctcccgggcgcggcggcggcgtacgacgtgtcgcagtgggcgtcgtcgctggcgcaggtggcctacataatggggtggtgcagggaggggtggcgcgggtggtccatggcggcgttccacgacctggccgccttcctccgcctgtccatcgagtcggcggtgatgctgtgcctcgagatatggtacctgggcctcatcaccgtcctcacgggggacctggacgacgcccagatggcggtcgactcgctggggatctgcatgaacatcaacggctacgagggcatgatcttcatcggcctcaacgcggccatcagcgtccgggtgtccaacgagctgggctccgggaggcccagggcggccatgcacgccgtggtggtggtggtggcggagtcgctgctcatcggcctcctctgcatggcgctcgtgctcgccttcagcgacaagctggcgctcgtctacaccagcgacgcccacctgctccgcgccgtctccaggatcgctggcctgctcggggtcaccatggtgctcaacagcgtgcagccggtgctgtccggtgtggccgtcggcggcggatggcagggcctcgtcgcctacatcaacctcgcctgctactacctctttggcctccccgtcggctaccttctcggttactacttcaacctcggagtcggggtacccattcctattcctattcctacctaccttccttctcttttcttttttccactaatataatggagtactatgcatatgtactgcgaaattatatataattgatcacagaaaaaaattaaaattaaattggctgcagggggtttggggtggcatgctctgtggagttgcacttcaaacactcattctactctttgtagtctggagaacagactggaaggcagaggtaatatatagtattattacattttcgttttcattttaaatggaaaaataaagagagttgctcatcatgat

SEQ ID NO: 8603 - DNA, 1196 bp, Oryza sativa
  ref <308>: DATABASE ACCESSION NUMBER: AK105951
  ref <309>: DATABASE ENTRY DATE: 2002-08-28
accaccaccaccactctcgctcgctccccccactcccactcgcctgaaaccctagcaaggagctcccggcggatggacgagggaggcggcgctggtgctgcggctgccgccgccgggaacgcggcgggggcggcggtgcaccacaacgcgcggtccgcggaggacgtcttccgcgacttccgcgcgcgccgcgcgggcatcgtcaaggcgctcaccaccgatgtggagaagttctaccggcagtgcgaccccgagaaagagaacctgtgcctttatggattgcccaatgagacctgggacgtgacccttccagctgaggaagtacctcctgaacttccagaaccagcactgggcataaactttgctcgtgatggaatgatcgaaaaagattggttgtcgctggttgcagttcatagcgatgcatggctactgtctgtagcattttactttggggctcgctttggatttgataaggaagccaggagacggctcttcaccatgattaatggtcttcccactgtatatgaagttgtgacgggaattgccaagaagcaaacaaaagtctccaacggcagcagcaaaagcaacaagtccaaccctaaaccatcgaagcaatccaattctaacagcaagcctgcaaagccacctcagccaaaagatgaggaagacagcggcccggaaggcacagaggatgaggaccaggcttacatgtgtggcgcttgcggagagacttacgcgaacggtgagttctggatctgctgcgacgtctgcgagaagtggttccatggcaagtgcgttcggatcacccctgcgaaggcagagcacatcaagcagtacaagtgccctggctgcagcagcaagaggagccgagaatgaccacgggaggctcccggttgacatgttttagaatcgttaggaattggtgaagaggcggagaaccgcttcacccgcaacctgctgccgtgcagcagcagacccggcgtgcaggccggttgttgtattagtttcagtcattgtgttgtacccgacatggtaagtagctattgtatttagcaggcaggcaggctaactgctgtggtcgtagtgtgatgtgaacctctatgagagagttggatactctcggtgttcagtagtgattaagttatgggttagtgtgtatgattctatgataactgcctcccctttcatgaggtttc

SEQ ID NO: 8604 - DNA, 1449 bp, Oryza sativa
  ref <308>: DATABASE ACCESSION NUMBER: AK105952
  ref <309>: DATABASE ENTRY DATE: 2002-08-28
aacggggcgttttggttaggagataattagacatgcggggggtttcggtggtgctcgtgctgatagcttgttggctgtgtggctgtccggtggccggcgaggcagccttcgccggcgacatccgtgtcgacctgacgcatgtcgacgccgggaaggagctgccgaagcgcgagctgatccggcgagccatgcagcggagcaaggcgagggcggcggcgctgtccgtggtgaggaacggcggcgggttctacggcagcatcgcgcaggcgagggagcgggagcgggagcctggcatggcggtgcgcgcgtcgggcgacctcgagtacgtgctcgacctcgccgtcggcacgccgccgcagcccatcacggcgctgctggacaccggcagcgacctcatctggacgcagtgcgacacgtgcacggcctgcctccggcagcccgacccgctcttctccccccggatgtcgtcgtcgtacgagcccatgcggtgcgccggccagctctgcggcgacatcctgcaccacagctgcgtgaggcccgacacctgcacctaccggtacagctacggcgacggcacgacgacgctggggtactatgccaccgagcggttcaccttcgcgtcgtcgtccggcgagacgcagtccgtgccgctcgggttcggctgcggcacgatgaacgtcggcagcctgaacaacgcctccgggatcgtcggcttcggccgcgacccgctgtcgctcgtgtcgcagctctccatccggcgattctcctactgcctcacgccgtacgccagcagcaggaagagcaccctccagttcgggtccctcgccgacgtcggcctctacgacgacgccacgggccccgtccagaccacgccgatcctgcagagcgcccagaacccgaccttctactacgtcgcgttcaccggcgtcacggtcggcgcgaggcggctgcggatcccggcgtcggcgttcgcgctgcgccccgacggctccggcggggtgatcatcgactccggcacggcgctcacgctgttcccggtggcggtgctcgccgaggtggtgcgcgccttccggtcgcagctgaggctgccgttcgccaacgggagcagccccgacgacggcgtgtgcttcgcggcgccggccgtggcggcgggcggcgggaggatggcgcggcaggtggcggtgccgaggatggtgttccacttccagggcgccgacctcgacctgccgcgggagaactacgtcctggaggatcaccggagggggcacctgtgcgtcctcctcggcgactccggcgacgacggcgcgacgatcggcaacttcgtgcagcaggacatgcgcgtggtgtacgacctggagcgggagacgttgtcgttcgccccggtggagtgctgagagggcaccacgtgtcaactgaaaatcactgtagttatttttttttctttctaag

SEQ ID NO: 8605 - DNA, 1249 bp, Oryza sativa
  ref <308>: DATABASE ACCESSION NUMBER: AK105953
  ref <309>: DATABASE ENTRY DATE: 2002-08-28
gatattttacgaggttcaagtggagtggtgtggtggaggtggagctggtggcaagtctgtgtcaaccatggcatcgccctccggcgccggcaagccaccggccgtcctcctcctccggccggtggaccagcccttcgccgtcgcgctgcgcgagcgctaccgcgtgctcgacctcctctcctccggccagcctctcccggccttcctcgccgccgccgccgccgcgcctgacccgccgcgcgccgccgtcgtcatggggggcggctcaatccgcgccgacgcggcgctcttcgacgccgtgccttccctgcgctgcgtcgtcagcacggcggccggcgtcgaccacatcgacctcgccgagtgcgcgcgccgcggcgtcgtcgtggccaactccgggacggtgtactccggcgacgtggccgaccacgccgtgggcatggtgatcgacgtgatgaggcgcgtgtcggcggcggagaggtacgtccggcgagggctctggccggtgcagggggactatcctctcggctccaaggtaagcggcaagcgtgtgggcatcatcgggcttggcaacatcggttcactgatcgccaagaggctggaagcattcggctgcgtcatctcctacaactcaagaaaccccaaacgctcgctcccctacacctactacgccgacgtccgcgccctcgccgccgactccgacgtgctcgtcgtgtcgtgcgcgctcaacagcgagacgcgccacatcgtcggcggcgaggtgctggacgcgctcggcgagggcggcgtggtggtgaacgtggggcgcggcgcgaacgtggacgaggcggcgctggtgagggcgctgcgggaggggaggatcgccggcgccgggctggacgtgttcgagggcgagcccaaggtgtcgccggagctgagggagatggagaacgtggtgctgacgccccacgtggcggtgtggacggcggagtcgaggtccgacctacgtgaccacacggtggccaaccttgacgccttcttctccggcgacccgctgctcacgccggtcatgcttccctaacccaccacctacatactccacgtacagaagtgaactccgataatactccagtatatacagtgatgggtatatatatgtacagtgtaacccaaataagcggcccatcagaggtccattggcccaaaagaggctttatactgtactggaataagttcatccgaggtcccttaactttacaccgaatttaatttt

SEQ ID NO: 8606 - DNA, 1695 bp, Oryza sativa
  ref <308>: DATABASE ACCESSION NUMBER: AK105954
  ref <309>: DATABASE ENTRY DATE: 2002-08-28
gtgctgcctttatattagttccaccaagaagacacaaattccagcagagatagtccgatagagattagcatggcgtcgacagccgtgtcccggcacgtggtcgcggtgccgtacccgggccgcggccacatcaacccgatgctggccgcgtgccgcctcctcgcggccgcggacggcgagctcaccgtcaccgtcgtcgtcacggaggagtggcacgggctgctggcctccgccggtgtgcccgccacgctgccgccggcgggccgcgtccgcctcgccaccatccccaacgtcatcccctccgagcacggccgcggcgccgaccccgccggcttcttcgaggccgtggacgccaagatgggggtggccgtcgagcagctgctcgaccggctggagcggaggcccgacgcgatcgtggccgacacctacctggcgtggggcgtgccggccggcgcggcgcgcgggatcccggtgtgctcgctgtggaccatggcggccacgttcttctgggcgctctacaacatccacctctggccgccggtggatgaccgggagggcgagcaagacctaagccgcaagtccttggagcaatatgtcccaggctgctcatcagtcaggctctctgacgtcaagatcttccggtcttgggaacggtcaatgaagctgacaacggaggcgttcgtcaacgtgcgtaaagcgcagtgtgtcctcttcacttccttctacgagctcgaaccctgcgccatggacagaatcacgcaggcggttccgttcccggtgtacccagtcggaccttcaatctcggacatgccgctggacggcggcgccggcaagatcgacgacgaggagcaccgtgcctggctggacgcgcagccggagcgctccgtgctgtacgtctcgttcggcagcgtcgtctccatgtggccgtcgcagctggaggaggtcgccgtggcgctgcgcgacagcgcggtcaggttcttctgggtggccagggacagcgccagcgccggtgacctgcgacggatcgccggcggcaacgggttggtggtgccgtggtgcgaccagctgggcgtgctgtgccaccgctccgtcggcggcttcctcagccactgcgggtggaactcgctgctcgaggccgtgttcgccggcgtgccgctgctcgcgctccccgtcgtctgggatcaggtggtggacgcccgcgtcgtggccgacgagtggaggatcggcgtcaacctgtcggagcagaggagggaggaggacgacggcggcggcgtcgtcgtcggcagggacgcgatccgtgccgccgcggcgaggctgatggatccggacgacggcgagagccgagagatgaggaggagggccgcgctgctgcgcgaggcttgccgtggcgccgtgcaggacggaccggacggtggctcgtcgcgccgctcgttgaacggattcgtgaaagatctcgccgacgggagacttaatttccagtgagagaacagcgtgaattaaaccaaaaaagtaaataaatgtactagcgtgaatgcttgttgtgtatcagtatccacgtggagaataatggaagagaaaattttactttaggtaatctgttgtacgaggcaaacatcatccctgttctatcgaaacactctcttagattaccagcctaagaggcttttacttatggcagatacccttttactgacc

SEQ ID NO: 8607 - DNA, 1638 bp, Oryza sativa
  ref <308>: DATABASE ACCESSION NUMBER: AK105955
  ref <309>: DATABASE ENTRY DATE: 2002-08-28
attctcgaatccgccctcccgcactcaagcgtcttcccctccacccaactccgccatggtcttcaccaagtttgctccgctcctcgcggtcgccgccctcgcggcctcggacgtctcggccatgccgcgcatcgactcgggcgtgcaccgcgcgctgcgccagcaggccacggtcaacctcgtcctcaccatgaagacgggtgtcgacagcgccgtcaactcgatcaaggaggccgactttgcgacccgcgggcagaagatcgcgtcgctcgtgacggcgctcaagctgaacgccaagacgtcgcagtcggctgtggatgcggcgcttgctccgcacgaggccggcggcgcgtcgcctttgttcaagtcgattgagaccatctggatcacgaaccagaagatcatcaagggcgcgacgctcgagctcgtggagaagctcgcgggcgtggccgacattgccgagatccgcgaagagaaggtgatcccgacgcccaagtttgagctcgcgtcgaacgccacggaggcgacggtgctcgcgaacgagtggggcgttgccaagatcagtgcgccgagcgtgtggtcggccggcgtgacgggccagaacgttgtcattggttcgctcgacacgggcgtgcgcgccacgcacacgtcgatcgccgcgaacttccgcagctcgttcaactggttcgacgctacgcccgccaacaagaaggcggcgtacgacgatttgggccacggcacgcacacgatcggcacgatggtgggcagcaacggcctgggcgtcgcgcctggcgccaagttcatttcgtgcaaggcgtttacggaggacggcggcgaagagtcgtggctgctcaactgcgcgcagttcctgacgtgcccgacggacgccagtggcaaccaggactgctcgcaggcaccaaaccttgtgagcaactcgtggggcggtggccagggcgacaagttctttgcggcggccatccaggcgtggcgcgcggccaacattatcccggtctttgcgaacggcaactcgggtccgacctgtaagacggccaactcgcccgctgacgacccgaacgtcatcgcggtcggctcgaccgactcgagcgacaagctgtcgagcttctcgagcaagggcccgtcggtgactggcctcgtgaagcccgaggtgtcggcccccggctcgagcgtgcgctcggcatggagcactggcgacacggcgttcaacacgatctcgggcacgtcgatggccactccccatgtctcgggcgttgtcgcgcttctgctgagcaagaagccgacgctcacgtacgaccagatcaagtcggctctcacgaccacgaccgacacgtcgacgctcaaggcgtctggctcgacgtgcggtggcacgacggacaagcagttcccgaacaaccagtacggcttcggccgcgtgaacgccttcaacgcatacaagtcgatcgcctaaggtgtttttgaaacgagtgatcgtgtaagttgcgtggtgccagtcggcggaataatagtagtagtactgtagcatcgacagtatcgaccacggggctctagtgtgcaggaagggaaccgtatctgcttccagccacgagagactctaatattaaatgtttgtttttcccttcc

SEQ ID NO: 8608 - DNA, 1057 bp, Oryza sativa
  ref <308>: DATABASE ACCESSION NUMBER: AK105956
  ref <309>: DATABASE ENTRY DATE: 2002-08-28
aacacacctagctaccacagcttgtgtactgtcaagagtgagtagtagagtttgtagtgacaacgagatgagatcaatcctctcactgtgcttccatttggcgcttgccattgcattggcggcaaatgttcctgatcacattgccaatggacgcgtgattgaagctaaatctgatccaaagccagcagatcccaatcctaaacctgacccaacaccaaaaccacaaccagagacaaagcccagtccacagcctaaccctcaacctaacccacagccagatccaaaaccatcaccgcagcctgacccaaaacctacaccacagcctgaaccaaaacaagatcctaaaccaaacccacaaccggatccaaaaccatctccgcagcctgacccgaaacctacaccacagcctgacccaaaacaagatcctcaaccgaacccacaacctgacccaaaaccaacgccgcaacctaacccaaaacaagatcctcagccgaacccacagcctgacccaaaaccaacgccacagcctgacccgaaacaagatcctcaaccgaacccgcaacctagccccaaagctgacccaaaaccaaatccaaagcctaagccacaaccggagccgagcccaaatcctaagccggagccaaagcctgaacccaaacctgagccaagtcctaaccccaagccaaatcctaatcctaagccggagccacagcctgatcctaagccagaacccaagcctcagccagagccatctctgccaaagccaccacctctttcaccagcaatagctataattgtgcccgggaactgagtagactttttgctacgtatgattccgcatagttttggtatgtactattgctctagtgactatctatgtgtttgtcgtgtgttgttcactggtgtatgtgtccatgtggctatctatgtgttttcttaatgctgttgcatctgagcaggcgtgcttcttataataaagcatatatatgcacgtgtgttatgtatgtgcgtacatatataccatgaataaaaagagcatgtatccctgtgtgtcact

SEQ ID NO: 8609 - DNA, 1380 bp, Oryza sativa
  ref <308>: DATABASE ACCESSION NUMBER: AK105957
  ref <309>: DATABASE ENTRY DATE: 2002-08-28
gagcttattatatttccctccacttcgtcctcttcttcctcctccatccccatcctccatcggatgcactagtagctggccttgtaccctacctagcttagctacccacccatgtcctcctcctcgtctcctctcgctgtctgcctttgacttggagacctagctcgtcgatcgccggccatgcgggtgcagtgcgacgtctgcgccgccgagccggccgcggtgctctgctgcgccgacgaggccgcgctctgctccgcctgcgaccgccgcgtccaccgcgccaaccgcctcgccagcaagcaccgccgcctcccgctcgtccacccgtcctcctcctcctccggcgacggtggcgccgccgccgcgccgctgtgcgacgtgtgcagggagaagaggggcctcgtgttctgcgtcgaggaccgcgccatcctgtgcgccgactgcgacgagcccatccactccgccaacgacctcaccgccaagcacacccgcttcctcctcgtcggcgccaagctctcccccgccgcgctcgccgaacagccgctcccgtcctccgactgcagctccgacgacgacgccgccgccgccgccaccgaggaggagtaccactcctccgccgcatccaccggcgccgcagtgagcgcgcctcttgacgcctccagcaacggcgccggtggcggaggaggagtaggagggagcagcatctccgactacctcaccaccatctgccccggctggcgcgtcgaggacctcctccccgacgacgacgccttcgccgccgccgccgcgcaggcggggaaagagaaggacgagcgcgtgccgttcctcgacgccgacctgttcgacgtggtcgccggccggccggagaagaagggcggcgcgtgggcgccgcacgtgccgcacctgccggcgtggtgcctcgacgaggtgccggtcgtcgtcgccgcgtcggcggcgccagcggcgacacctgtaaaggcgaagcagggacacgtgcgggacagccactggagcgacagcgacgcgttcgccgtgccggagttctcgccgccgccgccgccggccaagagggcgcggcccagctcgcagttctggtgcttctgaacgccgccgccgccgtacaatctggccgccggcgagctcgacgaacacctcgatggatcgatcgaacacctgtgtaatcactcagctggtcactactacaagtagcaatcagcaagcttgatgtgccactgttactagctgctgctgtttaattagtgagtactaagctactactagttaattttggtgaaaactatgctactttgttactatataatgaagtatgtgtatcaaactaaactgagatgttggtaattaattatcgtattttgt

SEQ ID NO: 8610 - DNA, 1343 bp, Oryza sativa
  ref <308>: DATABASE ACCESSION NUMBER: AK105958
  ref <309>: DATABASE ENTRY DATE: 2002-08-28
catgtctcaaatccccctaattaggtggaaatgccccccacatatagtattggagcaggattggcatattgttgctggagaagaaagtagggagattgaaattcaaaatgagagaataaatggagcgcttgaggcaatttacccacgtccatcgaacattccgccaaacccatttctttctcttgatgtgaaagatgcccattatgacgattccaaaaccctgttggttcctttgatccctcttgaagatgatgatgcatctgatcaattggaaggaccaacccttgatctaccaagccattacaacataacaggagtttcaaatactcctgtttccgctgagcaacaaccaccatgtggtggtgctataagttctggattcaccattgagcctcaggctgcagtctcagcaacagtcactgcaattatgcaaaccatacagagtaatcaaaatgggagcatggctgaccaaaacgggagcacgattgaccaggaactactcttcaaaatactaagtgatccttcacagcttcagaggttaatgaaagaatgtggcccagtcagacatgaacaatcagctagtagttctgttgttgccccattggtatcaatcccaccaccccaaataactgcaagctctcctgcccccttctctgatcatgtcggaacctttcatggcatgaatcctaccctgccgcctccaccaccaatgatgaatcggccaccttcaaccattccttcagttgctatgaatcatccaccaagttcaagcccagcaatgaactttggaagtgccctgccaagttcaagcccatcagtgaactttggaagtgttccagggagtggtgtcggctattataaaaccctcatccatcagcatggaggggagagactggaacaaccatttgagcagcatggaatgcagtttggtatgtaccgccaacctggtcctccacaaaatggcggtattgatgccatgaacggtgctgctgctatggtgagcagagatggcaaggtgaggccgatgaaaccgtgtgcatactttaacagcccgaagggttgtcgaaatggtgctagttgcacattcctacatgatgcgtcagccccaacaagaaaagatcatcagaagcaaaagggatcaaaaaggataaaattagacaacacaatgggcggtcgaaattgagctgaagccgccatttaatttttgactgttctttggttcatctatcatggatcagtaaatattactccgttagctcttccattagcctccttttttatgttcgtcgaggagaggagatgttctgaaagaaagcaaaatatttcatgattgattggtgctc

SEQ ID NO: 8611 - DNA, 908 bp, Oryza sativa
  ref <308>: DATABASE ACCESSION NUMBER: AK105959
  ref <309>: DATABASE ENTRY DATE: 2002-08-28
gtgagatcgagctgaaaaaaaaagagaggccacgaagagagctcagctgctgcctctagcttacttggtgataaggaggaggaggaggaggagggcaccgacatggccgcagccacggcgtacaccgtggcgctcctcggcgccaccggcgcgcgcgtccccgccgctccacgctccgccgcgcttctgccgcgccgcggcggcgtgctccaaccgctgcgcctccaggacgcgccgcgactgtccctgctccgcgtcagggccgcctccgacgacacctccacctcggccagcggcgacgagctcgtcgccgacctcaaggcaaagtgggaggcgatcgaggacaagccgacgttcctcctctacagcggcggcgccgtcgtcgccctctggctcaccaccgtcgtcgtcggcgccatcaactccgtgccgctgctccccaagatcctggagctcgtcggcctcggctacaccggctggttcgtctaccgctacctcctcttcaaggagagcaggaaagagttggcgaccgacatcgagaccttgaagaagaagatcgctggaacggagtaattaagcagctgcatttgtccggggaagttttggggggtgactctctagagtgcttgctgctgcttcctctgtgtgatgtttgtatatctctacgagaatatgttctgctcccatgtgcagtaacagcgtagtgcaaaaactgtatcaaacctactatcagttgtttcttcgaaattcaaaacaatttcttcgctttcttgttgcgtggaagtgttcatataatctggcgtatgacaatgagaatatatatctcggagaatggttgatcgactcattagaaaagaattgcaaatgagttgatgataaacatctctgaaatgcatcccctcatggcc

SEQ ID NO: 8612 - DNA, 1040 bp, Oryza sativa
  ref <308>: DATABASE ACCESSION NUMBER: AK105960
  ref <309>: DATABASE ENTRY DATE: 2002-08-28
aaacacggtgcaaagtgtgcagcgaactcgataaacattaaacaagctgtgtgaacttcttttttcgtgacaagtttaattctttctcgatcgatcgtcgtgatggctgacgagtacggccgcggcggctacggcaggtccggcgccggcgccggcgacgactacgagagcggcggctacaacaggtccagctccggcggcgccgacgagtacggccgccggccgggaggcggtgccggtggctacaacaagcccggtggcaccgacgactacgacagcggctacaacaagtccgccggcggcgacgacgacgactacggccgcaccggcggcggcgggtacaacaagtccggcaccgacgacgactacgacagcggctacaacaacaggtcaggggctaacgagaagtacggccgcaacaagtccggcgacgacgagtacagcggcggcggcggcgccgaagccgacgaggagtacgtcgacgggttgtcgtcccgggacgacccggagaagtacaggaaggaggagaaggagcacaagaacaaggagcgcctcggcgaggtgggcgccctcgccgccggcgccttcgccatgtacgagaggcaccaggcgaagaaggacccggagaacgcgcagcggcacaggatcgaggagggcgtggcggcggcggcggcgctggggagcggcgggttcgcgttccacgagcaccacgacaagaaggaggccaagcaggcggcgaaggacgccgaggaggaggcggaggaggagtccggctccggcgcccgcggcggcgaggggaagaagaagcaccacctcttcggctgatgatccatcgatcgatcgcgccatgcatgcggcggcggcggcgccatggccggcgtccgcgcgcacgcgtaaggtgtggccatgggcgtgtgcagctgaataagagccggggtttttgtacgtatgggctcagtatgtgtacacctcgtatatggtatggatgtacgtataagcgtatagtgtgtactataccaataaagctatctgttgctctg

SEQ ID NO: 8613 - DNA, 1676 bp, Oryza sativa
  ref <308>: DATABASE ACCESSION NUMBER: AK105961
  ref <309>: DATABASE ENTRY DATE: 2002-08-28
atgatgctttccgcaatacttacgaatgaagttggttggttcgatgaagaagagaacaactcaagtcttgtggctgctcgtctagcagttgatgcagctgatgtgaagtctgcaatagctgagaggatatcagtgattctgcagaacatgacctcccttatgacatcgttcatcgttggttttattattgagtggagagtagcactgcttatcctggccaccttccctcttcttgtgcttgctaactttgcccagcaactttcgatgaagggcttcgctggtgacacagcaaaggcgcatgccaagagcagcatggttgccggtgaaggagtgagcaacatccgcacagtggcagcattcaatgctcagaacaagatcctttctctgttcagttatgaattgcgcatacctgaacagcagatcctccgccgcagccagacatcaggccttctgtttggcctctcacagctctgcctgtactcatcagaagcactcattctgtggtatggttctcatctggtccggtctcatggatccaccttctccaaggtcatcaaggtctttgttgtccttgttgtgactgccaactccgttgccgagacagtcagccttgccccagagatcgtccgtggaggtgaatccatccgctccatctttggcatcctcaacagggcgacaagaatcgagcctgatgatccagagtcagagcgtgtcaccaatgtccgtggggacattgagcttcggcatgtcgacttcgcctacccggctcgccctgacatccaaatcttcaaggacttcaacctaaaaatccaagctgggcgcagtcaagctctggtgggagccagtgggtctggtaagagcactgtgattgctctcattgagcggttctatgatccgaccgggggcaaggtcaccattgacggcaaggacattaggaggctgaacttgaaggccttgcggctgaagataggcctagtgcagcaggagcctgttcttttcgcagccagcattcttgagaacattgcctatggcaaggacggtgcaacggaggaggaggtgatccaggcggcaaaaacagcaaatgtgcacggcttcgtcagtcagctacccaacggctacaagacggcggtcggcgagcgaggcgtgcagttgtccggtggccagaagcagcggatcgccattgccagggcggtgctcaaggacccggccatcctgctgctggacgaggcgacgagcgcgctggacgccgagtcggagtgcgtgctgcaggaggcgctggagcggctgatgaaggggcggaccaccgtgctggtggcgcaccgcctgtcgacgatccgaggcgtggaccgcatcgccgtcgtgcaggatggccggatcgtcgagcacggcagccactctgatctcgtgtccaggccggagggggcgtactcgcggttgctgcagctgcaacaccacgcctgacgatgattagtatgacataagtcttttgctcttgtgattggaatggttacttgtttcacttcttcttcttcttcttcttcttgtggcttggtggttaagttgatgtagataactagggcaaacttctatggtcgttgtgctatctacctaagtttaaactggaacggtgtaagatgtgtcttcctcctgaaacgtatgatgcaaaattgagatgc

SEQ ID NO: 8614 - DNA, 1708 bp, Oryza sativa
  ref <308>: DATABASE ACCESSION NUMBER: AK105962
  ref <309>: DATABASE ENTRY DATE: 2002-08-28
acgccttcttgaacagtttccccaattttctgaccgccgctttgtttgcagctcgcgcttcctgtcgacatggcgaagaaatccaagctgaagaaggagggatccagtacgacgaggaatccggcggccgagctcacctacgacctcatcgtcgacatcctctcccgcctccccgcaagtcggtctgccgatgcaagtgcgtatccaggcggtggcgcggcctcatctccgaccccgaccaccgcaagaagctcccccaaaccctcgccggcttcttctaccgcagcgagaacgaatcacgctgcccccaagctagcgcgccatttcgtcaatgtcaccggcagaggccggcctctcatctgcccaaccatctccttcctgcctcgcttcgacttggagggcatgaggatggtggactgctgcggcggcctcctcctcttccgctgcttcatgagctcggacgaattctgctacctcgtgtgcaatccctccaccgaggaatgggttgccttcccagattccggctacaaccccgagtggcagttcttcacccatttggggtttgatcctgccgtctcctcgcacttccatgtctttgagtttgtgatgggtgattgtggatttgtggaaggggtggagatctactcttcggaaaccggattatggaatttcatggaaagtgaatgggaccctgaaaccaccgtatatgatcgcacaaggacctttttcaatggcatgctgcatttagttgaagaggggattgcgatattatcagtagatgtggaaggggagatatggcagagcattggcgccccgagaccggaactagaaaatgtggaagatatgtttgctttggtgtcttgtttcatcggtcaatcccaagggaaattgtgctacctcagtgcatatgacactgtcccttggaacctgtcaatatgggttcttgaggattattccaaggatgaatggacattgaagcataagctgactaccgaacagctgtctgagaagataaactgcaagtgcaaaaccgacttcgacaaggcttggtactaccacgtggtcgcagttcattcagagtgcaatttgatttactatattgctggcggagatacactgatgtcatatgacatgggtcataaacaatcgtgtgttattgaaaatcttgggccgggtaataacagtggatatcttccctatgttccactctactcagaaatattgtcacatggctgctaagtctgcttcctttgtactactagtgttgcttggcattttttgccatgaaatgagtgtaagggttgcagtcaaagctgactacggttctggatcgcctgacaaagttctcagaggcttcactgaagcattacgaggagctcaagcagaattatgagatggcttgtgatgactacaagacgggtcgatcaaatgcacatcttgcttagtctgatgatgcccgtcaagtgcccattttcaaccatgttactgtattctccgtcatattagattccctgtgatggttgcagttcagcatcattgagccatcatgcgtgagtgcttgatattactaatccagtcccgttcatgcttagccgtctgcctgttgatgccaagaagaacttgtctctctagatctgattttgcttcatctgtaaattgtgtaggcatgtaaaaattcaggatgtaaaacagtggttctgtttcgtgg

SEQ ID NO: 8615 - DNA, 1577 bp, Oryza sativa
  ref <308>: DATABASE ACCESSION NUMBER: AK105963
  ref <309>: DATABASE ENTRY DATE: 2002-08-28
aaacgactcgtgtatatctctcctcaccttggcgcgccaacggttggttacgaacgaggacgagctgagcctgagacgcgcgcttcccgttcgcacagccgcacaggtctcttgcatggctgctgctgctgctgctgcgtcgtccgcgaagcgcgcgctcctcccgtgggcacgcgacgcccaccacgcgctggccagggccctgcagggatgcggcggcggcggcggcctcggtctccgcggggcgctcccgacggccggaggcaggtggtctctgctccagtgccggtggaggtcgtcgctgccgcagctcgactccgccgacaggtccgatgaggaaagcggcggcgaaatcgactgggacaacctggggttcgggctgacgccgaccgactacatgtacgtcatgcggtgctcgctggaggacggcgtcttctcccgcggcgagctcagccgctacggcaacatcgagctcagcccctcctccggcgtcatcaactacggccaggggctcttcgagggtctgaaggcgtacagggcggcgaaccaacaggggtcgtacatgctgttccggccggaggagaacgcgcggcggatgcagcacggcgccgagcgcatgtgcatgccgtcgccgtcggtggagcagttcgtccacgccgtcaagcagaccgtcctcgccaaccgccgctgggtgccaccgcaaggaaagggggcgctgtacatcaggccgctgctcatcgggagcggaccgattctcgggctggctcccgccccggagtacacgttcctcatctacgccgcaccggttggaacgtacttcaaggagggtctagcgccgataaaccttgtcgtagaggactcgatacaccgggccatgccgggcggcaccggcggggtcaagacgatcaccaactacgcgccggtgctcaaggcgcagatggacgccaagagcagagggttcactgacgtgctgtacctcgacgcggtgcacaagacgtacctggaggaggcctcctcctgcaacctcttcatcgtcaaggacggcgtcgtcgccacgccggccaccgtgggaaccatcctgccggggatcacgcgcaagagcgtcatcgagctcgccagggaccgcggctatcaggttgaagaacggctcgtctccatcgacgatctggtcggcgcagacgaggtgttctgcaccggaacagcggtggtcgttgccccagtatcgagtgttacttaccatgggcaaaggtacgagttcaggactggacatgacacgttatcgcagacactgcacacgactctgacgtccatccagatgggcctggctgaggacaagaaaggatggacagtggcaatagattaaggatggattatgggcaaagggatcccgattattcctcatgtcatccaatgtagattattgtcgttttatatatcttcctgtagcgacagtgatcacagcgcaagtggaatttggacgaacaggaagcaaatgcagatcatcttactgcgtaatctctgtgtggccaataaaatcttgtcattgccaaatctttgagataactgaatagtacgct

SEQ ID NO: 8616 - DNA, 1856 bp, Oryza sativa
  ref <308>: DATABASE ACCESSION NUMBER: AK105964
  ref <309>: DATABASE ENTRY DATE: 2002-08-28
gtggctgtgacgatccgacacctgcacgctagtacgtagtgcgtatacgtagccagtaccctactcccgtccatggcgccgccgcgagccaactccggcgacggtaacgacggcgccgtcggagggcagagcaagctctcgccgtcgggcctgctgatacgcgagattccgggcggctacggcgtgcccttcctctcgccgctgcgcgaccgcctcgactactattacttccagggcgccgacgagttcttccgctcacgcgtcgcccgccacggcggcgccaccgtgctccgcgtcaacatgccgcccggccccttcctcgccggcgacccccgcgtcgtcgccctcctcgacgcgcgcagcttccgcgtcctcctcgacgactccatggtggacaaggccgacacgctcgacggcaccttcatgccgtcgctcgcgctcttcggcggccaccgcccgctcgccttcctcgacgccgccgaccctcgccacgccaagatcaagcgcgtcgtgatgtcgctcgccgcggcgaggatgcaccacgtcgcgccggcgttccgcgccgccttcgccgccatgttcgacgaggtcgacgccggcctcgtcgccggcggccccgtcgagttcaacaagctcaacatgcggtacatgctcgacttcacctgcgccgcgctgttcggcggcgcgccgccgagcaaggccatgggcgacgctgccgtgacgaaggcggtgaagtggctcatcttccagcttcacccgctcgccagcaaggtcgtcaagccgtggccgctggaggacctcctcctccacaccttccgcctgccgccgttcctggtgcgccgcgagtacggcgagatcacggcgtacttcgccgccgccgccgcggccatcctcgacgacgccgagaagaaccacccgggaatcccgcgcgacgagctcctccacaacctcgtgttcgtcgccgtcttcaacgcctacggcggcttcaagatcttcctgccacacatcgtcaagtggctcgcccgcgccggcccggagctccacgccaagctagcctccgaggtccgcgccgccgcgcccgccggcggcggcgagatcaccatctccgccgtggagaaggagatgccgctggtgaagtcggtggtgtgggaggcgctgcgcatgaacccgccggtggagttccagtacgggcgcgcgcggcgcgacatggtcgtcgagagccacgacgcggcgtacgaggtccgcaagggggagctgctgttcgggtaccagccgctcgccacccgcgacgagaaggtgttcgaccgcgccggcgagttcgtccccgaccggttcgtctccggcgccggaagcgccgcccggccgctgctggagcacgtggtgtggtcgaacgggccggagaccgggacgccatcggaggggaacaagcagtgccccgggaaggacatggtggtggcggtggggcggctgatggtggcggggctgttccggcggtacgacacgttcgccgccgacgtggaggagctgccgcttgagccggtggtcacgttcacgtcgctgacccgcgccgccgacggcgacggcgccgcgcggcgcggagtataatagtgtcaagcggcggcgcgcgtgagcggcgagtgttggtgcggcgacgacgctgtccatgcatggtcgctgtcagttggtcagatttgcatggatttcttttttctttgacctaaaaaaattgggaaaaaggtgtactttcgcgtgcttgtgggggcaggttcttaagtatagggattcggtttgtcattgtgtgaagttcaatacgatgtttgaagttgaataaaattatgtgcgttcctcgtggtttt

SEQ ID NO: 8617 - DNA, 1823 bp, Oryza sativa
  ref <308>: DATABASE ACCESSION NUMBER: AK105965
  ref <309>: DATABASE ENTRY DATE: 2002-08-28
agtacacaatagggacacaacacaagtgtagcaaccgccttagtttcctcttgttgatcaaacgacatattcgccgtgtacgtacgcacggtgacaatgagcaggggcgacagcgccgtgggcggtgtcaccgtcgacgtgacactgtcgccgaacgccgtgctcccgggcttcgccaagaggcccgaggcgatgaccgaagcgagctgctgcggtggcggcttccctcggtgcgcccgggcggccgccgcggcggcgtgggctttcgccagcgaggacgccggcagggtggcgttcgccctcaaggccggcctcgcgatgctcctggcgtcgctgctggtgctcgtcggcgagcccttcaggctgttcggcaccaacatcatctggtccatcctcaccgtcggcatcatgttcgagtacaccgttggcgccagtttcaaccgagggtttaaccgggccgtggggagcatggtggccggagttgttgctatcgcggtgatctggatttcgctcagatgcggcagtgtcgccgagccgtacgtgattggcctaagcatcttcctagttggggccgtgacgtcgttcgtgaagcagctgccggcgctggcgccgtatgagtacggcttccgggtgatcctcttcacctactgcctcatcatggtgtcggtctaccgcgtcggcgagcccgtcgccgccggcctcgaccggctttacgccatcgccatcggcgccgtgctggcgctcctcgtcaacgtgctcatcttcccggcgtgggccggcgagcagctccaccgcgagctcgtcgccagcttcgccgccgtcgccgactcgctccacgactgcgtcaggagctatctgtcaggcgacgaaacggccgtcgacggcggcgaaccagcaattgagaaatgccgcgccatcctgaacgcatccgctaggatcgaatccttggtaagattgccatacgcgcgtgcttgcctgtgtatatactgtacaccacacggtcacacacactacgtagctttgacttgaacgtgtaatggcgggcgtacgcaggcgagatcggcgagatgggagccgccgcacggccggttccgctccttctccttcccgtggtcgcactacgcccgcgtcggagccgtgctgcgccactgcgcctacgaggtcgtcgccatgcacggctgcctgcactccgagatacaggcgccggacggagtcagggaggcgttccgtgcggagatcgaggacgcgacggcgcaggcggccgagctcgtccgtgtccttggcggcgacgtcgacggcatgacgcgcagcgccgagaggctgagccttctcaagagcgtgcacggctccgcctaccgcctccagctcgcgctggagctcaactcgcacctcctcgtctcgtccggctccgtggcggaggagatcacgagcggcggcggcctcgagcgctcgtgctcgcggctgcgcgagagcgcgcggcggcagaggctgtcgtggccgtcgcgggaggcggacgagctggaggaggcggaggccggcggcggatacgcggcgatgatggtgagggtgcgcgcgctggagagcacggcggcgctgtcgctggccacgttcgcgtcgctgctgctcgagttcgtggcgcggctggaccacctcgtggatgccgtcgacgagctctccaagctcgcaaaattcagggaagaaagcgactcgatcaaactagctacctgaccaggccatctgggacgtatcaccagcacgtttatcaacgtgctaaaccaataccgtgtattttacatggactttaattagaggattgttttcac

SEQ ID NO: 8618 - DNA, 1665 bp, Oryza sativa
  ref <308>: DATABASE ACCESSION NUMBER: AK105966
  ref <309>: DATABASE ENTRY DATE: 2002-08-28
aaaatgacaaaacacacaaaagtatatatatacaacgcacggtgcagagctgacacgtagatagtcgtcgttgtttttttgccggcggcgagatggggtcgttgccggcggcggcggaggcgcggccgcacgccgtgatggtgccgtacccggcgcagggccacgtcacgccgatgctgacgctggcgaagctgctatactcccgcggcttccacgtcaccttcgtcaacaacgagttcaaccaccgccgcctcctccgcgcccgcggcgcccgcgcgctcgacggcgcccccggcttccgcttcgccgccatggacgacggcctcccgccatccgacgccgacgccacccaggacgtcccggccctctgccactccgtccgcaccacctggcttcccaggttcatgtcgctcctcgccaagctcgacgacgaggccgccgccgccgccgccgcggacggcgcggcgcggcgcgtcacctgcgtcgtcgccgacagcaacatggcgttcggcatccacgccgcgcgggagctcggcctccgctgcgccacgctctggacggccagcgcgtgcgggttcatgggctactaccactacaaacacctgctcgaccgcggcctcttccccctcaaaagcgaggctgacctcagcaatgggcacttggacacgacggtggattggatcccgggcatgaccggcgacctgcggctgcgcgacctcccgagcttcgtgcggagcacggaccgtgacgacatcatgttcaacttcttcgtccacgtgacggcgagcatgtcgctggcggaggcggtgatcatcaacaccttcgacgagctcgacgcgccgtcgtcgccgctgatgggcgccatggccgcgctgctcccgccgatctacaccgtcggcccgctccacctggcggcgcggagcaacgtgccggcggacagccccgtcgccggtgtcgggtccaacctgtggaaggagcagggcgaggcgctccggtggctggacggccggccgccgcgctccgtggtgtacgtcaacttcgggagcatcacggtgatgtcggccgagcacctggcggagttcgcgtgggggctcgccggcagcggctacgcgttcctgtggaacttgcgccccgacctcgtcaagggcgacggcggcgccgcccccgcgctgccgccggagttcgcggcggcgacgagggagaggagcatgctgacgacgtggtgcccgcaggcggaggtgctggagcacgaggcggtgggggtgttcctcacccactccggctggaactcgacgctggagagcatcgccggcggcgtgccgatggtgtgctggccgttcttcgccgagcagcagaccaactgcaggtacaagcgcacggagtgggggatcggggcggagatccccgacgacgtgcggcgcggcgaggtggaggcgctgatacgggaggccatggacggggagaaggggagggagatgcggcggcgcgtggcggagctcagggagagcgccgtcgcggcggcgaagcccggtggccggtccgtgcacaacatcgataggctcatcgacgaggtgctcatggcttgagaaataatatgtatttttgctatatttgtgcattttgcttaaagaattattacacggaggacgcacacgtaacagtaac

SEQ ID NO: 8619 - DNA, 1661 bp, Oryza sativa
  ref <308>: DATABASE ACCESSION NUMBER: AK105967
  ref <309>: DATABASE ENTRY DATE: 2002-08-28
atgctcctccatgtcccggcctcccgggcgacacagagaagaaaaaacgaaacagccgagatggagaacgcaccggccaccaccacctcctccacccaagacggcggcggcggcgccggcggccatgtcttcctcctcgctttccccgaggcgcaaggccacgtcaacccgatcctgcagttcggccgccacctcgcggcgcaccacggcttcctccccacgctcgtcaccacccgccacgttctctccaccgtcccgccccctctcgcccccttccgcgtcgccgccatctccgacggcttcgactccggcggcatggcggcctgcggggacgccagggagtacacccggcggctggcggatgtgggctcggagaccctgggtgtcctcctccgctccgaggccgccgctgggaggccgccccgcgtgctggtgtacgacccgcacctcccgtgggcggggcgcgtggcgcgcggcgctggggtgccagccgccgcgttcttctcgcagccgtgcgccgtggacgtcatctacggggaggtctgggcggggcgcgttgggttgcccgtcgtggacgggggcgcgctccgggggttgctgagcgtggagctcgggccggaggacgtgccgtcgttcgtgaaggcgccggagtcgtacccgccgttcctggaggcggtgctgggccagttcgacgggctggaggacgccgacgacgtgctcgtcaattctttccaagaattggagccgaaggaggcagattacttggcatcagcatggcgttttaagacgattggtccgaccgtaccatccttctacttggatgacgatcgcttacaaccaaacaagaactatgggttcaacatttctgacagcacttcaccttgcttggcgtggctagataatcagcccccttgctctgttgtctatgcttcctatgggactgttgctgatcttgacccaactcagttagatgagctgggcaatggattttgcaattccggtaaaccgttcctttgggtcgtgaggtcctgtgatgaacacaagctatcagaagaactccgtgacaagtgcaaggagaggggcctaatcgtttcttggtgtccccagcttgaggtcttatctcacaaagccacaggctgtttcttaactcactgtggatggaactcaacaacagaagcaattgttactggcgttccactgttagcgatgcctcagtggacagaccaaccaactacagcgaagtacattgaaagtgcatggggaaatggtgtacgcgtacatcgggacaaggaaggcatggtgagaaaagaagaggtggagagatgcatcagagaggttctagagagtgagaggaaggcagagtacaggaaaaatgctaataggtggataagaaagctaaggaagccatgaagaaaggagggagctcgaataagaatattgctgagtttgcctcgaagtacgcttcatattgacatggaatagttttcatccagctaccaaggtattttatttagatctctggttatgattacaataatggagggagaaagtttagttctcctatggaatagttttcatccagctaccaaggtattttatttagatctctggttatgattacaataatggagggagaaagtttagttctcctatgttattac

SEQ ID NO: 8620 - DNA, 1298 bp, Oryza sativa
  ref <308>: DATABASE ACCESSION NUMBER: AK105968
  ref <309>: DATABASE ENTRY DATE: 2002-08-28
acctctcccgccgccgccgccgtcctcctccacctcctccgctctctcgcgcacggcgcacgcgcccgaagccctagaccccccggcggcgaagatggcggcggaaggcggtgccgccgctcgggcgctgtcccagcgggagcaggacatccagatgatgctcgccgcggacgtccacctcggcaccaagaactgcgacttccagatggagcgctacgtctacaagcgccgcactgacggtatctacattattaaccttggcaagacctgggagaagctccagttggctgcgagggtcattgttgcaattgaaaaccctcaggacatcattgtgcagtctgcgaggccctatggccagagggctgttctcaagtttgctcagtacactggtgctcacgccattgctggtaggcacactcctggtacatttaccaaccagctgcagacctcattcagtgagccacgccttcttatcctgactgaccccaggactgatcatcagccaattaaggagtctgcacttggaaacattcctaccattgccttctgtgacactgactctccaatgcgctatgttgatattggtattcctgctaacaacaaggggaagcagagcattggttgcctattctggcttcttgccaggatggttctccagatgcgtggtacaattctcccaggacacaagtgggatgtcatggttgatctgttcttctacagggacccagaggaagcgaaggagcaagaggaagaagaggcggctctggtggctcctgattatggtgcggttgcggaatatgctgccccagcggctgatacctggggtggagaatggggcactgacgctgcagctcaacctgctgccattccagcacaggctggtgctgactggactgctgctccagctcctgcagccggaggatgggacacggctgctgcccctgcccctggatgggaacaaggcagtgcaccagtcccagcggcagcacccacccctaactggggggagtgagtgaaagagtaactgatccagttcatgggtcagaggctgagtttgttgtcgggagcagctggtagacactatttaagtagctttaatctttttacagtactgagttatttagatgcaaatcaaattttgtgttcttgacaatgctgggactgcgaactagccagccttttttttgttacaatctcatggatagctttatttcaagagcaattctgctttgcgaacaaagtgtatgtgtttgcaacaacaaattgatggggttttctcctcatagttcttattgttc

SEQ ID NO: 8621 - DNA, 1672 bp, Oryza sativa
  ref <308>: DATABASE ACCESSION NUMBER: AK105969
  ref <309>: DATABASE ENTRY DATE: 2002-08-28
aactaacgctaaaaaagtaacagtttctgtactttattgaagttaaacccagtcgaaacatgtcggactacaaggtgcgtgacatctccctcgcggagtggggtcgcaaggagatcgagctcgccgagaacgagatgcccggtctgatggagatccgccgcgagtactcggctgctcagccgctcgctggtgcccgcatcgccggttgcctgcacatgaccgtccagactgccgtcctcatcgagaccctcaaggctctcggtgctgaggtgcgctggtcctcgtgcaacatcttctccaccaacgacgctgccgccgccgcgatcgccaaggccggcatccccgtcttcgcgtggaagggtgagaccgaggaggagtacgactggtgcattgaccagaccatccgtggcttcacgactggcggtgacacgcaccccaacatgatcctcgacgacggcggtgacctcacgaacctgatcctgaacaagcaccccgagatcgccgcgaagatcgtcggtatctccgaggagaccacgactggcgtgaagaacctgatgaagcgcgtcaaggccggcaccctgacgatccccgcgatcaacgtcaacgactccgtcaccaagtccaagttcgacaacctgtacggctgccgcgagtcgctcgtcgacggcatcaagcgtgccaccgatgtgatgattgctggcaagaccgccatcgtcgctggctacggtgatgtgggcaagggctccgccgcggctctgcgcaacttcggcgcccgcgtgatggtgaccgagatcgaccccatcaacgccctgcaggcgtgcatggagggctaccaggtggtcctcatggaggagaagatccacgaggcgcacatcgtcgtgacgacgaccggcaacgacgacatcgtccgcggcgagcacttcgaccagatgcgcgacgacgtgatcgtctgcaacatcggccacttcgacactgagatccaggtcgcctggctgaaggccaacgccgcgtcggtgtccgagatcaagccccaggtgcaccgctacacgatgaagaacggcaaccacgtcatcctgctggctgagggccgtctcgtgaaccttggctgcgcccacggccacccttcgttcgtcatgtcgaactccttctgcaaccaggtccttgctcagatcgagctctggacgaaccgcaccactgacaagtacccccgcggcccgcagaaggacgtcttcttcatccccaaggagctggacgagaaggtcgctgccctccaccttggcaagctcggcgcgaagctgacgaagctgacgcccaagcaggctgactacatcaacgtgtcggtcgctggtcccttcaagcccagccactaccgctactgagcagcgcagagcaacgctcggctccccgcgaattattcgcggattattcgcagttcagtcgacgactttaaatccccacgcaacacccacaaacacacacacacacaaaacctattccctccctcacacgattggcacgccggttttgtcaactccccacgaagcgacgccgatcctgtgcttctctcgtttaactcccgtcttcaaaacaagaagtccccgccgccgctcactccccgacacttcgcagccaccgcgacggagtgacggaacgcggtcccctaaaaaacaac

SEQ ID NO: 8622 - DNA, 1074 bp, Oryza sativa
  ref <308>: DATABASE ACCESSION NUMBER: AK105970
  ref <309>: DATABASE ENTRY DATE: 2002-08-28
atgcatccatctgccaaagattttccaatcaatacattgccaatttgccatgccccgcgcgcgcgcgcgcgcgtgcgatcctccactagctacgcaccgtggcaaggcgccattttcatagacttcgctagggtgtgcgtgactttgtcagtgaggtcgccgcagtgtaaacgccaaccaaactcccactagcagagtagcagtccatcagcacataaacccttccattccaaccccaattagcactagatcgtcatcgctatcggctgcagcaaagaatggcaggagctgggaggactaggagcacggccatggcggcgtggtcgtactcgtcgctgctgctgcagctgctgcttctctcgatggtcgccgtactagacggcgcggcgacgaccggcggcggcggtgccggggcgccggcgccggcggcggactgcacggacacgctgctgagcctggcgggttgcctgagctacgtgcaggaggggagcacggtggcgaagcccgacgcgccgtgctgctcggggctcaagggcgtggtgaagaaggaggtggcctgcctctgccaggcgttccagggcagccagaacttcggcgtcacgctcaacatgaccaaggcgctccagctgcccgccgcgtgcaaggtcaagacgccgccgttcagcaagtgccacctttctattccgggcgtgactggtggtgctcctgctcccgctccattctccggggctccgttcttcggggggtcgtcgccttcggcatcgcctgctgggacaggaagcgactccgccgccgccaccgtaagagctccggccccatcgccgtcggctgctgtccggcccaaggagacaaaggcggccttgttctctgccgctgtaatcgccgccgctactctgctcgcgcaccgtgcctagttaggctttggcctgcacgggtccatccaacgagcgtgtcgttgcagttgttgacttgtgtgtttgcatatgtaccgagatgtatcttgtgagagtttttccctccatattactacacacttaaaccagcattttttacgttcatgacaaaggttctcac

SEQ ID NO: 8623 - DNA, 1344 bp, Oryza sativa
  ref <308>: DATABASE ACCESSION NUMBER: AK105971
  ref <309>: DATABASE ENTRY DATE: 2002-08-28
gctagtatttatcctcctagagagggacatggggagaggaggagtggatccacgatgatgacgaggagcatgatgaagtttttctctccctcctcctccgctatttataccaccctctcctctcgtctcgccaggatcaacgccactcgccacacaccgccaccaccaccaaagagcagcagagcagcaagatcactaacctctttcttgctgattcgagcaaccatgtcttcttcgtcttcgtcgtcggatgctgtcgccgcggcggcggcggcgacttttgagaagccgaggacggtggtgaagaagctcctggcggagtcccagcccgagggcgacggcgccaccgtgcgaaggagcatcggcaggtacgagctcaggaacctggatcctttcctcatgctcgatgaattctctgtttccaagcctgctggatttcccgaccatccgcatagaggattcgagacagtcacctacatgctcgaaggggcgttcacccaccaagactttgcaggccacaagggcaccatcggcacgggagatgtccagtggatgacggctggccgcggcatcgtgcactcggagatgccggcagcggacggtgtgcagaagggcctccagctctggatcaacctctcttccaaggacaaaatgattgagccgaggtaccaggagcttatgagcaaggacatcagctgcgccgagaaggacggcgtggaggtgaagatcatcgccggcgaggccttcggggtgcgttcgccggtgtacacgcggacgccgacgatgtacatggacttcacgatgcagccggggtcgcagctgcaccagcccatcccggaggcctggaacgccttcgtctacatcatcgacggcgagggcgtgttcgggagggagaaggcgtcgccggcgaccgcccaccactgcctcgttctcggccccggcgacggcctgagcgtctggaataagtccggcgagccgctccggttcgcgctcgtcggcgggcagccgctcaacgagcccgtggtgcagcatggccccttcgtgatgaacacccgcgccgagatccagcaggccatggaggattactactatggcaggaatggcttcgagaaggcccgccattggagctccacagcatgatttcatcatcctcccttcataccatgacacaccatcaccatacataatgctgctgagctgaacatgatgctgtttttaggcatattagtatatcatttgattcagtaataataaataggtttattgtcataaatttttccttgattggctgtgtaataaaacgatatctgtgcaatgaaaatggtagtaatatgattggatttt

SEQ ID NO: 8624 - DNA, 1240 bp, Oryza sativa
  ref <308>: DATABASE ACCESSION NUMBER: AK105972
  ref <309>: DATABASE ENTRY DATE: 2002-08-28
gcagcagctgcaaaataagcgaagatgactacgcaaggatttgctcccgtgcttgcagtagcattgctccttgcagcatttcctgcagcggttcagtccattggcgtgtgctacggcgtgatcggcaacaacctgccggcggcgagcgacgtcgtgaagctctacaagtccaaggggatcgactccatgcgcatctacttcccgaggagcgacatcctccaggcactcaccggctcgaacatcgccctcaccatggacgtcgccaacgagaacctcgccgcgttcgccgccgacgccaccgccgcggccgcctgggtcaagcagaacgtccaggcctacccgggcgtctccttccgctacatcgccgtcggcaacgaggtcaccggcgacgacacgggcaacatcctcccggccatgaagaacctcaacgccgcgctcgccgcggccggcctcggcggcgtcggggtgtcgacgtcggtgtcccagggcgtgatcgccaactcctacccgccttccaacggcgtcttcaacgacgactacatgtttgacatcgtggagtacctggcgagcaccggagcgccgctgctggttaacgtgtacccctactccgcctacgtcggcgacacgaaagacatcagcctcaactacgccacgttccagccgggcacgacggtgacggacgacggcagcgggctgatctacacgagcctcttcgacgcgatggtggattccgtctacgccgcgctggaggacgccggcgcgccggacgtcggcgtggtggtgtcggagaccgggtggccgtcggccggtgggttcggggccagcgtgagcaacgcgcagacgtacaaccagaagcttatcagccatgtccaaggaggcactccgaagagaccaggggtggcgttggagacgtacgtgttcgccatgttcaacgagaaccagaagaccggggctgagaccgagaggcacttcgggctgttcaaccccaacaagtcgccgtcctacaaaattagattccactagacaagagtgatatactaatattacatttggatttggaataagctagctgctcatgtcaaatgcaaaaccgcatgcatgcatgggaacgtacggccagcatatagttttgtggtaataagcacagctgctcaagattcagcaacgtacgtgtaactctgccttggcactttggcagtgaatactgaacaataacggaatttataactctgtttccttg

SEQ ID NO: 8625 - DNA, 962 bp, Oryza sativa
  ref <308>: DATABASE ACCESSION NUMBER: AK105973
  ref <309>: DATABASE ENTRY DATE: 2002-08-28
agccaagccaaacaagaaacccaccgtttctctctcaaaaccgcgggaatcaatcaatcgccgttcgcgtcgcgccacgagatattttcccccaagaaaagttggagtgagggatgagtgctatggcgatgtcgtcgctgaacccgaacgcggcgccgttcatcccggcggcgttcaggagggtggaggacttctcgccggagtggtgggagctcgtcaagaccacggcgtggttccgcgaccactggttcaggcagcaccagatgtacgaggacgctgcggcggaggaggaccaccaccgccaggtgttcgacgacgacctcgccgcgctcctgcccgacgactcgctcgacctcctcgacatggtcgacaccgacgacctcttctacacccccgacccccccgtccaccacaagccgacgacgactcccaccctcgacgccgacgtgctcagggcgctcagcctcaactcgccgaggttgggcggcgccgggatggtgaggcacgccgagaagccggcccagttcgtcgccgccaagggcggcgccgcccgccacgtcatccaccagcctcgctagagcgccatgggtgagtggtgatgctgctgctgctgctgtctagtgtataaccttggagttttcagagtttagtctctctgcttttcttcactgtgtataaaaactgaaaaaaaaagggggaaaaattgcagctttctggtgctgcatcccttgtagtagtaaagcagcttctgttcagtttcaggtgcatcatctaaaatgtgttagaaaaaaaaagcaaaaatagagagtgatgtagaatcatgtgtactaatgattctactaccgcccttgttaatgttggatatattaagatggcaagcagtctaatgtttagaatctttcaacttctgattattcctttgctctcttcagaatctggtagaaacctgctcttttgttgtc

SEQ ID NO: 8626 - DNA, 1542 bp, Oryza sativa
  ref <308>: DATABASE ACCESSION NUMBER: AK105974
  ref <309>: DATABASE ENTRY DATE: 2002-08-28
aggtcacgagattatcgccggccatggccgccgcatcgtcgtcgcgtgttctgctcgccgccgtcgccgtcctggccgccgccctcgcgggctgcggtgcgggggcggcgctggacgacccggcggggctcctgcggcgtgcgaaggaggcggagttcgcgggctggatggtggggctgcgccgccggatccacgagaacccggagctcgggtacgaggagttcgccaccagcgagctcgtgcgcagggagctcgacgcgctggggatcccctacaggcaccccttcgccgtcaccggcgtcgtcgccaccgtcggcaccggcggccctcccttcgtcgcgctccgggcggacatggacgcgctcccgatgcaggaaagtgtggaatgggagcacaagagtaaagtgcctggaaagatgcatgggtgtggtcacgatgcacatgttgctatgctgttgggttctgccaggatacttcaggaacaccgtgatgagctgaagggtaccgtagtacttgttttccaaccagctgaggaaggtggtggtggggcaaagaaaatgatagatgatggagctgtggaaaatatagaggccatttttggggttcatgttgctgatgttgtacctattggtgtggtggcatccaggccaggacctgtaatggcagggagtggattcttcgaggcagtaataagtggaaagggagggcatgctgcacttccccaccacactatagatccaatactggctgcatcaaatgttattgtaagccttcagcaacttgtttcccgggaagctgatcccctagactcacaggtagtaacagtaggaaaatttcaaggaggtggagccttcaatgtcatccctgattctgttacaattggtggcaccttccgagcctttttaaaagagagttttaatcaattgaagcagcgaattgaagaggtcattgtgtcacaagcatccgtgcagcggtgcaatgctgtcgtagacttcctcgacaaagaccgccctttcttccctccaacaatcaacagcgcggggctccacgatttctttgtgaaggtagctagcgagatggttggccccaagaatgtcagggacaagcagccactgatgggtgccgaggacttcgccttctacgctgatgcgattcctgcaacttactactacttcctgggcatgtacaacgagactcgcggaccgcaggcgcctcaccactccccctacttcaccatcaacgaagacgccctgccctacggtgcagccttgcaagcatcactagctgctcgctatctgcttgagcaccagccccctaccactggtaaggcgaaagcacatgacgagctgtaggtacggacactttcgctctctccctctccttctctctcgtgaacgaattctctttattgaacgcgaatgataaagattggcaagatagaattctgtcaaattaaggtggcatgcccatcgattctgtatttctaggtgccatgtgtgactgatgtacatatactcctgattactgcgcattccaattagc

SEQ ID NO: 8627 - DNA, 1291 bp, Oryza sativa
  ref <308>: DATABASE ACCESSION NUMBER: AK105975
  ref <309>: DATABASE ENTRY DATE: 2002-08-28
aaaaaaggaaaaaagagctttgagttgactgacatggccgtgctctcctcttcctcccatggcctcctccacccaccgctccgtctcctcgccgccgcctccgccagtagcggcagcagctactcgattccccatgcgcgcctccgcctcgccgtcactactccgtcgaggctaccttcccccatctcatcctcgcccgacccaccgcccgacgtcgcccacgacgaagacgaacaggaaggtcagcaccacaaggaggagcgggacgagcggtacgggttcgagatccaggtgcgcaagctgcccaagcgcaaccgccgcctcgtccgcgcccgggtccgcgtcgacgccccgctcgacgccgtctgggccacgctcaccgactacgagggcctcgccggcttcatccccggcctctccgagtgccgcctcctcgaccagtccgactgcttcgcccgcctctaccaggtgggtgagcaggatctcgcgctgggtttcaagttcaacgccaggggcaccatcgactgctacgagggcgaattgcagctgctgcccgccggagcgcggaggagggagatcgccttcaacatgatcgacggcgacttcaaggtcttcgagggcaactggtccgtccaggaggaggttgatggtggggaaatatcagcggatcaggaatttcagactatactttcttatgtggtggaactggagccgaagctctgggttccagtgaggctactggaagggaggatttgtaatgagatcaagaccaaccttttttcaatcagagaagaagctcagaggatccagagattgcaagataagagaaatccatgctgaagtttggcagtatgttttcagtgattggtcatctcttaaggcttcatcccaatattacacgtccttgattctcaagaatacacttcagaaagggggaaaatgggcgaagaaagatgatgacgcgcttcatgatgttagtggaacacccaaaattatgacttaggtcactgggcatgtcttgtgacaattggattggttgatctttctcaatagaagagaggaaaaggcaaatggattatttggaattcggacagctttggacgtgcctgacaggcaaatggatagagggtcccaaaacctaatcttgcttgtatatctaggattacctttttgccactcaatggagaaatgattaacgtttcgtgattaactacacgatgttgacatatattgcaattttatttgtaaccaatcctaggcagaaagctgctgaattggtactcacttagtc

SEQ ID NO: 8628 - DNA, 1126 bp, Oryza sativa
  ref <308>: DATABASE ACCESSION NUMBER: AK105976
  ref <309>: DATABASE ENTRY DATE: 2002-08-28
attgctcggtccagatttacgccaggttaggcttgtagaatctgcgaggcgtctcctgcctggcgctagccgctaggctccccactccccgcgagcttcagccatgtccgcccgagccgccgccggcggcggtgacggtgatggcgggggccgccgcaagacccttgccaaggtgtccctctcctcgctctccgccgccgcggcggaggcggccacgttccccatcgacgccgtcaagacgcgcctcgagctccaccgcggtacagggggcagcggcgggggaggtgggggcgtcatgcgcgtcgctggcgagctcgtacgcgacgggggaatctaccggggcctctcccccgccgtactccggcacctcttctacaccccgctccgcatcgtggggtacgagcacctccggtccaccttcgccagcggtggacgagacgcgggcctcctcgagaaggcgcttgctgggggtgtctccggcgttgtcgcacagtgcaggtggtggcaagccctgctgatctcatcaaggtaaggatgcaagcagacagcagactgttgagccaaggtatccaaccacggtatacaggaatctttgatgcctttacaaaaattgtacgggccgaaggatttcgaggactttggaagggtgttgttcctaatgcccaacgagcctttcttgtcaatatgggtgaattgacatgctatgatcaggcaaagcatttcatcatccggaagcaaatctgtggcgataacctgtatgctcacacacttgcctctgtcgcatctggactgtctgcgacaaccttaagctgcccagcagatgtaatcaaaactaggatgatgaaccagggcaaggatgcaaaagttctatacaggaattcttatgattgtttggtcaagactgtcaaacatgaggggttgacagcattgtggaagggattcttacctacatgggccaggcttggtccatggcagtttgtgttctgggtttcctatgaaaaattgcgccaagcatcaggtatttcgtcattctgatggtgctggcttagttttatcttacatgattacagggagcatccagaataagattttgttaattgtttagctcggcttgtggcattatcat

SEQ ID NO: 8629 - DNA, 1186 bp, Oryza sativa
  ref <308>: DATABASE ACCESSION NUMBER: AK105977
  ref <309>: DATABASE ENTRY DATE: 2002-08-28
acactattctctcttcttcttaccaccctctcccggataagaggcgcaaccaaagcccccaccctcgcccaaaacccccacgagccgcggccatggcgaccaccaccaccaccccctcctcctctctcaccgcccctctcctccgcccgagctcgaacgcgaaccccgccccgagatctctgccgctcctcaggagccggaggtgcgctcgggccgtggcgaccgccgccgccgccgctggccacggggccgctcatcagaggagcgggatttggtcgatcagggatgatttggtggtgccgaggtcgccctacttccctgtggagtatgcgtcggggcaggaacgcgggccatcgcccatggtgatggagcggttccagagcgtcgtcagccagctcttccagcacaggattatccggtgtggtggacccgtggaggatgatatggcgaacatcatcgttgcccagctgctatatctcgatgccatcgatcctaacaaggatatcattatgtatgtgaattctcctggaggatcagtgacagctgggatggccatattcgacacgatgaagcatatcagacctgatgtttccacagtttgtattggacttgctgcaagtatgggagcttttctgcttagtgctgggacaaaagggaagcgatacagcttacctaactcaagaataatgatccatcaacctctcggaggagcccaaggacaagagactgatcttgagatccaggctaatgagatgctgcatcacaaggctaacctgaatggatacctagcataccacactgggcagcccctagataagatcaacgtagatactgaccgtgattacttcatgagcgcgaaggaggcaaaggagtatggtctaattgatggagttatcatgaatccccttaaagcccttcaaccgcttcctgcttctagttagccatggagtgctcaatctccacggagcattttttggttatcttttagaactgttattgcatccactgtttttattagcttggcaagatagttttgcgattccacaagcaaccacatcctgaggcttcaaagtttgtacaatacagatgtactactaggaggatatcttctgcgatgaatattgcaacttatttgatgtactattaggaggatatcttctgcgatgaatattgcaacttatttgat

SEQ ID NO: 8630 - DNA, 1474 bp, Oryza sativa
  ref <308>: DATABASE ACCESSION NUMBER: AK105978
  ref <309>: DATABASE ENTRY DATE: 2002-08-28
agctcgatcgatcaattcatctcatcgtccatggcgcccaaggtggcggtcacggaggcgacggggcggcaggcggcgtcgttcgtgctcggctgcgtggccacgctcaccgtcatgctgctcttccagtaccaggcgccgccggactacggccgcgccgccaggtcgccggtgcagttctccacctccagagaccagctgctgctgcactgcggcggcaatggaacggcgccgccgccgccggtgatcgcacgtggcggcgaggaggctaacatcaccggcaagcctccgacgactgctactgctgtcgccgaggagcagccgccaaccaagcctcctgcgacctctactgcatcttcaccaactcatcatattccagcaaccagtacagatcttgaagaagagggcggcgagttccgggggttggcggcggcggtggcgcgggcggcgacggatgaccggacggtgatcatcacgtgcgtgaaccacgcgttcgcggcgcccgactcgctcctggacatcttcctccagggcttccgcgtcggcgacggcacgccggagctcctccgccacgtcctcgtcgtcgccatggatcccaccgcgctcacccggtgccgcgccgtccacccccactgctacctctacaccatgcccggcctcgacgtcgacttcacctccgagaagttcttcgcctccaaggactacctcgagctcgtctggagcaagctcaagctccagcgccgaattctccagctcggctacaacttcctcttcacggacgttgacattgtgtggctgaggaattcgttcaagtacgtggcggtgtacgcggacatggcgatctcgagcgacgtgttcttcggtgacccggacaacatcgacaacttcccaaacacgggcttcttctacgtgaagccgagcgcgaggacgatcgccatgaccaaggagtggcacgaggcgaggagttcgcacccggggctcaacgagcagccggtgttcaaccacatcaagaagaagctggtgaagaagctgaagctcaaggttcagtacctggacacggcctacatcggcggattctgcagctacggcaaggatctgagcaagatctgcaccatgcacgccaactgctgcatcggcctccaatccaagatcagtgatctcaagggtgttcttgctgactggaagaactacaccaggttgccaccctgggcaaagcccaatgccaggtggactgtgcctggtaaatgcatccattgattttgattgtcgatcgggcagtatctggtgttgtaggctacgtacagtcaggaagatagctttatttgcacatgaaagggcgaattttgttttttttggtttgttgtagattgatgggtcgatttcaagttatattactgtatacctgacggcagacaagtatacgcatgatgggcaaactatatgatatgatatgatatgatagtactttagatgt

SEQ ID NO: 8631 - DNA, 1279 bp, Oryza sativa
  ref <308>: DATABASE ACCESSION NUMBER: AK105979
  ref <309>: DATABASE ENTRY DATE: 2002-08-28
ctcccgagacgaaccacccgaagccgcagcagcagcgatggcaatggagaggcttatctcttcgccgctcctcccgcgccggcctccccgcgccgccttctcccgcccgccgccctccctcgccgccgcgccaccccaccaccgcgccggcggtgcggcctccgggtacggctccaggccgcctctcgcctcgctcctcctctccaggcaccaccaccaccaccagcctccggtcctcgcggccaatcctgctgccgatgtggccgccggcgaggctgtccctcccgccaccgccaccgccagccggcgcttcctccagaaggtggcgtcggctgcggctgccactctgttggcgacgattgcactgacgctgatccagccggcgtgggcgccgccggcgttggcgtcgttccactcggcggcgaaggcgggaggtggcatcttcaagtcggagctgctcagcagcgcgtggacggggttcctggccggctgcctgcacacgctctccgggccggaccacctcgccgcgctggcgccgctgtccatcgggaggtcgcgggtggagagcgccgccgtgggcgcgctctggggctgcggccacgacgccggccaggtcatcttcggcctcctgttcctcagcctcaaggaccgcctccacatcgaggtcatccgaacgtgggggacccgcgtcgtcggcctcacgctgctcgtcatcggcgccctcggcatcagggaggccaccgaggtgcccacgccgtgcgtcgcgctggagaacggcggcggcggcggcggcgcgcaccgtggcccgctcgatgctctaccagccaccaggaagaagatcaccttcgccacgttcgccaccgggatcgtgcacgggctgcagcccgacgcgctcatgatggtcctgccggcgctcgccctcccgtcgcgcgtcgccggcgcggcgttccttggcatgttcctcgtcggcaccgtggtcgccatgggcagctacaccgtcctgatcggctcttgtacggaggcgctcaaggagagggttcccaggatcacggagaagctgacatgggctgcctcgctcgtggccatctccatgggcctcggcatcctcatcagccagtctctcggctttagcttgtactgatccgccatccctcgcgacacctccttcttcttcttcgccattgttaagcttccactgcctccactgtaggaatctgccatgagaattttgcaaatgttgcttgttgagatccaggagaattcaagtttagttcacaag

SEQ ID NO: 8632 - DNA, 2038 bp, Oryza sativa
  ref <308>: DATABASE ACCESSION NUMBER: AK105980
  ref <309>: DATABASE ENTRY DATE: 2002-08-28
tataaatgccggattgcttaattgctttcttctttgctttcctctcaaggcaatagcaagtctattttctataaaaaacaaaggcaaactctcttcttcttgttattgtttttgcaaagataaacaaatgcaaaattcgggttgataattacgggttttgacctgtaagattcttgtatccacttcaggttgggcaatcagactagttttaccgactggtgtggtgaccggtgaccgtgtaaatccgcaatgcaatcaatcatcaatgacatttctacaatcgaaccaccgtagtggatgactggatgtgatagcaacatatagatcgaagctaaactagtagtatgaccgaacaattttttttagaaaaagtaaaatttaatcaatagtagttttcttatacaatttgccctgtggttgtttatatttggtatggaggcatggagccttatttaaatcctctgctttatctgaaaatatcttgtctgatcgacgtgggaccttctggatttggacagactagttaggactaaacaacgtcctcagacagaaaaccctacggttttggtcttcttgtggttagttccactgtccatttttgctgccagcggcctatcaccagcacacgaaccggtcgcacggacaaaacggtacaacttgctttgcctgaattctgaccggtcatcgtacacgtttcggtgaccaatcatggtgagggattggtgtggacagtgtgcttgtttttctctcttgctcgctgatcaatccatcttcttttgtcgtcggttataaacttataatggtctgacattcctgttagctttgcagcccggcgaaccatcgatataaggaaagattttgtttgatcgaggtggggatggatcagctttgcacgagtggaggcagcgacagcgacaagtctttggcggccggcgatgagccggcggtgagagtccgaggtgaagtggaggcggaggcggcggcggcggcggcggcggcagaggcgcaaggcggtggctgcttcgactgcaacatctgcctggatttcgccacggagccggtggtcaccctctgcggccacctctactgctggccctgcatctacgagtggctgcaccccggcggcgacgacgacggaagcaacggcgacgcgagctcgacgaggcggcgtccctgccccgtgtgcaaggccgcggtctcgccggacacgctcgtgccgctctacggccgcggccgcggcggaagttccaagagggcccgatccggctcggccatcccgcgccggccgatcgtacatcgggagcccgtcgagcggcagagcgatcggctcggcgacgacgacggaggacaccgacacgggagcacgggatccagcccgccagtccggtcaccgtggcacgccaatcaccacgccgccgccgctagcacgccggcgccggcgccggcgcggttgttcgacgtggtctaccctccaccacctgctgccgtgggcggcgtgggcatgttccactcgacgacgacaacgaccggagggatgctcggagggatggccctggcggtgctcccgtgggtgtcgcgcgggcagtcgccggcgacggcggcggcgagcgcgtactacacgagcccttaccacatgagccccaggctgagacggcagcacatggaggtggagaggtccctgcaccagatatggttcttccttgtcgtgttcgcggtgctctgcctgcttctcttctgagagcggcgcacaccagatgatctgcaccttccaggagatccaagttgtactcctaactttcgtgtacataggtcgtgtacataggtaaaaaaaaaaaggtgcgtcatgccgcccagtaggcagtagcagttccgtactgccgtgccatccaaagcaaccctcttgcaactcctcgagcatgttctgatttagggcgctgcttaagcaaaggccaatgtgaatcgatgactcattttgcagagatgcagcatgccattttgcgcacatcagtgttaaacaagtgagaccattcatctgccg

SEQ ID NO: 8633 - DNA, 1290 bp, Oryza sativa
  ref <308>: DATABASE ACCESSION NUMBER: AK105981
  ref <309>: DATABASE ENTRY DATE: 2002-08-28
acaaaccaacacccccactcatctcacttcactctctttctcttctcttcacttcaccaccgccacctctctcatcggatccctgcagaggaggagagggcagtggcggcgaaaggcgacatgggctcgctgtcctctctcgccgccgcggcggtgtttctctccctcctcgccgtcggccactgcgccgccgccgacttcaacgccaccgacgccgacgccgacttcgccggcaacggcgtggacttcaactccagcgacgccgccgtctactggggcccctggaccaaggccagggccacctggtacggccagcccaacggcgccggccccgacgacaacggcggcgcgtgcgggttcaagcacaccaaccagtacccgttcatgtcgatgacctcctgcggcaaccagccattgttcaaggacggcaagggatgcggctcttgctacaagatcagatgcaccaaggaccagtcgtgctccggcaggtcggagacggtgatcatcaccgacatgaactactacccggtggctccgttccacttcgacctcagcggcacggcgttcggcaggctcgccaagcctggcctcaacgacaagctgcgccactccggcatcatcgacatcgagttcaccagggtgccatgcgagttcccggggctcaagatcgggttccacgtggaggagtactcgaaccctgtgtacttcgcggtgctggtggagtacgaggacggcgacggcgacgtggtgcaggtggacctgatggagtcgaagacggcgcacgggccgccgacggggaggtggacgccgatgagggagtcgtggggctccatctggaggctggacaccaaccacaggctccaggcccccttctccatccgcatccgcaacgagtccggcaagacgctcgtcgccaacaacgtcatcccggccaactggaggcccaacacattctaccgctccttcgtccagtacagctgaaccgccgctcgccggcggcgaccctcggcgccggcatcgccgccgctgctgctgctagtaatactactactgctatgatgtaattgtgttaccggttgggttctttgagtttgttggggttggggattgtgtggtcggtctgtgttgcgatttgcagaaaccgggcgagcgaaagaagaaaaaaaaagctgtgtgggaaatggaggaggtaggcgtacaaggttacgctctcccgcccactctcgcttttataatttatcattttcaaatggtgatgatatgatgattaatcaaaaggattatattgct

SEQ ID NO: 8634 - DNA, 1113 bp, Oryza sativa
  ref <308>: DATABASE ACCESSION NUMBER: AK105982
  ref <309>: DATABASE ENTRY DATE: 2002-08-28
gctgctcttcatccgattcaactcggaccaccagatttcttccttccttccttgcagaatctttcattgttcttgttgggaggaaggagacgaggcgcgcgaggcggcgagagggaggaggcattctagcatatacagatacagagccaggggaggtatggaggagggccttgcacgagcacgacgatgccaatagaagctgtggcggtcgcttctttaccgatggcgtcgcgcagcgccgccctgtgcttctcctccgccgccgctgcccggagccggagcaggagccggcacggcaggatggccgtcagctgcgacgccggggcctcagatctgctctattcctctctggctgccaagctgcttggccctcccaccagcttcgatgccggcaagctgacggtagagttcgcccacagccacgggaacagcagctccgggttccccagagcttacaccctcacccactgcgacttcaccgctaacctcaccctcgccgtctccgacaccatcgccgccgaccgccgcctcagggcggacgacgtcttcgccgagtggaagcagcagcaacagcaggagggcatggccctgcacgtgcactgcttcgtcagcggcgccaacctcctgcatggcctcgccgccggcttcaggtactacgtcttctccaaggagctgccgctggttctcaaggcagttgttcatggcgacgcattgctgttcgcggagcagccggagctgctggaggcgaaggtgtgggtgcacttccactccagctccaacgctaagtacaacaggctcgagtgctggggtcctctcagggaggctgcaaacgccgagacgacgcacaagaggcatgcgctggagcaactgcacaacgcaatcaccaaaggcacaagaaggcgtaggaggaagtggtctagcccggacgccatcttcagcgccctgctcgcccttctcctttgatgcatatcgggaaccccacacattgtcttttttttgctctgccttgtgcgcatcaattccaattctttcatccaccggacacttgacatgtatgtatagtatgtacccactccacgatcaacaaaatgagaaacgattgcctttccaagc

SEQ ID NO: 8635 - DNA, 1153 bp, Oryza sativa
  ref <308>: DATABASE ACCESSION NUMBER: AK105983
  ref <309>: DATABASE ENTRY DATE: 2002-08-28
catctgcggcggcagcgcgtacccgagggactgggactacgccaagctcagggccgtcgccgacaaggtcggggcgctgctcctctgcgacatggcgcacatcagcggcctcgtcgccgcgcaggaagctgcaaatccttttgagtactgtgatgtggttaccaccaccacgcacaagtccctccgaggaccaagagctggcatgatcttctacaggaagggccctaagcctcccaagaagggccagcctgagggtgctgtctatgactacgaggacaagatcaacttcgcagtgttcccgtcactgcaaggtggtcctcacaaccaccagattgcagcccttgctgttgctctgcagcaaaccatgacacctggattcaaggcctacgcaaagcaggtcaaggccaacgctgtcgccattggcaagtatcttatgagcaagggctacaaaatggtgactgatggaactgagaaccaccttgttctctgggatcttcgccctcttggcttgactggcaacaaggttgagaagatgtgtgacctttgcagcattacacttaacaagaatgctgtctttggtgacagcagtgcattggctcctggcggtgtccgcattggtactcctgcgatgacatccaggggtcttgtcgagaaggactttgagcagatcggcgagttcctccaccaggccgtgaccatctgcctcaacatccagaaggagcacggcaagctcctcaaggacttctccaagggcctggtgaacaacaaggacatcgagaacctcaagctggaggtcgagaagttcgccacctccttcgacatgcccggcttcaccctcgacagcatgaagtacaaggagtaggaaaacaaaaacacacacaaaccatggtcctaccgccgctaatcgtcgaccagctgtgctctcgtggaccgccgtcgtcgtcatcttcttcctcggcacaagctggccctgtgttacggattttgtctgcccatcgagatgataggtttcataaaacgctctctcccccaccctgctgctgcctctggtttggttgccaacctcatcccccatcggtttttttcctcctcttgtttctaatttctaggagctgtgccttttggaatcatggaatgtcaagtatttgccaat

SEQ ID NO: 8636 - DNA, 1751 bp, Oryza sativa
  ref <308>: DATABASE ACCESSION NUMBER: AK105984
  ref <309>: DATABASE ENTRY DATE: 2002-08-28
aactcatcagcacactcactctgcaacaagcatgcagacgccaaccatgtcgacgtccatggccacgccggcgaagctcccctcaccgccgtcgctgccgatagcgaggcaatgctgctgccacctgctgcagctagggcggcgcggcggcgcgggcgtggcgcgggcgtcggcgaagaagaagaacccgtggctggacccgttcgacgacgggcccgacgacgagttcgactaccgcggcgcgttctcgggggggaagcaggaggaggacccgcggccgccggaggacccggcgaacccgtacgggttcctgcggttcccggcggggtacaacccggagctggatagcctggcatccaaggtgcggcgcgacgtgcggcgggcgtgctgcgtggtgtccggcggggtgtacgagaacgtgctcttcttcccggtggtgcagctgctgcgggacaggtaccccggggtggtggtggacgtggtggcgtcggcgagggggaagcaggtgtacgagatgtgcaagaacgtcaggtacgccgacgtctacgaccccgacgacgactggcccgagcccgccgagtacacccaccagctcggcgtgctcaagaacaggtactatgatctgatcatatcgaccaagttggccgggatagggcacgcgctcttcctcttcatgtcgtcggcccgcgacaaggtcggctatgtttaccccaacgtcaacagcgccggcgccgggctgttcctcaccgagatgttccggccgccgaccaccaacctcgccgacagcggctacaacatgtatcaggacatgttggagtggattgggcggccagcgaagggtgtgccggagcacccggtaccgccgttgcgggtgtccatctccaagaagctccgagcgttcgtggaggacaaatatagccgtgccggcgtcgagaagggcaagttcgtcgtcgtccacggcatcgcctccgactccttcgccaacatgaggtcgaggggggacgatgactgcctcctccctctcgagcattgggctgagatcgccaaggagatcagctctgaagacaatggtctgaagcctctgtttgtgatccctcatcagaagcacagggaagaggttgaggagactgtggggaaggacaccaatatcctgttcatcaccactcctggccaactcacctgccccatcaacgactccgtcggcgtcgtcgcgaccaacaccgccgccgtccagctcgccaacgccagggacaagccatgcgtggctctcttctcatccaaggagaaggcgaggctgttcctgccgtacttggaggagaagaagggctgcaccgtcgtcgcgtcggagaccgggaagctgatcgacatcgacgtcgaggccgtcaagaaggcggtgaaggagttcaaggccgccccaagcgttgcattggctcaaacatgatgaagaccatcatcttcttgttgcactgtacatagatctgcacggttacagtgagctcgcctgagcaagtgagcagcaaaagctccttgcctggctctgattcaatgtgtcttgtagtcgttcagttcagctacaaatgttccacatacaaccgcatgaaatgcccaaactcaccttgtctactgctcaccgagcagacaagcgatgcagcctgtgttactctgtttatagaatggaaatggcatacaccttgcacgtttttatgatataacaccagatacaataaacatatcatggcatggatcggctt

SEQ ID NO: 8637 - DNA, 1672 bp, Oryza sativa
  ref <308>: DATABASE ACCESSION NUMBER: AK105985
  ref <309>: DATABASE ENTRY DATE: 2002-08-28
attattaatctcaaattcgtcgtcctcgcaaatcggatcagcatggctgccatcctgctgctgctgctcgtgttcttggtgagtgtggccttggttgttcgaacatggagtgctagtaggagatctcatgagaaggcgcggtatgcgacggccgagctgcggccgtatccgctggtcggccacctgccgcagttcctcgccaaccggcaccgcatcctggactggatgacggaggtgctgtcgcggcagccgacgcgcacgttcgtgctccgccgccccggcggcgtgcggggcgtgatcaccgcgaacccggcgaacgtggagcgcttcctccgatccgggttcgacaactaccccaagggcgagcgcttcgcgtcgctgctgcacgacttcctcgggcgcggcatcttcaacgctgacggcgaggcgtggcggtcgcagcgcaaggcggcgagctacgagttcaacacgcggtcgctccgcgccttcgtggcgcggtgcgtgcacggggagctgcacgggcgcctcctcccgctgctgcggcgcgccgcggcggagggccgcgccatcgacctccaggacgcgctcgagcgcttcgcgttcgacaacatctgccgtgtcgccttcgaccacgaccccggccagctccctgacgccagcggcggcggcgctctcgcggaggccgacgatggctccactgccagcggcaggttcgccgacgcgttccgcgacgccgctaatctcagcgcggggcggttccggtatgctgtcccgtggttctggagggtgaagaaggcgctccacattgggtccgagcggcggctgcgcgagtccatcgccatcgtccacgacttcgccgaccgcatcatccggtcgcggcgggaggagatacgcgccggcctcgagaagcacgacctcctgtcccggttcatggcgagccacgacgagtcgtacaccgaggtggccctccgcgacgtcgtcatcagcttcctcctcgcggggcgggagaccacgtcgtcggcgctcacctggttcttctggcttctctcctctcgcccggacgtggagcggcgcatccgcgaagaagtcgccacggtgcgcgcacgccgtggcgacggcgacgtcgaccgggtcggcttcgacctggacgagctgagagagatgcagtacgtgcacgccgcaatcacggagtcgatgcgcctctacccgccggtgccggtggactcgctgcatgcgcaggaggacgacgtcctgccggacggcacggcggtggaggccgggtggttcgtggcgtacaactcgtacgccatggggcgcatggagtccgtgtggggcaaggacgcggcggagttccgggcggagcggtggctggaggacgcggcggcggcgacgttccggccggagagcccgttccggtacgtgtcgttccacggcgggccgagggtgtgcctcgggaaggagatggcgtacatacagatgaagtccatcatcgcctgcgtgctccaggagctcgagctcgccgtcgacggcgcgtaccggccgcggcaggtgacgtcactgacgctgcgaatggcggatgggctccccactagggtgaaagttagaggcaattgaatgtgacatttgggcttgtggaccatggcccgtagcagaaagaaacagtttcccatgc

SEQ ID NO: 8638 - DNA, 1047 bp, Oryza sativa
  ref <308>: DATABASE ACCESSION NUMBER: AK105986
  ref <309>: DATABASE ENTRY DATE: 2002-08-28
agactgccaccgccgctgccactccatccactctgccaccgccgctgccgccaccatccactccccaccgacaccgttcgtgcgacgccgccaccgtccactccgccgccgccatcgtccccttccgccaccaccatccactcctccaatagctcatctgccgccgccgcgtcgttcagcaccggcggcggcggcctaccctccccgttccccgaccttggcgcccccctctccgccacgaacacctcctccccgtcgctccaagggtggaagccctgggagcggcggctgcggtggggcgaagtcggcgccgccgcggtggccggcgaccgtcggggagttgacgcgtgtgcagatgcggatttcggagcccgccgacacctcaagacaccgacgacctcaagccgccgtccacctcaagatgccgccacctcaagccgccgtccccgagcccgacacatgctcaaggacgagcggctcgcgcagcaccagccgacgcagtacccgacgtcgtagagctgagcgtcgccaagaacaagttcaaggccttcgacctcggcggccaccagatcgcccgcctctgttctaattctaccactctttctttttttccccctctcctgctgcagcttttgtgctacttgttgatggatttatgattttattccttgagggacggatggggtgatttgggtcagaagcagctcttgtttgattggaacaaactagggtttaggcatgggggacggatggggtgatttgggtcggaagcagctcttgtttgattggaacaaactagggtttaggcatggggagtattggggattagacatgcacctgggttaatgaagaatcgggcatcttactcgaatcatggaaagaaataatcagtgctttcattcattattgattggtcgattcagatcttgcaaaatgaaccatccgattgggcaatcggatatgttgctggtgttagtcctcagtttcagccatgagctctagtctccagtattcagatcagttacaataagagtggtcacttttagc

SEQ ID NO: 8639 - DNA, 1128 bp, Oryza sativa
  ref <308>: DATABASE ACCESSION NUMBER: AK105987
  ref <309>: DATABASE ENTRY DATE: 2002-08-28
atcatccacaaactcccctaaaaatttccccccgcggcggcccggcgtggcgcggccgtggcgaggtacgacgccgcggcgtcgggggggaagctgtacgtgacggaagggtgggcgtggccgttcgagcgggcgccgcgcggcgcggtgtacgacgcggcgtcggactcgtggtcggagatggcgcgcgggatgcgggaagggtggacgggctcctgcgccgtcgccggcggccggatgtacatcgtggcggagtacggcgagtggaggctgaagcggtacgacgagccgcgggacgagtggaggatggtcgccgggagcggggtgccccccgaggtgaggcgcccccacgtcgtctccggcgaggtcgaggaggtcggcagcggcggcaggcggcggatatacgtggtgggcgccggcctcgacgtcgccataggcacggtctccccttctccggccatccacggcggcgacgacgagagggtggactgggaggtcgtcaagggccccgccgagttcgccggcctcgccccgtgcaacgctcaggtcctctacgcctgaactccccgccgccgccgctgccgctcgccggtggcgcgtcgcatcgccggggaccccgctttttccgggcccacctgtcagtgagacccctccacccacgcgggcccacctggcagaagcacgtgacgatgcttcccgctgctcactgctgacgcccatccacgggcgaaatcacacaggcactgccttggcacgggacccacctgtcagtgactccgaatcgggggctaaatggtcttttcacccccgctgtccatctctgcatctcaattctatcttgtcagaggagcagaggacggaggaatggagcgtgcgtctctgtaaaacttaaataccacccatatttaattaattactcctactagcagtagtattagattcttcatgtaccactagtatatttgcaaatatttgcacgaggttttgaacaaacgagaaaaaagtggtgaagatcgatgacgtcgacagcactactgaatgaatgaacaaagtggggaaaaagaaaagaaaaataattcaaaccccatttcatttcgttcactaaggcaaagtacttaccaataagat

SEQ ID NO: 8640 - DNA, 2440 bp, Oryza sativa
  ref <308>: DATABASE ACCESSION NUMBER: AK105988
  ref <309>: DATABASE ENTRY DATE: 2002-08-28
acactgccaagctccgcttcaagtgagctagtctagccagcgtttagacaccatcaccagcaatggcgatcgctggcgttctcttcctcctcttcttggcacggcaagcctccgccgccgggtacggcgggtggcagagcgcccacgccacgttctacggcggcggcgatgcttccggcaccatgggcggggcttgcggttacggcaacctgtacagccaagggtatggcacgaacaccgcggcgctgagcacggcgctgttcaacgacggcgcggcgtgcgggtcgtgctacgagctgcggtgcgacaacgccgggagttcgtgcctgccgggctccatcaccgtgacggccaccaacttctgcccgcccaactacggcctccccagcgacgacggcggctggtgcaacccgccccgccctcacttcgacatggccgagccggcattcctccacatcgcccagtaccgcgccggcatcgtccccgtctccttccgcagggtgccgtgcgtgaagaagggtggggtcaggttcaccgtgaacgggcactcctacttcaacctggtgctggtgaccaacgtggccggcgccggcgacgtccgctccgtctccatcaaggggtcgcgcaccgggtggcagcccatgtcgcggaactggggccagaactggcagagcaacgcgttcctcgacggccagagcctctccttccaggtcaccgccagcgacggccgcaccgtcaccagcaacaacgtcgcccaccccggctggcagttcggccagaccttcgagggtggccagttctagccgccaccgacatcgccgtctccgacacccacatataatagcacggtgtccttcttcgtcttcgttctcgtcgtcgtctttcttccttgagagattatttattttgagcaagagagaaagaaaagcctcttcgttatagtggagaagaggttttgggctatgctgaggctgctaattagcacccgcttagacgttttccttctctggacttcgtccaataatgactggaccggtccaccatcatcaagtgtagtggtagtagtaaaggggagtactaagcttagggaaggtgcgaacaagtccctgatatgagatcatgtttgtcatctggagccatagaacagggttcatcatgagtcatcaacttaccttcgccgacagtgaattcagcagtaagcgccgtcagaccagaaaagagattttcttgtcccgcatggagcagattctgccatggcaaaacatggtggaagtcatcgagccgttttaccccaaggctggtaatggccggcgaccttatccgctggaaaccatgctacgcattcactgcatgcagcattggtacaacctgagcgatggcgcgatggaagatgctctgtacgaaatcgcctccatgcgtctgtttgcccggttatccctggatagcgccttgccggaccgcaccaccatcatgaatttccgccacctgctggagcagcatcaactggcccgccaattgttcaagaccatcaatcgctggctggccgaagcaggcgtcatgatgactcaaggcaccttggtcgatgccaccatcattgaggcacccagctcgaccaagaacaaagagcagcaacgcgatccggagatgcatcagaccaagaaaggcaatcagtggcactttggcatgaaggcccacattggtgtcgatgccaagagtggcctgacccacagcctggtcaccaccgcggccaacgagcatgacctcaatcagctgggtaatctgctgcatggagaggagcaatttgtctcagccgatgccggctaccaaggggcgccacagcgcgaggagctggccgaggtggatgtggactggctgatcgccgagcgccccggcaaggtaagaaccttgaaacagcatccacgcaagaacaaaacggccatcaacatcgaatacatgaaagccagcatccgggccagggtggagcacccatttcgcatcatcaagcgacagttcggcttcgtgaaagccagatacaaggggttgctgaaaaacgataaccaactggcgatgttattcacgctggccaacctgtttcgggcggaccaaatgatacgtcagtgggagagatctcactaaaaactggggataacgccttaaatggcgaagaaacggtctaaataggctgattcaaggcatttacgggagaaaaaatcggctcaaacatgaagaaatgaaatgactgagtcagccgagaagaatttccccgcttattcgcaccttccttagtactacttgaagaaaaaatcaataataattgtattgattaaatttctacttttgagcgttttcttgtaccggagtgatggccttgcaacggaattaaaaaccgcgaggccgtgttttatttatcaaggggactattgatgttgtactttgtcgt

SEQ ID NO: 8641 - DNA, 1716 bp, Oryza sativa
  ref <308>: DATABASE ACCESSION NUMBER: AK105989
  ref <309>: DATABASE ENTRY DATE: 2002-08-28
atctagctgatcagcttgcctaggaagcaaggaattagccatggcttctgtttcgccgctactgcttctcctcttgtgcagctaccactctgtagttgctcatgcaggagatggacagagttacaaggttcttgagctgaattctgaggccgtctgctccgagcgaaatgcgatttcgtcgtcgttgagtggaaccacggtggcgttgaaccaccggcacgggccatgctcgccggtgccgtcgtccaagaagaggccgaccgaagaggagctgctcaaacgcgaccagctccgagccgagcacatccagcggaagttcgccatgaacgccgccgtcgatggcgccggcgatctccagcagtcgaaggtgtcgtcgtccgtgccgaccaagctgggctcctccctggacacgctggagtacgtcatctccgtcgggctcggcacgccggccgtgacgcagacggtgaccatcgacaccggcagcgacgtgtcgtgggtgcagtgcaacccgtgccccaacccgccgtgctacgcgcagacgggcgcgctgttcgaccccgccaagtcgagcacctacagggcggtctcctgcgccgccgccgagtgcgcgcagctcgagcagcaaggcaacggctgcggcgccaccaactacgagtgccagtacggcgtccagtacggcgacggctcgaccaccaacggcacgtacagccgcgacacgctgacgctgtccggcgcctccgacgccgtgaagggattccagttcgggtgcagccacgtcgagtcgggattcagcgaccagaccgacgggctcatgggcctcggcggcggcgcgcagtcgctcgtgtcgcagacggcggcggcgtacgggaattccttctcgtactgcctcccgccgacatcgggctcgtccgggttcctcacgctcggcggcggcggcggcgtgtcggggttcgtgacgacgcggatgctcaggagcaggcaaatcccgacgttctacggcgcgaggctgcaggacatcgccgtgggcgggaagcagctcgggctgtcgccgtcggtgttcgccgccgggtccgtggtggactccggcacgatcatcacgcggctgccgccgacggcgtactcggcgctgtcgtcggcgttcaaggccggcatgaagcagtaccggtcggcgccggccaggagcatcctcgacacgtgcttcgacttcgccggccagacccagatctccataccgaccgtcgcgctggtgttctccggcggcgccgccatcgacctcgacccgaacgggatcatgtacggcaactgcctcgcgttcgccgccaccggcgacgacgggaccaccggcatcatcgggaacgtgcagcagcggacgttcgaggtcctgtacgacgtcggcagcagcacgctcggcttccggtccggcgcgtgttgaccggggcgggcggcgcgacgccggcgcctggcgggccgggcaacacgacacacgtagaggccaagagggtagcagtaggttgctctcatgtggtcgtctacttgtttgtggttgcgaggtaagagtcgtgacgtgtgatgatgacaagatataatgatatatattgcaattgtaatccaacaaccaaaatattatattagtccctagctctaaaaaaatattatattaggagtgaacttttcatgattttttatgaataataaagactttatactgattaattc

SEQ ID NO: 8642 - DNA, 1257 bp, Oryza sativa
  ref <308>: DATABASE ACCESSION NUMBER: AK105990
  ref <309>: DATABASE ENTRY DATE: 2002-08-28
ctcctccgcctccgcctccgcctccgcctccctcgcaaggggtctcccacgcatcgccgcccgccgctgacgcgtgggacccaccccttccccccccccacaccacccgccgcttcccatctccgacaagcgcctacaacgccgcaagtagccctaaccctaggtcgctggatgcgccgatggccgccgccgccgcagcctgcgtagagagccccgacgagggcgtggagatccgggaggtatgggcggggaacctggaggcggagatcgcggcgatccgcgacgaggtcgaccggtacccgtacgtcgccatggacacggagttcccgggcatcgtgtgccgccccgtcggcaacttccgcaccaccgacgagttcaactacgccaacctcgaggccaacgtcaacatgctcaagctcatccagctcggcctcaccctctccgacgagggcggcgacctcccgcggcgggggacggggggcaggcgctgcatctggcagttcaacttccgcgggttcgacccccggaccgacccgtccaacgccgactccatccagatgctccgcacctgcggcatcgacttcgatcggttcgccgctgagggggccgacccgatccgcttcgccgagctgctcatgtcgtcgggcgtcgtgctcaacgccgacgtgcagtggatcaccttccacagcgggtacgacttcggttacctgctcaggctgctcaccggccggaacctgccggacaacatgcccgccttctttgacctcatcagaatctacttcccggtgctctacgacatcaagcacctcatgaggttctgcagcaacctccacggcggcctgagcaggctcggtgagcttcttgatgtcaagcgtgtggggacctgccaccaggccggctctgactcgctgttgaccctcgggtgctacaacaagatcaaggaggtgtacttcaaaggatcgaccgagaagcatgccggtgtgttgtatgggcttgttattgaggatggggtgaacagaccaccaccaactcagcccaatgaatgaatatggttagttaaataaaacaatctgaaatgggaaaaaaaattgaaactttcgttggtgaatatatgttgtctgatctgatctgatgatttgcttatggtttccatggtagtttgttgtgccttgctgttactatttgttgtagttgagttgctttagttgttttgtctttgactctttgtgctgtgcaatcatctttcattgtttgccc

SEQ ID NO: 8643 - DNA, 1393 bp, Oryza sativa
  ref <308>: DATABASE ACCESSION NUMBER: AK105991
  ref <309>: DATABASE ENTRY DATE: 2002-08-28
ttgccatcttcatcttctacctccatccagtcctcatggccgcagcaatagacatgtacaagtataacactagcacacaccagatcgcatcctcggatcaggagctcatgaaagcgctcgaaccttttattaggagcgcttcttcttcctccgcttcctccccctgccaccactactactcttcttctccttccatgagccaagattcttacatgcccaccccatcttatcccacttcctctatcacaaccgccgccgccaccaccacctcgtctttctcgcagctacctccgctgtactcttcgcagtatcatgctgcttcacctgcggcgtcggcgacgaacgggccgatggggctgacccacctgggcccagcccagatccagcagatccaggcccagttcttggcccagcagcagcagcagagggccctggccggcgccttccttcggccgcgtggccagccgatgaagcagtccgggtcgccgccgcgcgcggggccgttcgcggcggtcgccggggcggcgcagtcgaagctctaccgcggagtgcggcagcgccactgggggaagtgggtggcggagatccgcctcccgaagaaccggacgcggctgtggctcggcaccttcgacaccgccgaggacgccgcgctcgcctacgacaaggccgccttccgcctccgcggcgacctcgcgcggctcaacttccccaccctccgccgcggcggcgcccacctcgccggcccgctccacgcctccgtcgacgccaagctcaccgccatctgccagtccctcgccacgagctcgtccaagaacacccccgccgagtcagcggcctccgcggcggagccggagtcccccaagtgctcggcgtcgacggaaggggaggactcggtgtccgccggctcccctcctccgcccacgccgctgtcgcccccggtgccggagatggagaagctggacttcacggaggcgccatgggacgagtcggagacattccacctgcgcaagtacccgtcctgggagatcgactgggactcaatcctctcataaacaagcagaagcagctactactagtctattactagtactagtagtagtcttcgtcaagctagagtcactcaactcaactagctgtgtaatcttctctgaattccgtggcttccatggctcggtggcattttagacgtcggccatggctgctgcgagtagcagtaactagtcagtactcagtagtagtaaggtcgttggtattacgtcgtcgtgcaagtgtcgttggtgtactcagtgatctgatctcctggttgagctgccggttgtttttttcacggcgcggccggtcgagaattaagctgtaatcccttgttacatgttggaaattcagtagcttatgt

SEQ ID NO: 8644 - DNA, 1349 bp, Oryza sativa
  ref <308>: DATABASE ACCESSION NUMBER: AK105992
  ref <309>: DATABASE ENTRY DATE: 2002-08-28
aattccatctttcttctgttctcctttcctcttcctcgttcttcttcttcttctagtatccgtgcataaaactgctaaacaattaccactattgtattgaccaatgagtcgacggggccatgtggtttggttttgtttagcatcccgtctctctcctcctctgtttccatcatcatcatcatccagaggccaccaaccctcctcgattattcagagcagccaattagtcttggcgtcttgacgtgttcggagaatttcctctcatttatatgcagtagttagacatgctctggagaagcaaagcgaggtaggaagagggatttggtcgaattttacgtacttagccgtgggcgaggcgtttacagggttgcttcggctcggggtgggttgggttgggttgggttcgatggagaagtggagcagggggctctcctgccgggccgccatctgcggcatcgtcgtcctgctctgcgccaccgcgttctcctgctccctcgccgccgaattccgcaaagtcaaggagaaggacatgaagctggacggtagcctctgctccctgcccaagagctccgccttcgaattgggcgtcgcggccatcgcgttcctctccgtggcgcagctggtgggcaccacggcggcggcgaccaccatgtgcgccgcgtccaagcgcagcaagtcgtccaccaccaggcgccgcgcggcgtccgtcgccatcctcgtcctctcatgggtgagcttcgcgctggccgtcgtcctgctggcgaccgcggcgagcatgaaccacgggcagcggtacggccggggctggatggacggcgactgctacgtcgccaggaacggcgtgttcggcggggccgccgcgctggtcgtcgtcacggcgctcctcatcctcggcctcacctccaccaccaaatcatcctcatgcgccacctcggcagcatccgccacaacgacaatccgtctcgacgcggcggccacggacgccgagcaggcgagcgggcgatcgaagcagtgacccgccggcctggccggggcggaacacgcggggcgggacgggccaaccggaggagaggcgggtggacggtgctccgcgctgttcgtcccgcaaaggccaagcggcgtgggggcaatctccgcttgctggcaaaggccaacggctggtgatgggtgggggcgggtataccggtgggttagaagatattttagctggacaaaggtagtacatagcattactgacaaaattactgaccaagaggtccaagaccgtgcaaaatgtaaatgaaaccagatcaaacagatccacgcaaagaaagtaaaggttgtacatgaattaattacagcatcttaag

SEQ ID NO: 8645 - DNA, 1728 bp, Oryza sativa
  ref <308>: DATABASE ACCESSION NUMBER: AK105993
  ref <309>: DATABASE ENTRY DATE: 2002-08-28
aaccgaccgaaaaagcagaaacagcctgcctgaccccaaaaaaatggaggaaggcgtcgtcggtgggggcggcgctgccgttcttgttgccttgctcgtgaccgtggtgttggcggtgatgaggtcagctggaagcagaagcagcaagcgcggtcggctgcccccgagtcccatggcgctgcccatcatcggccacctccacctcatccggccgccaccccaccgcgccttcgaccgcatcctcgcccgccacgggcccctcgtctacctccgcctcgggccctccacgcactgcgtcgtgatcggctcggccgacgtggcgcgcgacttcctcaagttcgaggccagcatcccagagcggccgcccacggcggtgacgcgacagctggcgtacggcaaggccgggttcgcgttcgcgccctacggggcctactggcggttcgtgaagcggctgtgcatgtctgagctgctgggcccgcgcaccgtggagctgctccgccccgtccgtgccgcggagctggcggacgtgctgcgcgcggcgcagtcggcggcggagaggggcgagggcgtcgacatgagccacgagctggtccgcatggcgaacaacagcatcatgaggatggtggcgagcgctctgcctggcgagatggcggaggcggcgagggactgcgccaagcaggtggcggagctggtgggggcgttcaacgcggaggacttcgtggcggtgtgccggggctgggacctgcaggggatcgggcggaggaccaacgaggtgcacgccaggttcgacgcgctgctggagaccatcatcgaggccaaggaggaggcgcggaggcggagcctaaggctgggccggcgggagagtagcagcaaggacctgctggacatgctcatggacgcggcggaggacgacaccgcggaggtcaagctcaccagggacaacatcaaggctttcgtcctcgacatcttcaccgccgggtcggacacgacggccaccaccgtggagtggatgctggcggagctggttaaccacccggagtgcatggcgaagctgcggggcgagctggacgcggtggtgggcaggtcgcgtctggtgggagagcaggacgtggccaggctgccctacctgcaggcggtgctcaaggagacgttgcgcctccgcccccccgcggtgtttgcgcagcgcgtcactgtggagcccgtccaggtgcgcggctacaccatccccaccgacacccaggtcttcttcaacatcttctccattggccgcgacgccacctactgggaccaaccgctccacttccgccccgaccgcttccttcccgacggcgccggcgccaccgtcgaccccaagggccagcacccgcagctcatgcccttcgggagcggccgccgcgcctgccccggtatgggcctcgccatgcaggccgtcccggcgttcctggccgcgcttgtgcagtgctttgactgggcgccgccgccgtcgcagccgctgccgcttgacatggaggaggcggcggggctcgtgtccgcccgcaagcacccgctcctcctcctcccaacgccgcgcatccaaccgctcccttccttctactcctgagcatcctcgatcgtcgatacgtacacctgcgagcctgcgatcctgatccatccatttgtttttgttgacttgttactagcacctgctttgttttacgtacctcacatcaaataattcttattcaactc

SEQ ID NO: 8646 - DNA, 1735 bp, Oryza sativa
  ref <308>: DATABASE ACCESSION NUMBER: AK105994
  ref <309>: DATABASE ENTRY DATE: 2002-08-28
gaattaaccagagtgcgttgccgtttgcattcttgcagagtttggtctcgcttaacgcgcgcttttgagaggtaaaacgtaagggtggctgcgttggccggccgcgcgcgcgcgtcatggaggcgtctcttgttctgctctgcctctgcgtctttcttgcgagcggcggagaagggaggtcgccggcgggcacggtcctcccgctgcaggtgcgggtgcaggaggtggagttggaggcgccggcggcgaacaggctccggttccggcacaatgtgagcctgacggtgccggtggccgtcggcacgccaccgcagaacgtgacgatggtgctcgacaccggcagcgagctctcgtggctgctctgcaacgggagctacgcgccgccgctgaccccggcgttcaacgcgtcgggttcttcctcgtacggcgcggtcccctgcccgtcgacggcgtgcgagtggcgcggccgcgacctccccgtcccgccgttctgtgacacgccgccgtcgaacgcctgccgcgtctccctctcctacgccgacgcctcctcggccgacggggtcctcgccaccgacaccttcctcctcactggcggcgccccgcccgtggccgtgggcgcctacttcggttgcatcacttcctactcgtcgaccaccgccaccaacagcaacggcaccggcacggacgtctcggaggcggcgaccggcctcctcggcatgaaccggggcaccctctccttcgtgacgcagacgggcacccgtcgcttcgcctactgcatcgccccaggcgagggccctggcgtcctcctcctcggcgacgacggcggcgtggctccgccgctcaactacacgccgctgatcgagatctcccagccgctgccgtacttcgaccgggtggcatactccgtgcagctggagggcatccgcgtcggctgcgcgctgctccccatcccaaagtccgtgctcacgccggaccacaccggcgccgggcagacaatggtggactccggcacgcagttcaccttcctcctcgccgacgcctacgcggcgctcaaggccgagttcacgagccaggcgcgcctgctcctggccccgctgggagagccagggttcgtgttccagggcgcgttcgacgcgtgcttccgcgggccggaggcccgggtggcggcggcgagcggcctcctcccggaggtgggcctcgtactccgcggcgcggaggtggccgtgtccggggagaagctcctgtacatggtgccaggcgagcggcgcggcgaggggggcgcggaggcggtgtggtgcctgacgttcggcaactcggacatggccggcatgtcggcgtacgtgatcgggcaccaccaccagcagaacgtgtgggtggagtacgacctccagaacggccgcgtcggcttcgcgccagcgcgctgcgaccttgccacccagcgcctcggcgccggcgcgtaggctttacagtactaatcgatgcgtcgtccatggcgagaactcgccgtggccaagtaagagtgtagaggcctagtattagagatggtctctccgatcacctgctgtgcttcacatcactgctggcgtgtgtagtagtgtacggagtagttaaagggtgtgtttatgtcgaaactagatttcggcaataataaaagggggtggctatcaagctggaaaagtgtatgagtttggagacaaaggatttatacaggttcaggccttcttattcaagaagt

SEQ ID NO: 8647 - DNA, 1094 bp, Oryza sativa
  ref <308>: DATABASE ACCESSION NUMBER: AK105995
  ref <309>: DATABASE ENTRY DATE: 2002-08-28
aaaaaaattactcttcgctctcgcgtcgcgcacgacacgaccgagccagcaaagccgcccatccgccatcccgccgctcctgcaatctacagccgcgtcgccgcttgtccgcctgcgctcgttctcgctagggttcggaagggggagggtggggatcgcccggcgatggactggagcgcggtgacggcggaggacctggtggacgcgctgcgggaggtggactggtcgacgccgccgcgccccgtgccggagttcttctcccgcttcaccgtcccccgctcctactccaagtggaccagccgcctcaagtgcaacctctactactacaggacaaattacttcatcttgatcatgttcatccttgggataggcttcatttggaagccggttgctatacttgcagcctttatgactggaatcagcattgcatttcttaatgacagctttgcagtcactttcaatgagaaagtcacgaggactgtcagacaattttcaccacatttagctgcaaaaatgaggccaccaataacccctgttcttcgtggtagaccaagttcaaagaggtcgattcatatttgtgggcgacctcgctggctatttgtgctgttattttctgcagttagttgcatgctctggttgacttcctgcagtctcctcacagttctatgggcccttttaattgctatctttgcaactctgcttcatgctagcttcagaacacctaatctgaaagcacgtctgaatacattcagagaagaattccgagctgtttggaggaattatagtgagctttaaggttcatgtggtaagaagtgcttagtgctgaaacttcgtgctgtttgtgaattgtgtttgtgggagataccaagatatgaacaatggtgacaggcagctgcgttctattgtgattacttgctcgttttggaggtgggccttgactgtctaagtacatgatgatgttacacttggtacgccaccttccaaatcactataattgttcacatggaattctccctaaccaagcattggaaaaagaacagcatgtaaaggatgtaaacaagtattctaatcaacacagcatatattgtttgttg

SEQ ID NO: 8648 - DNA, 1346 bp, Oryza sativa
  ref <308>: DATABASE ACCESSION NUMBER: AK105996
  ref <309>: DATABASE ENTRY DATE: 2002-08-28
accgaacccgcccggccgccacacacgcctctctagctacccggcgcccgttcgagtagcctgtaggcgcgtggcgtcgtaatggccgtggcgcccgtccggctcgtggcgtgcattgtcgccctggccgccgtggcgccgggcggagtggcggggcacacacggggcgtgcggccagggagggcggcggggaagcagcagccgtcgttcccggagaacgcgacgcgggtggaggcgatcgagcggcagttcatggagtgggtacggtacatgggcgggctggagcacagcacggtccaccacgcgctcgcccgggcgttcccctcctactcgctcgtcgtcgacaagaacccggcgttcggcgacttcaccaccatccaggccgccgtcgactcgctcccgatcatcaacctcgtccgcgtcgtcatcaaggtcaacgccggcacctacacggagaaggtgaacatatcgccgatgcgcgcgttcatcaccctcgagggcgccggcgccgacaagacgatcgtgcagtggggtgacaccgcggacagtccgtccggccgggcgggacggccgctcggcacatacagctccgcgtcgttcgccgtgaacgcgcagtacttcctcgccaggaacatcactttcaagaacacgtcgccggtgccgaagccgggggcgtcggggaagcaggcggtggcgctgcgggtgtcggcggacaacgcggcgttcgtggggtgcaggttcctgggcgcgcaggacacgctgtacgatcactcgggccggcactactacaaggaatgctacatcgaaggctccgtggatttcatctttggcaatgcgctctctctgtttgaggattgccacgtgcatgcgatcgcgcgggactacggcgcgctgacagcgcagaaccggcagagcatgctggaggacacggggttctcgttcgtcaactgccgggtgacgggatccggcgcgctctacctcggccgcgcctggggcaccttctcccgcgtcgtcttcgcctacacctacatggacgacatcatcatcccccgtggctggtacaactggggcgaccccaaccgcgagctgacggtgttctacgggcagtacaagtgcacgggccccggcgcgagcttctccggcagggtgtcgtggtcacgcgagctcaccgacgaggaggccaagcccttcatctcgctcaccttcatcgacggcacggaatgggtcaggttgtgagagatcgatccatcggtcgatcgagttcattgtagcacaccgcacacggcatcatagcgtcacacgatgtaaaaagaaaaacagacgaatatatatacagattcatttgc

SEQ ID NO: 8649 - DNA, 1884 bp, Oryza sativa
  ref <308>: DATABASE ACCESSION NUMBER: AK105997
  ref <309>: DATABASE ENTRY DATE: 2002-08-28
aaaaaaaaactcaagaacacaagaaaaaagaagcagttttttttgcccgtctcatcttcttcttctccctctcgccgcgcttcttgcacgcagcaatctctctctctctcgccgccgtcaatcccaccacgaattctccggtggctggctgctctcgactccttcgcgcgtcgatttcatgcggccgggtggttgcccgcctcctcccgaacgatccctcgccgccgccgctgccgctcatcggcgttgtcatccaccaccgccgccgctcctccgccgcggacgtgcctcgccggcggcgagccgagcggtgagttctgccccgtgtggtgtggactcgtagagtggccgtggatctgccgcggcgacgtaatctgctccgggctcgccgtcgaaaggatccaatttttttcgactgcagaatcccctcacggacgcgaggaatttcgtcgtaggtggagcacacgcggggagtgtttttgacagagcttgatttcaacggatgaacatgtgtgagaaagatcaaaatttccactggggttatgaccttttccgtgacccttttgctcctatcgggtactatggacctcctcatggttacggtgatggcaactattgtgacctccattatgctagagatgcatcacatctggatgagacgcacttgcattcttctgcactgacatatgatttgtacaacccatcagtaggcatctaccatcctggaaatgctggtgagcatgaccatgacacagtctatatagagccgactagttccaattcatgcccagacactgacgacagtttcccaatggatgaagaagtaggaaagaggttttaccccatggtgccagttccccatgttcctaaaattaatggagagatcccttcagtcgatgaagctaccatggaccatgaaaggctgacagaaaggttgaggttgtatgaactagttgagcacaaggtgaaaggagatggcaactgtcagtttcgggcactatcagatcaactgtatcaaagtcccgatcaccatgagtttgtgaggcagcagattatgagccagcttaaaagtaaccgtgatgcctacgatggatatgtccccatggcatatgacgattacttggagaaagtatcacatgcataaactaacagaaatggtgaatggggtgaccatgtgactctacaggctgctgctgacaagtatggagttaagattttcgtgatgacatcgttcaaggatacgtgctacattgagatccaaccaaaggttcagaagtccaacaaagtggtgctgttgagcttttgggcggaggttcactacaactccatatatccgcagaacggtgagtaggccctgcctgccattggcatacgatgcaatgcatgtccggtcttcgtcgccagcatgcgccgaggtcgcagacgacgaggaagaggagatggtggccgttctctcacaaccaccaccatcaccaccattgatgcctgggctgcaaagcttttcttccttgatcaagatgacccaggttgatcaagatgacccagaaagaaagctggtgctcattgtcttgttggtctgatgacaatcatggacatctgatagtaggaggaggacattgtggtgatgattatatatctccaaatgatatagaagatacatggaaatatggaatccatggaaggaataatttcgtcttagtccggtccggtcccgtatatagctgctgctgagctgcactgcactgcattgcattccctgaatcaattatcaatcacctcacctgtattattatttctcaaaaattttgccggaatgaggctacaattattcattcggaacgaatgccaccatataataccaataatgataatgataattgacat

SEQ ID NO: 8650 - DNA, 1488 bp, Oryza sativa
  ref <308>: DATABASE ACCESSION NUMBER: AK105998
  ref <309>: DATABASE ENTRY DATE: 2002-08-28
cacgtcatgacggagctctccgccgccatgaccaaccagtacacctgcctcgacggcttcgactacaaggacggggagagggtgcgtcattacatggagtccagcatccaccacgtctcccgcatggtcagcaactcgctcgccatggccaagaagctgcccggcgccggcggcggtgggatgaccccgtcatcgtcgtcgcccgacacggcgacgcaatcggagtcgtcagagaccacgcagcggcagccattcatggggtacgggcagatggcgaatgggttcccgaagtgggtgaggccgggagaccggcggctactccaagcgccggcgtcgagcatcacgcccgacgcggtggtggcgaaggacgggagcggcgggtacacgacggtgtcggcggcggtggcggcggcgccggcgaactcgaacaagaggtacgtgatacacatcaaggccggggcgtacatggagaacgtggaggtggggaagagcaagaagaacctgatgttcatcggcgacggcatcggcaagaccgtcatcaaggccagccgcaacgtcgtcgacggctccaccaccttccgctccgccacagtcgctgtggtgggcaacaacttcctggcccgcgacctgacgatcgagaactcggccggcccgtcgaagcaccaggcggtggcgctgcgcgtgggcgccgacctgtcggcgttctaccggtgcagcttcgtcggctaccaggacaccctctacgtccactccctccgccagttcttccgcgagtgcgacatctacggcaccatcgacttcatcttcggcaactccgccgtcgtcttccagagctgcaacctctacgcgcgccgcccgctccccaaccagagcaacgtctacaccgcgcaggggcgggaggaccccaaccagaacaccggcatctccatccagaagtgcaaggtggccgccgcctccgacctcctcgccgtccagtccagcttcaagacctacctcggccgcccctggaagcagtactcccgcacggtgttcatgcagtcggagctcgacagcgtcgtcaaccccgccgggtggctcgagtggagcggcaacttcgcgctcgacacgctctactacggcgagtaccagaacaccggccccggggcctccacgtccaaccgggtcaagtggaagggctaccgcgtcatcaccagcgcgtcggaggcgagcaccttcaccgtcggcaacttcatcgacggcgacgtatggctcgccggcacgtccgtccccttcaccgtcgggctgtgacactgtgatagagcgcgctgggttcagggcgtcacggcaataagcgtgctgtgctgacaagtgaagaaagagggggcaccagttcgaatcgaataccatgttgctgttgattcttttgtttttgggccgaaatgtgtaacatgtacctatacgtgattcagaaattaccattcgatacgggtccgtatttacgttctccat

SEQ ID NO: 8651 - DNA, 1819 bp, Oryza sativa
  ref <308>: DATABASE ACCESSION NUMBER: AK105999
  ref <309>: DATABASE ENTRY DATE: 2002-08-28
aaaagaagagaaaaacaacgaaagagagagagaggggggcggcgccgccggcgacagagccgcgacatgtgaggcgccgccggtcgccggagcgagcgagcgatgagcagcagcgccgccacctccacctacgcggagagcgtcgcgtcctgccgcgctcccgctcccgccacccccaggcccccccacgccgccgtgaggcgccacctcgacttcgccgccggcgacggcggtgagctggatgacgacgaggtcgaggacgaggacgaggacgacttcctcttccgcgccgcggaggagacggagcggagccactacgaggcccagcgccgcgcttccgcacctcccccgccgccgtctcagcccccggctttcttcgagaggccgtgcatctgcggccgcggcggctgcgatgtggaggagagggagctcgggcggtgggcctacgtctgcccggcgactccgaaatgcaaatattctgtttggtgtggagaagctgatatttgtccaaatccacagcctgcttatatgagccatcctaaaccaaatcctcatgtttttagcagcccatgcagtcctgttgtgttcaacagtcctagcaatcatttagctggttctacaactcctacaccgaacaatctccaagtttttaatggtccaagaaaccctcatgtgtccaacagtcctagcaatcatttagctggttctacaactcctacaccaaacaatctccaagtttttaatgctccaggaaaccttcatgtgtccaacagtccaaacaatcatcgatctggtgctacaactccagttaacgctaatccccctggttctagatcaagtgataaacaaccaatctgccattgtagggctggaaaatgcaaagtggagacaataaaagggcaaaagtactatgtgtgttgtatacagaagggacaaggtgcatgcccttaccaagtgccggtcaatgcttttgttgaagaatcaccacaagctggaaacagcgttccattggaggataaccgtgggaactacagtccagttaaagtggaggcgaacaatgacaacggatcaatcaatcctgatcaacctgaatacgatgagtggccatttgacatcgtcaacaatgatgttgtatgcagtggcttcttgccaactgctgagcctacactaagagatggtatagttgctggggaatcaccaagtacgcagcacctgtcaaatgctacgactgaagcgaaaacaccaacaaaatcgcccattatgccgccacctcatggtagcgggagccccttcactcctcggtcgaacccctgctaccgatgtggtgaagacgggcactggtccaggaactgccctaagccggcttcgagcccacttaactctccttgctacaactgcggcaagcttgggcactggagaggtaattgccctggaacttgatgacacaagaggggtgttaagaagcatatgatcggtatcattttggcaatgtgacaggaccatcagaagctaggcttaatgagtaatggcctacttctgcttaatgattgactctcccatggctgccatgtaaataggtttagggtttagggtttatgcaatatgctatagtattgggcacctgatactacttgtggtgtctgtggcagcaagaggtgggctcctacggtgtttgtccatcatctgctttgttaatcacttcttacatgaagtaaccccaggattaagttaggtcgtaattggaaccttctgtttatggatcatgtatggtatttatgtcgcctataaagatgtatcaatatatacttacttatatggt

SEQ ID NO: 8652 - DNA, 1240 bp, Oryza sativa
  ref <308>: DATABASE ACCESSION NUMBER: AK106000
  ref <309>: DATABASE ENTRY DATE: 2002-08-28
caatccacccatggactcgccgccgccgccgtctctcccgccggcgagcccgctccccctcccgccgtggcggcccgatccgtcgccggccgtcctcccctggccggacctcctcgccggcgcggccgccgccacccgccgcctcatcgccgcccactcccgccacttcctcgccctctcgtccctcctcctcctcccgctctccctcctcctcctctccctcccggctcccttcctcccgcccgtctccccctccgtctcgctccgctctactacgacgccgcagccggcgctccccctcccgctcctcgccctggttgccgccgccgcgctcctttacctcgccgccttcgccgccgccgccgccagcgcgcacgcggggttcttcggccgccccgtcaagctgctcgcctcgctgctctccgtgcccgcgtccctcctccgcctcctcctgacggcgctccccgcagcgccgctgctgcttctcccgctcctcccgctcccgttcccgcttaccgccgccctcgccgttcttggcctcctcctgttagtcccattctggtctctcgccggcgccgccgccgtcgtcgagtccagcgcctgtgtgtccccgctgcggcagagctgccggctgctcaatggcgcgcgcctcgccgcgctctctgcgttcttggtgttcggcgccgggataggggtcacgctatggggatttggtggggtggccgcggagacctatgatgccagtgctgggtgggccggcatggcgccggtggtggtgaaggcggtggtcggaacggcggtgctggtggttctgatgctttatggaatggtgatcaacgttgtgctctatatgcattgccgcgcgcttcacggggagctcacgggggagatctacaacgaattcgccaactcgtatgtcttcctgccctttgacgagggcaaggatcggcatgtagtgtcagtggtcacggtgtggccatgattgactatcgccgcggtggtgagtttgcgaatccaaagaacagttttgaccacatcatgtataactgtgtgcgcatctctgttcttctgttcataggtgtctcttcaattgtgcaaacgtttggatcaaatactcttctattagccttaggcctttacagccttagccctggaatatataattttgttcaggtaacgtatctttcatatgtacaatattgtttcaatatgcactgaataataaaatagttcttgtgct

SEQ ID NO: 8653 - DNA, 2095 bp, Oryza sativa
  ref <308>: DATABASE ACCESSION NUMBER: AK106001
  ref <309>: DATABASE ENTRY DATE: 2002-08-28
gctggagtagagtggcatcctggcaactctgtatatatatatttttcccttctgtatattaattgccatccatcgcattgcttctcgggcaggttctactcctatatatcgtctcgcttctctctctcgatctcaggtcaggggcgctagctggccactggcgactcacacagtcacacacacacacactctctcgtccttgctgctagctatctatcgctgcttgccccggcccatgcatgtgagctcacttattatagatcgatcgccatagcctagcttggtggtggtggtggtgatggaggcggggacgtgggcggtggtcgtggcggccgtggccgcgtacatggcgtggttctggaggatgtcgcgcgggctgagcgggccgagggtgtggccggtggtggggagcctgccggggctggtgcggcacgcggaggacatgcacgagtggatcgccgccaacctccgccgcacgcggggcacctaccagacgtgcatcttcgccgtgcccgggctggcgcgccgcggcgggctggtcacggtgacgtgcgacccgaggaacctggagcacgtcctcaagtcccggttcgacaactaccccaagggccccttctggcacggcgtgttcggggacctcctcggcgacggcatcttcaactccgacggggagacgtgggtggcgcagcggaagacggcggcgctggagttcaccacgcgcacgctgcgcaccgccatgtcgcggtgggtgtcgcggtccatccacagccgcctgctgcccatcctgtccgacgccgccgcggccggtggcggtggcggcggcgccaccgtcgacctccaggacctcctcctccgcctcaccttcgacaacatctgcggcctcgcgttcggcaaggaccccgagacgctcgcccgcggcctgccggagaacgacttcgcctcggcgttcgaccgcgccaccgaggccactctcaaccgcttcatcttcccggagtgcgtgtggcggttcaagaagtggatggggctcggcatggagaccacgcttgcgcgcagcgtccagcacgtcgaccgctacctctcggcggtcatcaaggcgcgcaagctcgagctcgccgccggcaacggcaagggcgacgcgtcgtcggccacgccgcacgacgacctcctgtcgcgcttcatgcggaaggggacctactccgacgagtcgctgcagcacgtggcgctcaacttcatcctcgccggccgcgacacctcctcggtggcgctctcctggttcttctggctggtctccacccaccccgccgtcgagcgcaagatcgtccgcgagctctgcaccgtcctggccgcgtcgcgcggcgccgacgacccggcattgtggctcgccgcgccgctcaacttcgaggagctcgaccagctcgtctacctcaaagcggcgctctcggagaccctccgcctgtacccctccgtgccggaggactccaagcacgtcgtcgccgacgacgtcctccccgacggcacgttcgtgccggcggggtcgtcggtcacgtactccatctactccgcggggcgcatgaagacggtgtggggcgacgactgcctggagttccggccggagcggtggctgtcggccgacggcacgaagttcgagccgcacgactcgttcaggttcgtggcgttcaacgccgggccacgcatttgcctcgggaaggacctcgcgtacctgcagatgaggaacatcgccggcagcgtgctcctccgccaccgcctggccgtggcgccgggccaccgcgtcgagcagaagatgtcgctcacgctgttcatgaagcacgggctccggatggaggtgcgcccgcgcgacctcgccccgatcgtcgacgagctccgcggcgccggggagtacgccgccgcggcgcgcgccaccgcggcctgcgcttagaagatcccgggcgttggacgaagtcaattggaaatggcaaaaaaatatgtagatagatgagagtccaagatagtaattactaaagggtttgtatggttggtgaggtcatttaaatcacttgcttttacagttcattaccagtcgatagaggaaatgtct

SEQ ID NO: 8654 - DNA, 1256 bp, Oryza sativa
  ref <308>: DATABASE ACCESSION NUMBER: AK106002
  ref <309>: DATABASE ENTRY DATE: 2002-08-28
agagaaagcagctttgagcttagctatggcaatggccgcgccgctgacgttggtggtggtggcggcggcggtggccgtcgtcttcgtcggcggcggcgtggaggggtgggtgctcaaggaggggttctacgagcagagctgcccgcgcgcggaggcgctggtgaagcactacgtggagcagcacgtccccctcgccccctccgtcgccgccaccctcatccgcacccacttccacgactgcttcgtcagggggtgcgacgcgtcggtgttgctgaacgggacggacggggcggaggcggagaaggacgcggcgccgaacctgacgctgcgggggttcgccttcatcgaccgcatcaagagcgtggtcgagagcgagtgccccggcgtcgtctcctgcgccgacatcctcgcgctcgccacccgcgacgccatctccgtcatcggcgggccgttctggcgggtggcgacggggcggcgcgacgggagggtgtcgatcaagcaggaggcgctggaccagatcccggcgccgaccatgaacttcaccgacctcctctcctccttccagagcaagggcctcgacctcgccgacctcatctggttgtcaggggcgcacacgatcggcatcgcgcactgcaactcgttcagcaagcggctgtacaacttcaccgggaaaggcggccccggcgacgcggacccgtcgctggacgcggagtacgcggcgaacctgcggcggagcaagtgcgcggcgccgtcggacaacacgacgatcgtggagatggacccgggcagcttcctcaccttcgacctgggctactaccgcggcctcctcaggcgccgcggtctcttccagtccgacgccgccctcgtcaccgacgccgccgcggaggccaacatcgccagcgtggtgtccagcccgccggaggtgttcttccaggtgttcgcgaggtccatggcgaagctgggcatggtcggcgtcaagaccggctccgagggcgagatcaggaagcactgcgccctcgtcaacgacatccactactagtattatcactagctcatcgatcttcagctcctcggtgcttgataaaatttcagtagaaatatatatacatgtaacttaattcgatcgtcatcctgtttattctctctctctatgtaattttgtttccaaattgtaactgttttattttggagcaactgtaactatttctgtatgtgcccatgaatatatttcaattatagaaaataattcacttttt

SEQ ID NO: 8655 - DNA, 1278 bp, Oryza sativa
  ref <308>: DATABASE ACCESSION NUMBER: AK106003
  ref <309>: DATABASE ENTRY DATE: 2002-08-28
acatctctcacatctctctcctccactccgctcccgtcgccgccacatcgccatggacgacgacgcctcctcctacacctactgttgccacagctgcgacagcttcgtccacccgcacccccacctcgacgccgctgtgctctgtccccactgcaacgccgccggcttccttcacgaccacgagatgcctcccgccgccgaccactccccgttcaacccccccgtcatcgtcctccgccgctccgcatcccccgacgacgccaccaccttcgatctcctctacgacgacggcgcctcctccgccctccgccccctcttcgaccgcctcctcctccgcatcccctccgcctccgacaaccccaaccccccggcctccaaagccgccgtcgactccatgcccaccatcctcatcggggcctgccacctcgccgccgactcccactgcgccgtctgcaaggaacccttccacctcgccgccgaggccagggagatgccctgcgcccacatctaccaccacaattgcatcctcccctggctcgctctccacaactcatgccccgtctgccgccaccgcatgcccaccgatgaccacgactcgaccaatgctgctgctgctcaggctgccgccggaagcagcgacgaggacgccaccaccgtgggtactctcaccatttggaggcttcccggtgggggatatgcggttgggaggtttgctgctgctggtgggacaagagccggtgagagggagctcccggttctctacacccagatggatgatggcggcttcaacggcggcggcggctcgggctcgccgacgatgatcgggtggtcatctagagggagtcgttcgtcccagagacagagaagcatcatcccacgcttgtttcgcaacatgtttgcatgctttaggcatcatgatgcaactgcagattcaggagattattcctcacgggctgggaggagatcctcctcctctgtcttcacccgcagcctgaggagccagatcacgagctggagatcggaagatggccaccccgatgccattgctactagatgataatggtggtatgatttggaaattgatcatcacctgcatctttttgctaccttttgcttgatgattttgtgtaagtagtagataatatcaagaaagatatgatgagtattattgtttgtaggcatagcaaaattgctgcttaatttgtacatatagcagattgttcaggtaacaatgtaacattacaattcaaatatcatatatctttggtttgcctattc

SEQ ID NO: 8656 - DNA, 1301 bp, Oryza sativa
  ref <308>: DATABASE ACCESSION NUMBER: AK106004
  ref <309>: DATABASE ENTRY DATE: 2002-08-28
gaagtcgatcgccatctccaattctccatcgatcatctatctctcacgatcatctcgccggagctgtgtagtggtggtgaggaggagaatgatgatgaggtgtggttggtcggcggcggcggtggttgcggtggtcgtcatggttggtgtgatggtggcgtcgccggtggcgggggagctagctcgggtggagcacccgacgaaggaggacgggtcgctggcggtgctcgtcgttggcgactgggggaggaaggggcagtacaaccagacgttggttgccacccagatgggcgtgatcggggaggagttggctgccgacttcatcctctccaccggcgacaatttctacaacgatggcctcaccggcgacaacgacacggccagcttccaggagtccttcaccaacatctacaccgctgatagcctccagaagccttggtacattgttctcggcaaccatgactacactggagatgccctcgcacagcagagccccgccattcgcgccgtcgatagccgttggacctccattaacaagtccttcatcgtcgactcagatatcgcggagttcttcttggtggacacggtgccattcgtgcagaagtattggaacgagagcaagttcgactggagacaggtcgcccctcgtgacacctacctctccactctactcacagatttaggagacgcgatgtcgcagtcgaatgcgacgtggaagatcgtggttggacaccacaccatcagcagcggctgcgagcacggcaacaccaccgacctcgtcgccatgctcctccctgtcctcaagacctatggggctgacatgtacatcaacggccatgatcattgtttgcagcgcatcaccagcattgacagcccacttgaattcatcacgagcgggggcgggtcgagggcgtgggcggggaagtttaagcaaacctcggacaagctggagttcatctacgacgggcaagggttcctgtcgatgcagctgacgatggcggaggccagcttcgccttctatgacgtcaccggcgccgtcctgtacagctggcagctcgccaagtcaacctccaccaactagtgatcaaagtcaacacttaattattgtgttaattagctgcttatgtgtgtgaaattggaacagtcaatgtactgcttcagttatcgatatatatactgtgacaaaagatgcacggtgtataaatagtgtgtgtgtttgtatacgtaagtatgcaagaatgttgctgtttgtaattgcatcctaagttcatgggataagttataatggctatctaaatgat

SEQ ID NO: 8657 - DNA, 1686 bp, Oryza sativa
  ref <308>: DATABASE ACCESSION NUMBER: AK106005
  ref <309>: DATABASE ENTRY DATE: 2002-08-28
gctgcagacggtgatcagctagagagcgagagtatggcgacgctggcgccggcgctggtgctcctgccggagtggggctccggccacctcatgtccatgctcgagtcctgcaagcgcgtgctcctcgccggcgccggcggcggcagggagttctccatcacgctgctcgtcatgcgcccgcccaccgacgaggcgggctccgaggtcgaggcgcacgtccgccgcgaggccgcgtcgggcctcgacatccgcttccaccgcctccccgccgtcgacccgcccgccgacgccgccggcgtggaggagttcatcgcgcggtacatccacctgcacgcgccgcacgtcagggacgccgtcgccgggatggggcgccccgtcgccgcgctcgtgctcgacatgttcgccgcgcccatggtcgacgtggcgcgcgacctcggcgtgccgtcctacgtcttcatgtcgtccaccggcgccatgctcgcgctcatgctgcacctcccagtgctccacgaccgggtcgccgtggagttccacgaggtggacggggaggtggacgtgcccggcctgccgcctctgccgccggcgtccatgccgtgcccggtggtggacaagaagagccccaactacacgtggttcgtgcgcctcggcgaccgcttcatggacgccacgggcatcatcgcgaacaccgccgacgagctcgagccggggcccctcgccgccatcgcggacggccggtgcgtgccggggcgcgccgcgccgccagtgtaccccatcggccccgtgctctcgctcggcggcaacgacaagagggacagctccgagccgccgcacgagtgcatcgcgtggctcgacgggcagccgccggcgtcggtggtgttcctctgcttcgggagcatgggctggttcgaggcggcgcaggtggtggagatcaccgccgcgctggagcgttccggccaccgcttcctctgggtcctgcgtggcccgccgcccgccgccgagtcaggcaccggcgcgcccgacgggtcggagcacccgacggacgcgaacctcgacgagctcctccccgaggggttcctggagaggaccaaggggaggggcatggtgtggccgacgtgggcgccgcagaaggagatcctcgcccacccggccatcggcggcttcgtgacgcacggcgggtggaactcggtgctggagagcctgtggcacggcgtgccgatggcgccgtggccgctgtacgcggagcagcacctgaacgcgttcgagctggtgcgcgacatgggcgtggccgtgccgctcggggtggacagggagcgggacaacttcgtggaggcggcggagctggagcgcgcggtgaggtcgctgatggacgatgcgtcggaggaggggaagaaggcgagggagaaggcggcggagatgaaggccgtgtgccggagcgccgtggcggcgggcggcggctcgtcgcacgccgcgctgcagaggctctccgaggcgctgcaccagggcgcggcgctcccgaagaactgagcatacgtgaaaattgttgcacgtcacgttttcgaagtcgaagtaacaagagatgatgccgcttgtactgtttgtgccatatgcgtgtcttgtttgcactacagtaacactgaaatgcagtcttgtactcgggtcattattaatgatgattttctatggact

SEQ ID NO: 8658 - DNA, 1683 bp, Oryza sativa
  ref <308>: DATABASE ACCESSION NUMBER: AK106006
  ref <309>: DATABASE ENTRY DATE: 2002-08-28
aagctgtctgtgagcccgtgactgggcagagcagcacaggggcgagacgcgccggccggccacctccggcaccgatgggcgcggcggcggcgcacgtcctcgtgttcccgatgccgctgcagggccacatcaacgtcatgctccacctcgccaccgccctcgccgccgccgccggcgtccacgtcaccttcctccacaccgaccacaacctccaccgccttggcaacgccgccgccgcaaccacggcgggctcgccacggcgcctccgcttcctgtccgtcccggacggcctccccgacgaccatccccgctccgcgagcgacgtcccggtgatggtcgattccctcctgggcgctggccaagccgcgtaccgtgctctgctcggctcgttgttggtcgggagcggcggcgccggcggcttcccgccggtgacctccgtcgtggcggacgcacttttaacgttcgcaatcgacgtcgccgaggagctcggcgtgcccgcgctggccttccgcacggcgagcgcgtctagcttactggcgtacatgtccgtgcccaggctcttcgagctcggtgagctgccgttcccacccggcggcgacctcgacgagccggtgcgtggcgttcccggcatggagggattccttcgccggcgagatctcccgagcaccttccgccgccacggcaacgaccacgacgtccatcccaagctgcaaatgctggtcgacctcaccacggggagctgcaaggcacgggcggtcatactcaacacggccgcgtcgctggaggcgccagcgctggcgcacatcgcgccgcgcgtgcgcgacgtcttcgccgtcggtccactccacgccatgtcccccgcgccggcggcggccaccagcctgtggcgcgaggacgacggctgcatggcgtggctcgacggccaggcggaccggtccgtcgtgtacgtcagcctggggagcctcaccgtcatctcgccggagcagttcacggagttcctgtccgggctcgtcgccgccggccacccgttcctctgggtgctccggccggacatggtcacggcgaggctgcagcacgccgatctgcaagaagccgtcgcggcggcggcggggcacagcaaggcgcgcgtcgtgcggtgggcgccgcagcgggacgtgctgcggcaccgcgccgtggggtgcttcctgacgcacgccgggtggaactcgacgctggaggccgccgtcgagggcgtgccgacggtgtgctggccgttcttcgtcgaccagcagatcaacagcaggttcgtgggcggcgtgtgggggacggggctggacatgaaggacgcgtgcgacgccgccgtcgtggcgaggatggtgagggaggcgatggagtccggcgagatcagggcgacggcccaagcgctggcggagaaggtgagacgggacgtcgccgacggcggctcgtcggcgacggagttcaagaggctcgtcggcttccttcaggagctcgccacgcgtatccaacacgctaattgaccatagtcggttggcctcgttaatcaaagccattacgcacgttgattgtggtacagtggttgttgttgtggtcctagacgcgatatcatgctacagtcgtatgaataaatgatcatgctatcatatgataaaagacaataaaaggaagtccacttaattttttacc

SEQ ID NO: 8659 - DNA, 1437 bp, Oryza sativa
  ref <308>: DATABASE ACCESSION NUMBER: AK106007
  ref <309>: DATABASE ENTRY DATE: 2002-08-28
aaaccctcagcccccctcattcccaatctagggttttcccccatggcgtcggcgtcgcgcttcctcctcctctccaggctccccgccgccgccgcctcctccacctcccgcctcctccgcccgctctccgccgcggggagcctcctcccggcggcgctcgccccctccgccccgcgcgcggcggcggcggcggcgaggtgcttcgccacgcagcccgcgacctcctcgctgcgggactcgtcgccgaactggagcaaccggccccccaaggagacgatcctcctcgacgggtgcgacttcgagcactggctggtcgtcgtggagccgccccccggcgatccctccaacccggagcccacccgcgacgagattatcgacggctacatcaaaaccctcgcacaggtggttgggagtgaggaagaagcaaggcataagatctactcagtgtcaactcggcattactttgcttttggagctcttgtatctgaggaactctcctacaaactcaaagagttgcccaaggtccgctgggttcttccagactcatacctggatgtcagaaataaggactacggaggagaaccttttataaatggggaagccgttccttatgaccctaagtaccacgaggagtgggtgagaaacaatgcgcgtgccaatgaaagaagccggcgcaatgataggcctagaaactttgacaggtcaaggaattttgagaggagaagggagaacatgcagaacttccagaacagagatgtgcctcctggccagggattcaacagccctcccccaccaggtcagggcccagtcccgcctcgtgatgctcctccgatgcaccatgctcagggtaatgttcctccacctccaccaccaaatgcaggtcctccaaactaccagccccatgcaccaaatccgcaaggctatacaaactatcagcagggcggtgcgcctggctaccaaggtggaccccctggctatcaaggtagcaaccagggctaccaaggtccacccccacccccaccatctgcttaccaaggcaacaaccctggataccagggaggagggccaggttaccagggcggcaacccgcctccttaccaaggtggcaaccctggctatgcaccaggctaccatggccaaggaggcaaccctagctaccagcaaggcggcgataactacaatgccggtgtgccggcttatgagagggacggacaagggaggaattaccagtagaacactgctagaataaacgatatgtagaatctagtacgagcgtaacttcatttgtttcctgttgttatcgcatgtatactcttatgctgctttgtgaactcggtttcgtatgtgtcgagcaatcacttcaatgtgtctggaactagcggttgtttgaagcacttaaaacattataaatgtttggtcaactagtgcattttgtcc

SEQ ID NO: 8660 - DNA, 1375 bp, Oryza sativa
  ref <308>: DATABASE ACCESSION NUMBER: AK106008
  ref <309>: DATABASE ENTRY DATE: 2002-08-28
gatgcgctcagctagttagataagcatattgagcttcgttcgcagccaagcaaacgctcgcgcgcgcagccggcaatggcgtcgttgtctgacccgaactcgccgccgccgcacgtcgtcgaggactgccgcggcgcgctgcagctgctcagcgacggcacggttgtccgcgccgccgcgccgccgccgccgttctacgtacgcttggacatcgacgacggccgcgtcgagtggaaggacgtcgtgtacgacgccgcccacggcctcggcgtccgcatgtacaggccggcggcgacggggggagcggaggagaagctgccggtggtggtgtacttccatggcggcggcttctgcatcggctcctgcacctggcccaacttccacgccggctgcctccgcctcgccgccgagctccccgccgtggtgctctccttcgactaccgcctcgcgccggagcaccgcctgcccgccgcgcacgaggacgcggcggcggcgctcatctggctccgcgaccagctcctctccgacccgtggctcgccgacgcggccgacgcgcgcaaggtgttcgtctcgggggaatccgccggcggcaacttcgcgcaccacctcgccgtgcggttcggcgcggcggggctggacccggtgagggtcgccgggtacgtcctcctcatgccggcgttcatctcggagaggccgacgccgtcggagctggcggcgccggccaccgcgttcctgacgcgcgacatgtgcgaccgctactgccgcctcgcgctgcccgccggcgccgacaaggaccacccgctcgtcaacccgttcgggccggcgagccggagcctggaggcggtggacgtcggccgcgtgctggtggtcgccgccgacggcgacctcctcagggacaagaacgtcgagtacgcggagcggatgaaggcgatggggaaggacgtggagctggtggtgttcgccggcgaggagcacgcgttcttcggcgtgaagccaatgtcggcggccaccggcgagctcgtcgaggtcatcaggcggttcatcgccggcgccgccgcgtaagtgatcgtgatcgagcgaacgccggcgacggcgaggtggtttgcctcgtgcgccacgtgttcgtaggcttattccacagatgcgacatggtggcaggcactgtgtccttgcaacaataattgagacaagcttaattacttcgtactacatttgtgttttttttttttgtggttacaaattgggcacaatggcaagcaacaaaggtcgacaaatttatgtcattgttgtgaaatagtggtcgcagtttatatggctgcgaaggaagtgtgacagtgaccgtaagcagaggtaataaagtcagcgtgcatttatt

SEQ ID NO: 8661 - DNA, 1293 bp, Oryza sativa
  ref <308>: DATABASE ACCESSION NUMBER: AK106009
  ref <309>: DATABASE ENTRY DATE: 2002-08-28
atctttagcaccctggagatccttgacctcattcgggccggttccgtctgcaactcttggcgatctgcgtacacaagtatatgcagccttggacactgcaagccgcagcagacaccatgcttgctgtacacatttgagtctgacggcaccaaggcgacaggtctctacagcctagcggaaaagaaggcgtacatgttgactctcctggatccggcattgcctagtaggtttatcatcggatccagccatggctggattatcaccgccgacgagaggtctgagttgcaccttgtcaaccccatcaccggcaagcagatcgccctggcacctgtcaccaccattgagcaggtgaagcccatcttcgacgattccggtgctgtccacaagtacaagtactcatggtatacaggacagatgacggtttccgactcaccctcgatccttgctccggatgagctgcggaattttcttttcagcaaggcgatcgtgtcttctgatccatctgggggaaactttattgtggtgctcatccacaatcctcatttgcagctctcgattgcgagaccaggggatgataagtggacctggctgccgccacacaaagactatgaggactgcatattccgggatgggttgttgtatgccttgacatcagcaggagaaattcatgagtatgatctcagtggcccggcaatcgcacggaagatagtcctgaacaaggtgaagggctttgcatgcgagaacatgtacattgtccgaactccgtgtggtgatctattgcaggtgtggagatcgtacgatccgctggatgacgaggatgaagatgcatcggatgacctcgaggcagaccatgatgatgagtcttatgtttggaataccaccatgatcaaagtacacaaggttgacttggtagcgagaatgctcgtggaagcatgcgacttgggtgagaatgtgctgattcttgggcacaaccaatcgctttgtctccgtgctgatgaatatcctctgctgaaggcgaatcatgtctacttcagtgatgatagagagctctatattaaaggatgcaagaatggctgccgtgatattggagtgttcaacctggaaaacaactgcgctgaggaaattgtgtcacttcagctttggtcgaactggcctccccctgtttggatgacacccaatgctagaaaaataagtttggaaacgcacagtttgtgatgttatagtagttccggtcatctatgtatgtactctggtgttcaaacatatatggataatgtgctcaagatttattat

SEQ ID NO: 8662 - DNA, 1005 bp, Oryza sativa
  ref <308>: DATABASE ACCESSION NUMBER: AK106010
  ref <309>: DATABASE ENTRY DATE: 2002-08-28
aatcacagagtgcttagctagctcacactaaaagatatagagatagaagccactgagagcttgagaacaccatgtcttcctcggttcttctcttcctcgtggcgctgctgctctcgtgcagcaccatgggcaacgctgcacgacgcctggaggtggagtacccggcggcgcaccccgccgtgccggagcttcccaagcctgagctgccgccgcaccccgtcgtgccggagctgccaaagcacgaagaaccaccgccacacccacaccccgccgtgccggagcttccgaagcctgaactgccgccgccgcaccccgccgtgccggagctgcccaagcacgaagagccaccgcaccccgtcgtgccggagctgccaaagcccgaggtgcctcaccctgccgtgccggagttgccgaaacacgaagagccaccacaccccgtcgtgccggagttgccgaaacacgaagagccaccgcaccccgtcgtgccggagctgccgaagcccgaggtgcctcaccctgctgtgccggagttgccgaaacacgaagagccaccacaccccgtcgtgccggagttgccaaagcctgaggtgccacaccctgtggtgccggagttgccgaagcccgaggtgccgcatcccaccgtgccagagcatgaacagccgcccaagcctgagagccattatcccgagaagccatgatcgatccagagatcgatcgatcggccggtcgtatcgtatcctgaaattactacgtgttgctgtatgtgtgtatgttcatgtgtaagctttgatcgatgtttgcctaagatattttcagtgatgatctagctagctgtgtgagtgtgtgagatgatgtacgttgttgttgtgttttgttttgtggcagctttctttgttcttggatgagttattgtgttatcgtatgtgctgatttatgtgtgtgcacacacgatctacacttgtatcatacatgcttcataaatcaataaaatagctatcttcctat

SEQ ID NO: 8663 - DNA, 1377 bp, Oryza sativa
  ref <308>: DATABASE ACCESSION NUMBER: AK106011
  ref <309>: DATABASE ENTRY DATE: 2002-08-28
atgcacagcagcagcagcttgtatcatcctactagtagtagcttgcaacaatggcggcttcaatgaattcgaagcttcccctggctcttgtgctcctcctgctgtgcggcggcgcatgcgtagcggtagccatgcccagtgaattgtccatagttggctactcggaggaggatctggcgtcgcatgagaggctgatggagctgttcgagaagttcatggccaagtaccgcaaggcctactccagcttggaggagaagctgaggaggttcgaggtgttcaaggacaacctcaaccacatcgacgaggagaacaagaagatcaccggctactggctgggcctcaacgagttcgccgacctcacccacgacgagttcaaggctgcctacctcggcctcaccctcactccggcgaggaggaacagcaacgatcagttgttcaggtacgaggaggtggaggcggcaagtttgccgaaggaggtggactggaggaagaagggggcggtgacggaggtgaagaaccaggggcagtgcggcagctgctgggcgttctcgacggtggcggcggtggaggggatcaacgccatcgtgaccggcaacctgacgcgcctgtcggagcaggagctcatcgactgcgacaccgacggcaacaacggctgcagcggcggcctcatggactacgccttctcctacatcgccgccaacggcggcctccacaccgaggagtcctacccgtacctgatggaggaaggcacctgccgccgcggcagcacggagggggacgacgacggcgaggcggcggcggcggtgaccatctccgggtacgaggacgtgccgaggaacaacgagcaggccctgctcaaggccctggcccaccagcccgtcagcgtcgccatcgaggcctcaggcaggaacttccagttctacagcgggggtgtgtttgatggtccgtgcggcacgcggctggatcatggcgtgacggccgttggatacgggacggccagcaagggacacgattacatcatcgtgaagaactcgtggggatcgcattggggtgagaaggggtacatccggatgaggaggggcaccggcaagcacgacggcctctgcggcatcaacaagatggcctcctacccaaccaagaacgcttaaattaaatcagtttcttaatttcaaggatacaaaataataacacaagaagaggactctcttaattcatcctgcttgtaaagttcgttgttgttatctcggcacttccaagtgtttctcagtactcgtattcattgttattcattttcaattcccatccacatttcaagattgtttgtctctcattatttttcatcggtgaaaattaaagatggtgatggatagatgtaat

SEQ ID NO: 8664 - DNA, 1782 bp, Oryza sativa
  ref <308>: DATABASE ACCESSION NUMBER: AK106012
  ref <309>: DATABASE ENTRY DATE: 2002-08-28
aaactttgccatgtctcgtcgtcgtcctcctcacgccctcgccacgctcctctcccgcctccgcgcctgcagctccgcctcccacgcgctccagtgccacgccctcctcctcacctccggccacctcgccgcctccccggcccgcctctccaacctcctcctcctcgccctcgcctccgcctccgcctccccctccgccgccgaccacgccgactccgtcttcgcccacctcgcggaggaagcctcccgccacgcgttcccctggaacaccctcgtccgcctccacgccgccgcgagcccgcggagatccctcctctacttctcgcgcatgcggcgagccgccgtggcgcccgacgcctacacgttcccggccgtgctcaaggcgtgcggctgcgcgcccgggtgtagggtggggttggtggtgcacggcgaggcggtgaggacggggttggacgccgacctgttcacgaggaacgcgctgattagcttctactgcaggatcggggactgccgttccgggaggaaggtgttcgatcacggcgtgcgggacctcgtctcctggaactctatggtggcggggtacgttgggtgtggggaggtggatctggcgcaggatttgttcgacgaaatgcggcagagggatgcgttctcctgggccaccatgatcgatgggtacggagagatggcaggtggtgtagatcgtgcacgtgagttgtttgatcaaatgcctgacagggatttggtgtgctggaactccatgattgatggttatgccaggcatgggagaatggatgaagcgagggttctgttcgaggagatgcctgagaggaatgtgatctcatggagtattgtcatcgatggctatgtcagattcggggagccaaatgaagctttggagtttttccagaggatgctaagatgtggtatcaagcctgatagagtagctgcagttggggctgttgcagcttgtgcacagctgggagctctggagcaaggcaggtggctgcactcatacttggagaagaagaaggtgttgttcgatgttgtggtgcaaacagctttgatagatatgtacgtgaaatgcggtcgtttggatcttgccaaattgatctttgaaagcatgcccaagaagagtgtggtcacttggaatgtgatgattgttggacttggaactcatggttatggacttgatgccatcaagctttttaaccaaatggaaactgaaagggcaccaatggatgatcttagcatacttgctgtgttgacttcttgcacgcatgctgggttagtctcagagggtttggggatattttatagaatggagaaggatttaggactagaacctaaggtggaacattatggtgcattgattgatctccttggccgtgctggacgagtggatcaggctagaaacacaatagagacaatgccgatggaaccgactcctgaattatggggatctcttcttgcttcctgccgaagccataggtgtgtggagctggctgagctatcagttgagcgtctggccagtctcggagcagatgactctggagtctatgttcttctgtccaatatctatgctgatgaaggaatgtgggatgatgttttcaggattaggaagttgatgagtgctgagggtatgaaaaagaacattggacggagtgtgattgaggtggatggacaaattcatgagtttgtgaatggaggtagttcacatccccacaaggaggaaatttacttgacgctgtggaatttatctaacatagcagcatctatttgatc

SEQ ID NO: 8665 - DNA, 1123 bp, Oryza sativa
  ref <308>: DATABASE ACCESSION NUMBER: AK106013
  ref <309>: DATABASE ENTRY DATE: 2002-08-28
tcgcccgaggagataagtttttttttttttttttcaaaaaaaattcctcctctgcggcctcccctcaccgccgtccccgtcccgaccaccggaggccggcccgctccggcgagctgccgatacgcatggccgtcctcctccgcaccaccacctccgctacgaccgccacgagcggcggctcctcctcggcgacggcgctcctcgccaccacgttccgacgcggcggcaggcgcctcctcctcctccccgcgacacgcggctcggcgccgcgccgcgcggccttactcacggctcgcgcctcggcggagccgctggaggtctgcgccaaggcctccctcaccgtccccgaccgcctcggcgactgtcctttcacacagagagtgttgttgacaatagaggagaagcatcttccgtatgatataaaactagttgatctcgctaacaaacctgattggtttctgaaaattagcccagaaggtaaggtgcctattgtcaagcttgaggaacaatgggttgctgattctgatgttattacacaagcgatagaagagaagtaccctgaaccatccttggcaactcctccagaaaaggcttcagtcgggtcaaaaatattttccacctttattggtttccttaaaagcaaagatccgaatgatggaacagaacaggcactgcttagtgagctgacttcattcgatagctatctaaaagacaatggtccatttattaacggtgaaacaatatctgctgctgatctctctcttgcccccaaactatatcacatggagatagctctaggtcactataagaattggtctgttccagattcactttcacatgtgaaaaaatatatgaagactatcttttcaatggattcatttgtcaagactatagctctgcaagaggatgtcattgctggatggcgcccaaaggtcatgggttaaattgtagctgtaaaagtaaggcactctgataaactataaactatacatcatactttcttcagtaaagctagaattataccacacacaaacaattttcgtatgattaccacttgttgctgctgaaatatctgggcatttcttttgttgctaatagtttatcggtgagtaagacattccag

SEQ ID NO: 8666 - DNA, 1693 bp, Oryza sativa
  ref <308>: DATABASE ACCESSION NUMBER: AK106014
  ref <309>: DATABASE ENTRY DATE: 2002-08-28
tacgagcgaaaagatttggagtataaataaacagagagcgatggagccggtcgttccaagctgaagcctccactcacttgctctgcccaccggcgccggcgccgtcgccgccctatcctgtcctacctatggggcacggcctgagctgcagccgcgacaccgacgagtacgacctgttccgcgcggcgcagctgggcgacatccacgccctctccgccctcctcgccgccgaccccgcgctcgcccgccgcgccacagtctacgaccgcttcaccgctcttcacatcgccgccgccaacggccgcctccaggtactgtccatgttgctggatcgcgacggcgacgtggacgtcctgagccgcaagaagcagacgccgctgatggtggcggccatgcgtggcaacaccgagtgcgtggtcaggctcctccgcggcggcgccaacgtcctgaccttcgactcgccgcgcgccaggacgtgcctccaccacgccgcctactacggccacgccgagtgcctgcaggccatcctcggcgccgcggcgcaggcgcagggccccgtggccgcctcctggggtttcgcgcgcttcgtcaacgtgagggacgagcggggcgccacgccgctgcacctggctgcgaggcacgcccgcgcgtcctgcgtgcgcctgctgctcgacaagggcgccatcgtgtcggcgccaaccgccgtctacggattccccgggagcacggctctgcacctggcggcacgcgccggcagcatggagtgcatcagggagctgctggcctggggggcggaccggctccagagggactcggcggggcggatcgcgtacgcggtggcgatgaggcgggggcacagggcgtgcgcggcgctgctgaacccggcggcggcggagcccatagtgtggccgtccccgctcaagttcatcggcgagctggaggcggacgccaaggcacttctggaggcggcgctgatggaggccaacagggagagggagaagaggatcctgcacggcagcgacatcaacatcaagggcggcgacgaggaggaggagagcgaggatgaggaggaggcgtgcaacatctgcttcgagcaggcgtgcagcatggaggtgaaggagtgcgggcaccagatgtgcgcggcgtgcacgctggccatctgctgccacagcaagcccaaccccaagaccctcctcctccacccgcccgcctgccccttctgccgcaccaccatctcccgcctcgtcgtcgccaccaccaactccaacaagaccaacagccgccgccggtcgaggagcagaagcagcagcttcaagggggggctctcgtcggccatggggtcgttttccaggataggccgcggctccgggagattggtggtggacggcagcagcgtaggagagctcgccgacaagcctgaccacgacttctcttctgtcgccgccgctgctgctatttgtgacacatgaccctccctctattcattttttgtgcagttacaccttactagcactagagctttgggtaatcaatcaatcctcccacaagctcaagctaggttattcattatagcaaacaggaattggatattgggattggattgcatttgtattgtcttgtgttgcattcaatttgtagtatatacttgtttttggcttgtcatggtaaataatatttactccctatttattgt

SEQ ID NO: 8667 - DNA, 1712 bp, Oryza sativa
  ref <308>: DATABASE ACCESSION NUMBER: AK106015
  ref <309>: DATABASE ENTRY DATE: 2002-08-28
actaataatagctgcggccaccgccgccgccgccgccgccttggtcaccaaatccgcctacggcggcgccggcggtggggggcatcgtcatggcgtcgccgagcagccgcgcggtggccgtcggcggcgcgctcctcctgctcctcgtcttcgccgtcccaaccaccttcctctacctcacctccgcccccgccgcctcctccccgagcctcctcctcaacctcaagccgttcggcgcccggtgcgcgcccgccgccgccgccgccccgccgctcagggtcttcatgtacgacctgccacggcggttccacgtcggcatgatggacgcctccgcctcggggttccccgcgtggccgccgtcggcgggcgggatcaggcggcagcacagcgtggagtactggatgatggcgtcgctgcagggcgggggaggtggggggaacgggtcgtcgtcggaggaggggagggaggcggtgcgggtgacggatcccgacgcggcggaggccttcttcgtgcccttcttctcgtcgctcagcttcaacgtccacggccgcaacatgaccgatccagagaccgaggccgaccgcctcctccaggttgagcttatggagattttatggaaatctaaatattggcaacgatctgcaggccgtgatcatgtgattcccatgcatcacccaaatgcttttaggtttttgcgtgatatggtgaatgcatctattcttatagttgcagactttggaagatacacaaaagaattggcttccttgaggaaagatgttgtagctccatatgtgcatgttgtagattccttccttaacgatgatccacctgatccatttgatgatcgtcctacactgcttttctttcgagggcgtacagtcaggaaagatgaagggaagatccgtgctaaacttgccaagattctaaaagggaaggatggtgtgcgctttgaggatagccttgcaacaggtgaaggcattaaaacatctacggaaggcatgcgatcatcaaagttttgtctccatcctgctggggatactccttcctcgtgccgactgtttgatgcaattgtcagtcattgtgttcctgtgattgtcagcagtcggattgagctccctttcgaagatgagattgattacagtgagttctcccttttcttctcagtggaagaagctctaagacctgattatttgctcaaccagctcagacagatccagaaaacgaagtgggttgagatctggtcaaagctaaaaaatgtctctcatcactatgaattccagaatccacccaggaagggtgatgctgtgaacatgatatggaggcaggtgaagcacaaagtccctgcagttaatcttgcgattcacaggaataggagattaaaaattccagactggtggggatgaaccttggtgaattgtgtatatattatcatatcgatggggcgacggctgaagtgacattttttgggatgtatatgatgaagtcatgctggtcattccttgtgcaccatcaaaatcaaaatgggtccgagtctcattccacgcaggtttactgacgcactaacatttttgtccccttttttgttccttctatgacatcctaactatttttttcctctgatttttacgatatagtggaagcaaataagttgtattaatgttgtagagcagattttcatctgacaatacaaagacacaaagcacctatgttac

SEQ ID NO: 8668 - DNA, 1565 bp, Oryza sativa
  ref <308>: DATABASE ACCESSION NUMBER: AK106016
  ref <309>: DATABASE ENTRY DATE: 2002-08-28
actccgatgcacctgccctcgccgactcgccgttaaatgccaccgacacactccactcctcgctgccgccgccgccgcatctgaccacccggcgatggcgagaccggcggcgacggcggcggcgccgaaggcgccccctccgaagcacctgattgcgctcgccgtcgtcgccatcctcggcctcgtccttgtcgccgacttcctctgggcctcctcctcccccgccgcccccgcctggtcctccaggatcgatctccccggccgcccggccgccctcgtgccaccctcggggaagaagcaaacaaaggaaaaaatatctataggttccacggacataaatgcaacctttgcagatttgccagcaccagaactacaatgggaggagatggctgaagcacctgtgccacgtttggatggtgctgctatgcaaattaagaatctcttatatgtgtttgctggatatggtaccattaaccatgtgcattctcatgtggatatttacaatttctcagataatacatggggtgggaggtttgatatgccaaaggaaatggctcattcacatttggggatggttacagatggaagatatgtttatgtggtaacaggacagtatggtccgcaatgtagggggcccacagcacgaaattttgtgctggacactgaaacaaaagaatggcacgatttgcctccattgccagttcctagatatgctccagccacacaactttggagaggcaggcttcatgtgatgggtggcagcaaggaggataggcatgaacctgggcttgaacattggagcattgcagtaaaggatgggaaagccctggaaaacgagtggaggagtgaggtaccaatcccacgtggaggccctcatagggcttgtgttgttgctaatgataagctacttgttattggtggccaagaaggagattttatggcgaaacctggatcacctatatttaaatgtgttagaagaagtgaggtggtctacagcaatgtctacatgcttgatgatggaatgaagtggaaagaatttccacctatgccaaagccagattcacatatagagtttgcttgggtgaatgttaacaattctctcattattgctggaggaaccacagaaaagcacccaataaccaaaaaaatggttttagttggtgaagtgtttcggttcaacttgaacacactggaatggactgtgattgggcggttacctttccgaatcaagaccactctggtaggatactgggatggctggctgtatttcacttctgggcaacgagacaaaggaccgaaagacccttctcctaagaaggttgtcggatgcatgtggagaactaagttgcacctgtgagatttttagaaggaaaactgatatgaccattgactaagcccattctttatgcattcttttgggtacataactgttccattcccctatggtgggcgagttgtttattatcatacgaattgttggctttgttgtgcattgtcacatcatgccactaatctgttgtatgcttacctttttggttatatcatagaatgaccgacttttacgc

SEQ ID NO: 8669 - DNA, 1342 bp, Oryza sativa
  ref <308>: DATABASE ACCESSION NUMBER: AK106017
  ref <309>: DATABASE ENTRY DATE: 2002-08-28
aaaacatcaaggaaggcagcaaactgcaaacccccatcctgtccctctccccctcccttaccttccactcttgatggacacagccgccaagctccactctcccaccactcccctcctcgcccacgcccaccatgacgaccgcctcttactctgctccccgccggcggccgtggagttccctgtgctcaagagcagggcggcgcggggcgcgctgctgctggcggcgaactacgcggcgttgtttgtcgggtcgctctcgtccagcctgctctctcggttctacttcgcgcacggcggcgccgaccggtggctggccacgctcgtccagtcggcgggattcccggcgctcctgctgccgctgatgtgcgcgcggcggccggcgtcacggccgttcgccgggttcacgccgcgcctggtgatgtactgcgtcctgctcgggctggtgatggggctcaacaacctgctctactcgtgcggcacctcgtacctgccggtgtccaccacggcgctactcctctccatgcagctggctttcacgctggcgctcgccgcggcgctcgtccgcgtgccgctctccttcgccaacttcaacgccgtcgtgctcctcacgctctcgtccctgctcctcgcgctccgccacggcgcgggcggcggcggcggcggcgcggacgccaccagcccggattacctcgtcggcgtcgcggcgaccctcggcgcggcgttgctcttcgcgctctacctgccggcggccgagctcgtgtaccggcacggcggggtgacgggcttccggatggtggtggaggcgcaggtgattatggaggcggtggcgacggccgtcggcgcggccggcatggtgtcgtccgcggggggcaagtggccgtgggacggcgtggaggccacgtgggatctgtcgccggcggcctactacgcggtggtcggggcggcggtgcttagctggcagctgtgctttcttggcaccgccggaacggtgttcctgacgacgtccctgcacggcggcatctgcatgacggcgctgttggcggtgaacgtggccggcggcgtggtggtgttcggcgacgagttcgggccggagaaggcggtggccatgctgctctgcctctgggccttctcgtcctacgtctatggggagtacaagaaaggggacaaggccatggcaaatgaggaggaccaagggattctggatcgggtctaaattttgctttcagatcagattaagaaaaaagaaaaaaaaagaaagaagagaaagcacttctagtctttttttttccctttcatgtgaataaccaccatgcacataatgtgaaaagttactagctttttt

SEQ ID NO: 8670 - DNA, 1451 bp, Oryza sativa
  ref <308>: DATABASE ACCESSION NUMBER: AK106018
  ref <309>: DATABASE ENTRY DATE: 2002-08-28
agcagcgccaccaccacggactccgccgccgctcccgccaccgccacatcccttgccggtgatccagatgaggttccgcggtgtacaggtggatctcgtgtacgccggcgtgtgcctcccgtggtgcccgacaacctggagtggacctcagcgcgaccggtcggtgctccgcggccttgacgacctcgccacggcgcgcagcctcacggcatccgcgtggccgacgagatcctgcggcttgtcccggacaccgcggcgttccgcaccatgctgcggtgcgtgaagcactgggctaaggcgcggggcgtctactccaacgtcgcaggcttcctcggcggcatcggctgggctatcctcgtggcgcgcgtgtgccagctctaccccaacacctccccagcatgctgctcccgcgcttcttccgcgtctttgcgcggtagaagtggcccagcccggtgatgctgcgcgccatcgagcacgacgacggcgagctcggcctcagacgccaccctgcgcgtcaccaccgagcagctcgccgtcggcgacgacgtctgccaggagatcgtcaaggccggcgccatgtgggtggtgattagttaagtactgcttagtcttaatgatcggtaactgcatgtgttgtagcttgactaacaaatcactgagtctgagaaataagagtggaagtgtagctagttcgccgcaagctcgtgtttgtcccctgaagtatttgcatcacttgtgtattccttcgtgcgtgtgtgacctcgcgtgtgttttgttgtttctctgggccaaagctcacagggctgggtggagtcgcggttgaggcagctgtcggccagggtggaggcggacacgtccggggtgctgctctgccaccttcacccgcaagcgtacgccaccgagcaccacaaggagccgcggcggcagcgggagcgggaagccgtctccgctgcagccgcctcgacgccaaggatctctgggcggcacgccggcgctgcacggatggccttgaggagagcagctagctcgctcagatggccttgaggtggtcggcagcggcggcggcggcgatgtcctggccgtcggcgtctcagcgagggcgacgatgttggggaagtccatggccacggcgtcctccgtggtgaatcagtcctcgttgcggaggagctccttgctgccggcggcgaccatccccggcgtaggcgtggcagtgcacggagcatgcggcggcgtcgacggcgaggtccgcctcctgagcgccgtcagccttcggccttcccgagccttggcacggcggacctcacgtggtcctctcccaccagggactgagagagaggatagagataacagatacagtaagaggggagaaatagggtgacatatggggcccatcattatttttattattttgtatgtgcaactgatatgtgggtcccacgagtttgttttcc

SEQ ID NO: 8671 - DNA, 1225 bp, Oryza sativa
  ref <308>: DATABASE ACCESSION NUMBER: AK106019
  ref <309>: DATABASE ENTRY DATE: 2002-08-28
gatgtgaccgctcgcaggtcgcagagcccccgctctggcctctgcaaggagcacgcttctaagaagaacaatgctgtggcgtacgcaaagtccacacaggtgatactagttgggtatcctccaaggaggacaacggtggcccaggtgaacgccagtgtgccgagggcgttgcccaccctctcaacggaggcaacaacttgaacaaagcaattcagctgctcttctggcatcgcgctatgccagctcgcctcaggttgggcaactctctctgctacatctaccagtacattctctgtttgtgtcgacatactcatgaatcagttcaggttctttgatgtatctatctggaattctgtatatgctacgaagaatactgatgcactttctaaagtatacctcctgaaggggcagggttgtaggcaatcaggagacagctgacacgagagcaccggttaatccaatgatgagtcagcagcaacttcgattactacgcatgcgaagttccctttatttgtattattctcccgatagagctggagcatagttttcttgactgacatgccaatgttcatcttctaggaaaatgtcacagctgatggcatcttcctctctatctacctaagagttgtacgcattacagaaaaaaaacaaacggaagagagtaaactccaaactccagaggtgttggatttggtgattggtcattggttgcggcggcgccgccggcctaccgggcgtggaacaccgtacggccggagaatgatttcctcgttgcgcggcacgaaatgtactcttccattcctgaagctacgggtacggtttctgcttaaagaatacactgaattctgcatgtataaagcctgaacccgtaggtcttcagctacccggcagtgttcagataagcaacccggatgattgttttggcttctggatttatcaaatgaagtcattttgcctgttgactcagacataggattgcttgacgtacccatgatcaagtaacatgtatatataaaatccgagaaatgttatgtgatctagtctaagagaatggttgaatgaagaggatcctcttaatttggagattaaaaacaagttgattgagatgcaatctgagtgtacgagaagcagttatagagttggcaatggtatgtaaacctctgaaaatgactgttgcgtgaaacggtgaaaggttgtctataaagattttatttactgattattg

SEQ ID NO: 8672 - DNA, 1450 bp, Oryza sativa
  ref <308>: DATABASE ACCESSION NUMBER: AK106020
  ref <309>: DATABASE ENTRY DATE: 2002-08-28
gttcaagtcccctcctcttctttcttctctcctctgcttcctcctgaagcggatgacgtcagcaatggcgatgagcttcctctccaccaccgccgcctcctcctcccagccacccctacccgcccgccgcctccctcgccgcaatccctccctccccttccctctcagaccaccacaccgcctctctcccttctccgctccccctcccgagccccatcgcctcacctaccgaacccactccacctcctcctcttccaggacacccaccgccgccggcctcctctctccggtcatctccacctcgagaaccctcatcttcctccttgtcgcctccctcctctccctctccggcgtccgccccctcccttccctcgcatcccctcccccacctacccaacaaccgcaagaaacggaagagcaagaacagcagcaagaatccgaggagaagcagcagcagcagcaggaggaggagggcgtggaggcggaggtcgaggaggcgtggctgcggcaagacgaggaggaagaagtagaagagaaagaagaggaggaggaggaggccgatgacgaggtgcagatgtacatggagatcctgagccgcgatccgggcgacgtggacgcgctcaagtgcgcgctgttcgccaagatgaggcgcgcggagtggggcggcgcgctggggttcgcgcggcggctgcgggaggcggagcccggcgaggtggagtggcggctcatggaggcgctgctgcacgagctcaaaggcgacctcgccgaggccgagcgcctcttcaacgaggtcctcgccgagaagccactcctcgtcagggcactccatggacttgctctgtgtatgcataaaagatcagaaggacctactgtttttgagatgctggagaaagctttgcaacttgcaatttctggggaaagggttccagaagagcgcaacattaagcttttgattgctcagatgcatgttgtcaagggccagttggatgttgcatcagagaaactgcaaaatcttatcaatgaggatcctcgagatttccgacctcatctttgccagggcatcgtttacgcacttttagacaaaaaggaagaagcagatgagctgtttgatacatatagaagtcttgttccagatgaatttccagacaagagttttattagtgatgttatacaagcagccagagtggagtccaaggaccggctacaaaaggattttggatctgaatttttatctaagaagtgactaatcaggatttttctacacctgaacggctaatagtttttgtagtggtaggtagctgcatattgatgtgcacacaagtgcaaaaatgttacaagtgaattgaaataaatagtgagaaatggaaggagatgtgtatctcctaccaccaattttctcctaacattgaaataaaatagagataaatggagatgtgtttctcccattacc

SEQ ID NO: 8673 - DNA, 1144 bp, Oryza sativa
  ref <308>: DATABASE ACCESSION NUMBER: AK106021
  ref <309>: DATABASE ENTRY DATE: 2002-08-28
cttaatctatccgaacgctctagatcttatcaagtggcgtcggcggcgatgtgcgaggaggcgacgcggagcagggtgctggtggtcggcgccaccgggcggctcgggggatgcctcgtgcgcgccagcctcgccgccggccaccccaccttcgcgctcgtccgcccccaccacctcgctgtccccgactccgccccactcacgtcgctcgccggcgccacggtcgtgaagggatcgctcgaagattacccgagcctgctggaagcggtgcggcaggtggatgtcgtcatctgcgccgtgcccacgaagcaagcgctcgagcagaagcttctgattcgggctattaaggatgctgggtgcgtgaagagatttattccagcggaatatggacttgatcccacaaaggttcaaatttgtggcatggaccatggcttctatgagaagaaaattgaaatacgccatttaatagagagcgaatgcattcctcacacctacatctgctgcaacttcttgatgcgttatttgcttccgtcacttgttcagccaggactcgatgctcctccaagagatgaagttaagatatttggtgatggaaacactagaggagtttttgttgaagagactgatgttgctaaattcacgatctgcaccatagatgatcccaggacattaaacaatacgctgtatctgagaccctcgggaaatgtctactcaatgaacaaattggttgacctctgggagaaaaaaataaataaattcctgaacaagatatatatcacagaagaacaactcctgaaaaacattgaagatgcaccattgcccttgaagatggatttgatatttatatattcaacatttattaagggtgaccaaacatattttgaaattgactcgagaaaggaaggaactcaattgtatcctcatgtaaattataccacagtggatggttatttagataaattggtttagaatattaaatatttgttttttcctgtactagtaccattcctacctctattagttatattacctttcatctctagcctacctcaacttgctagggacttaaggttattattcttgtatcttgcccataaacaatacccttctgttaaatggtattttgaaagaattgcaaaatgac

SEQ ID NO: 8674 - DNA, 916 bp, Oryza sativa
  ref <308>: DATABASE ACCESSION NUMBER: AK106022
  ref <309>: DATABASE ENTRY DATE: 2002-08-28
gaaaaaaaaaaaaaaaaaaaaaaaaaaaaaaaaaaaaaagccagcattgacaggcacttagctaagtacgtagctatatagcttctcctgcttgttcataataagcaaataattaacaatgcaaggccggatggtgacatggtccatggcgtctgtgatcgtcgccgcggcctgcatcttcctcagctgctctgcgagcgtcgcccatggaaggagattcgtcaggagtagtagctacgacaagccgtgcaaggagatgaggctctacctccacgacatcctctacgactacagcaacagcacctccaactccacgtcggcggcggccaccaagccgacggcgctggccaccgccgtgccgtcgaccggcggcaccttcttcgggcaggtggtggtgttcaacgacccgatgacggaggggagggcgctgccgccgtcgctggaggagacggcggtgcgcgcgcagggggtctacctctacaacagcaaggaggcgttcaacgcgtggttcgccttctccatcgtgttcaactccacggggcgccgcggcacgctcaacctcatgggcgccgacatcatcgccgagaagacgagggacatctccgtcgtgggcggcaccggcgacttcttcatgtcccgcggcgtcgccaccctccgcaccgacgccttcgagggcttcacctacttccggctgcagatggacatcaagctctacgaatgctacgtcgtctgattacgttgctctgaattctgatagatggtaattaacatataatactgctatacacggtgtgatgcgtgatttatttccatcgcgaaatatacttgtttgcttgacgagttatatgcaccgatgaatgtgcaaaatgtatcccaactttgtttattttcattcaataaagatgaagtttgctct

SEQ ID NO: 8675 - DNA, 1365 bp, Oryza sativa
  ref <308>: DATABASE ACCESSION NUMBER: AK106023
  ref <309>: DATABASE ENTRY DATE: 2002-08-28
gtgcctgccttccccctaccacatcaccgccgcggcgtccacccgaatcccccctcccacaagacgaccgaagaaaaacgggcaatcgccaaatccccgtgaaaccccaaagcggccgcaccgcgggccgagccgccgaggcgatggagcttgcgacgcacgacctcgcggcgctgggcgcggccgacctcgtccgcgtctccgcctcgatcccgcgcgcggcgccgcgcaccttcgcgctgctcaccgcgggcctcgtcttcccgctctccgccgcggtgctcgtccactccctcttcacccaccccatcatcctccgcctccagggcgccaacggcgactactcctcctccgactccgcccagtggctcaagctcttcgcgtaccagttcctctacctcatcctcctcttcaccctctccctcctctccaccgccgccgccgtcttcaccgtcgcctcgctctacgccgccaagccggcatccatcgcctcctcgctcgccgcgctgccgcccatcctcccgcgcctcctccgcaccttcctctgggtctcgctcctcatgctcgcctaccacctcgtcttcgccctcaccgtcctcctcctcctcctgctcttcgccccatcttcctccccgccctccctccccttcgtcctcatccttgtcgtcgtcgtgttcgtcttcctcgcgatccatgtctacatctccgcattgtggcacctcgccagcgtcatctccgtgctcgagccgctctgcggtctcgccgccatgacaaaaagcaagcaactgcttcaagggcgcacccgcacggccggcgtgctcgtcgtctcctacttcgccgcctgcggcgttaccgctgtgctgttccgcgcggccgtagtcaagggccgcggcgaggaggggagccttggcctgagcttgcccggtcgggtgcttgctggtgctgtgctggtgtctgttcttgtctgcgtcaatttgctggggctactcgtgcagagcgtgttttactacgcttgcaaggccttccacaaccagcagattgatcgaagcgcattgtatgagcatctcggagggtaccttggtgaatacgtgcctctcaagagcaatattcagatggagaaccttgatgcataaagggtaagaactgctggatcttgctctaaagaagagagtaggatttgttttgtgctcttctatctagttcactatgatgctttgtaatctgtaagtagtaataatatggaatggtctatgcaatggaacagagatgcataaggaaaattctctttcttttgcattattgtgtctctgtttacattattttcctgtcattcatgactaatttatgatatacgggtttcttttc

SEQ ID NO: 8676 - DNA, 1071 bp, Oryza sativa
  ref <308>: DATABASE ACCESSION NUMBER: AK106024
  ref <309>: DATABASE ENTRY DATE: 2002-08-28
atctctaaccccttcgtttcccacccaccacctctctccggcgtgctcgctcgcacacagtccccaatggcctcccggaacgccgacccgccgcgtcaccacccctcgacgccgcctctcctcctcgccatgcgccacctccccttcccgggcgtccaccggccgcgcgcgctccccgccccggacctcgcgcccctcgccgcccgcctcgaagagctcgctgccgccgcggccgcgcacccgctcctgaagccgctcttcgccttccactcccacctcgccgccttctcccagagcaggaggcgggcgatggcgacgatgcgccggcggcggacgacgggcgagtgcccgctgtccggcgagcactgcttcgcggcggtgctgggtgactccgtggccggtgtggtggtgtccagcggcatcaacaacttcctcagcctgtacaacaccgtcctcgtcgtcaggctcgtgctcacctggttccccaacacgccgcccgccatcgtcgcgcccctcagcacgatatgtgatccgtatctgaacattttccggggaatcatcccgccgctggggggaacgctcgacctgtcgcccatcctcgcgttcctggtcctcaacgccttgtccagcaccgccgccgcgctcccggccgagctcccggacccagcaccgccgacgtctcgcggcgcaacctcgtcaagctccgtgctcaccgcaaaccggaggaaatggatgcggagaatccgcccggtaaaatcgcaggaaggagaggaggaaatgtgatgctctatctaggtgggacttcgtttgaaccagtttggacagatggaatcgctgtctcactgacatggtggccatcagactaagagtctgggcatgttcagacgcgaacgatcatcaattaagcaggcggaattgttttggttgtgttgcttcagaagatttttgcttgtacgctgtagaatccatcccattgaggcttcgtgttttctgcatgtatgcagaggaacaacctgcttgactagtttgacatgttccagtcttttggatgagtttgttactttgttgatg

SEQ ID NO: 8677 - DNA, 1799 bp, Oryza sativa
  ref <308>: DATABASE ACCESSION NUMBER: AK106025
  ref <309>: DATABASE ENTRY DATE: 2002-08-28
agaagctctgggtgtggattggtccaacgaaaatggcgctcccagcaaccgttagccacacgacctgcgccatccagcggcggcgccgctccaccgcgccagctcgccgacgaggcccaccttctcgccgccatccccactccggcgcggccctcaccctccgcgccgcgccgccgccggccacccagcccaccctggaccgcgtcctctccgacctcgggtcccacccgcgcctcctcacccccgacctcctcgactccctcctcgccgccctcccgctccacccctccccgcgccgcaacctcgcccgcctccgccgcctcctctccgtctccctcctccgccgctaccccgcgctcgcccgccgcctcctccacctccacgcctctctgggcctcgtctcctacgcccaccacctgttcgaccacctgctgcccgcgcgcgcccgggaggacgccttcccgtggaactgcctcatcgccgggtacgcgcgcctcggccgccacgaggacgcgctcgcgctctacctccagatggaggaggagaccgtcccgcgggaccgcttcaccttcacgagcgcgctccaggcctgcgccggcgtcggctcggtcgagctcggccatgccatccaccgtgacgtcgtgcgcgccggtctcgcgtccgacgtgcctgtgtgcgacgccctcgtggatttgtacgccacattcggcgacgtacggagggctctccaggtgttcgatgcaatgccggacagggacggcgtctcatggaacatcatgcttgctgggtgcctgcgacatgggctctcccagcaggctctggagctctggagaagaatgctgagagaagaacatgagcccgactccattacattatcaacaatgctgtcgatactgccgttggtttgtgacaatggtaaatggggactggagattcgtgcctgggcaattcgtcatggtctcgagacagagctgtcagtagcaaatgctctgatcaggatgtactctgataagaacgaacagagccatgccctgttggtgtttgagtcaatgacgatgagggatctgcagtcctggaatgctataatctctgctcacctccaggactacagaattctcatgatcttccgtcgaatggtggattccgggatgcgaccagatgagaccacctttgcgttggtgttctcagcttgtgacaatttagggctggtggagggtggcatgagattgttctctgagatggagaatgagtacagaattccccctactatggaacaatatacctgcatggtgaacatgctaggcaaggctgggatgatccatgaggcttacgagttcatgtcgaagcggaagcctctcgacaatgaacagactgttttgagggctctactgcaggcttgcttgatgcatcgcaacgccagggttggagagatcattgcgaagaggttgatcgaactggagcctgacaatgagcacaattttgtaaagttgatggagatctatcaaaatgtgggaaggttggtagaggctgaaaaggtgaagaagacgatgagggatagaggactgtcatgtcaaagctgatgaattcaaatgatcatagtagcttttgaaccatatttcagagctcttttgtttagtggtggtgaacatagaactaaccccagttcattgtcaaacggttgtactttgtacaggccagtatcaggtgcaaaaacaattctttaattaatgctgtacaatggagtattgtgtatacaacaattgtaaggtacaatattgtatatacaacaattttaagat

SEQ ID NO: 8678 - DNA, 1329 bp, Oryza sativa
  ref <308>: DATABASE ACCESSION NUMBER: AK106026
  ref <309>: DATABASE ENTRY DATE: 2002-08-28
accaccgcacaattaatctcatcactcttcacccgccgcgacctccggaagcaaacgccacacgcgcctctccgccatgcttcctcctagggttgccccggccgccgccgccgcgcctacctatctcgccgccgcggcctcgacccctgcttccgtctggctgcctgtgccgcgtggtgccggacccggggcagtgtgcagggccgccgggaaagggaaggaggtgctcagcggcgtggtcttccagccattcgaggagctcaagggggagctctccctcgtcccccaggccaaggaccagtctctcgctaggcaaaagttcgtcgacgagtgcgaggccgccatcaacgagcagatcaatgtggagtacaatgcatcgtacgcgtaccactcccttttcgcctactttgatcgtgacaacgttgctctcaagggattcgccaaattcttcaaagaatccagcgatgaggagagggatcacgcagagaaactcatcaagtaccagaacatgcgtggaggcagggtgcggctccagtccatcgtcacacctttgacagagttcgaccatcctgagaaaggggatgccttgtatgctatggagttggccttggctctcgaaaagcttgtaaatgagaagttgcacaacctgcacagtgtaagatattctcctgttatgcagtaatgctgaacatggatttagaatgtgttgtataattctcaacactattttgaaaagaaatatatggtgaaacttgaaaatgtgttgctgtgaatcaacaggtggcatcaaggtgcaatgatccacagctgaccgacttcgttgagagcgaattccttgaggagcaggttgaagccatcaagaagatctctgagtatgtcgcccagctgagaagagtgggaaaggggcatggggtgtggcactttgatcagaagctgcttgaggaagaagcttgaatggaggagactgtgtgaagggcagtagtaggtttcgtttcttccatccatgggatcatgcagctaaagaaagaaaataagtcgagtctgtgtattcatcaaattaagcacgcagtagcaatggagtgaatgaaccaaccaatttggtcatgaacttccccctgtgtctaggtcagtagagcttcagaatcatgtgtatgtcgcgcgtcctcgcagaaaaggaacatggcgccgctggctgtagcgatacttgtgatattgtggctatgcatggagtcatggtgatggtgtattttgggggcatttacacgtttgttgctagagagattttgctggcagccaataaggaacaatatgataaaccattgtggtgtt

SEQ ID NO: 8679 - DNA, 1667 bp, Oryza sativa
  ref <308>: DATABASE ACCESSION NUMBER: AK106027
  ref <309>: DATABASE ENTRY DATE: 2002-08-28
gcagaaaaccaaaaccatttcccccatttcctcccctcccctaccctaccatggacttctccggcggcagcggcggcggcggcgtcgcgtcggggagggtgcaggcggagcggtggctggagatcgccgggaagctcctcgcggcgcgggacctcgtcgggtgcaagcggttcgcggagcgcgcggtggaggcggacccgctcctccccggcgccgacgagctcctcgccgtcaccgacgtcctcctcgcctcccagtcggtcctcccctcgggccaggccgacccgctcgccgtcctccagctccccccgtccaccaacccggccgaccacgccgccgtctcccgcgcctaccgccgcctcgccctcctcctcaggcaggacaccaacccgcacccgggcgccgacgtcgccctcagcctcgtccacgacgcctacgccatcctctccgatcccaaccgccgccccccgccgcccgtcgccgtcgccgtcccccacgcccatccaggcgccgcgtcccacccagccgcgcccgccgccgccgaatcccccgagttctggacggcttgcccgttctgctcctacgtccaccagtaccagcgcgagctcgtggggcgcgcgctcaagtgccccaacgagtcttgccgcaaggggttcgtggctattgagatctccaccccgcccaccatcgtgccgggcaccgagatgtaccactgcgcctgggggttcttccccctcggctaccccacctccgccgacctcaatggcaactggaagccattctacaagatgttcccctggaacaatgcgcccgctggtggcgccggctcgggtggtagggggggctatggtggccgtggtggaggcagcgctggtcggcagccgcagaatgggagcgcgcggggcgggtcatccagaggtagggtgaagaagacgaccgctcgcaagaaggtcggtgccgggctcaagaggcgatcattcggcggcgtggagagcggcattgagccgatggatgggcaggatggatggggtgagggtgaggagggtggtgatggacaggcagaggaggtgagggggattaacatcaatgaagaggcacagtctacagatggtgctaccaggggacatgttcacgcaagggggaatgtcagcggtggggttgtggacatgggcaccttccatctggatgtcgatccatcggaagatattttagggaatttgcagaacttgcccttcttgagggttgacaatcttgggcggatgctgtaatgggctatggcatttgttgtgctggagaaatgctgtatgtttagctgggtcaaaacagatgtttcagggaccgacccttaccgctcttgttgtcgttattgttcttgtggcattatctcttgttgtagtagtagtttaccttgtgtttctagttacttagctggcggtggagtcccatagaagtcctatatgtgagtttgtggtatctccaaattagctgggatatgtattctgtcttaagcaaacaaacttgtggagttctctcaggatgaatttagtgattcatggatgggcgatcacttcggtttcttctagggcaatggcgagacaagtcactgagagaaagtaagtgaagctgtgagctgtctgtctttctgaatatacaaagcttcttttgtt

SEQ ID NO: 8680 - DNA, 1514 bp, Oryza sativa
  ref <308>: DATABASE ACCESSION NUMBER: AK106028
  ref <309>: DATABASE ENTRY DATE: 2002-08-28
agagagagacagagagagctcgagctcgacatggcgatggcgggtggaggacgaggagactacggcgccttcatggagaggttcgtgctgccgccgccgccatcgcagcaactccctctccacggcctcaccttcgccatcaaggacatcttcgacatcgccggccgcgtcaccgggttcggcaacccggactgggcgaggacccacgcgcccgccgccgccacctcccccgtcgtcctcgccgcgctcgccgccggcgccaccagcctcggcaccaccatcatggacgagatggcctacagcatcaatggggagaacacgcactacggcacgccgaccaacccttgcgcgcctgggagagtccccggaggatcctccagtggttcagctgtcgccgtcgccgccaacctcgtcgacttctccctcggcaccgacaccggcggcagcgtcagggtgcctgctgcctactgcggcatctttggactccgcccttcccatgggttggtttctgcagagaatgtcatccccatggcgcaaatgtttgatactgttgggtggttttccagagatttatctacgttgtctcgtgtaaccaaagtgctgttgccactccctgatgacattgtcaagcaacctactcaagtcacaattcctatggactgtttccagatcttaggctctctcgacgaccgcacctatcaaatcatcaatgcttcggtagcaaagagatttgatagtcagatattagacaataggaaccttggagatttcatctctgataatgttccaagcataggaaagttcatcactgacttctctgaaagcgaactcccttctgtgccagctctatccgtcatttcacatgtcatgcgaggccttcaaggtctcagttcaaagcaaaccatgcagagtgggtcaacactgtaaaacctaacctaggccctggattacgggagagaatactggaggccattgcatctggggataatgaatccctggaggatttccaagctataagggctgaattcaagtctgcacttgctgctcttctgaaggatcatggaatccttgcaatccctacagttcctgggcctccacccaaggtgggcatggaagctgctcctctggaaaatttccgagcaagagcattttcacttctctccatcgctggattatccgggttttgccaggtgagtattccgctgggcatgcgcaatggtcttcctgtgtcagtttcgctcgtggcgcgacatggtgcagaccatttcctcctcaatgtggttgaggagctgtatcagacactcatagacgaagccactaaaacttggtcctcctgaatcctgccctatttcatctgtatatgcctaatacacagtcaaaacacatttcatatggaaatggagtgatactgatacagatactacagtagactgcccatgtaattaacatttgcatatgcatggatgtttgcactgcacagacaaagttctttgggataaaacttgtgctttacc

SEQ ID NO: 8681 - DNA, 1146 bp, Oryza sativa
  ref <308>: DATABASE ACCESSION NUMBER: AK106029
  ref <309>: DATABASE ENTRY DATE: 2002-08-28
actttccaattcacctcttgggacccacaacaacaaccagctctccaagacagcaactcaagaacgaagatgttctctgcaagcaagctctgtgtgctcgcggtctgcgcgatcaccctcttctcgtccgctcacgcccaccccacggaatcgcccgagtacgaccagcgtcgtctgcgcggagagggatacggtggtggcggtggtggctacggcggtggtgctggcaacaacaacccagtgtcgcttccggctgcgcctgcgggcgtcccagcgatgccgacgcccggtgcagcggttccggtcccggcgcctggtggtggtgccaatgtgcctgcgcctgccggtggctccaacaactgcgctggtggtggcggcaacggtggcatgggcaatggctgccagccagcgcctgctcctgctcctgccggcggctcgaacaactgtgcgggtggtgcgggtaacggcggagccggcggaaacggcggcatgggcaagggttgcgggccaacgccagctgctccgcagcccgccccagctccagctcctgctcctgctcctgctccggcgcctgccccggcgcctgctccggcccccgctcctgctccggcacctgctccagttcccgcccccgctccagcccccgcccccgctccggctcctgcgcctgctatgaagcctgctccagcgcccgccccggctccggctccggctccggccccagcccccgctccactgccccttgctcccgcaggagctacgaacttgtggtgcaaggatgccgcgggtaacaacatcgaccccagcaactgtttctcggggccgatcccggcgccggcacccccgcagccggccccagctcctgctcctgccccggcgccagctccggccccggctccagctcctgtaccggcgccagccccggccccggctcctgcgccagcgccagctccggcttcgggaaacactggtggcaagccgggcaagccgaccagcagtggcgacccgactcagcagtagacgcgtcctagcgatagatgctgtggttgcggtgaccgcccgattcgatgttgtgactggtagatgttactcaatgtagtgaaactgtggagtgactaagtggtaattgacgcctattgaacacgc

SEQ ID NO: 8682 - DNA, 1173 bp, Oryza sativa; identical to SEQ ID NO: 3948
  ref <308>: DATABASE ACCESSION NUMBER: AK106030
  ref <309>: DATABASE ENTRY DATE: 2002-08-28

SEQ ID NO: 8683 - DNA, 1411 bp, Oryza sativa
  ref <308>: DATABASE ACCESSION NUMBER: AK106031
  ref <309>: DATABASE ENTRY DATE: 2002-08-28
aaatccagcccaagtccatctcccacccttccaccactacccacatcgtctcgccgccgtcgccgccgccggcgtgacctccgccgcaaatccgcagcccccaccaccgccacccaaagctctcatcccgcatgaaggcgtcgatcaagttccgcgacgacgaccggccgctgctgcgtgccagggtgccgatcagggtgctcgggctgccgctccactccggcctctccgccggcggcgacccgcgcgagctccgcctcgacctctccaccgccttctccttcggcccggcgatccgcctctcgtaccgccccaatgaccccgccctccccttctccgtctccgtccgcgccggcgtcgggcccctcggctcccccgcccgcgcgcccttctccctcgccgccgagttcaacctcctctccggcaaccccggatcccccgccttcttcctcctcctcaagccgcgcctcggcgacttctcgctctcccacaccctccgctcctcgccgcatcccggtaataaggtcggggaggtctccgatggcgatggccatgggcgcgaggtgaactacaaggcgttctcgttcgcggcggcggggaagagcggcggcggggtcggcgcgctgctgtccgggatgcggctcaccacgaggagcgtgctcccgctgtggggaagggcgagcctgcggttcaactgggggctgcgcgcgccgccggagctgcaggcggcgctcgccgccgacgacgccatggtcggtgccagccgcagccgcaagggcggcgcgcgggttccggtcagcaagatgcccctgctggtcattgacaagatctccatcgaacagtcacctcgcgccgccgacaaaacgcgcggcaacgcggattcctcgccaccagcgccggcgattgctgccgccgccgacgccgatgcagcggacggcacgggacgcggcggcgaggggttctcgctggtgaggcggcagctggaggcgctgaacgcggagagcgggatgctgcgccgcgccgtggaggacctgcgcgccgaggtcgggagccgcagggcggcggtgtccaccgccggcgcacccgacacctggaggacgccgccggcgccgccacaaccagcacagccataccactactcatctccggtgaagccggatcgccggggcagtggcaaggacatggccgcagccgagaacgccacgaagccttcgtcggatgagcttggcgacgagttgaagagggcattggaggcgcggctgaggtgagagctttggcatccagccattgccaagagctccactccaccaccacggctaaccaacctcactgtccggtgttgctggtacatgctagcttcaggcttgtataattgagcatttccaatcaagaaatcatcaggttttcttct

SEQ ID NO: 8684 - DNA, 1376 bp, Oryza sativa
  ref <308>: DATABASE ACCESSION NUMBER: AK106032
  ref <309>: DATABASE ENTRY DATE: 2002-08-28
ttctgtgaagggttcgagttggagcacgcctgtcgggacccgaaagatggtgaactatgcctgagcggggcgaagccagaggaaactctggtggaggctcgaagcgatactgacgtgcaaatcgttcgtctgacttgggtataggggcgaaagactaatcgaaccatctagtagctggttccctccgaagtttccctcaggatagctggagcccattacgagttctatcgggtaaagccaatgattagaggcatcgggggcgcaacgccctcgacctattctcaaactttaaataggtaggacggcgcggctgctccggtgagccgcgccacggaatcgggagctccaagtgggccatttttggtaagcagaactggcgatgcgggatgaaccggaagcctggttacggtgccgaactgcgcgctaacctagaacccacaaagggtgttggtcgattaagacagcaggacggtggtcatggaagtcgaaatccgctaaggagtgtgtaacaactcacctgccgaatcaactagccccgaaaatggatggcgctgaagcgcgcgacccacaccaggccatctgggcgagcgccatgccccgatgagtaggagggcgcggcggccgccgcaaaacccggggcgcgagcccgggcggagcggccgtcggtgcagatcttggtggtagtagcaaatattcacaccggctatctatccatctatctactcagctttgcgtcctcccgcgaattcaccgcagcaatggcgtccctcgtcgccgtccagcctgtcgccgtgaagggcctcgccggcagctccatctccggcaggaagctcgccgtcaggccgtcgccccgggcgctctgccgcaccacccgcaggccgcgcgccgccgtggtggccaagtacggcgagaagagcgtctacttcgacctcgaggacatcggcaacaccaccgggcagtgggacctgtacggctccgacgcgccgtcgccgtacaaccctctccagagcaagttcttcgagacgttcgcggggcccttcaccaagagggggctcctgctcaagttcctgctgctcggcggcggatcgctggtggcctacgtcagcgcgtcggcgtcgccagacctgcttccgatcaagaagggcccgcagctgccgccgacgcccggcccacgcggcaagatctaaattaaattcctcgtctctgcctcaccttcttcttgatccgatccatccatgcaaatcctctgtactgtactgctagtcccccatggccggatcgccatggattaattccccctgtttatgatgttgatataattgtactattcctatggctatataagttgtaaaggatccaattcgatgctgcatgcg

SEQ ID NO: 8685 - DNA, 1453 bp, Oryza sativa
  ref <308>: DATABASE ACCESSION NUMBER: AK106033
  ref <309>: DATABASE ENTRY DATE: 2002-08-28
attcccggactcgccacgcaaaaccatgagctcatccccattctcccgtcgcacgaccgacagcagcagcggctcggcctcgccggcgccgcttccggtgtttacggccgcctttggccacgacgatctccacgacgaaaacgtcgacgagcagctcgcctacgggctctcgctcgactcgccgccggcctatgtgttcagcaacgacctcgcctttgagccgagcgagctggacgacgacgttgaaactggcatggacgcccacgagggcaaggccgctgccatgcgcagcatgcccacgcagcgcgacacgtcggcctttgtctttgaacccttgatcacgccgcgctcgtttgaaggcggctttgttgagaccaacatctttgaaagcacgagcggtaaggcgcccgtgttcgtgctcgaccaagcgctgtcgtctccgctcaacgtcaacggcgccaagaactttgacttgttcacgcccacgatcctcaagtcggacgccaagaagatcacaccgtcgtcgccgctgtgccccgcgggctttttcgagatccccgagaaggaacgcagtgactttttcctgtcggtgaacccgaccttcacgtcgtgcgcgtcgccctcgactatcatggacagcctcaaggcggcactcgcgacgctgcggtgtgaattcgccacggcgacttcgtgccagtggaccctggacgtgcgctgcctgctggttgctgaagagatctcattcgcgatccacttgctgcagctccgtggtgccgagaccaagtatgagattgagtttgtgcgccgcagcggcgacgaactcatgtttgtggacctcgctgagcacatccgcgcccagtgcaccgacgtcgacgacgacggcgccctcgcgctctttaacaagacgctcgacgcgtggatggacgagacgcaggaagtcacggcacgtcggtatgtgatccaggagaccgaggttgtggcactgctcgacgaacttaactgcgaatttcttcacgccgagtcgctataccaagtcgcccgcagcgtcaagaaccactgccgccacaagaccaaccgcaagctctttgtgcagcagtcgcacaatgccaaatccctcctcaagggactcaagtggatgcttgctgacagcgacgagctcgctcgctttgcgctctttgtgctgctccagtttgccggcgatgccgacttgtgtggctccttcttccccacgccgttcgagaagagtagcgtgtcgctgctgctcgacagtctcgacgcacgaaaagacgagtcgccgtccaagttcacgaccgagatggtggccgccgtgcgacagagcgcgctgtttgcttaacgtcgtaacatgtgacgcgtgatgccctcccccccgcggtgcatccacccccacacacacactacacacaaaaccagtaatttatgggcgtccgtcttc

SEQ ID NO: 8686 - DNA, 1160 bp, Oryza sativa
  ref <308>: DATABASE ACCESSION NUMBER: AK106034
  ref <309>: DATABASE ENTRY DATE: 2002-08-28
actccacatctgtttccatcgcgagccacagagagagggggagagagtgtgagtgtgagatcacaactactgtagtgtttgtgtgtgcgtgggatgatggggacggaggctacggcgacgacgacggtgagcggcggcagtggcagggcggcgccggcagcgctgtgcctgcaggcggcgcgcggcgcgtggtcgcggacgagcaaggtgctcgacgtcgacgccgcgtcgcccacggcggcgccgtcgctcgggtcctccgtcggcgtgccgttcctctgggaggaggcgcccgggaggcctaaggtggtggtggtcgcgccagaacacttcgcgccgccgccgccgctcgctccggctgccgacgagagggcacctgtttctcacggcggcgaggctgcgcctgcgagcggtggtgaccgcggcgacggtgacaaggcgcgacacgtcgtcgtgccgctcaagctgccgcctcggttgcaggctgcagcggcagccgcggcggcggcggattcgtcgctctcccccaacaccgtgctgcacggcccctacggtggaaacaagccgccgaggccgctgacgaggagcgggagcacggcgagccaccggaggaagccaagcgccgtcggggtgagcctctggaggaaggccacggcggcggcgagaggcaagaaacacgactacgacgcggcggctctggacgcgtcgtgccgctctccggcgtcgtcgtcctcctcctcgtcatcctcgtcgtcctcgtcgatgtcctacttcgccgacgacgaccaccggaggaaggctgacgggcacggcgacccggagccggaggccgacggcgaggagtgcggcgccaagagcacggtgaggatcacgcggttcaagaggaacaagagcctcccgagcgtgaacacttcgcacctgtgggcaagcatccgcagaagcgtcaaacagattactccatggagctagaaatcctgcaaactcccacggtacagtgtcacaaactgtacccagacatgcagatcaggaatgctacatctgcaaaatgttgagctctggaaatcacaaggacatccggatgacaaagcattcgctgctcagtgtaaaagaagaattttagtctgtaaatctgtaatgcaaggataaagggttaagttgcg

SEQ ID NO: 8687 - DNA, 1002 bp, Oryza sativa
  ref <308>: DATABASE ACCESSION NUMBER: AK106035
  ref <309>: DATABASE ENTRY DATE: 2002-08-28
gagcggcgatcgcaggtcggcggcgcgcggccgccggcttgggcttcctggcacgtcgggcggcagccggcggggtccctccagcttcctccgacggcgggcgacagtgacggcctgttttagtggcgtgcgacgggctcggtggggccatccactgcccggatccggcggcggcggccgtccctcgcccggccccgcacagatccactagcggctgcgggaggagagcccaagggcagactcggcgatggctggtggacgactgtcgtgcaccgggtggagtccggcggcgggcggcgcatccgctcacttctttctgcccgctgccgtcatcgtggttgtgctccaccagctcgccgtgtggccgccaccttctccccacaccgccgccgacggacgtcgactccgactcggccgccgggggcaagcccacccagatggacctcgaggactaggtttgacagctggtttcatatttaaagataccactcagtcaaagtcttgtgaagcggctcgggtgaaattcaaggaggcgacaggcttgacgcgacgggcagcattgcactaagggctaccacgccgagcatgtcgtctggaggccttgtcgctgacccgagtccggaaggtcctattgctggcctctttggtgattccagctctgcatatcgcctgacggtcaggtcggcggaggcaggtgccttccacctggtgcacgttcgtgggaaccacctgagaacatcgtcaacagtcttccttttgcatgtcgacattgttctatcgccagagtcaattgtttaaactagtagttttgcttctgagtattttttttacttctagattaactgtgtaatattttactggtggacatatgatccactgtaaaggttccttgtagttttcagactcacaaagtcaaatgatccggtgaaattttttattatagaatgtaaaaatatgcatggcaaataaatgtattgtgatggttgataattttctacttcc

SEQ ID NO: 8688 - DNA, 1324 bp, Oryza sativa
  ref <308>: DATABASE ACCESSION NUMBER: AK106036
  ref <309>: DATABASE ENTRY DATE: 2002-08-28
gtcaagattcccgaacgccacggagcagcatggccgcgccgccgccgccggcgaaccagttcgtctacatcgacgcggcggcgctccactccgtcctccccttcccgtccctgatctcccacctcggcgccggcctccccgccttcgccgccggcatccactgcccgcaccgcgtctccttcccgctccccaccgcgccatccgcctccctcctcctcatgccatcctggagcgcgcacccctcgctcccctacctcgcgctcaaggccgtcacctcgtttccggccaactccccgcgcctcccctccgtccacgccgccgtctccctcttcgactccgcctccggcgtccccctcgcctccctcgacggctccgcgctcaccctcctccgcaccgccgccgtgtccgcgctcgccgcgtccctcctggcatcccccacccgcccgccctccaccctcgcgctcgccggcgccggcgccctcgcgccctacctcgccgaagcccacctctccgccctcccgtccatctcccgaatcctcatctggaaccgcaccaaggccaaatccgccgcgctcgccgccaggctccgtgacgcgcacccgggggtcgccgtcgaggaggcggacagcatggacgaggcggtgtccgcggcggacgtcgtgagctgcgcgacggggtcgcaggagccgatcgtgcgcggggagctactgaagcccggggcgcacctggacctcgtgggctcgttcacgccggcgatgagggagtgcgacgacgaggcgctgcggcgggggagggtgttcatcgacttcgaggcggcgatgcaggaggccggagagctggtgggcgcgctccagcgcggcgtgctccggagggaggacgtggccgggacgctcgcggagcttgccgccgggagcgtggctgggcggcgctgcgacgacgagatcacggtgttcaagtccgtcgggacggcggtggtcgatcttttggcggcgcagctcgcctacgagacttacattgctacaaccaccaagaagacatgaactcgatgcatcatggatgggttagtttcagagactgcaagaagggtgtttcgtttcagagattcgtcatagaagtacaaataaattggtgagaatggttatgatcatgtccatagcatgtttactcgccactgattaaaataaaaatttagtatggccttgcaattctctgttctttgtacctgatgataagatgttttctgcaaggagtactgtaattcgattgttcgcttttgtaacctatgaactggggtatcatatctgttttatggatgaattgatac

SEQ ID NO: 8689 - DNA, 1086 bp, Oryza sativa; identical to SEQ ID NO: 3953
  ref <308>: DATABASE ACCESSION NUMBER: AK106037
  ref <309>: DATABASE ENTRY DATE: 2002-08-28

SEQ ID NO: 8690 - DNA, 1666 bp, Oryza sativa
  ref <308>: DATABASE ACCESSION NUMBER: AK106038
  ref <309>: DATABASE ENTRY DATE: 2002-08-28
actccacacacgctggtcgactccaccacgcaagagatggccgccgccgccgccgcagcagcagaccacgatgccgcgccgcgcgcgcacgcgctcatcctcccgtacccggcgcagggccatgtcatcccgctcatggagctcgcgtactgcctcatcgaccgtggcttcgccgtcaccttcgtcaacaccgagcacaaccaccgccgcgtcgtggccgccgccgctggcgcaggcggcgtgcaagcaccggggagccgggcacggcgcctgcggctcgtggcggtggcggacgggatgggcgacggcgacgaccgggacaacctagtccgcctcaacgccgtcatggaggaggccatcccgcctcagctggagccgattcttgatggcgccggcggcgaggggcagctgggcaaggtgacgtgcgtggtggtcgatgtcggcatgtcgtgggcgctcgatgccgtgaagcggaggggcctcccgggcgccgcgctctgggcagcgtcggcggcggtgctcgccgtgctactcggagcgcagaagctgatacgcgatggcgtcattgatgacgacggtgcaccactcaaattagagaacaactcattccgtctctccgagttcacgccacccatggacgcgaccttccttgcatggaacttcatgggcaaccgtgatgcagaacgtatggtgttccattaccttacctcctccgcacgggctgctgcggccaaagcagacattctcctctgcaactcattcgtggagttggagccagccatctttactctaaaatccccagccaccatcctccctattggaccacttcgtaccgggcagcgttttgctcatcaggtagaagtggttgggcacttttggcaaaccaatgatgacacatgcctctctttccttgatgaacaaccctatggttctgttgtatatgtggcatttggcagtcttactatcatgagcccaggacaactaaaggaacttgcactagggctagaggcttctggtcatccatttctatgggtagttaggcctggacttgctggtaacctccctacctcattcttggacgccaccatgggacaaggaaagggtatagtggtggagtgggctccacaggaacaggtgctagcgcaccctgcagttgggtgctttgtaacgcattgcgggtggaactcaacggtagagagcattcgtaatggagtgcccatgctatgttggccatatttcaccgatcagttcacaaatcaaatatacatttgtgatatttggcggattgggctaaagatggtgcaaacctgtggtgaggggatcgtgaccaaggagataatggtagagaggttgaaagagctactactagatgagggtatcaaggaaagggtgcaaaggttgaaggagtttgcagaaacaaacatgagcgaagagggtgagtccaccagtaatttgaacgcagttgtcgagcttatgacaaggccaatgtcatagaatatggtttaacgcaggttttacgttactattgatccaatgaataatgatatttcatacttcatttttatggacctgaagtttgctttgcaacctatgattgttaaaaccatctaatgtacgtgctatatgctctaaaagtaatatgtgtaaatgtgtatggtacaaatgc

SEQ ID NO: 8691 - DNA, 1139 bp, Oryza sativa
  ref <308>: DATABASE ACCESSION NUMBER: AK106039
  ref <309>: DATABASE ENTRY DATE: 2002-08-28
gcagttgcgaggcacttgtcacgcccccaccccctttgctttgatgcacgcctagctaatcaattaacttaacctgcctcgcctctgcctattcgaaacagcagcggctccagctcgccgtggtcgactttcccggcggcgatcaccggcagcggaggaggagcagtacgtgtgtatatataaaggatggggaggcagccgtgctgcgacaagctgggggtgaagagggggccgtggacggcggaggaggacaagaagctgatgagcttcatcctgaccaacggccattgctgctggcgcgccgtgccgaagctcgccgggctgctccgctgcggcaagagctgccgcctccggtggacaaactacctccgccccgacctcaagcgcggcctcctcaccgacgccgaggagcagctcgtcatcgacctccacgccaagctcggcaacagatggtccaagattgctgccaagctaccgggcaggacggacaacgagatcaagaaccactggaacacgcacatcaagaagaagctcatcaagatgggcatcgacccggtgacgcacgagcccctcgaccggaagcaggagagcccggccaccacctcgcagtccaccgtcacggcggagtcgtccaagtccggcgaggcgaccaggcagcaaagccggcagcttgacgacgccgtcgtcagggacatgtccgtgtctgccggtggcgacagcccgccggagtcgagcactaacaccgccagcaccgccggtggcagtagcagcagcagcagtagccatcaccaggaccctctggtgaagtggctgctggaagaggacctgctgcccaccggtgacgagccatggctcaatttcacggccagcaacgacgtcgacgagttcagtagcatcgccgccaccggcgccacgccggcgctgccgtgggacgtcggcatgacgacggactggttgctcgactaccaagattttgggatgggagactcgagcttggtggtcgatgcctccatggtcaacagctcaaatgggtccaacttctagctagaagatgtcagcagcttacttaattgtgttgctatcagtgtagataatcaagtgaagtgtataattaataaaagcatcaagattgtgaaagc

SEQ ID NO: 8692 - DNA, 1143 bp, Oryza sativa
  ref <308>: DATABASE ACCESSION NUMBER: AK106040
  ref <309>: DATABASE ENTRY DATE: 2002-08-28
agctagtagcagggctctcatcacaatctttctcactggctctgctgctgactccagtagtactgggctactagctgtagtagccagctgtgacagtggtgagcatggatggtttcgtgtgtttgcccagaggacaagaggccactgtggtattcatcaacctcttgacgcctctcttgtttgcaatcgcagagctcgtcgtttttcatccacatgcatagtgagattcttccatggctaattctcgatgtcttaggggacctgtgtgttcatgtgaattatagttaggccttgtttagggaagcttttagtagctgcggtttcttttagaatctcatgctccttcaaacaatacaaattctcgcatatattctccagttacttggaatctcaagccccctccaatagagccttaaccttagaaacttttcacaaatgtgtatactacatgaattgaactgtttttttaaaaaaaatgctccaaaagattaatgcttgcaagatgcctgaaaagtttgaggctccaaatgccagtttggtactctgaactctgcagggtaaccttcccctgtagcctgtataggcaatggtagcaactagcaaggcaccagctttccagagaggttgcaatgcaattgcaatgggacgaacaagaacacgacgtactcgctaaggagaagtatacgctggttgtctagtactgtactacttggcatacggcagagagaaagctcaccatctttctacttggcacaatcttcttgtacttttccgttttcactttcaccgagtaaattatcagggctaggaggaacacagccttttcatcattaaaagaggcagcaggagcagatcagagcagacatttagatctgtaaagcaatgcaactgtgtggatagcctgaattgttcagcagtagtagtaatagtagtatttgcgctgaatttttcagtagtatttgcagtgaaaaccatacgtgtttacggtgaaaatgccaggaacgggccggcattgaagacgatgggccaggaggcaacggcggacggggcggcgcttgttttcttcttgcattgacgcccattgcctgaaaatttcaactccatgttcctgaattcagagacaatttgcacctttcctgcttc

SEQ ID NO: 8693 - DNA, 1272 bp, Oryza sativa
  ref <308>: DATABASE ACCESSION NUMBER: AK106041
  ref <309>: DATABASE ENTRY DATE: 2002-08-28
agaattcaaaccggatcaacctcgctcgcttactcgtgtttaggcatggacgtttctgctgcgctcagcagcgactactcgtcggggacgccgtcgccggtggcggccgacgccgacgacggctcctccgcctacatgacggtgtcgtcggcgccgcccaagcggcgagcggggcggaccaagttcaaggagacgcggcaccccgtgttcaagggcgtgcgccggaggaaccccgggaggtgggtgtgcgaggtgcgcgagccgcacggcaagcagcggatatggctcgggacgttcgagacagcagagatggcggcgcgcgcgcacgacgtcgccgcgctcgcgctccgcggccgcgccgcctgcctcaacttcgccgactcgccgaggcgcctccgcgtcccgcccatcggcgcaagccacgacgacatacggagggcggcggctgaggcggccgaggcattccggccgccaccagatgagagcaatgcggccaccgaggtggcagccgccgcatcgggcgccactaattcgaacgccgaacagttcgcctcccacccgtactacgaggtcatggacgatgggctggacttggggatgcagggctatctcgacatggcgcaagggatgctcattgacccgcctccaatggccggtgatcctgccgtaggtagcggcgaagacgacaacgatggcgaggtccagctatggagctactgatcctgcgcgtttgaactcaacttggtttggcgcgaagagatcgcatgtacagcttaagggagtcgagtacaagtacctcaggtgtactccactcgttgcccctttcccttccctttcgtttttcttgagcttatctgcagggtaatgttatgtattgctgctcttctgatgaaatgtgatcggaagaagcggaaggccagatcgagcttatgggttctgaagacggtgaaggcttgtcgagtgttgtgagcatatattcagaaagtcaggcactgtgaaagtatgaatcagatcagccttgttacgaatgagagtgatcgaccttgttcagtgtttataattgaaccacttgtgtgtaataagcagcaaagccatgttgcttgcttgatctgactcttgggaatggtatatttctcaaagaatgcaggattgactactcagaatttgacattttgcagtgaaatgataggattgttaaattaacattggaggagaggcatgtgtatatatgttaagaaacattagtaatgatgagcctatgatacttcgatc

SEQ ID NO: 8694 - DNA, 1721 bp, Oryza sativa
  ref <308>: DATABASE ACCESSION NUMBER: AK106042
  ref <309>: DATABASE ENTRY DATE: 2002-08-28
atgtgatcccaggtctgcagttctgcacagccgaacacaagatccaaaaccccccgcacgctttccaaagcaaagcactctctcgacatcgccccactccaggtcaacagtctccactctcactggctcgcagtcgcacacactcccacgcctccgcgctcccgaccaccgtcgccatcatcatgccaccacccttgctcctcctcctcctcctcgccgccgccgccgccgccgtcgcgcccgcgcggtccaagtcgacgctggagtcctgctcctcttccaccgcctgcccagcgctgctctcctacacgctctacgccgacctcaagctcgccgagctggccgcgctcttctccgccgacccgctcgccatcctcgccgccaactccatcgacttcgccgtcccggaccccgccgaccgcatcctccccgcggggctcccgctccgcgtgcccgtcccctgcgcctgctccgacggcatccgcagggtcaccaccgtgcgctacgttgcgcgcccgggcgacacgctcgcctccgtcgcctcctccgtctacggcggcctcaccaccccggactggatcagcgactccaacggcatcctcggcgccaagcccgacgccgccgtcgacgccgggacgactctgttcgtgccgctgcactgcgcctgcttcggcggcgtcgacaacggcctccccgcggtgtacctcacgtacgtcgccgggaagggggacaccgtcgccgcagtcgcgcagaggtaccggaccacggccaccgacctcatgagcgtcaacgacatggccacccccgagctcgccgccggtgacatcatcgtcgtcccgctgccagcgtgcacatcatcattcccggcgttcacggcggactacggcctggcggtggcgaacgggacctacgcagttactgccaaccggtgtgtccagtgcagctgtggcccaggcaacttggacctgttctgcgtgccggcgccgctcgccgactcgacgtgctccagcatgcagtgcgccaacagcagcatgatgctcggcaacttcactctcctcatgaccagctccggctgcagcgtcacgtcctgcagctacggcggattcgtgaacggcacaattctcaccacgttaaccacagcactcaagcctcaatgcccaggtccgcatcagtatcctccgctgattccgccgccgacgtcgtccttcttcgagacgtacctcggcccttcgccgacgccgatggcatccgaaggaggcgtcatggccggcatggcgccgacgagcaccccggcggcgagctccggccctcctccggccggccggcacgtcgtcggcgacgttcttggggcgttcgctctctgcctcgtcggcaacctgctgtggtaacagagcggctctcgccgttgatgctacataattttgtacagaagctgtggccggctgtgtttttgtcgggcagcgtcgggttgtgcccaatttttgttgcgttcattcgatttgtctgccactcactcctgtggaatggcaaacacaattacagaagcgcagatctctccagcgcggctgtaatggtcctgaattcctgatgctattgagaatgtgagtaccgagtagtgtgctttttatcgacgctttttactgtaccttctactactgatatgctttttagggcacccacaatggttatttataaactctctacaggagattcatatcagc

SEQ ID NO: 8695 - DNA, 1617 bp, Oryza sativa
  ref <308>: DATABASE ACCESSION NUMBER: AK106043
  ref <309>: DATABASE ENTRY DATE: 2002-08-28
aaaggcccatcacctgcatcgttccaagcgcagctcaatctttgcctcgtcaggttttgctcattggcgtctccatggataggctcctcgcctgcctccttggcttcctgttgatcgcttcagtaggaagccatgccgctcggactccggagcaatactggaaatcagctcttcccaactctcccatcccgagctcgctctctcagcttctcagcactgcaggcggaggcacgtcggtgaacgtcggcgggggcggcgtccatgtcgacgcggggcacggcaagcccggcggcacaaccgttgatgtaggcaagggtggcgtcggcgtgaacgtgaagcctggttacggcaagcccggcggcaccacggtcggcgtcgggaagggcggcgtgggagtcaacgtcaagcctggctatggcaagcccggaggcaccagcgtcggcgtcgggaaaggaggcgtgggcgtgaacgtgcagcctgggtacggcaagcccggcggcaccaccgtcggcgtcggtaagggcggcgtcggcgtgaacgtgcagccaggctacggcaagcccgggggcaccaccgtcggcgtcgggaagggcggcgtcggcgtcaacgtgaagccccggggcaagcctgtccacgtcaacgtcgcacctttcatctacaactacgccgcaacggagacgcagctgcacgacgaccccaacgtggcgctcttcttcttggagaaggacctccaccccgggaagacgatggccgtacatttcacggccaccaccgccggagagaagttcctccccaggagcgaggccgacgccatgccgttctcctccgagaaggtcccggagatcctcagccgcttctccgtgaagccgggctccgtcgaggcggcggagatggcgcagacgctgcgcgactgcgaggcgccgccggcgcagggcgagaggaaggcgtgcgccacgtcgctcgagtccatggtcgacttcgccacgtcgagcctcgggaccagccacgtgagggccgcgtcgaccgtggtcgggaaggaagggtcgccggagcaggagtacaccgtgacggcggtgaagcgcgcggcggccggcggcgaccaggaccagctcgtcgcctgccacgcggagccgtacgcgtacgccgtgttcgcgtgccacctgacgcgggcgacgcgggcgtacgcggtgtcgatggccggcagggacggcacgggcgtggaggccgtcgcggtgtgccacgccgacacggccgggtggaacccgaagcacgtcgcgttccaggtgctcaaggtgaagccaggcacggtgccggtctgccacttcctgccgcaggaccacgtcgtctggacacgcagcggctagctgatgatcggctgccaatcttggcgcctgatcgagttggttgcttatgctctagaatctagctaggctccatgcagatgctatactgtatggtgtcttactatcttacatatttgtatgcacgcaatttggttctttgttatttggatggtgttgccagcatcgccagcctgctagtagatgatacgggtgggcttgctgtttgatgtatagttttagtatgcgggtgcaataaacagacaagtatttactt

SEQ ID NO: 8696 - DNA, 1322 bp, Oryza sativa
  ref <308>: DATABASE ACCESSION NUMBER: AK106044
  ref <309>: DATABASE ENTRY DATE: 2002-08-28
ttaaagtgcgtgatgagcaggaacatgacatgccccttctacaggcgatttcacttgttcttgagaggcacccccatctgaagttacaagggatagatgatcaagtcttgcaatggtgtgtctgtcggcttgaggcatggtttgctgcagatgctgatgaaatatctctgaaaaactgggatcaggagcatgttcttaccggtggccatggtctgatggtgaacggatactatcctataattcaggctcttgcacaaggtctagatatccggcttaatcaaagggtaaccaaaattgcccgccaattcaatggagtgacagttaccactgaagatggaacaagttactctgccgatgcttgcatcattacagtaccgctcggtgtgctcaaggcaaacataatcaagttcgagcctgagttgccctcatggaagagctctgcaatcgcagaccttggtgtcggtatcgagaacaagatcgccatgcacttcgatacagtcttctggcctaatgttgaggtgctgggaatggttggcccaacgcctaaagcatgtgggtacttcctgaacctccacaaggccaccggcaatccggtcctcgtctacatggccgccggtagatttgctcaagaagtggaaaaactgtcagacaaggaggccgttgatctggtcatgtctcacctgaagaaaatgctacctgacgccactgaacctacgaagtatttggtttcacgctggggttctgacccgaactcgctgggttcctactcgtgcgacctggtcgggaagccggccgacgtgtcggcgcggttcgccgcaccggtggagaacctctacttcgccggcgaggcggccagcgccgaccactcggggtccgtccacggcgcctactcgtcggggatcgccgccgccgatgagtgccggaagcgcatcctgatgcagaagggcatccctgacctcgtccaggtcaaggcctacgaggagatggccggagtcattgctccccttcagatttgcaggacctgaaaaaactgaacctgctccaccctgccattgtcatggaatctggattgattcaattgccatgcctatgccctggaatcttgatgattcaatcactcatacaagttcaagttcatgtaggggattaactgcatgaatcaaaattattaattaataattatgtaattgtcatgttattattgaataaataaatcgagatcatgcttgagatctttgtactgggacacagtttcaattaattaatgctagtaacaaccttggagtgaatgaatgtgagtagttgggctggagttgcttgtt

SEQ ID NO: 8697 - DNA, 1291 bp, Oryza sativa
  ref <308>: DATABASE ACCESSION NUMBER: AK106045
  ref <309>: DATABASE ENTRY DATE: 2002-08-28
gatgcatctgaaacaaagcttaatactccctcaactccaccatgcctcgccatgaacacacaaaccggaagctaatttgcgcacctcaacgcacagctcggtcagcacaaacacctcccctgcaagcgccggcgccggcgccacaccgccaccgagtcgcacctccacagcagcgccaagcttcttcagggaggctatagctatagctgccgaacgcgcaggcggagaccgcgggcggacatggtctcttcaccattggtacttggccttgacaaggacctcctcgtagagctcggcggcgtggtcccagctgaggtcctgcgacatgccgcgcacctggagccccctccagctctccttgtacttgcggtacgtctcgaggcagtggccgagcgcctcgatgagcttgtgcggctcggcgcggtcgaacgtccacccgaggccggtgtcctcgaacgggtcgaacgccgacatggtgtccctcagcccgccgacggcgtgcacgacggggacggtgccgtacgccatggcgtagagctggttgaggccgcacggctcgaaccgcgacggcatgaccagcacgtcggcgcccgccgtgatccggtgcgccatcttcaccgagaaccccacccacccgcgcaccttgctgttgtgctgcgcctcgaaccgctgcagcatcacctccaggtcgcggcggccggagcccagcagcaccagctgcacgtcctgcccggcgatccacggcatcgcgtcgccgatgatgtccacacctttctgcccgtcgagccgcccgatgaacccgatcagcggcacgtcgtcgcgcacctccagccccagctcgcgctgcagcgccgccttgcaccgcggcttgctggagtccagcgaggccacggtgtagttggcgtagccgtcggactgcaggtgcacgtccacctccgggttccactcccggtagtcgatgccgttcacgatgccgttcatcttccagtcgttctcccgtatgatgtcgtggaggccccagccgccctccgtcgtcttcagctcccagaggtagccggggctcacggtcaccacccggtccgccatcttcaggcccgcgccgaagatgttggcgtgctcgccgccgacggggtcgtacagcttgaagtgatccaggtagtgctccggcaattccatgtaggggaattcatctactgggccacggccctacaaacattacacgaaccatttagcacacaaaaaaagtactccccggcccgtttcatattgtaaattgttttgatattttttt

SEQ ID NO: 8698 - DNA, 1273 bp, Oryza sativa
  ref <308>: DATABASE ACCESSION NUMBER: AK106046
  ref <309>: DATABASE ENTRY DATE: 2002-08-28
acaccacctttctctccttccctcttgtgctcctccttatcttctatctcttcttcttcccctatcttttcttctaaagaacatctgcaatctccagcttcttctgttctgaagcagtggctttttgtggtttatgcacaccattggcagctgctactgtttgctgcttgtgttgtcagaagctaccttattgtttcggtcatcatcggcgccatgtcgacgccgacggtgcagatggtggcgccggcggcggcggtggtggaggacccgagcaagcactggacgcggcacgggccggtgctgacggcgtgcctcgtcgggatcaacctgctcatggtcctcctcgtgttcttctacttctggcggttcttctccgggaagcgtggcccgccgacgtcgtcaacgtcaacgatggccagcggcggcgacgacgacgaggaggagggggcgtcgtcgtcgtcgtcgtcggccgacacgtcgccagggcgccaccaccaggatcgggaggacatcgcgtcgtccctgcccgtgttcgtgtactcctcctccgccgccgcccccgacgtcggcgacgccggggggaacgggaaggcggcggcggcggcggagtgcgcggtgtgcatcgtggagttccgcgacggcgaccgggcgcgcctcctcccccggtgcggccaccggttccacgccgactgcatcggcgcgtggctccagctccactccacctgcccgctctgccgcgccgccgtgctgctccaccccgccgccgccgagccggccaagaacgatcagcccaaggatgacgactgcccggtgtgacgcctcgccgtcgccgtcgccgggagagacgagaacacagctatagacggagggtcgagcgcgcaatcgatcgtacgccggccggggtgatcgagaacgcgacaagcatctttcggcgtgcatcgctgtccaagatggaggaaatcaagaaaggttggtgtcggtgatgacttatgagttgagaagacgcgaggttttgcttccactcgtacggccgtttttgttttcttcttctctccagcttgttctttaatttgttgttacctaccctagctgcttatattgtgtgtgattatattgtgtgtcctcatctgtgtgtgtatatgattggagctgtgtgctgctatatagtataagagttttgtgtatagaaatcgatcgatctgctgcatgcatgcatatcggatagaattagtatgtactttgtaataaaggttaattactcgtagttgaatgc

SEQ ID NO: 8699 - DNA, 1685 bp, Oryza sativa
  ref <308>: DATABASE ACCESSION NUMBER: AK106047
  ref <309>: DATABASE ENTRY DATE: 2002-08-28
aacgaacgctaaaaaagtaacagtttctgtactttattgatctgaaagcgacagcaacagacagcaatgcgtgaggttctctccatccacatcggccaggctggcgtgcaggtcggcaacgcctgctgggagcttttctgcctcgagcacggcattcagcctgacggcgcgatgccgtcggacaagacgatcggcgttgaggacgatgccttcaacaccttcttctccgagactggcgccggcaagcacgtgccgcgcgcggtgttcctggacctcgagccgaccgtcgtcgacgaggtgcgcacgggcacgtaccgccagctgttccaccccgagcagctcatctccggcaaggaagacgccgcgaacaactacgcccgtggccactacaccatcggcaaggagatcgtcgacctctgcctggaccgcatccgcaagctggcggacaactgcactggcctccagggcttctgcatctaccacgccgtcggtggtggcacgggctccggcctcggcgccctgctgctggagcgcctgtcggtcgactacggcaagaagtccaagctcggctacaccgtgtacccgtcgccgcaggtgtcgacggccgtcgtggagccgtacaacagcgtgctctcgacgcactcgctgctcgagcacactgacgtcgccgccatgctcgacaacgaggccatgtacgacctgtgccgccgcaacctcgacatcgagcgcccgacgtacaccaacctgaaccgcctggtcggccaggtcgtgtcgtcgctgacggcgtcgctgcgcttcgacggtgccctgaacgtcgacatcaccgagttccagaccaacttggtgccgtacccgcgcatccacttcgtgctgacgagcttcgcgcccgtcatctcggccgagaaggcgtaccacgagcagctgtccgtcgccgagatcaccaacgcggccttcgagcccgcgtcgatgctcaccaagtgcgacccccgccacggcaagtacatggcgtgctgcctcatgtaccgcggtgacgtcgtgcccaaggacgtcaacgccgccgtcgcgacgatcaagacgaagcgcacgatccagttcgtcgactggtgccccaccggcttcaagtgcggtatcaactaccagcccccgaccgtcgtgccgggcggtgacctcgccaaggtgcagcgcgccgtgtgcatgatcgccaactcgaccgccatcgccgaggtgttcgcgcgcatcgaccacaagttcgacttgatgtactcgaagcgtgccttcgtgcactggtacgtcggtgagggtatggaggaaggtgagttctccgaggcccgtgaggatctcgccgcgctcgagaaggactacgaggaggtcggcgccgagtccgcggacgtcgagggcgaggaggaccacgaggagtactaaacgacgcgacgacgcgcgccgcccccctcgtgagtggtagagagtgagggacgacgacgacgacgacgacacaacaacgacgctgtacgcgggcacaccaatcaaaaacaaaacaccacttcccggggggcacaacggcgcgccacacacacagacggcggcgtgccttcttcttcgtcgcggggcagcctctcaacacgctttgattgaggcgcggcacgaagcagcggcataccacagcatccggcctgtcgacacgccac

SEQ ID NO: 8700 - DNA, 1398 bp, Oryza sativa
  ref <308>: DATABASE ACCESSION NUMBER: AK106048
  ref <309>: DATABASE ENTRY DATE: 2002-08-28
atggatcgcaagcgcccgcgccctccccagccgtcgccgccgccgccggtggcctcctccgccgcctcctcctcctcctcctcggtgctcgacgacggggacctcctccgcgagatcctcctccgcctcgcccaccccaccttcctcgtccgcgccgcgctcgtctgcaggcgctggctccgccacgcctccgaccgggccttcctccgccgcttcgccgtcctccacccgccccgcctcctcggcttttacgtcgacagcgccagcctcccgcgcccgcgcttcgtgcccctcccccacccgcccgagctcgccgccgtcgtccgccgcggcagcttcgacctgggcaccgccgccgacctccacttccacctcggcacggggatctactgctgccggaacggccgcctcctcgtgtgccacaggggcggcggcgagtccacgctccagctccgccgcccgctccatccggcgagcgacggggcggtcatctccaccttccgcacgccgcctcgccctctcccgcccaaccagcgccacacgcggtatatcctcctccccgaggacggtggcgatggcgatggcgatgccgtggcgtgcaccgtggtgaccctggtgagcagcgagcgggaggtcttcgccaaggtggagaagatcttgcgagctggggtctgggacgtcgcgcaaacctcggcgcccattgagctaccggcgcactggaggagatcattgagccggggttttcttgtcaatggcaagctgtatatgttgggcacaacagggtacattcttggattggaattggtgtccatgagcttgttcttcatcgaggtccccgatgccgtgcgagatgactgccctgaaagctttcagctgagcgttaagctgtcgcaagcggagaaatctgggctttatctgatccatgtggaggggtttaagatccatgtttggcttcacggaacagatggaaacagctctgccgattggaatctagtaaatactatttgtttgcgcgaggtgtttggtcatcttgtgaagcctagttgggagtcaggggattcacgcattagtctgcctgggtctggggacaacgctgagtttgtgttcttggaggtggatggtgaggtcttttgcatggatattatcagcaggacagtggagaaggtgtatgagatggcaatgaaggatgattttctatttgagatataccccttcatgatggtttggccaccaatcttcccagcattgatcaaaacacatgaaccagagtgattcgacaaggtttccctcgagatgatttgcataatcaagtgatgatatatgatgattctgctacttctgtagtgaggtaattgtacaaaataaaattgatgaaaagtttgatatccaagttgattt

SEQ ID NO: 8701 - DNA, 1612 bp, Oryza sativa
  ref <308>: DATABASE ACCESSION NUMBER: AK106049
  ref <309>: DATABASE ENTRY DATE: 2002-08-28
attcaaccgcaaaagcaacctagttagtacaaggcagcacatgcgctgctattagtagcagctgctaggtgtcctgctattttgttgccctgcttcctctaatcttcctcttcttcttctccttcaatcgtgtcgtgtcgtctccttgttcggttctttggtgcaggaagcaatggcgattcttcgtgtgtccgtgatgcggctggttgttgcggccatggctgttgcagctggtgttctcttcttctccggcgccggcgaggcgcgcgtgctcctcaccctcgacgacttcggcgccgtcggcgacggcattaccaacgacacgcaggccttcttggacgcctggaacgccgcctgcgcctcgacggagccggccgtcctcgccgtgccggccgggaagacgtaccagatctggccggtgcggctcgccgggccctgcaagaagaagctcaagctcatgatttccgggacgatcgcggcgccggcgagccccgacgagtgggcggggcgcgacccgacgaagtggctctacgtcttccgcgtcgacgacctgtccgtctccggcggcggcaccatcgacggcatgggcgccgagtggtgggcgcgctcctgcaagcgcaagaagaccaagccttgcagcacggtgtctgctcccaaggcgctgcagttcgaggagtgcaggcgggtgagcgtgcaggggatcacgatgcagaacgggccgcagttccacctgatgttcacccggtgcacggacgtcaaggcaagcttcctccgcgtcgtggcgccggagagcagcccgaacaccgacgggatccacctcaacgacaccacccatgcccagatcatggacaacctcatctccacaggagatgattgcgtgtcaatggttggcaattgctctgacgtccgagtgaaggacatatcatgtgggcctggacatggcatcagtatcggaagcttaggcaagaaccggaccactgacagaatagagaacgtgagggtggacacctgcttgctgacaaacacaaccaacggtgtacggatcaagagttggcagggagggatggggtatgctcacaacctgaggttcgagggcatcgtgatgaagaacgtctccaatccaatcatcatcgatcagtactactgtgaccaaccaacaccctgtgcaaaccagacgcaggcggtggaggtgcgcaagatcgagttcgcgggcatccggggcacgtcggcgacggagcaggcgatcaagctggcgtgcagcgacgccgtgccgtgccgggatctggagctgaggaacgtcaacctgaccatggtgggcgtcgtgccggcgtcctgcctcgccaaggcgccccacaggatgctcggcgacgccacgccggcggccagagtcggttcttgatcgccgccggcaatgcccgatcctggcaacgatcaccggaaaaaagctgaagtataaataccgtacacgtaggtgtagaaactgttgccgtatttgggagagtgtatgagtacagagagttgtaagctgtatacgacgtttgtgtcaagaattttttagagggcattatgtgaagttaaaatggatacaaaaaaacataattttaccggagtt

SEQ ID NO: 8702 - DNA, 942 bp, Oryza sativa
  ref <308>: DATABASE ACCESSION NUMBER: AK106050
  ref <309>: DATABASE ENTRY DATE: 2002-08-28
gaccaccaccaccacggccgccggtgatcgccggagcaatccccatccatggcggccatccgccgattccgccctgccctcctcctcgcggcgatcctcctgctcgccgccggcgctgtcgaggggaagaagggcgggaaggtggacgtggcgctctactacgagtcgctgtgcccctactcggcgatgttcgtggtgggcagcctcgccaaggtcttcagggatggcctcctcgacgccgtcgacctctccctcgtcccctacggcaacgcccgtgtcaaggacggcaaaatctcctgccagcatggaagcgaggagtgcttcctgaacaccgtggaggcttgcgccatcgatgcatggccggatttgagagtgcatttccgtttcatctactgcgtggaggacctggtggtgaaccacaagcaacgggagtgggaatcctgcttcgggaagctcaacctcgatcccaagcctgtcaccgactgctacaagggcgaacgcggccaccagctctcgctcaagtatggaagacagactgacgctttgcagcctccccacaagtacgttccctgggtggtcgtcgacggtcagccgctctacgaggattacgagaacttcgaggcttacatctgcaaggcctacaagggccatcctcccaaggtgtgcgaggggctggcccgtcctccgactccgactgtgcttgaggtagcggaggcagtcaatagagtcagctattacgactccggtgatatcaggcttaagcctgatgaagatggccacgccaagatcaagaaggtggttccagatgatgatgattgaatgatggggggaagatatcaacacaggcagtcccatgtttctgtctaggctataggacatagttcatccagtaataatgaagtgccgttcaaaaaaaatggtaataacaaagagattaagttt

SEQ ID NO: 8703 - DNA, 1866 bp, Oryza sativa
  ref <308>: DATABASE ACCESSION NUMBER: AK106051
  ref <309>: DATABASE ENTRY DATE: 2002-08-28
gtgccaggtagtatacgcgattcctttccatttttcccccacacgccaagtccgtccatctcgccaacgcgagacatggcctccaaactccccgacctcggcggcggcggcgtggaggacggcggcggcaagaagtggccggggttcgtccagttcttcttcgtcctctccgtcgtcctctgcgtgctcctctacgccccgcggttcatcgtgctcacgcccacctatggcctcgacttcttcccccagccgccgcccaacgtcaccacctcgcccgcccgcgtcgtgggagatcataatgctggcgaagtggtggttcttgacaaccagctgcgctcgccgtgctcgtcgctcgccggcgacaccatctgctgcgaccgctcggatttcaacaccgacgtctgcttcatggccggcgacgtgcggacggacccgtcgtccctgtcgctcctgctgttcccgaagcagccgccggcggcgaacgccaccgtggaggagaggatacgtccgtacacgcgcaagtgggaggcgctcatcatgagcagggtagaggaggtgcggctccggatggccccgccggaggaggagcccggccaccggtgcgacgtccggcacgacgcgccgctcctcgtcatgacggcggggggctacaccggcaacctcttccacgcgttcagcgacgggttcgtgccggcgtggctgacggtgcaacacctccgccgccgcgtcgtgctcggcgtcctctcgtacaacccgtggtgggcgggcacgtacggcgagatcatctccggcctctcggactaccacgtcgtcgacctcctccacgacaagcggacgcactgcttccccggcgccatcgtcggcacacgcttccacggcatcctctccgtcgacccggcgaggctccgcgacaacaagaccatcgtcgacttccacgatctcctcgccggcgtgtacgagaccgcaggagacaccgtcgtcgtcgacgacgttactcagccggcgccacggcggccacggctcgggatcgtgtcgcgcagggggacgcgggtgatcgagaaccaggcggcggtggcgcggctcgcgaggtcggtggggttcgacgtggacatcctggagacggcgaacgggctgccgctcccggcgtcgtacgcgtcggtgagcgcgtgcgacgtgctggtgggggtgcacggcgccgacctgaccaagctcctgttcctgcgccccggcgcggcgctggtgcagatcgcgccgctgggcgtggcgccgatcgcgcgcgggtgctacgcggaggcgtccgcgcggatggggctgcactacgagcagtacgacgcggaggggcacgagagctcgctgagccgcaagtacggcctccgcgacgtggtggtgtccgacccggaggccgccaagcgcgacaaggggtggggcttcgtcgcccgcgtctacctcggcggccagaacgtcaccctcgacctctccaggttccgacacacgctcaccaggctgcacgcgcgcgccctgcgcgtacgctcgttgcacccagcgccgtagacggattatcggatagcagcggcagaagcagccatggatgaatccatcggtttctcgagcggatagacgtacgtgacaagtgctccattgcaaccagttgtttaggcgattgctaaggcgacggccggagattggccatggtgctgtaaggatagccgtctggctctgcagcgcatacagttggactcgaaacgtataccagttggtagctttttaagggcgaggtgccaagttaggatataactactactctctggatattggtaactattaaggcattaaatttatttcttggaatacaatttttgttttgct

SEQ ID NO: 8704 - DNA, 1011 bp, Oryza sativa
  ref <308>: DATABASE ACCESSION NUMBER: AK106052
  ref <309>: DATABASE ENTRY DATE: 2002-08-28
ataaaaagcaatcgttggagaagcaaaagcgcacggcacgagggacgcccaatcctccgtgtccgttggctcaactcgaccaaacaaccgccttttttttagtctccactctctccacttccccccctccattgccgccccgtttctctctctgatcggcaaaaaagtggatgctccggctgctcgaccgccatggtgaggtctctcgacagctacccctccatcaaagatgtcacctacagctgcggatactgcgggtacgcgctgaacctgagctcgtcgacgcggaacacggcgaacatcgggtccaagtacgggaagcagatcaagaagggggtcgtctccttcttcgcggtggacgagagccggttcacgcaggccgacgaggtcacctgcgtgccctacttccactcgcggcgctcctgggggctcttccggcggaggtcgcggctgctgtgccggaagtgcggcggccgcatcggcagcgcctacgaggaggacgaacccgccgccgcggcgctgcccgcgtgcgacggcccggacgacctgcgcaccacgagctccgggagcagcggcagcgcgtcgagccagaagaactacgtgatcaagatcaacgcgctgcagccctcgtcggacgattctgatgctgttgcctttaccctatgacgattctgctgtagcctgtcatctcttccggcccggttgaatttgctgctgcagtcttggaattcgcattgggagtgcaaaaagggtgatattgcagtcaaggaagggatcgccatggcagtgagcttttggaagggtttgataccatcatgatcttgagtcacctttgctgtctgtagtagactagtagtgcttttcttttcttctgtgaattggtgggagtatacactggttgttaatttttggatttgttaatattggaaaatgacaaagtttgctgtatgtggcttggccctattgagtttgtaccatctcatgaggttcataggggttgcaattttgagt

SEQ ID NO: 8705 - DNA, 1493 bp, Oryza sativa
  ref <308>: DATABASE ACCESSION NUMBER: AK106053
  ref <309>: DATABASE ENTRY DATE: 2002-08-28
atcccacgcctcgctcactagcgcacagatctcctaccaccaccaccaccgccgcagccatggcgaccgggtactaccgcggcggcggcggcgccagggaccacgccgacgagcccgacgacttcgacgagtacgaccccacgccgtacggcggcggctacgacctcttcatcaccttcggccgcccgctcccgccctccgacgagacctgctacccttgctccgctccctccacctcctacgacgccccgcactactccgccgacgagccctccccctacgcccaccactccaagccgcagcccgcctacggcttccgcccccagcacgagcagcagcagcagccgtcctacgcctcctccggctaccgcccccagcacgagcagcagcaatcctacggctcctctggctacggatctaagccccagcccgcctatggcttccgcccccaggccgaggaggagaacacctacggctccggctatggatctgggtacggtggtggaggaaggaagcagcaggaagaggagagctacggctccggctacggtcgcaagccgcaggtcgaggagagctatggatcagggtatgggaccaagccgcagcaggaggagagctatggatcagggtatggatctgggtatgggaccaagccgcagcaggaggagagctacggctccggctatgggaggaagccgcagcaggaggagagctacggatcggagtatggttccggctatgggaggaagccgcaggccgagagctatggatcggggtatgggagcaggccacagcagggtggggaggagtatggtagcggtgggtatgggaggaaggctcaggaggagagctatggttccgcgggctatggcggcaggaagaccgaggaagagagctatggtggtggttctggttatggatatgggaagaaagcccaggaagagagtgaagggacctatggctctggtggttaccccaagccgaagccttacagtcaggaggagacgcagggttcttatgggtatgggtacggcgagaagcctgcgtatgagagtggtggatacaacaagccgagctatggcgggggagacgaataccagggaggctacggccgcaagaaacatgatgacaatgactctgatgatgaaaagaagcagcgttatcagaagcaccaccaccatcgccgccaggagtacgatgattaagcttccggtgcgttatcttctacggggccatcgattgctgctatcacttgccagccatagtactctgcgtgaataaaagatgctcctgctcagtcgtttcatcgttcgtctcatggacactatttgttatccgtctccatgatagtatgatgtcgcttcaacactgataataaattgtggctttgcgcgtgttttttttatgtttgaagcatgtctaaacaatcactctgtcagttatcatttctttgcttgggatgattggtgtatatatgtgcccctgttgcgtct

SEQ ID NO: 8706 - DNA, 1297 bp, Oryza sativa
  ref <308>: DATABASE ACCESSION NUMBER: AK106054
  ref <309>: DATABASE ENTRY DATE: 2002-08-28
atcttcccaaatccaagaagaaacagagcgagcaagcccccgacaccatgggtgacgtcaccgccgccgcggcgccgtcgacggacaagtcgaacaacctcttcatgcagatcgtcgtccacccggacggcaccatcacgcgccccttcgtccccgacgcgccgccctccgccaccggcccggtcctctcccgcgacgtgccgctcgacgcctccctcgccacgtcgctccgcctctacctccccaaccccgcctcgccgccgccgccgccgacgtccaagctccccgtcatcctctacttccacggcggcggcttcgtcctcttctccaccggcagcgtcttctaccacgcctcctgcgaggccatggccgccgccgtgccggccatcgtcgtctccctcgactaccgccttgcgcccgagcaccgcctccccgccgcctacgacgacgccgcctccgccgtgctctggctccgtgacgccgccgcgggggacccctggatcgcggcgcacggcgacctgtcgcggtgcttcgtcatggggagcagctccggcgggaacatggcgctcaacgccggcgtccgggcctgcaggggcctcgacctgggccccgccgccgtgcgcgggctggtgctgcaccagccgtacctcggcggcgtggcgcggacgccgtcggaggagaagtccggcgacgacgcggtgctgccgctggaggcgaacgacaagctctggagcctcgcgctgccggcgggcgccgaccaggaccacgagttcagcaacccggcgaagtcgatggcggcggcggcggcggcgttgaccgggctgcctcggtgcctggtcaccgggagcgacggcgacccgctgatcgacaggcagagggagctggtcgcgtggctgcgggggcacggcgtggaggtcgtcgcgaagacggacttcgccgggtcccacgcggcggagctgttcgtgaaggagacggccgacgagctcttcgcggcggtgtgcgcgttcgtgtccggcgccggcgacgtcgtccacagttgatgatgacgtacgcatgcaaaagtctgtgtgtcactatcaccgtatggacaataataatccggcactgcattgattgcactgatgatggtggatgagtcagttggtacgtgcagctagctagctgccgtggcggtgcttgattttttttttttttgtgaactcggtgcttgattaattgcttgttgatttgcataatgcaaatgatgtactccctccggttccatagttttattgtttgagacaatgatacgttcttc

SEQ ID NO: 8707 - DNA, 987 bp, Oryza sativa
  ref <308>: DATABASE ACCESSION NUMBER: AK106055
  ref <309>: DATABASE ENTRY DATE: 2002-08-28
gtaagctaggcaatggctatgccgctgccgccgccgccgccgcctcgtcctcctcttggacggggacggctcgtcggagtaggaccagctccagcaccagcaacggcctcccaatccaaccgcccagtgccccccctgcagctgcctcgctgccgctgccatcgctcggagggaccctggaggacgacggcggcggcgaacgggaggaggcggtggtggtccgacgaggacatggaggaagaggacgacgaggagggatacggatacgacgacggcggcgcgccaggcgggtcagcgcaggagctgttcggcgagccatggttttccaagctcttccgtgcgtacggctacgtgctgccgctgctgctggcgtccatgctggtggccacggggcccagagctttcctcatggccatggcgctgccgctcgcccagtccgccatctcctgggtcgtctccttcttcaccaccaggagtcgtcggcagcaggaggaggaggagtcgtacggatacgactacgatgacgatcccgccttccaacgccgagaggaagacgacgacgacggcgactactatgatgccggggcatggcaatggcggagcaggagccaccagcaatcgaccgaatccggctccggttttggaggatgggatgacctcctctacgacgatgaggagaagaaggagcaggagagctcagggaagaagaggacgccaccggagcccgacacggcggcggctgctgccgcctccgatctgggactgggattgcgggcgaggagaggtccacgacgcagcaatggcggcatgtcgcgaggaagaagcagcagcagcatgaggtataaccaggcgccactgctgacgcgccttctcgtggcactcttccccttcctcggctcatggttcaggatactctaaatttgagaagaagaagaaaaactgagagatttcagcattcagaatggattgattcatcgtcagttcgtc

SEQ ID NO: 8708 - DNA, 1707 bp, Oryza sativa
  ref <308>: DATABASE ACCESSION NUMBER: AK106056
  ref <309>: DATABASE ENTRY DATE: 2002-08-28
atcgatggatgcgaccaagaagcgtgtggccatcgtcggcgccggcgccagcggcctgacggcgtgcaagcacgcgctggcgaagggcttccggccggtggtcttcgaggccgccggcgacggcgtcggcggcgtgtggaggcgcacgctggcgtcgacgaggctgcagacgccggcgttcgcctaccggttctccgacttcccgtggccggcggacgtgtcgggcgccgaggtgttcccgcggcacgaccaggtggtcgaatacctcgccgcctacgcgcggcgccacggcgtgacggagtgcgtccggttcggctgcaaggtgctcgccgccgagtacgccggggtgcccgatgaggaggcggcggcgtgggagcggtggtcggggaatggcgaggccttcggcgacggctccggcgagtggcttctcacggtgcagcaccctggatccgaagctacccagatacacagggtcgatttcctgatactctgcactgggagattcagtggagttgcccacaccccaacatttccacccaaccgaggccccgaagtgttccacggccaagtgcttcactccatggactactccaacatggaccacgccgccgccgacgagctgatcagaggcaagcgcgtcgccgtcgtcggctccggcaagtcggccttcgacacggtggcggagtgcgccgctgcaaacggtggcaggtatccgtgcgccatgatctgtcggagcgggcggtggatggtgaacggcgggttcgtgtggggcgtcagccttggacacctcttctgcaaccggctggccgagctcaccgttcacaagcccggcgaggggcttgcattggccctcctcgcaattctgctcacccctttgagatggctgctgtcgaagctggcagagacctacttcaagatgcagatcccgatggagaagcacgggatggtgccggaggagagcttcgcgggatcaatgtcgggctgccggctcggagtcctccccgacaagttctacgacagggtggaggaaggcagcatcctgatcaagagggcaagatctttcagcttctgcacggacggcttggtgctcgacgacgacgacaccggcgagcgcgtcgacgccgacgtcgtcgtgctcgccaccggcttccgtggcgaccagaagctcacggacatgttcgtctcggcgacgttcaagcagcagatagtagcagctcctctgtacaggcagtgcgtgcacccgcggatcccgcagatggcggtgatcgggtacaccgagaacctgacgagcatctacaccttcgagatgatggccaagtgggtggcgcacctcctcgccggcgcgttccggctgccgagcgtcgtgcggatggaggcgagcgcggcggagtgggacgaacacctggcgatgaggaggcacggcgagggcggcggcggcaagccgtgcctcggcggcgttagcacgtggtacaacgacgagatgtgccgggacatggggtacgagccgaggaggaagaaagggattcttgcagctacgctggtatcctctgaagtctgaactcaagtgaaactgatcagtgatcgatcgatcactgatgtgttgatcacgagtatacgataaaaaagaacatgaactttggaattgttgggctttcagaaaggggaaaataagttgggctgcgatatgaagaggaaaataagtcgagg

SEQ ID NO: 8709 - DNA, 1107 bp, Oryza sativa
  ref <308>: DATABASE ACCESSION NUMBER: AK106057
  ref <309>: DATABASE ENTRY DATE: 2002-08-28
agatattcagacacacaccttcaataacttgcaaggataactcaaactacttgaatcagatcagacaaaaacatcataagaatatcacgatgtgtggaggagcactgatcccgaacgactatggcgacaagccgccgccgccgccgtcggagtcgtcggagtgggacgccacaacgaagatgaagaagaagaagaagcgtggtggcggcggcgacgacgactgggaggccgccttccgggagttcatcgctggcgacgacgacgacgacgacggcggcgtttccatgttcccttctggtgcagggacgatggagacgaccacagaggtggcgccggcggcggcggtggtggagaggccgcggcggcggcgaagggtgaggcggagctacccgtaccgcggcgtccggcagcggccgtgggggcggtgggcgtcggagatccgcgaccccgtcaagggcgcccgcgtctggctcggcaccttcgacaccgccgtcgaggccgcgcgcgcctacgacgccgaggcgcgccgcatccacggccacaaggcaaggaccaacttcccgcccgacgagcctccgctgccggcgccatcgcaggcgccgttctgcttcctgctcgacgacgacgacgacgacgacggcgtggcccgtggaaacagcccggcgtcgtcgtcggcgccggacagagcctccgcttgcacgacgtcgtcgacggtggcgtccggcgagcgaggcgatgagctcatactgctggagtgctgctccgacgacgtgatggacagcctcctcgccggcttcgacgtgtccagcgaaccacgcagtgttttgggaatggttaattagcagcgcgcacgcctgattagatcggtacatgtgaagtacaagagaagtagttactactagctaggagcaaattaacttggagtgcaagaataaaatatgcatgtctctgcactactactgtagtgttagcaagtttgctcattgttctgttgtatcctttcatgtccatttcagacttcccaatgctacataaggatgtacatatgtatgatgttgtgtgccttgttaatcaatgaatgtaaatatctttatattgcttttgtac

SEQ ID NO: 8710 - DNA, 1343 bp, Oryza sativa
  ref <308>: DATABASE ACCESSION NUMBER: AK106058
  ref <309>: DATABASE ENTRY DATE: 2002-08-28
gagttgcatgcatccctctcctctcgtcctgtgagttgcccaagacgaatcgctttgctcacaatggctggagctcggttgtctctcgcgttcctgtgctttgtggtggtggtggtggcctccgcgctcgccggcggcgccggtgcgaggaagacggtcggcgagtacgtgctcaggaagggggacttctccgtgaagatcaccaactggggagcaaccatgatgtcggtcgtcctccctgattccaaagggaatttggctgatgttgtgcttggcctagacaccattgctgagtacaacgacactaattacttcgggccggttaccggacgggtcgggcagaggatagccagggggcggttcgttctcgacgggaaggtgtatcacacgtacatcaacgacggcaggaacgcgattcacggtggacacagagggttcagcaaagtcatatggacggtgaaggagtacgtcggcggcggcgactcgccgtacatcaccttgtactaccgcagcttcgacggagagcaaggtttccccggggacctggacgcgtacgtgacgtaccagctgtcgagcccgtacgtgctggcgctgcgcatgaacgcgacggcgctgaacaaggcgacgccggtgaacttcctgcagcacacgtactggaacctcggcgggcagggccgcggcgacgtgctggggcacacgctgcagctgtcggcgtcgcggtacaccccgctggacgaggagctcctcccgtcgtcgggcgtcgtcgcgcccgtcgccggcacgccctacgacttccggcaccccaccccgatcggcgcgcgcatccggcaggtgatgggcgggcgcatcgccgggtacgacatcaactacgtgatcgacggcgagggcatgcggaaggtggccgcggcgcgggacggcgcgtcgggccgcgcgctggagctgtgggcgaaccagccggccatgcagctgtacaccggcaactggctgaacaacatcaagggcaagggcggcaaggtgtaccagcagtacggcgggttctgcctggagacgcaggggtacgtggacgccgtgaaccacccggagttcccctccatgacggtcaggcccggccaggtgtacaggcacgacatggccttcaagttctccttctagctctctagctgatcagtcaggatgatcgtgtggttgtagtataccatttttcaagattgtgcgaataattattggcgtgttgttgaaataattgaagaatggggtcgttctcaagcatgcgctccatgaacaattatgtttgcggcaagctatcatgttcatgagcagatatgtacacgtcacattatcag

SEQ ID NO: 8711 - DNA, 1146 bp, Oryza sativa
  ref <308>: DATABASE ACCESSION NUMBER: AK106059
  ref <309>: DATABASE ENTRY DATE: 2002-08-28
aaacagagcagagaagcagagcaaccatggccgcgcgcgtgctccccctcctcctcgtcgtcgtcgtcgccgcggccatggcgagagcccccacggcccacgcgtggggcaaggagggccactacatggtgtgcaagatcgccgagggtttcctgacgaaggaggcggcgacggcggtgaaggagctcctccccgggtgggccggcggcgagctcgcggaaacgtgctcgtgggcggacaccgagcggttccggtaccggtggtcgagccccctccacttcgccgacacccccggcgactgccagttcaactacgcccgggattgccacaacacaaacggtgagaaggacatgtgtgtggtcggagcgatcaacaactacaccaacgcgctcgaggactcatcaagtccatatgatccaaccgagagcttgatgttcttggcacacttcgtcggcgacgttcaccagcctctccactgcggccacgtcaaagatcttggtggcaacaccatcatcgtccattggtacacaaggaagagcaaccttcatcacgtgtgggatgtgaacgtcattgaaacggccttgaaggaattctacaacgaggacgtgagcacgatgataaaggccatcaagatgaacatcactgatgagtggtccaccgaggagaagcagtgggagacttgccgtagccggacaaagacttgtgccgataagtacgccgaggagagtgcaaagctcgcgtgcaaagcgtatgagggtgttgagcaagaatccaccttagaagatgactatttcttcgctgccctgcctgttgttcagaagaggattgctcaaggtggcgtgaggcttgctgcaatactcaaccggatcttcagcgggaacaaggttcagagtagttgatccaatagagattaaacagatgaaagattaagaaaatagcccgcattctgaattacaataagattatcttgtttgaccatgttaacttcacggttacgattagatgtatcctcatttagccatttgtcaaagtagcttagatagctacagaacattgtaattcctgtaagcaagtggtgatttatcaatattgcactgtctttttgtatcattgatcatctttcaggctgaagttaagctacagccg

SEQ ID NO: 8712 - DNA, 1228 bp, Oryza sativa
  ref <308>: DATABASE ACCESSION NUMBER: AK106060
  ref <309>: DATABASE ENTRY DATE: 2002-08-28
atacgagcaggacagcacaggtcgagactcgagaggcggcgagaccgagcggggacgccatggatcgcgagtggggctccaagcccggcagcggcggcgccgcctccgcccagaatgaggccatcgaccggcgggagcgcctccgccgcctcgccctcgagaccatcgacctcgccaaggacccctacttcatgcgcaaccacctcggcagctacgagtgcaagctgtgcctgacgctgcacaacaacgaggggaactacctggctcacacgcaggggaagcggcaccagaccaacctcgccaagcgtgccgcccgcgaggccaaggacgcgcccgcgcagccccagcccaacaagagaaagttcgcgccccgcaagtccgttaagattggaagacctgggtatcaggtgactaagcagtatgatcctgacatgaagcaacactcatttctttttgagattggttatcctgaaattgaagaaaacagcaagccaaggcaccgtttcatggcatcatatgaacagaaagtcgaatcttgggataaaaagtatcaatatctactttttgcagcagagccctatgaaattattggctttaagataccaagcgcagagatcgacaagtcagcagataaattcttcaactattgggatccagacaagaaacagtacattctccaactatacttcaaaacaagacaaccagaagctaataagccgcctgcggctcctgggactttgccaaatggatctggaggtccaccacgcccacccccaccgcaggttccgccacccccgccacaggctccgccgccgcctccaccaaatgcacctatgggtatgcccccaaggatcccacccccacctgttggtggtactcaacctccaccaccaccgcccccacttgcaaatggacctccacgatcaatcccacccccacctatgaccggtggtgcaatggctaacttcactcctggagcacctcctcgtcctccaatgcaaggatttcctgggccgcagcagtagatgacccaagcgacaacaactgaggtcgggctacaaatgttgcaatgattgcctagtttgctgtagaatgccttttgacccaaatttgtatgttgtcaaatacattatatatttacatgtactcttagactatagtattgtcgattttaagaaattttccaccttgatacttttgatacttctattcaaagcacttggtgtct

SEQ ID NO: 8713 - DNA, 1133 bp, Oryza sativa
  ref <308>: DATABASE ACCESSION NUMBER: AK106061
  ref <309>: DATABASE ENTRY DATE: 2002-08-28
atccatcctcgacaccaccgtctccgcttccctttccattcgcgccgccacctcgccgtcgcacccagcggcggcgccgccgtgccggaggagcggcgatgtggtgccagtcgtgcaaggaggagtacgaggaggaggacgccgggacgtgcaaggagtgctacgaggaggcgagcgagacggaggaggagctcaagcgcgagatcgacgacctccgctcccgcctccacttcctccgcctcccttccccttccctcgacgcctcctccctctcccactccgacctcctcctccacgccatccccgccgatgcgcccgcccgccccgacacccccgccgtccccgcccaccgcgtcatcctcgccagcagatctcctgttttcagagctatgcttgagaacgagatggaagagagccggagtggcatcatcaaaatatacgatgtgtcctacgacgtccttcgtgctttcgtccattacatgtacacagcagaagctctccttgacgagcagatggcatctgatctcctggtgttggctgagaagtacgaagtgaagaacttgaaggcctactgtgagaaattcttaacatccaaagtgagcaacgacaatgccatcacgcattatgcgtttgcgcatcgccacagcgcgaagcagctgctcgagacatccctggcagcgatcatggacaacatgtcaacgctggcagatcgggaggaatacaaggagcttgttgagaaggacccaaggcttgttgtggagatatatgaagcctatctgaacagacaagtgaacactgctgctgggaaggagacagattccagtagtaggaaggggtaattcaaaagaaaactgctatcagagatgtaattaatgttctaaccaagcttttgcatgttcatgctaggcaaagactggcacatcaaattgtcatcctgcggtgtaggcgcagaacagctatttctgtatatgcttgaattgatactgtgtgctcgctactgatagaatgagatctattgccatctttatgtaacatataggtcaactgatatgtgatgatcatcaaacacactcagtatgaacaaaaaactaagtgtaaactatttgcaacgttgaacggttaaattgattacc

SEQ ID NO: 8714 - DNA, 958 bp, Oryza sativa
  ref <308>: DATABASE ACCESSION NUMBER: AK106062
  ref <309>: DATABASE ENTRY DATE: 2002-08-28
agctagtgttcgtccagtccaggttcagccatggcgcccacctctcgctctcccgccgccctcttcctgctgctcgcgctcgcctgcgccgcgccgccgctcctgcgggcggcggacacgcacctccacttcttcatgcacgacgtcgtctccggcagcggccagacggcggtgcaggtcatcaagggcccgacgtcggccaacggtggcgtcagcaccggcttcggagacaccaccgtcgtcgacgacgcgctcacggagacctcgtcggcgacgtccccggaggtggggcgcgcgcaggggttctacatgatgtcgtcgctgtcgagcccgacgctgatgatgtgcgtgaacctctacttcaccgccggcgagaacaacggcagcaccatcgcggtgatcggccacgacgacaccacggccacggtgagggagctgtccgtggtgggcggcacgggcaagttcaggatggccaccggctacgtggtgtggaagacggccagcatgagcgccagcaccggcgtgttcgagctcgacgtctacgtcaccacgcccaacgccacaaccatcgacgcctccgcgccggtgtcgccgttggacggcggaggcagcagcgggtcgacgtcgacggcgaagtcgggcgcggcggggcgacaggtggggtgggtgagtgcgtgcgtagtggggttggtggtggcgttggttgggcgtggttggtgaggcgtcgagtcgtcggtgtccaagagattcgttggtgccttctctttgttttcgagtcttttagtttgttggaatcggattcccgtactgaacctgcttttactgcaagttaattgtttggttggttggttgccttcctgtcactccaccttgaccgtgaaggtattactgtactgcagcataaaggtccccaccttgaccaccatcttcaccatctatctatacattttattttcac

SEQ ID NO: 8715 - DNA, 925 bp, Oryza sativa
  ref <308>: DATABASE ACCESSION NUMBER: AK106063
  ref <309>: DATABASE ENTRY DATE: 2002-08-28
acacaccaaggcaacacacactaatacacaatcaaattaattccgagttctaattaacgtacgtaaaagaaggagaagagatggctgcttctcgccgcgtcgcgatctccctcctcctcctggtcgcggccatggcgagctccttctccttctccccgtgcaccgcgcagtcgtcgtcgtcgtgcgcgagctacaccttctccagcaaccagcagtacggctcgtgcgccaccctgccgcgcctgggcgccacgctgcactacaactacacggcggcggccagcaccgtcgccgtcgcgttccgcgcgccgcagccggcgggcggcaaggggtgggtggcgtgggggatcaacccgagcggcagcgggatggtgggcacccaggccgtggtggcgttccgccactccaacggcagcctcgtcgcgtacccgacggtgctcggcagctacgcgccgtccatggcgcccgcggcggccaaggacctggccctccccgtctccggcgtgtcggcggaggagaacggcaaggcgaaggaggtggtggtgtacgcgacggtggcgctgccggccgggaaggggaccaagttcaaccacgtgtggcagcagggcagctcggtggccggcgacgtgccggcggcgcaccccacctccggggacaacgtcctctccgtcggcagcatcgacttcagcaagtgatcgatcgtacatatatactggtatatacgtacacttgttcgatcgtatacgtacgtacgcccggctgcttgtaatgttggtatacaagtatattcatgtacacatgtgttaattatttatgcttctggtagatcggctcccattagatgtgtggagtatatgtatgatgattatgtcagtgagactccatgtatgtattgtctatatatatgtacagccggaaagtttgc

SEQ ID NO: 8716 - DNA, 1431 bp, Oryza sativa
  ref <308>: DATABASE ACCESSION NUMBER: AK106064
  ref <309>: DATABASE ENTRY DATE: 2002-08-28
aaatttgacgtgtcatccgacgttttgcatctcatctcccccgttcacagcacagcccaggtgcacctgccacctgcacagtttcgtcaacagagccggcctcccgtcgctgctcccaaccgctgactcccactcgccgcgatccgatcgccacctgccctcccctcccagatccgccgccgcggaaacctcaccggcgccggcgacgcgagggcaccatgccgggcctcctcgagtattccgcgggcggcctgggcctcctggcgctcgcggcgctcgagtccctcccgctccgccccctcctcctccccgccgccgcggcgtcgcacctcccgcgccgcctcggcctcgccacgccgctgcacctccgccacctcctcgcggggatcgtctccgcgctcttcctcctctccgcgctcttctccgcgcgacaccacctctccctcccgacgctcgccgccaccgcgctgttcctcctctacgcgctggcccccctcgccccgctccgcgcgccgctcccgctccccttgctcgacctcgtcctcgccgccgcgttcgcgcaggagctcctgctcttcgcccaccgcaggccctccaccgccgccgggatcgagaaccggtacttcgacctcttcctcgtccccgtcgccgtctgcctcgtcgccacgctactcgccgcgcacgaccccgaggccgtgccgccccgcctcgcgcgcgccgcggggctggcgctgcagggcacatggatggtccagatggggttctccttcttcaccagcgccgtcgcccaggggtgcgcgctccacgcccagagccgcgtcgactacaccatcaagtgccgcacccacgacgactaccaccgcgcgcgctccgcggccacgctgcagttcaacggccacctcgcgctgctcgtgctcgccggcgcggcggcgtacggcgccgccgtctcaagaagaaaccagccgccgagcgggtacaggatgctgagcaaggaggtgcagatggaagggatgccgctgcattcgcagttcacattggattcagacgaagagaaggaagatgaaaggatcaccaattcggcaatgccggtggcgaatggatcggggtcgcatcacgagatcacggtgcaaacctctgattccaagtgatgagactgtgaattatgcggcgatttttcggtgtacaatagctcagccaaggaggatatctgccaagctagctgcagggtgtgttttcagtatgatgttcagttttgatgctttattacttcagaattcaccatatatgtgcagagaatcagatcttgctcagtttgatctgcatacatcaaatttaacttgtgcattagatttagctactgtacaatattgtaatgttgtgatttcagatagcactttcggaaataaaattgacaggactttgtatttgaat

SEQ ID NO: 8717 - DNA, 1042 bp, Oryza sativa
  ref <308>: DATABASE ACCESSION NUMBER: AK106065
  ref <309>: DATABASE ENTRY DATE: 2002-08-28
gcgcctcctccacctgccccgcgccgcatccgcccccacctacccccgccgccgccaccaccttgccctcctcccctcgctccggctacgagtgccggcgcccgccgccgccgccgccatgtcgagtgccgcggcggcgcaggaggtcgccgaccagaagcgcgcgctgcggtccgaggtgcggagggcgctcagggccctcacccccgagcagcgcgccagcgaagaccaggctattcaaaatgcaattttgaactcttcttggttcaaagaaagcaagcggttatgtgcttatataagctgtgcacaattgcgggaagttgatacatcaaaagtactgtcagaagttttatccccaaattctgaacatggacatgcaaaggatctttatgttcctcgagtggaagataagaatcgcaatatgcggatgctcaaaatcactaccatggatgatttagttaaaaattcaatgaacattctagaaccatcaccacttgatgctagtgggaatgctcgtgaagaagtgttgtcaacctcttcccctgttgatctttttctattgcctggacaagcttttgataggactggacgaagattaggacgtggtggagggtactatgacacattcttgatgagatatcaagaacttgctaaagagaaagggtgggatcagcctcttctagtcgcgctttcatactcggtgcaaattttggaggaaggcatcatcccagtcaactcaacagatgttcctattgatgctctggtctcatcctctggcatcattccaatcagtcctgcagcattggcgaggatataattgagctgattggtttctgctttgcgttgacagtcaacctctcttccctgaacaacacttttttagataatgcttcaccaaagctgagaaatttttcgatcaagtgattttgttacgcaatgtatctgtattctgaatatgaattgattttgtctgcgtattgtaatgacaactttgatcaaacatacaataagttcaatatatattcatagaggactatggacc

SEQ ID NO: 8718 - DNA, 1138 bp, Oryza sativa
  ref <308>: DATABASE ACCESSION NUMBER: AK106066
  ref <309>: DATABASE ENTRY DATE: 2002-08-28
ataactgctagtgggcccccgtgccgctccaggggcaggggcgacacgggcggcgaccaccgccgccttcctccctcctccacctcgccgccgcccgagcagaccgccggaaaccgcgtggctgcgaggaaggcggcggcggggccttccttctccctcgagggcgcgggtcggtgcccacgaccccgaccagttgggggcggcgacggtgcggcggcatcggcgtcggcgtcagggcgttgggctgggcgcgcggaggcgacagggtgcggaacagctgggcggaggcggcttggtgcggaacggcggcggcgccggatttggcgtccctcgccagatccggcggtccggtctcctcccgggacgatggtggcacccaaggaggcggggaagggagatgcaggcggcgggaaaggtggagcagcggcaacgcgcgtcgcctctccagatccgggctgggggagtggtcggcgccgaggaggtgcggagaccggcaggcagaggcagcgtcacggtggtcaggcgacaacagcggcggctcgctcccgccgtggtcgcggcgccgccgtcggtgtctgtcaagcgttggtgttggcttcggtaatgctgcggcggcgcgctctagctggtcatcccctgtacctggctggatctggccgtccgcggccggatccatcgcctccacgccgaatggcagctggtcggcgggacggctgcgtgtggacggcaagcgcggcggcggctcgctggcggccagcctcctgctcggcagggggcttctgccggtggtgggtcttgtcgttgttgatgggcggcgatgtgcggatgtggaaatggcaggacgacggcttgtgctggcgtgaagcaggaatggggcttgatgtccgtgacggtgacttcctcattgtcggccgagtgttctccctctcttcggtttccccccttggccggacccttttctagtcatggggaatgctagggggagggcggaggctccggcttgctgtagaagtttgtggcggatagatggcgtttcgagggtggccaagggcccgtcttgccattggttacaatcaaggtatgattgcttctaagacgtcatgaactattctgcggccatcgatgtgggggtgcttgt

SEQ ID NO: 8719 - DNA, 1566 bp, Oryza sativa
  ref <308>: DATABASE ACCESSION NUMBER: AK106067
  ref <309>: DATABASE ENTRY DATE: 2002-08-28
gaaacacagaagccaaagcaaaccgaagcccagtttctctctcctcctcctcttcctcctcgcatcagtccgcataaagtctcctccccttccccctcctcctcctcctctccaatcttggcagcagcagcagcaaaggggcggtgggttctttgtctctctctctcgggcggatttcggtttcttcgtgtgtttgttggttgcgttggcgtttggagcggcggcggtggcggtgagtgtgagtggtgaggaggaggaggccgccatgggcgcgggcgggaggtgggtggaggagtacgggcgttcgtcgtcgccgtcgtccaacctgcagtgcttcttggactgcaccacccccgccgtcgacacgcacctcctccccaaggcgaatggccggttttcgagcgattcttggcaccacgccgagatggacagcgtcgagtacttcaacctcgcggacctatgggagcagtactatgagtggagcgcgtacggggctggaactacggtgcagctgtatggaggggaaagagtagtccaatactatgttccctacttgtcagggatacagctatataccaacaaagcccagactgcatccaggagttttggtgaagataatggcatggactattggagcgatgatgaggacaatgagaagatgtcaagatcttggagttcaacatctgaagactcattatttaactgtgatgcaataagtggcaatagaaaacgccacgggcacatgtattttgagttcttcgaggtttgctctccttatggaaggattccactcattgacaaggtgtatgaactatcccagagctatcctgggttgacatccctgagaagtgttgacctttcgcctgctagttggatgtcagttgcctggtatcccatctaccatattccctaccagcgcaatgtgaaggacttatctgcatgcttcctaacttatcataccatttcctcttcatttcaagattacgcgctcgagagcatggccaacgggaagcgaaacgacgagacggagaagaaggtcagcaagactcatcttgctccgttcgggctcgcggcgcacaagctgcagggttctctctggaccaacccgagaacaggggaccgtgacaggatggtctccctcttcggcgccgcggattcctggctcaagcagctcggagtccagcaccatgactacaactacttcatcactcaccccatgtgatctgaacagctgatctgtgtcatctgagaagagtaggttgcaacttgcaaagaaaccccatggctgcagactttggagaggaggcatcagatttttacttaccccagcgacaatggtagcaaacgttttaccgttttgtcaaaatgacactgacatttgccggatagagttttataccgcttgagacttgagacttgagagtttacctgcagctgaatatataccgaatatatcaggacttataggttttgtgtttttcttggctgaagatgtaaaccgaccgtgtacagaaagttttggaactattttgatatccaatatatgtcgtggttggaattggattc

SEQ ID NO: 8720 - DNA, 1775 bp, Oryza sativa
  ref <308>: DATABASE ACCESSION NUMBER: AK106068
  ref <309>: DATABASE ENTRY DATE: 2002-08-28
agctagccgctcaagcaagcatggcgcacgacgcaaaaatggcggatgtactatctcagggttacgtctacctcgccatggctctcgtggcgctgctcggcgtgctgctcacgaagtgcagccgcacggcgacggctcagcggcggctgcctccggggccatggcagctgccggtcatcggcagtctgcaccacctcatcggcaagctcccgcaccacgcgatgcgcgatcttacgcgccgccacgggccggtcatgatgctccggctcggcgaggtgcccacgctggtggtgtcgtcgccggaggcggcgcaggaggtgatgaggacacacgacgcggtgttcgccacgcgggcgctgagcgccaccgtgcgagcgggcaccatgggaggcagggacatcgccttcgcgccgtacggggactactggcgccagctcaggaagatcgccgccacggagctcctctccgcgccccgcgtcgcctccttccgcgccatccgcgaggaggaggtcgccgccacgctgcgcacggtggccgcggccgccgcggacgggcgcgccgtggagttacgagcggcgctgtgcgctctcgtgaccgactccacgtcgcgcgccgtggtgggagaccggtgcaaggagagcgacgcgctcatccgtgcgttcgaccgttccatggagctcgcgagcgggttcaacccggcggcggacctgtggccgtcgtcgcgtctcgccggccttctcagcggcggcgtgcgcgagattgaggcgaacctccacacggtgtttggcatccttgaccgcctcatcgagaagcgcctgcagcagaagaagactgctccatcgtccgccgccggcgaggacattctggacgcgctgctgaggatacacaaggagggcggcgggctccagttcccgctcgacatggacagcatcaaattaatcatcgctgacctcttcagcggcggcggcgaaacggtggcgacgctgctggtctgggcaatggcagaactgatccggaacccaatggccatgcagaaggcgacaacggaggtgcgacgagccttcgcactggctggcgccgtgtcagagggcaagggcgcgctcggcgagctccggtacctgcaccttgtcatcaaggaggcgtctcggctgcacccgccagcgccgctgctgctgccgcgcgagtgctcggagccgtgccaggtgctcggctacgacgtgccgcgcggcacgcaggtgctggtcaacgcctgggcgatcggccgcgacgagcggtgctggaccggcggcagcggcgacggcagctcgccggaggagttccggccggagcggttcgaggatggcgccgaggcggtcgacttgaggggcaacaacttcgagctccttccgttcggcgccgggcggcggatgtgccccgggatggcgtttgcgctcgccaacattgagctcacgctcgccagtctgcttttccacttcgactgggaggtgcccgacatggccgaccctgccaagctggacatgaccgagacgttgggcatcacggcgcgccgcaagggcgacctcctgctacgccccgtcctccgcatgcccgtgcccggcgtctactagacgccgttgccagaatttcagccatctgctcagccttctttcttgtgttacatctcctaatcaccgttatacaagtcaccagtaacactaatatcgcaattatatatgtcaaacacaacaagccatgttgtagcctcgctgttaaataagtggagaaagaattgaagg

SEQ ID NO: 8721 - DNA, 1368 bp, Oryza sativa
  ref <308>: DATABASE ACCESSION NUMBER: AK106069
  ref <309>: DATABASE ENTRY DATE: 2002-08-28
ataccagtagcagctaattaagtgggtgggttcgcttgcttgctttgcttttgcttggagacgggagcgacgctggcttcagcgattggcgtggagaagctagattgttggtgcgactttccgaccgcgaaaatagtagggctggcaaaccggtggccggccggcgatccggccgaggggatggggagcatcgacggccactcgctgcagcagcatcaggggtactcccacggcggcggcgcgggagggagcaacgaggaggaggaggcgtcgccgccgcccggcggtggctcggctacggggtcggcgggccgccggccgagggggaggccgccgggctccaagaacaagccgaagccgcccgtcgtggtgacgcgggagagccccaacgcgatgcgttcccacgtgctggagatcgccagcggcgccgacatcgtcgaggccatcgcgggcttctcccgccgcaggcagcgcggcgtctccgtgctcagcgggagcggcgccgtcaccaacgtcacgctccggcagcccgcggggactggggccgccgccgtcgcgctgcgggggaggttcgagatattgtccatgtctggcgccttcctcccggcgccggcgccgccaggggccacggggctcgccgtgtacctcgccggcgggcaggggcaggtggtgggtgggagcgtcatgggggagctgatcgcgtcgggccccgtcatggtgatcgcggccacgttcggcaacgccacgtacgagaggctgccgctggaccaggaaggcgaggagggcgccgtgctgtccgggtcggagggcgccgccgcgcagatggagcagcagagcagcggaggcgccgtcgtgcccccgccgatgtacgccgccgtccagcagacgccgccgcacgacatgttcgggcagtgggggcatgcagcggtggctcggccgccgccgacatcgttctagcactggcaccggttaatcaatgtctctctacctagctagttagccttccacttctttccctagttgtttgagtaggttaattaatcatttaccatgttaattaatgtgctatgtaatgcataagtactcgtgtgatcttatcgttccattttcttcagagtttgaagaatgtaaaattactgtgcgtatcaagatcggcagtggttgctcacttgctccttcactagctatctgctcgatcataagctcttgcatcttgttcttcgcaagcaccaattcacgcttgtgtcaattgcttggtcattttgcatactttggactactcgatcactacaaaatatttcttgagttttactccctgcatgcactgctcaatgcgtgattatgcctgaatacactaattgttttgtt

SEQ ID NO: 8722 - DNA, 1731 bp, Oryza sativa
  ref <308>: DATABASE ACCESSION NUMBER: AK106070
  ref <309>: DATABASE ENTRY DATE: 2002-08-28
atgaatatgaaaagtctgtacacatagacaaagaggacctcaaagaagtctcagtgtcatatggctcaaatgtgaaactaagcaatttgttcccaacagggtatgcacatcagaaatatatattaacaagcggagctggactaaaggaagtctccgtgacatatggaagtgatggtgaagaggagccaaggaaaacattctctaaagtagggtatatgttagataaggaatgcaagaagtcttcagatgtagacgaagggggactaaaggaagtctcggtgtcatatggaagtaatggtgaagaggagaccagcaaaaccactcctatgggaggatacatggtagatatgaaaaacgaaaagtctctgcaagcagagaaagatggactaaaggaagtctcggtgtcatatggaagtaatggtgaagaggatacaagcaaaacctttgctatgggaggatacatggttgataacgaacgtgaaatgtctctacaaggacagaaagtaatgatgaagaggagacaagaaaaatcattcctatgaaaggatacatggaagacagggaacacgaaaagtccctacaagcggagaaagaggaactcaaagaagtttcagtgtcatatggccatgaagtaaaactaagcaatttgttccctacgagattcggacataagaattatcaacacacattcgaaggaatggatcatggacgccatgttcacgcacacggcaacaagatgcagcaactggccgacgtcttcttcttccgcgacgccctccggccgggctccgtcatcacgccgaccatcccgccgacgacctcgctgccggccttcctccctcgccacgtcgccgacgccatcccgttctccgccgaccgctttgccgacgtcctcgccatgttcgcgccggcgtccctcgccatggcgcgcgagatacggtgggcgctcgacacctgcggccagcgggcggcggcgctgctcccgggcgagaaggccggctgcgccacctccctcgagtcgctcgccgacctcgccgcgtcgctcctcgggacgcgcgacgtccgcgcgttctccgccgccgaccttcccaccgacgccgcgaccacgccggcgcggcgcgggaggtacaacgtgacgtccgtgcgggagctctcggcgatggctggttccggttcgtcgtcgtcgtcggagccggcgccggctgccgtcgtggcgtgccacgacctgacgtacccgtacgccgtgttctactgccacagtaccaagccgaccgccgcgtacgcggtgacgctggtggcggcgaccaccggggacggcgacggcgaaggcgaggcggcctcgccggcgaagatggaggcgctcgccgtgtgccacctggacacgtcgcggtggagggcggacaacccgttcttcgtggcgcacggcgtcaagccgggggaggtgtccgtgtgccacttcctcaccaagctcagcatcgtctgggtcccacgccacgagcaggggggcccacgcgcagcagcttaatcatcatcgatgatgtaaacaagctctacaacctaaagtgaacaatttggcgtggtttgtgcgtaatttgcagcaacggtcgatcgagctatctacttatatagtatgtaaaaagtgaataattcagtttgtcatcgtgtgaaccacatgtgtgctgcatatttgtgcgtgtgcatgttcataattaatatggatattgtgtcttc

SEQ ID NO: 8723 - DNA, 1307 bp, Oryza sativa
  ref <308>: DATABASE ACCESSION NUMBER: AK106071
  ref <309>: DATABASE ENTRY DATE: 2002-08-28
ctgccgcgcctgcgccaccaccaccaccgttcgtccgctcgccgcgtcgacgagctcctcctccgcttcgcgcttcgtgtcagggtttggagtggagtggagggggaaggaaaagggggagggatgatgcacgcgaagtcggagtcggacgtgacgagcctggcgccgtcgtcgccgccgcggtcgccgaagaggggcggcggcgtgggcgtgggcggcgcgaactactacgtgcagagcccgtcgcgggagtcgcacgacggcgggtacaagtcgtcgtcgatgcaggcgacgccggtgtacaacagcccgaacgagtcgccgtcgcacccttcctacggccgccactcccgctcctcctccgtcagccgcttctccggcaccctccgcgacggctcccgcaaggccggcggcgagcgcaaggcgctcaacgacaagggctggcccgagtgcaacgtcatcgaggaggagggcccctacgaggacctcgccggcgacaccggcctctcccgccgctgccagatcgtcctcggcttcctctgcttcgtcctcctcttcaccgtcttctgcctcatcatctggggcgccgctcgcccctacgagcccgacgtcgtcgtcaagagcttgacgatggatgatttctacgctggtgagggcacagaccacagtggggttccaaccaaattggttacactgaactgctctctgcacatagctgtatacaaccctgcttcaatgtttggaatccatgtcacgacgggtcctattcgccttctctattcagagatctctatcggggttggacaggttcgcaggtactaccagccgaggaagagccaccggttggtgacggcggtggtccacggcaacaaggtgcccctctacggcgccggcggcgggctgatgctgtcgagctccggcggcgcggtgccattgacgctggacttcgacctcacctcccggggatacgtcatcggcaagctggtgagggtgacgcacaaggtgcacgtgacgtgccccatcgtcgtcgacgccaagaagacgaagcccatcaagttctccaagaaggcctgcgccgtctacaagatctgagaggccatcgtcgccgccgccgtcgccggtcgtcgtccatcacgccggcggcgggcgtcgcctgcagtgatcgatcggcgacggagccgttcttctgttcttgcagttgttgtatgtattatgcttgtgaagaacaataagcgtttatatggtcacttgttaattttacttgagcttcgattttgttgataaatcagtaaatcactttgtatggt

SEQ ID NO: 8724 - DNA, 1678 bp, Oryza sativa
  ref <308>: DATABASE ACCESSION NUMBER: AK106072
  ref <309>: DATABASE ENTRY DATE: 2002-08-28
atcgaacttgctagcctcatcctccctcggtgtctctcagatggcggggctaaccaagaatcgtagcacctctgcttgccgcctctgcttcatcctcctcctcgtcctatccgccaccaccaccaccctctccaccgcgctgtccggaccctactcctcccggtgcgcgtccccgtcaccagctgccgaccaacacaccggcgtggacgacgcctctgcgctcctccgatcgttccggattacctctggcatcttctccggcgaaggggcggagaccctgttctcccctcgttcctactactcaatcgtgggtcagcactcgttcaccgacagcttcgccaggcgctccttctcccttctcccccacgccgtgtcccgcaccaccgaacccagcgtcatccacctcacagccaccctcaccctgttcggcagccgcgtgcagttattcgagagcgacctcacacgtgaatccgcgaaggaaggacattccatctccttctacctcgacggatactactcgtccgcaaccacgcaactctgtatggtcggcaaggggagtgacctttccattgatggttcagtgaaacattacatggacgtcgctctccgcctccggatccccagcatttccagcctcaccgaccccttcgtcaccggcatcctcgagggcgccgacttcgagcccttctccctcctcacgtacgccgaggggagcagctacaggtacagcgagaacacatcctgcctgccgctcccggtgccggaggccgctgctgccgcgcggcgggccatccagacgacgccggacggcaacttctcgtgcgacactctcaaggcgcggctcgccgcgtcgtaccggctggagtacgggcgcgcgcacgcggtgagcttcccctcgctgcacgagccacgcctgcacgtcaaccagctgcactgcaccgcgggcggcgcggtgcgagcgtacgcggtgttctccaacgacacggccaacatgtggggattcagggacttcttctcgtcccaggaggcggcggtcgtcgcggacgggcactgggacagtgacaccaaccgtctctgcctccgcgcgtgcctggtggcgcgctcctcgccggcgacgccgtcagccagcactgagcttgaggtgcgcgagtgcgggatcgggatgagcttctggttcccggccgtgtggacggtacgggaccggagtgtcaccgccggcgtgctctggaacgcgacccagctgaacagcagcgacaaccacgcaagtgtaggctccgacgtcgctctgataaccgcgtcgagcttcgaggagtggaagggtaacctctccgacgtgaactacaactacagcttcaccatgcttgaggaggccaagaagcattacctcaagaccgggccgagcgatagcaagaagaatagcaagggttcgttcccggggaactactctcactcataccgtgacttccgtttcccgttcttcttggagggagaaacagggtctggaaccgcctacccggtcgcgatcggctcggcgatggtcgacggtgacaggctggctgccgaacattcgttctcacggcacgcggcggcgcaacttgagcagggtacactggtgaatgtcagctatggtgtgacgtactacgttgcacctaagaattggtcttcctttggccagctc

SEQ ID NO: 8725 - DNA, 1099 bp, Oryza sativa
  ref <308>: DATABASE ACCESSION NUMBER: AK106073
  ref <309>: DATABASE ENTRY DATE: 2002-08-28
accaaccttgcctggtttgctctgccctgctctcccagcaacgccaaccccgatgctagccgccgccgccgccctccgcccgcccttccgccgcgcccgcctgagcacctcccatggaggaggcggaggagtgacgcaccctctgcgcccgcgcctgcagcggcgtgctttggcctgccgggctgacctgcagcaggacgcgccgttcgccgccgccatcggcgcctgcttgctagcctccctcgtgctcccgacgtcgagaggccgacgagatgacgacgaggaggaaggggagtttggcgcgacggacacgaggatgggcgtcatggggatcatctccttgctgccttacttcaactggctgagctggatcttcgcgtggctggacagcgggaagcggcgttatctgttctacgccgctgcatacttggctccttatctgagaacaaatttatcactgtcgcccgaagagagctggttacctatagctagcatctttgcctgcattctccatgttcagctagaggcaagcatcaggactggtgatatcgagaccttcaggtttgttcagagagcttggaggcttattttccctagtgctctgaaggaggatgttcaacatagaaacaagggaaaatcaatcagaatgggcagcggtaacaggagaattccatcagcacatgaatctagagaaaagcttcgtaattcagatatcttcaaaaggagacttgatgagcccaacgacgagaaacaaaacaaatcagattggaactgaactcaaacagtgtcgtcctttctcttgtcaagctgtttaaggaagatccacatccttgtggaaaactcctgtggctgcttgcaaaaccgatgtgcagtatgtcaaattaggcttaggtgtagttagtttccaagttagtccacgaccacgagttgttggatcaagcaggcaaccaggctgatcagagtgaggcacctgctgttttcaggtttctgcaaattatgttttgtttgttgtgtgtagcattcagcaagaataattaacgttgcatgcttgctctatctgaaattctgaatgaaagtagctttatgcctggtttgtctc

SEQ ID NO: 8726 - DNA, 1608 bp, Oryza sativa
  ref <308>: DATABASE ACCESSION NUMBER: AK106074
  ref <309>: DATABASE ENTRY DATE: 2002-08-28
agtccaccaccatctctagaactttccatctcgcctccgcctccgcctccgcctccccccacctcctaagctccaaacccaagaaaccctcctcctccgccgcccgccgcccaatccgacccgccggagcgcgaagggagaaacagggcagccagaagaagaagaagaagaagaagaagaagaagaagaagaagaagaagggaggatgccgccgaagaaggcagcgccatcgaaggcggacctggccaagaagcagaaggtcgtggaggacaagacgttcgggctcaagaacaagaacaagagcaagaacgtccagaagtacgtccagtccctgcatcaggccgtccagcccaagcccgacccgaccaagaccgccgccaagaagaagaaggaggaggagaaggcgcgcgagaaggaactcaatgatctattcaaggtcgccgtcagccagcccaaggtcccagttggtgtcgatcccaagtccatagtgtgtgaattctttaaggttggccagtgccagaagggttttaagtgcaagttctcacatgaccttaatgtccaaagaaagggtgaaaagattgatatttacactgacaagcgtgatgcagaaaccatggaagactgggaccaggagactcttgagaaggttgttgcgtcaaaaggagcagagtaccagcagaataaacctactgatattgtttgcaagtactttcttgatgccgtggagaagaaacagtacggttggttttgggtttgcccaaatgggggcaaagattgccactacaggcatgcacttccacctggctatgtactgaagtcccaaatgaaggccttattggaggaagagagtgaaaagattgctatcgaagatgagattgaagatcagcgtaaaaaggtaaaaacaacaactcctatgaccacagatttattcatggaatggaaaaggaagaaggcagaagaaagagaagctggtctggctgccttgagggcagagagggctaagaatgatcgcatgagtggccgtgagctgttcatggctgattcaagtgtgttcgttgatgatgctgaagcatatgatgtatatgaaagacaggaagaatcagaggctaatgaagaaccgagcaataaaaaccaggatgaggggccaagttcatcaacttctaatggcaaggaggtggaagagtccgatgatgaagatataaatattgatgatgacctggacattgatgagttaaacgagcttgaagcaagcctgtcaagaacttccattcagattcgagaacctggcgagggaacatcatcttgagcagtaacactctggactggaaggccattgagaagtagaacaccatttttgcgccttaaattgcctacttgctttagaaacaaaaaaggtggaaggtggagcatagatgcaagtgcaatttgtttcaaccagactgatcatctatccatgattagtgaatgatgctcagtgctgttatgacatgacaattgattttttgacgcatctgccctttatattatctttgcgggagttacgttgctacttgtgaataacatgactactttttggcctcgtgcacactataaccgatttttgatgtg

SEQ ID NO: 8727 - DNA, 1312 bp, Oryza sativa
  ref <308>: DATABASE ACCESSION NUMBER: AK106075
  ref <309>: DATABASE ENTRY DATE: 2002-08-28
actcagtgcttcagtattgtagcgagtcggagtcagtagagcaggcagccaagaaatggccgatgcgcacggtcaccgccggcgggtggccctgccgtgcgcggtgcgcctccggctctgcctcctcgaggccgccatcgacgcgacgcagcgccgggacggcgccatcaaccgtcctctcttctccctgtacgaccggcgggcgcccgccgacccgcggccggacgccgccggcgtgagctccacggacgtcaccgtcgacgcgtcccgcggcctctgggcgcgcgtcttcacccctaccgcgccggagcacgagcactcctcgtcgtcgtcgacgacgacgccgcgccccgtcatcgtctacttccacggcggcggcttcgcgatgttctcggcggcctcccgcccgttcgacacccactgccgcacgctctgcgccggggtcggcgccgtcgtcgtctccgtcgactaccgcctcgcccccgagcaccggttccccgccgcgtacgacgacggggaggccgtcctccgctacctcgccaccaccggcctccgcgacgagcacggcgtccccgtggacctctccgcctgcttcctcgcgggagacagcgccggcggcaacatcgcgcaccacgtggcccagcgctggacgacgacgtcggcggcgactccgccgcctccgtcagacaaccccgtccacctcgccggtgtgatactcctggagccgtacttcggcggcgaggagcggaccaaggcagagcgcgcgctggagggcgtggcgccggtggtgaacatccggcggtcggaccggtggtggagggcgttcttgccggagggggccgaccggaaccacccggcggcgcacgtcaccggcgacgcggggccggagcccgagctgcaagaagcgttcccgccggcgatggtggtcgtcgggggcctcgacccgctgcaagactgggaccggaggtacgccggcatgctgcggcggaaggggaaggcggtgcgggtggtggagttcccggaggccatacacgccttctacttcttcccggagttcgccggcgacatccggaagctcgtcggtgaaatcagggcgttcgtggaagacagcatcatgtccaagcaatccattgcttagctgtgattactccaactagctataaattatcggagtggttcgtatttatataattgtagtacttatcttttgagggaacttaattatagtacttataatggagtaattactctccatagatgttttcggttcgttcaaacttttgaaatttgctgattactcactctgttcagt

SEQ ID NO: 8728 - DNA, 1593 bp, Oryza sativa
  ref <308>: DATABASE ACCESSION NUMBER: AK106076
  ref <309>: DATABASE ENTRY DATE: 2002-08-28
agctggcctccatttcttcctcctccccttcgccgaatcccccacaccaatccgccatggctagtgttctcgccgtccccctcctgctgtgcctgctcgcctccgcctccgccgcccgcttcgccccggcggacaaccacctcctcgcctgcggcgcgacggcaccggccgtgctccccgacggccgacgcttcgtccccgactccggctgcgcctccacgcgcctccgctccccggcacctaccctcccgtccgcggcctccagcgcggccccgcagccgacccctctccacgccgccgcgcgggtcttctcctgccgcgcgtcctacgacctcgccgtccgccgccgcgggtaccacgtcctgcgcctccacttctaccccttcgagcccgcgctcgcgtccgcgcgcttccacgtcggcgccgccggattcctcctcctccacaacttctccgcgtcggcccccgtcgtgaaggagttcatcctacccgtccactccgacgtcctcgtcctcaccttcgtccccgagtcgggctctaacgccttcgtcaacgccatcgagctcgtctcggcccccgatgagctcgtcggcgacatcggcaccctcgtcacgagcagcggcactgaccagaccaatggattgtcgtctcaggtctatgagatgctctatcggatcaacgtcgccggccgcaaggtcacaccgttcaacgacacgctgtggcgaacatgggtcaacgacgagcgcttcctcgtcagcacggaatcatccaacagcggggtctggtcgttcggtggccggattgcttatcccaagggtagcagattgatgacacgggaggttgctcctgacaacgtgtacaactcggcgaggtcagtgagctcacagggcaaagtgacatggggatttcccgtgcctgcttccagcaggtacctagtgcgtatgcacttctgtgacatcgtgagcaaggctctaaatgagctttactttgatatctatgtcaatggtcagctagcagtaaaggatttcgatatctctggtgccactggattcttagcctatccatattacatcgactttgttgtggatgttgaggatgaaggggccctgaaattggccattggtggctcgaagaatagccgatcagacgaagtgagcggtattcttaatgctgtagagataatgaggatgaacaaaacaaatggtggtattgatggggattttgcagtttctctgggcatggagtatgtggctagcaaggggatcggagaatttactcgctcactgctgtgtggtttcatttttgcgggattgttgttggttttgttaatgcttgtggtgaggttgaggactgagctgaggaataatggtacaacttggtcttggcagccaaatgattctggtgacgggaagctggctagagcatatcaacttgtgtccgctaagacagactattgaacatcatgagatgataatctttgaggagctttaaactgtggctgttgacctattgtatgtaatgacatattgcattacttcagttgtaagtattgtagttttacacttttactcccttaatggtaagttttcggtt

SEQ ID NO: 8729 - DNA, 1182 bp, Oryza sativa
  ref <308>: DATABASE ACCESSION NUMBER: AK106077
  ref <309>: DATABASE ENTRY DATE: 2002-08-28
gtgctcagtttcactcttatcagtgaattagatcatatacttgtgtccttgacagctcgttaattagcatggctaggtctctcgctgctctccttctccttctggtcgcagccgcgggagccagccatgccgcgtcgccggcggagatgtactggaagatcgcgctcccgacctcgccgatgcccggcgccattcgcgacctcatcagcccggcgagctcagcggcctcagcttcgaaggataaggaggatacggtgggctccgtgttcttcctcgagaaggacctcttcccgggctccaagatgacgctccacttcacccgcgccaccgccggcgccgcgctgctccctcgcggccgcgccgactccgtcccgttcgcctccgaaaagctcccggagatcctctcccagctctccatccccgccggctcgccgaccgccgacgccatgcggtccacgctcgccgtgtgcgaggccgcgcggatcgccagcgagacggcgcccaagcacaagcactactgcgccacgtcgctcgagtccatggtcgagctcgtcgcctccagcctcggcacccgcgacgtccacgccgtgtccacggaggtggtcaacagggccgggccgacgccgaggcaggcgtacagggtggaggccgtgaggcccgtgccggtgcccgggggcgatatggtggcatgccacaggatgccctacgcgtacgccgtgttcggggtgcacgggatcaagggcgcggcgtacacggtgacgctggccggcgccgacgggaccatggcggaggcggtggcggcgtgccacggggacgtggacgggcacggcgtggcggtggcggaggcgtacaagaggctcggcgtggcgcccgggaaggtggcagtctgccacttcctgcctcaggacgacatgctctgggtgcgcaactgaatgaagcagctacctgcgcgccatccatggctaattaagctccttcctatattttcgatctacctgccggctggctatcatgttatcatcgcgtgtgtgtgcgcgccgatccgacatgcccacactacacgtcgacactacacgtgttttattttgttaattaataagtctggacaaccaggtcatcttgtacggcacttctcccctctgtcccgaaataaaccaacttataaagattgaagtttgtcgc

SEQ ID NO: 8730 - DNA, 1048 bp, Oryza sativa
  ref <308>: DATABASE ACCESSION NUMBER: AK106078
  ref <309>: DATABASE ENTRY DATE: 2002-08-28
cattccgcctccacccccgccgcccgtccaaaccctagctccgccgcctccgccgcctccaggagaggagaggtaagtcgaagatggtgtccggctccggcgtgtgcgcgccgcgcgtggtggtggacgcgcgccaccacatgctcggccgcctggcctccatcatcgccaaggagctcctcaacgggcagcgcgtggtggtcgtccgctgcgaggagatctgcatgtccggcggcctcgtccgccagaagatgaagtacctccgcttcctccgcaagaggatgaacaccaagccctcccatggccccatccacttccgctcccccgccaagatcctctggcgcaccgtccgcggcatgatcccgcacaagaccaagaggggagaggcggcgctggcaaggctgaaggcgtacgagggcgtgccgccgccgtacgacaggaccaagcgcatggtcatccccgacgcgctcaaggttctgaggctgcagcctgggcacaagtactgcctcctcggccagctctccaaggaggttggctggaactactatgacaccatcagggagcttgaggagaagaggaaggagaaggccaaggttgcctatgacaggaggaagcaactggcgaagctgcgtgtcaaggctgagaaggcagccgaggagaagctgggtcctcagctggagattcttgctccgatcaaatactgagaagctttgctttcgtgcatcatcagttttgtgaaacatgtgcccccttattcctagtagtatggtgactcatgatagtacaatcaaggtgtttaaaccgttgttatgcatcccagttctgctactcctatttgaaattttctagtcgatgaactgtttctgtttgtcaaatgtgtgcatttggagattctaccgatggctgtcatagtcccatattgacaaagcggtttttcttaacttatttgcccttgttgagcgtccgtctgcaagtttatgttgattatttttctggttaagactggatgtaatgcgtgtgctttatctcagcaagttccagtgcgttc

SEQ ID NO: 8731 - DNA, 1122 bp, Oryza sativa; identical to SEQ ID NO: 4368
  ref <308>: DATABASE ACCESSION NUMBER: AK106079
  ref <309>: DATABASE ENTRY DATE: 2002-08-28

SEQ ID NO: 8732 - DNA, 1576 bp, Oryza sativa
  ref <308>: DATABASE ACCESSION NUMBER: AK106080
  ref <309>: DATABASE ENTRY DATE: 2002-08-28
atcacgaggctaacccgcatgggcgcgcgccaaggaggcgggaggagtagcacaccgccaccatcaccagcagcagcatggtgcagctgagccgccgccggcaccgcgagcacgctccatagccctctgccatggcggcagcttccgtcctcctcctcctcccttcccccttcctccgtccgtcgtccccggcgcaccgcgcgcgctgcggcattgccaccacgacgacgacgagcacgagcgggaggagggggctcttcctcttcgcctcgcgctgccgccccggcccacggcgacgcgcggcgtcggcggcggtgcctcccgagcacggcttgtcccagccccagccacaggcgcgggcggtgggctcgtacgaggccgccctcggcgacgccaaggacgcgctctacgccgctctggaaggcatgaacagagggatattcgggatgacctccgagaaaaggtcggagattcacgcactggtggagctcctcgagtccaagaacccaacgccggagccaaccgacaagctgcaggacaaggtggatggatgctggaggctcgtctatagcacgatttcgatactggggaagaagaggacaaagttgggactgagagatttcatcagcttaggagatttcttccagatgattgatgtcaaagagatttagcatcaccttctctacacccaaaggaaaaggcggtaaatgtgataaaattcagtgcaagggcgttgaagatattatctggccaacttactattgaagcttcgtacaagataactactaaaacaaaggttgatatcacgcttgatagttcgaccatcactcctgatcagctgatgaatattttccagaagaactatgatatgctccttgctatattcaacccagaaggctggctagagataacgtatccttttcggcttatgtgaaactgttttgttcttcgctgtttttctaattttacaatctctgctacaaatcactagtttccctacgctacattttttctttccagaagtggtgtggatgcttttaacaccaataatttcgggtagcacatgtatagcagcagagtaacccaatttgcatccagattccagagttctcctcaacattttggtcagatacgttgatgaatctctacggataggaagagatgacaaggcaaacatctttgtgctggagagggcagacccctcagaagtttgacaagatttatctgaagcaaaatgcctgcatatacatggacattccggcaaagatgcctttgcacatacccgtcctgtaacacggtggtttttaacagccagtgcagatcgtgtgctcaactttccatttgcgttagattatactactgctatttttttttctttctggagcaaaaggcatttccctttgcgacaaaatcatgcaagctgggaaagctcatgcaagttcagttacactacatagagaattggtacattaagaactggtgtacttttgaattttgaaatacaccattttcaattattcatccttgtaagacataatctaatgagtgtacagcttggcaaatggcaatacccttt

SEQ ID NO: 8733 - DNA, 1895 bp, Oryza sativa
  ref <308>: DATABASE ACCESSION NUMBER: AK106081
  ref <309>: DATABASE ENTRY DATE: 2002-08-28
gatcgatatctcaccacacaaacagcaacgacgaactaagccatagctccggtagctcttcgatctctctcaaggtctcaccaaccagccgatcgaagcagaagcagagctacagtataggcgtacgtactccggcgactggttcaggtgatctcgcggcgtacgtctagtagccatgggtaatctggggtggatggtggcggcggcggtggcggcggtggtggcgtcgtgggcgttcgacgcggtggtgaagctggtgtggaggccccgcgccatcaccaggcggctgcgggcgcagggcgtcggcgggccgggataccggttcttctccggcaacctcggcgagatcaggcgtctccgcgacgagggcgccggcgtcgtgctcgacgtctcctcccatgacttcgtccccatcgtgcagccgcacttccgcaaatggatccccctctatgggaagacattcatgtattggttcggagcgcggcctaccatttgcttggcagacgtgagcatggtgaggcaggtgttatcggaccggacggggatgtaccctaagaacgtgtcgaacccatacttcgcacgactactcggcaaggggcttgtgctcaccgacggcgatgagtggaagcgccaccgcaaagtagtccacccggcatttaacatggacaagctcaagatgatgactgtgactatgtccgattgtgcccaatctatgatttccgagtgggaatccgagttggggacaaagggcgatatagtggagatcgagctgagccgacgattcgaggagcttaccgctgatgtgatctcgcacacagcattcgggagcagctataaggaggggaagcaagtgttcttggcacaaagagagcttcaatttcttgccttctccaccttccttagcatccaaatcccggggtccagctacctcccgaccaagaagaacctaaagacatggtcagtggacaagaaggtgagaagcatgctcacggacatcatcaagagccggctcaacaacaaagatgtcgcaggatacgggaacgacctgctcggattaatgctggaggcatgtgcaccggagcacggggagagccagccacaacttagtatggacgagatcatcgccgagtgcaagacattcttctttgcagggcacgacaccacctcacaccttctcacatggaccatgttcctattgagcacacatccggagtggcaggagaagctcagggaggaggtggcaacggagtgtgacggcaaggtgcccaccggtgacatgctcaacaagctgaagctagtcaacatgttcctcctcgagaccctgaggttgtatggccctgttgcattcatacagaggagggtcaacgccgagctagaactcggcggcatcacggtccctgagggcactgtcctatcgattccgattgcaacaatccaccgcgataaggaggtgtggggcgaggacgccgacatattcaagccggagaggttcaagaatggggtgtcaaaggcgggaaaatatcccaacgcgttgctctccttctccagtgggccgagggcatgcattgggcagaacttcgccatgatcgaggccaaggccgtaattgcaatgatcctacagaggttctcctttactctatcacccaagtacgtccacgtgccaaccgacgtgatcacgcttcggccaaagtatgggctgcctatgatcctcaagagtctcaaggtgtagaagttgttcattaggagggggttattttagtacttctttgttgtacacgagattagtttttgttcatgagcatttgctcctactgatgatgttactgtgtgtaatgcattgattccattttgtacgaaattggggtgtaaatatatctagtttgcttgttgattgg

SEQ ID NO: 8734 - DNA, 953 bp, Oryza sativa
  ref <308>: DATABASE ACCESSION NUMBER: AK106082
  ref <309>: DATABASE ENTRY DATE: 2002-08-28
tacgtgcaattgcataataatacaggcagttccccatggctacttccacaccctgcagactggccatctcagttatactattgtgctgcttctcacttctccctcttgcgcacgcgcggctcctcctttccgataaaaacaccctcaatgatagcaaggccttctccatcaaaggtggcgatggcgcaggaggtgggcggggttttggtgtgagtattagccatggaggtcacgacatatcaattggtataggcggtggctttggaggtggagccggcactacacgtggtggtggcgcaagtgtgggtggtggggcaggtggaggtgttggcatagatgtgggtcatggtggggtggatgtggggattggtgggggaggaggtgccgcggttaacggtggtggcgtgcacgcaggaggaggaggaggtggcggtgttggtgtccatataggtcatggtggagtgagtataagcacagggggtggtggtggtgctggtggaggtgaaagtgcgggaagtagcggaggtggatttggtggaggaaatggagttggccgtgctgggaatgcagtgggaggcggcgggggttctggtagcgtgattggtagtagcggaagcggaggaggtagtggggttggatcaacaagttctgcaataggaggtggctctggaagtggtggtggacaaggctaagaatttgctctgatcaattatatggtgtatttaattttaatctaaataaccctctccagtgaacactatataggtgaaaacatggtatcgaatccaacaaagtgtgagtatgtactgttatataccatgtttggctttttgcacatttgatgtgcctagtaatttgtcggttgtgaagtactaaccgacatcttatattgtaatataattgtatgctgatcaaactagcatacgagtgatgtatactaatgttttaattat

SEQ ID NO: 8735 - DNA, 1331 bp, Oryza sativa
  ref <308>: DATABASE ACCESSION NUMBER: AK106083
  ref <309>: DATABASE ENTRY DATE: 2002-08-28
gtctccatctccaccgctagtgcttggctgcctcctcgtcagattctaggagatggcatcagcagcaatgtctactctgaacctgagttcatctcctctgaccaagcagcagctccgatttggagccagcacactcagtgcagaacacgtcagtggcttcagctctgcaaggccagctccatcgttgtgctgctccagctctcactggcgagcggtcaagctgagaccgagacggcggccatggcggcgcgccgggaaccgggtcgtcgcgcaggccggcggctacaaggtcgccatcctcggcgccgccggtgggatcgggcagccgctctcgctcctcgtcaagatgtcgccgctcgtctcggcgctgcacctgtacgacattgcgaacgtcgatggtgtcaccgccgatcttggacactgcaacacgccggcgaaggtcgccgggttcaccggaaaggaggagctcgccggttgtcttgccggcgtggacgtcgtcgtcatccctgccggcgtgccgaggaagccagggatgacgcgggatgacctgttcggcatcaacgccggcatcgtgagggagctcgtcgaggccgtggcggaccacgcgccggcggcgctggtgcacgtcatctccaacccggtgaactccaccgtgccgatcgccgccgaggtgctgaagcggaagggcgtgtacgacccgcggaagctgttcggcgtcacgacgctggacgtcgtgcgcgccaacacgttcgtcgcggagatgaagggcctcccgctcgccgacgtcgacgtcccggtggtcggcggccacgcggcggccaccatcctcccgctgctgtccaaggcgaggcccaagacggcgttcaccgatgaggaggtggaggcgctgacgaggcggatccagaacgccgggaccgaggtggtggaggccaaggcgaaggccggcggcgggtccgcgacgctgtcgatggcgtacgcggcggcgaggttcctggaggcgtcgctgcgcgggctcgacggcgacgccgacgtgtacgagtgctcgtacgtgcagtgccaggcggtgccggagctgccgttcttcgcgtgccgggtgaagctgggcagggacggcgtcgaggaggtggcggcggcgggggcggagctccgggggctcacggagttcgaggcgcgcgcgctggaggcgctcaagccgcagctcaagaagagcatcgacaagggcgtcgcctacgcgcagcagcagccagcgacggtggcgatgggttgaaatttgacatacttttcgcagcattttgcgagtgattaccatttgctgaatgcatttccgtgcc

SEQ ID NO: 8736 - DNA, 1525 bp, Oryza sativa
  ref <308>: DATABASE ACCESSION NUMBER: AK106084
  ref <309>: DATABASE ENTRY DATE: 2002-08-28
aaatcagtgagagagcaacaggcgtttattgagtctcacgtacttacgtagtgtatagtgatagcagtagtagcattcatggcgtcgtcgtcgtcgtcatggctcgtgctgctctcagccgcgctctgcatcggcgcgctcccggcgtcgcacgccgcccgcgccttcttcgtcttcggcgactccctcgtcgacaacggcaacaacaactacctcatcacgtcggcccgcgccgactcgccgccgtacggcattgacacccccgaccaccgcgccaccgggaggttctccaatggcaagaacatgcctgacattatcagtgagcacctgggagctgagccggtgttgccgtacctgagcccggagctggacggcgacaggctgctcgtcggcgcgaacttcgcgtcggccggcatcggcatcctgaacgacaccggcgtgcagttcgcgaacatcatccacatcgagaagcagatcaggtacttcgagcagtaccaggaccggctgcgcgcggtggtcggcgacgagcaggcgaagaaggtggtcgccgggtcgctggcgctcatcacgctgggcggcaacgacttcgtgaacaactactacctcatcccgtactcgccgcggtcgcgggagttctcgctgccggactacatccggtacatcctctcggagtacaagcaggtgctccggcacatccacgcgctgggggcgcggcgggtgctggtcaccggcgtcgggccgatcgggtgcgtgccggcggagctcgcgctgcacagcctcgacggcgggtgcgacgccgagctgcagcgcgcggcggacgcgtacaacccgcagctggtggcgatgctggcggagctcaacgcggaggtcggcggcgacgtgttcgtcggcgtgaacaccaagcgcgcccacgacgacttcatcgaggaccccagggcgcacgggttcgagacctccacggaggcgtgctgcgggcagggcaggttcaacggcatgggcctctgcaccctcgtctccaacctctgcgccgaccgcgactcgtacgtcttctgggacgccttccaccccaccgagcgcgccaaccgcctcatcgtacagcagttcatgcacggctcgctcgactacatcacccccatgaacctcagcaccatcctcaagctcgaccaacaagctcaactccgcaactgatcaatatctcgccaccatgattacaacctgcatgcattattgcaatcaatcagaatgatcgtcagatcgatggattgatctctctccgtaatttactgtcatttggatttttcaagtgttcgacgtacgtactctacgtacgtccgtgattagttttagtttttgctagatatatagcgtccacataaaccatatttgagcttagctcgatcatcatccggtcagatcgattgctcatcagctagtgtgtttaattactcctacatatgtactgtgttgtgtatgtacgtggtgttcttgttttgaatcacatatcattattgataggtttttaatt

SEQ ID NO: 8737 - DNA, 1198 bp, Oryza sativa
  ref <308>: DATABASE ACCESSION NUMBER: AK106085
  ref <309>: DATABASE ENTRY DATE: 2002-08-28
acagcacccctgcaaccttgtgttcccctcatcccccttttctagcactcaccaagtttaatttggagcacacatttcagctcaccactgctagcttgggaagaggaggaggagcttgagcttggagagagacaacaatggcggctcaggctcttctctctgggaggcagctgctggggaggccattgcaatcttcagtctccaggtcttcttcccccaggaaggcacccttcatggtcagggcagaggccactccccctgccaagcaaggtgctgacaggcagctgtggttcgcatccaagcagtccctgagctacctggatggcacgcttccgggagacttcgggttcgacccgctggggctatcggacccggaggggaccggtgggttcatcgagccacggtggctggcctacggcgaggtgttcaacggccggacggcgatgatgggcgtcgtcggcatggtcgccccggagctcctcggcaagctgggcctcgtccccgccgagacggcgatcccgtggttccagaccggcgtgatcccccccgcgggcacctacacctactgggccgacccttacactctcttcgtcttcgagctcgccctcgtcggcttcgccgagcaccgccgcttccaggactggtacacgccgggctccatggggaagcagtacttcctcggcctcgagaagtacctcgccggctccggcgagccggcctaccccggcggcccgctcttcaacccgctcggcttcgggaccaagagcgaggcggagatgaaggagctcaagctcaaggagatcaagaatggcaggctcgccatgctcgccttcctcggcttctccgtccaggcgctcttcaccggggttggccccgtgcagaacctgcttgatcacctcgctgatcccgtccacaacaacatcctcaccagcctcaagttccattagagatgccatcaactacgtatttaattaattacgagtttttaattatgtatgtatgtacgtgcgtatgcgtatatgtgtgtacgtatgtatgtacgcaactttgtacgatcgatggtgcgtgtgatcgagaggggtatgtatgtacgtacgtatatacgatgtattattatgcatgggtgtagggtgtgggtgtaacatgtaaatttgtgctccaactgatttgcacgcatggtcgcatggatcgatttgct

SEQ ID NO: 8738 - DNA, 1163 bp, Oryza sativa; identical to SEQ ID NO: 3699
  ref <308>: DATABASE ACCESSION NUMBER: AK106086
  ref <309>: DATABASE ENTRY DATE: 2002-08-28

SEQ ID NO: 8739 - DNA, 1136 bp, Oryza sativa
  ref <308>: DATABASE ACCESSION NUMBER: AK106087
  ref <309>: DATABASE ENTRY DATE: 2002-08-28
acttgtcagacagcacaaaacatcgatccaaaagcacttctcggacagcaaatcgtctcgatcctgttattagtattcaggcgccatggcagctggaagctcccatgtttctgctgatgcaaggaagctggtgggcaaggtggcggtgatcaccggcggcgcgagcggcatcggcgcgtgcacggcgcggctgttcgtgaagcacggcgcccgcgtcgtggtcgccgacatccaggacgagctgggagctagcctcgtcgccgagctcggcccggacgcgtccagctacgtgcactgcgacgtcacgaacgagggcgacgtcgccgccgcggtcgaccacgccgtcgccaggttcgggaagctcgacgtcatgttcaacaacgccggcgtcagtggcccgccgtgcttcaggatgagcgagtgcaccaaggaggacttcgagcgcgtgctcgccgtgaacctggtcggcccgttcctgggcaccaagcacgcggcgcgggtgatggcgccggcgcgccgcggcagcatcatctcgacggcgagcctgtcgtcgtcggtgtccggcgcggcgtcgcacgcgtacacgacgtcgaagcacgcgctggtggggttcacggagaacgcggccggcgagctgggccggcacgggatccgcgtcaactgcgtttcgcccgccggggtcgccacgccgctggcgagggctgccatgggcatggacgacgaggcaatcgaggcgatcatggcgaactcggcgaacctgaagggcgcaggcgcactcaaggcggacgacatcgccgccgcggcgctgttcctcgccagcgacgacggccggtacgtgagcggccagaacctgcgcgtcgacggcggcttgtccgtcgtcaacagcagctttggtttcttcagggactgaaaatgatttgggaccagtcgtcagtcgatcgacaatactacattacgtcgttatatatggttgatgttatttgtgttgcattcttgaataaactagcatccatggttccccgcttgtttgcgaggacattccatcgctagctagattctgtcttgtatttgtatttgttggaagagtgaaatacatgcatgaacggtgcttaaactattcaggtttcctgaactct

SEQ ID NO: 8740 - DNA, 1126 bp, Oryza sativa
  ref <308>: DATABASE ACCESSION NUMBER: AK106088
  ref <309>: DATABASE ENTRY DATE: 2002-08-28
ccgtctccggcgccgccctcgcggcgctgctcgcctgctgcggctcggccgacggcgactccgacgggctcctcttcggcgtggctagccgcgcagccgcggctcccccgtccttctacgacgacgacgacgacgaccaggcccgcgcctcctcgggcccctccctctccatctccgtcgtggggcacgcctcggtcgcgcagccttcctccctcgccgatccgctcggccgcttcaccaggtcgtcctactcccccgacccctccgccgccatcggcttcttctcctcctcccgccgccgctcgccgctgcgcccctccatgcgcgaggccgccctcgcgcgctccctctcgaagaccctggtgctcgcccacccgctcgtcttcctcctcgtggcaccatcctcctccgccgctggcctctccgttcactcgttcgactaccgtgcgttcctcctcgttgactcccgccttgtgccggcctccctcagcgtcgtcaacgctgggcccggattcagggagcagtaccacgccttcgcgccggagtcgccgttgccgtcgctgccggagcagcctgtaaagcagggttacagcattggtgagcagaaggcgcttgatgggatggtagaagggttcgggctggagagggtaggggcaatggtgacctcggcctctgcgctgacctccgaaatggaggagatgtacagtgggatgctaaggaagctggaggggcttgctcggcaggttgagcggaccaacgaacgcgtgctcgatcaggaaaaacagaatacattgctcaggaaaaaggttgctggattgaaataaggacagtgatttgttctcagcaacaacaagtgtgcattggttataagaaaagttgggagctatgagccttgagtataatctcgagccgaagaagctgctttcagggctgacaatcctgttctcgctcctcgttgtaaacagattcgatggtagacaccaagaaagaaattgtggaaacatttgtgtaaatctaaaaagacgaggcgcacacgttatcgtttttgaaactgccatcttaatggctgaagtatactacactcctgtattatcttttgtggcattcagcgaatcaaattcgttcc

SEQ ID NO: 8741 - DNA, 1265 bp, Oryza sativa
  ref <308>: DATABASE ACCESSION NUMBER: AK106089
  ref <309>: DATABASE ENTRY DATE: 2002-08-28
ccacttgactagagcccgatcgagaggaacagaaagaagggaaataggagctatggtaagctgcagggtgtgtgtcaccggggccagcggctacatcgcgacctgcctcgtcaagaagctcttggaacgaggctgcatcgtccatggaacattgagaaatcttggagatgagaagaaggcggcgccgttgagagagctccccggcgcggcggagcggctggtgctgttcgaggcggacatgtacgacgccgacaccttcgagccggccatcgccggctgcgagttcgtcttcctcctcgccaccccgtttcagcatgaacccagcagcaagtacaagaacaccgccgaggcggccgtggacgcgatgcgcatcatcttgaagcaatgcgagcgatcaaagacggtgaagcgcgtcatccacactgcctccgtcaccgccgcctcgccgctccgggaggacggcggcgaggggtacaaggacttcatcaacgagtcctgctggactccactcggccagtctcacccatacagcagcgacatgtcggctataaatcaagtttacgcatcatccaaaacgctatccgaaaaggcgctgctgaggtacaacgagtccgagagcagggcgttcgaggtggtcaccctggcgtgcgcgctcgtcggcggcgacgccgacaccacccggctctaccacctgctcagcgtcccggcgatcgtggcgccgctcatcggccaggagtcttaccacggcggactcaagtacctgcaggcgctgctcggctccgtgccgctggcgcacatcgacgacgtctgcgacgcgcacgtcttctgcatggagcagccgtccatcgccggccgtttcctctgcgccgccgggtaccccaacatgaaggacttcgtcgaccacttctccgccaagtatccggagatcacgatcaagctccgagaggtggtaggggagggcgtgagggtgggagctgatacaaacaagctcacggatttggggttcagatacaagtatggggtggaggagacgctggaaggtagtgtggaatgcgccaagagaatgggattgctgtgatatgcggctgttgcgttgctcgttggtgtttagtaatttgcgtatgtgtagttggcaccgatttggacccagatgtgtttgtgcctttatgctaaaaaaaggttaattagatccataccattattattttgctagttttgaaaaataccattataatttatataattgaaaccatatcattgcagtt

SEQ ID NO: 8742 - DNA, 1715 bp, Oryza sativa
  ref <308>: DATABASE ACCESSION NUMBER: AK106090
  ref <309>: DATABASE ENTRY DATE: 2002-08-28
aaacactcgagctcacacctgctcgatcaaaatcctccaacaactcgatccattcgcagtagctgcgagctctgagcggcggcgaggtgtccgacatggcgtcggggcagaaggtggtgaagccgatggaggtgtcggtggaggccgggaacgccggggaggcggcgtggctggacgacgacgggcgggcgcggcggacgggcacgttctggacggcgagcgcgcacatcatcaccgccgtcatcggctccggcgtgctgtcgctggcgtgggcgatcgcgcagctgggctgggtggccggtcccgccgtgatgctcctcttcgccttcgtcatctactacacctccaccctcctcgccgagtgctaccgcaccggcgacccggccaccggcaagcgaaactacacctacatggacgccgtgcgcgccaacctcggcggcgccaaggtcaccttctgcggcgtcatccagtacgccaacctcgtcggcgtcgccatcggctacaccatcgcgtcgtccatcagcatgcgcgccatcaggagggccggctgcttccaccacaacggccatggtgacccgtgccgcagctccagcaacccttacatgatcctcttcggcgtcgtgcagatcgtcttctcgcagatcccggacttcgaccagatttggtggctgtccatcgtcgccgccgtcatgtccttcacctactccggcatcggcctctccctcggcatcgtccagacaatctccaatggcgggatccagggcagcctcaccggaatcagcatcggcgtcggcgtcagctcaacgcagaaggtgtggcgcagcctgcaggcattcggcgacatcgccttcgcatactccttctccaacatcctcatcgagatccaagacacgatcaaggcgccgccgccgtcggaggcgaaggtgatgaagagcgcgacgaggctgagcgtggcgacgaccacggtgttctacatgctgtgcgggtgcatgggctacgcggcgttcggcgacgcggcgcccgacaacctcctcacgggcttcggcttctacgagcccttctggctgctcgacgtcgccaacgtcgccatcgtcgtgcacctcgtcggcgcctaccaggtgttcgtccagccaatcttcgccttcgtcgagcgctgggcctcccgccggtggccggacagcgcgttcatcgccaaggagctccgcgtggggcccttcgcgctcagcctcttccgcctgacgtggcgctcggcgttcgtctgcctcaccacagtcgtcgccatgctcctccccttcttcggcaacgtggtgggtctcctcggcgccgtctccttctggccgctcaccgtctacttccccgtcgagatgtacatcgcgcagcgcggcgtgccacgtggcagcgcgaggtgggtctcgctcaagacgctcagcgcgtgctgcctcgtcgtctccatcgccgccgctgcgggctccattgctgacgtcatcgacgctctcaaggtgtacagaccgttcagcggatgattggaacgtgaggggcacgtgtgctcgttaaattatttcttactatctctgtaccaaaatatagcaaactagtataaataggacgaaattcgggtagttctcaggtacgaattcatcgtactaggaaatatctcacattgtattaagttgctatattttgggtcagcattagtacaatattacacaaagagg

SEQ ID NO: 8743 - DNA, 1020 bp, Oryza sativa; identical to SEQ ID NO: 2183
  ref <308>: DATABASE ACCESSION NUMBER: AK106091
  ref <309>: DATABASE ENTRY DATE: 2002-08-28

SEQ ID NO: 8744 - DNA, 1170 bp, Oryza sativa
  ref <308>: DATABASE ACCESSION NUMBER: AK106092
  ref <309>: DATABASE ENTRY DATE: 2002-08-28
agctctaagacggatcgatcgatgcagagcagcagcaggcaatggcatcagcaatggcgtcgtcccagtcccatctggatctggtacagctgctaatcgttgtggtgatgactatgacgatgctggtgggtggcggcgaggcgctgagcctggactactacgccaagagctgccccaaggcggaggcggcggtggcggcggcggtgaagcaggccatggccaaagaccgcacggtgccggccggcctgctccgcctgcatttccacgactgcttcgtcagggggtgcgacggttccgtgcttttggactcgtcggggaacatgtcggcggagaaggacggcccacccaacgcgtcgctgcacgccttctacgtcatcgacaacgccaaggccgccgtcgaagccctctgccccggcgtcgtctcctgcgctgacatcctcgcgctggccgccagggacgcagtcgccatgtccggtggtccttcttggcaagtgccggtgggtcgtcgtgacgggcgcgtgtcgctggcgagcgagacgacgacggcgctaccggggccgacggcgagcttcgaccagctgaagcaggcgttccacgggcgcgggatgtcgaccaaggacctggtggtgctgtcggggggtcacacgcttggcttcgcacactgctcctccttccagaaccgcatccagccgcagggcgtcgaccccgcgcttcacccctccttcgccgccaccctccgccgctcctgcccacccaacaacaccgccaggtctgccggctcctccctcgaccccacctcctccgccttcgacaacttctactatcggatgctgctctccggccgtggccttctctcctccgacgaggcgctgctcacccaccccaagacgcgcgcccaggtcacgctctacgccgcgtcgcagcccgccttcttccgtgacttcgtcgactccatgctacggatgagctccctcaacaacgtcgccggcgaggtccgagccaactgcaggcgcgtcaactagctagctatttccactagcatcatatcgatcacactatcttatcttatccaccacaccatccctgcactgcatgtatggcctcaactcaactcaacttatgtacaacaacaatataacgtcgaatggctatagcatcttttaatttgtt

SEQ ID NO: 8745 - DNA, 1070 bp, Oryza sativa
  ref <308>: DATABASE ACCESSION NUMBER: AK106093
  ref <309>: DATABASE ENTRY DATE: 2002-08-28
atttccctccctctccccctcttccgccccaacctccaacctcacctcgtcgtcgccacggcctccctcgcgagttcgccgtggaacacccgatgggctccggcgaggacaccggcgcgggcgtcgcgggaggagggggaggcggaggcgccggtggggtggtgcggggcgcggtgctgaaggcgctcgtggtcgtcggcggcgtgctgctgctccggcggctgcgccgctccaccacccggtgggaccacgcccgcgccgtcgtggacgcgctctccggtgagaagttctcgagggagcaggcgaggaaggatcctgataactactttaatttgaggatgcttacatgccctgcaacagagatggtggatggttctagagtgctttactttgagcaagcattttggagaagtccagaaaaacctttccgacaaagattctacatggtaaagccatgcccaaaggatatgaaatgtgatgttgagttgagttcatatgcaattagagatgttgaagagtacaagaatttctgtgaccgtccaaaggatcagaggccacaaccagaagaagtcattgcggacattgcagagcacctgactaccatacacttgtcgcggtgtgagcgtggaaagcgctgcttgtacaaaggatcaacccctcctgaaggctttcccaacagctggagcggtgcgacatattgtacatcggatttgtccattcacaagaatggtgaggtgcatatctgggacaagggttttgacgatgatgggaatcaggtttggggaaccaaagctggcccttacgagttcaagcctgcccccaagtcgaattacgacgacatgttctcgccgttgaatttttctgctccattgacgctggagaagaagattgagagctcgttcgcaatcgatgatcagtagtatattagtatgtacatacagttcatgtacctctctctctttttttttaatttaagaaaactaagcagaaaaaactgccttcgtttagtatatagccccgtgtactgaattttgttgctaagaaatgcaataaaaagtagcgttgcatgt

SEQ ID NO: 8746 - DNA, 1389 bp, Oryza sativa
  ref <308>: DATABASE ACCESSION NUMBER: AK106094
  ref <309>: DATABASE ENTRY DATE: 2002-08-28
gtgctcagtttcactcttatcagtgaattagatcatatacttgtgtccttgacagctcgttaattagcatggctaggtctctcgctgctctccttctccttctggtgagcagacacacatatatatcgctctttgtatggtttagttgttttgagctagaagcctagaacagagataagttgggagagagatatatattatttagagattgaagattaagttaaaattacgtaccctaacctttttttttgcggggaaccctagctaaaattttaaactaactggatcaacatgtttaccttaagatggttgatggatcaacatatggagttcattgaatttctgatgagaacgtaatacaattagtcgcagccgcgggagccagccatgccgcgtcgccggcggagatgtactggaagatcgcgctcccgacctcgccgatgcccggcgccattcgcgacctcatcagcccggcgagctcagcggcctcagcttcgaaggataaggaggatacggtgggctccgtgttcttcctcgagaaggacctcttcccgggctccaagatgacgctccacttcacccgcgccaccgccggcgccgcgctgctccctcgcggccgcgccgactccgtcccgttcgcctccgaaaagctcccggagatcctctcccagctctccatccccgccggctcgccgaccgccgacgccatgcggtccacgctcgccgtgtgcgaggccgcgcggatcgccagcgagacggcgcccaagcacaagcactactgcgccacgtcgctcgagtccatggtcgagctcgtcgcctccagcctcggcacccgcgacgtccacgccgtgtccacggaggtggtcaacagggccgggccgacgccgaggcaggcgtacagggtggaggccgtgaggcccgtgccggtgcccgggggcgacatggtggcatgccacaggatgccctacgcgtacgccgtgttcggggtgcacgggatcaagggcgcggcgtacacggtgacgctggccggcgccgacgggaccatggcggaggcggtggcggcgtgccacggggacgtggacgggcacggcgtggcggtggcggaggcgtacaagaggctcggcgtggcgcccgggaaggtggcagtctgccacttcctgcctcaggacgacatgctctgggtgcgcaactgaatgaagcagctacctgcgcgccatccatggctaattaagctccttcctatattttcgatctacctgccggctggctatcatgttatcatcgcgtgtgtgtgcgcgccgatccgacatgcccacactacacgtcgacactacacgtgttttattttgttaattaataagtctggacaaccaggtcatcttgtacggc

SEQ ID NO: 8747 - DNA, 1628 bp, Oryza sativa; identical to SEQ ID NO: 3119
  ref <308>: DATABASE ACCESSION NUMBER: AK106095
  ref <309>: DATABASE ENTRY DATE: 2002-08-28

SEQ ID NO: 8748 - DNA, 1575 bp, Oryza sativa
  ref <308>: DATABASE ACCESSION NUMBER: AK106096
  ref <309>: DATABASE ENTRY DATE: 2002-08-28
aactcgaagcatctcgcctcgccgccgccgccgccgcacgcccgacggaagcgagcgcctctctctctctctctcaccggcgacgggatcgacggcggcgggggcggggatggtgggctggctgaaggcgctgtgctacggcgcggggggcatggcggtggtggggctcgcggcgctcgtggcgctgcaggagcgcctcgtctacgtgcccgtgctcccggggatcgcgcgggcgtaccccatcacccccgaccgcctccgcctcatctacgaggacgtctggctccgcgccgccgacggcgtccgcctccactcctggttcatccgccactcccccacctgccgaggtccaactattctgttcttccaagaaaatgctggcaatattgcacatcgtttggactttgttcgactaatgatgcaacgactacagtgcaatgtatttatgctttcttacagagggtatggtgagagtgatggttatccttctcagaagggcatcataaatgatgcacaggctgcacttgatcatctagttcagaggaaggatattgacacatccaggatagttgtttttgggagatcgttaggaggtgctgttggagcagtgcttgcgaaaaacaatcctggcaaggtgtcagctctaatactggaaaacacctttacatctatattggatatggctggtatcatgctacccttcttacgatggttcataggtggcagttcttcaaaaggtccaaaacttctgaactgtgttgttcgctccccatggagtacacttgatatcattgcagaggtcaaacaacccattattttcctttctggattacaagatgaattagttcccccttcacacatgaggttactatatgaaaaagcttttgagcataataagaattgtagatttgttgattttcccaatggcatgcatatggatacctggaattctggaggagaccgttactggaggacaatccaactgtttctggaccaatatgctccagaagtacagagttgtaataccagctgcaaaagtgaaattgctaatgatgatgaagctgaagagtgaccagaacatctggagcggccttctttttttttttcttccaggctccagttttctggtgtgatgcgatttaaatcctgatgaactgaagctcactgcaaacaattaattcaggcaattattctccattcaacctgaagaaggcaaagttgtgaataccttgaggttgctctccatcctagcactacatttgtctctggagctatatatagatttctgagaagacctagcctttgaactgatgattccccctcccccccttgatttaatctgtgatgttgctttgttgaagttttttacaatatactgtagcgcattaccatgtcataatctggcctcggtgtataacagtgtaatgcataggtttttaggctctggttcagcaatttggttttgtgttttttattattggtgttatagatctggttgcctgcttcttaagcctgttataccaaaactgttgcaatatcaataggccatgtcttcaccggcagtaattttttagc

SEQ ID NO: 8749 - DNA, 1167 bp, Oryza sativa
  ref <308>: DATABASE ACCESSION NUMBER: AK106097
  ref <309>: DATABASE ENTRY DATE: 2002-08-28
gtgctcagtttcactcttatcagtgaattagatcatatacttgtgtccttgacagctcgttaattagcatggctaggtctctcgctgctctccttctccttctggtcgcagccgcgggagccagccatgccgcgtcgccggcggagatgtactggaagatcgcgctcccgacctcgccgatgcccggcgccattcgcgacctcatcagcccggcgagctcagcggcctcagcttcgaaggataaggaggatacggtgggctccgtgttcttcctcgagaaggacctcttcccgggctccaagatgacgctccacttcacccgcgccaccgccggcgccgcgctgctccctcgcggccgcgccgactccgtcccgttcgcctccgaaaagctcccggagatcctctcccagctctccatccccgccggctcgccgaccgccgacgccatgcggtccacgctcgccgtgtgcgaggccgcgcggatcgccagcgagacggcgcccaagcacaagcactactgcgccacgtcgctcgagtccatggtcgagctcgtcgcctccagcctcggcacccgcgacgtccacgccgtgtccacggaggtggtcaacagggccgggccgacgccgaggcaggcgtacagggtggaggccgtgaggcccgtgccggtgcccgggggcgacatggtggcatgccacaggatgccctacgcgtacgccgtgttcggggtgcacgggatcaagggcgcggcgtacacggtgacgctggccggcgccgacgggaccatggcggaggcggtggcggcgtgccacggggacgtggacgggcacggcgtggcggtggcggaggcgtacaagaggctcggcgtggcgcccgggaaggtggcagtctgccacttcctgcctcaggacgacatgctctgggtgcgcaactgaatgaagcagctacctgcgcgccatccatggctaattaagctccttcctatattttcgatctacctgccggctggctatcatgttatcatcgcgtgtgtgtgcgcgccgatccgacatgcccacactacacgtcgacactacacgtgttttattttgttaattaataagtctggacaaccaggtcatcttgtacggcacttctcccctctgtcccgaaataaaccaacttataaag

SEQ ID NO: 8750 - DNA, 1333 bp, Oryza sativa
  ref <308>: DATABASE ACCESSION NUMBER: AK106098
  ref <309>: DATABASE ENTRY DATE: 2002-08-28
acgcaaacctctcccctcttcggcacttcccttccccaccttcctcctctcccaccgctctctctctctctctctctctctctctctcagtctctctcccccccaagaagaaatccattcctctctcacgcgcctccgcgtcgccgcattcggggacgcccaccgccgccggatccggccagccttcccccctcccctcctttccccggccgctcccctcctcggtaagatccggcgccggttccatgtcgagcaccggcgagcagtcgcaggcgaaggcggaggccgaggaggcggtggagctcgtgctgttccaggtcgctgagtgctacgtctacctgatacctcccaggaagacagccgcctcctacagggctgatgaatggaacgtcaacaagtgggcttgggaagggactctcaaggttgtcagcaaaggagaagagtgcatcatcaaactggaagataagaacacaggggagctgtacgctagggcattcctcagagaagacgaaccacatccggtggaacctgttattgatagcagcagatattttgtactccgtgttgaagagaatatagatggacgtcagcgccatgcctttattggtttaggcttccgtgaaagacctcaagcatatgatttccaagctgctctgcacgaccatatgaaatatctaaacaagaaaaagactgctgaagagatggtacaacactatgagaaatcatcatcagtggattacagcctcaaagaaggggaaactttggttttgcagctaaaaaataaagagtccggcgcaaagataaaatctgcattttttgagcaaggcctcaacaagctctcatttaacgaaaaagccaactccaaggaggccccagtttccctcaagctccctccacctccgccatcaccggtctctcctacagattctggcatcgcggcttctccgttcaaagcggagtttccttcccaagaccaaccagctgctgatactggagctgataccactcctttcaaagcagaatttccttcttctcatgaacaaccagccgcggataacgtcgcttcttccccaccaccgaaagcagaagctgctcctcaggagcaaccaactgcagcagagaaggcccctcaagagagcgtggacgacgacttcggagactttcaggcagctgggtgaatcatgtatcttgtacataccacatgttactcaaattgctcctttgattttccatgttccatcagttgtgacttctgccggcacatgagttgctgtacagtacagagagctagtaactatcttgttataatctataaaagaacagatggatacac

SEQ ID NO: 8751 - DNA, 1513 bp, Oryza sativa; identical to SEQ ID NO: 3105
  ref <308>: DATABASE ACCESSION NUMBER: AK106099
  ref <309>: DATABASE ENTRY DATE: 2002-08-28

SEQ ID NO: 8752 - DNA, 976 bp, Oryza sativa
  ref <308>: DATABASE ACCESSION NUMBER: AK106100
  ref <309>: DATABASE ENTRY DATE: 2002-08-28
ctccccagatccgaagcgagaagcctcttttggatctatccattcgggtcaccgtggcagttcggtaattttggcggagaggaggaggaggacgacgacgacgacgacgtgatgggtctcctcgacaagctgtgggacgacaccgtcgcggggccccgccccgacaccggcctcggccgcctccgcaagcacgccgccgcccgccccgccgccgtcaagatcaacgacccgacaggggacgcggcgatggtggccgtcccgccgacgacgccggccggggcggaggaggcgccggtgaaggtgacgcgcagcatcatgatcaagcgccccgcggggtacccggcgtcgccgaggagcgcggccagcacgccgccggcctcccccgccggatccacccctcccatctcgccgttcgccggcgccggtggtcgcttcagaaggaaatcatcgtccgacgcatatgagagggcaacacctgggacaaccagtcaccctcctccctttgaagtgtgagcccccagcgtgctcacgctcgtttttgctcctaggccagcgtctactgcacacacaaggcagaggaggaggagagacatatcagagaccgaagcggatggaagtcgagtgttgtctacctatcttacctctactactgtgatataacgtagatgctactagtaattaagtacgcctgctgctgctcgccgtctactatgttgagtcgtgtatggtttgtgtagtaaggttgtcgtctgctgtgtcatatatgtacatatgtttgctctgggctgcgatggagcttgctgcagtctgcagccaagcccgcagttcatcgctgcgtcgtgttttcgcgtccttttaagccctctgcaactatgtcaaatggatgggcatgtggaggatggtggaatgagctttcaggctgtgatgctaaagatggaagcactgatggctggtgtgtgattttgcttgatgtatt

SEQ ID NO: 8753 - DNA, 2091 bp, Oryza sativa
  ref <308>: DATABASE ACCESSION NUMBER: AK106101
  ref <309>: DATABASE ENTRY DATE: 2002-08-28
actcgcgccgccgcttccgccgccgctccgctccagtcgcgtcggcttcccgcctcctcgccggcgagccgtgcctcgacgctctccctctgttgctccgccggccagcagcatgccgcgcttctgctcccactagctcccgccaccgccgcccctactgagcccggtgagaccgtgaggcggtggtgtgcaccagtccggcagttcgcccccctcctcctcccaatccggccgccgcttcatcaccgccggcgaggctccgcgtctcctcctaggtcgcgctgcttcgtatcacagagagaggccagctcggtctccggataagcaagaaccatggcgtctgctgctgccgcttacggcgtcggggctccactcaagctcgctgcaaggcggcatggggcactcgcgctggccggtagccatcgctgcagtggatggaagtcttcagtgtcttgccctgttcctcaggcttggatgggcagttgctcttctgtcgcaatgcgccgtgtcgcctccggttctcgattgattgttcaggcttcaaacagcgggggctcaagcttgaaggcatcattggctgatgctagcctgcttactgaagagaggataactgttttggtgattggaggtggaggaagggagcacgctctctgttacgccttgaatcgctctccgtcttgtgatgcggtcctatgtgcccctgggaacgcaggtattgctcagtctggagatgcgacctgtatatcggacttagacgtctccgatagcgatgccgttatcgcgttctgctgcaagaggggagtgggaatggttgtagtaggtcctgaagctcctcttgttgccggtcttgtgaatgaccttgtgaaagctgagataccagcatttggtccttcctcagaagctgcggctttagaaggatcgaaggactttatgaagaaattatgcgataagtacaatattcctacagctaagtatcgcacattcacagatcctgcagaagctaaacaatatgtcaaagatcaaggcgcccctattgttgtcaaagctgatggattggcagctggaaaaggcgtggttgttgctatgactttggatgaggcatttgaagccatagactctatgctggttcaagggtcatttggttctgctggttcacgggttatcattgaagaatatctggagggtgaagaagcctctttctttgcattagtggatggtgaaaatgcattgccacttgaatcggcacaagatcacaaaagggttggtgatggtgatgtaggcccaaatactggtggtatgggtgcatattcccctgcaccaatagtgacagaagagcttaagcacacaattatggatagtataataatcccaacagttcaaggtatggcagctgaaggatgcaagtttgttggtgtattatatgctggacttatgattgagaagaaatctggtctgcctaagcttatcgagtacaacgtacgattcggtgacccagaatgccaggttcttatgatgcgattagaatccgatctagcacaggttctgatgtctgcgtgcagaggggaactgggcgatgtttcactaacctggtcacctgaaatggcaatggtggttgtgatggcaagcgaaggataccccggatcttataagaaggggactgtaataagaaatctcgagaaggccgagcaggtctcgcccgcggtaaaaatattccatgctggaacagcactggatggggatggaaatcttgtcgctgtcggaggccgggtgctcgggatcacggctaagggcaaagacattgaggaagcacgggcaagagcatatgatgcagtagatgttgttgactggcctgaaggattcttcaggcgcgatattggttggagagcactgaagcacaagcaagtggccaattactgatgcggattttcctgagcacaccacaactatggtgagcatgtaatgttaagagcaataaagagaaaatttgtcacttctgtggttgaggaaaggcaaaaccatagctcaaatttgagtttttttttttgtaccaactgttaaatttgagttgggcttgcattttgaggaacagcc

SEQ ID NO: 8754 - DNA, 1056 bp, Oryza sativa
  ref <308>: DATABASE ACCESSION NUMBER: AK106102
  ref <309>: DATABASE ENTRY DATE: 2002-08-28
acttcatctcgcatcgcgttcgccgccgctcggatccccttcccacgcgtccctcctcctcccttcgtccaccatccacaaccccctcggatccccttccgcctccccctccgctcctcccgccgccagcccgtcgcagctgcagcccgtcaggcgtccctgacgagtggggcgactgctcgccctccgcgcccgagccgccctcccagcccgaccccccaatcgacgacgacgagtggggccgggacgacccctcgtcctccggcaccgggtggggcgagccgggtgtgtccgaaccccaatccacctccgccgccgacgacgagtagggtggggaactggggatccggcgccaccgccaccaccacctcctgccaccggcggggatggaccgtggtgggggtgggggtgatgcctccgtggcggcgctgctgctgccgtcggcgccgatggcgtacgcggtggtgactgacccggggacggtcgacacccctgacatgcccagctaccagccatacgtgtacggccgcctcgaccccctgcgctgatcccgctccagatgaaggaggtcgacctgtccgtcgactgcgcgctcggcgaggccgccgtcatccgtccgcgcgcggtggtggctgcacttcatcacccgcagccgcgactgtgacgtccgcgtcgtcgtgcccatgggcgaccagccttctaagacaattatgtcaggaccaactaattttcctccctctggccattttgtgaagacctaatgttgtggcaccacagcaggccatagtttgaatctaaagtgctgcagttaaatatctacagaatgttgcacatcatgaaaatcagggtatgcttctcattcaggccatagcttgaatctaaagtgtatgcagttaattcagaatgttacccaaggttgaagcaccacagaacacggactgttggaagacaattttcttgtacatgtgtttgatgaattgtaactgaacacatttaattttcctatggaccatttgtatatttctaaatccgatttgaatgaatttgttggtactg

SEQ ID NO: 8755 - DNA, 1039 bp, Oryza sativa
  ref <308>: DATABASE ACCESSION NUMBER: AK106103
  ref <309>: DATABASE ENTRY DATE: 2002-08-28
ctctctcctccctcgcttgctgcagcgagcggctgcacccagcgggcaaggcacgacggcagcgtgccctctctctcctccctccacttactgcagtgagcggcggcggccggtcggcatggcgtgagagcggcgcgccctctctctcctccctccccatcctgcagtgagcagcggtggctgcccagcaaggtgcgcacagtggcacagcctctctcttttccctcccattgctgcagcgagcgccggcggccggccggcaaggcgtgcacggcggcacaccctctctctccttcctcccctagctgcagcgagcagtggaggcggaggtcggagattggtggcgagcggcgtcgagcacagctgggtggctccggccggtggcgagcgtggcaatggggagggcgaaccagaggaaaccggcgaggagcctcaacgccgccattgcctcggcctccgcctccgcttcggccgcagctgtggcaaccgacatcccgcctccactttctacaccaccgcacgtcgctcggctccgcgtgtcgaccgccgtcgccgctcgacctgtgccggcccccgcgcgtcatcatgcacgccgaccgccggcgccgctcgacctggacccgcgcttgcccccacgtgagagagagagagagagagagggaagagggggataggagaaagaggaggctcgtagccgctggcgcgccactcgtcctcgacggcgccacccttgcctccacggtcgccgatctttgcagtcagcctctgccggctcagggtgatctcataatcaactgcgacaaagggaataggcaaagtgaggagggtgtcccccagtagtgtgtcggtgttgtacttgttaaacagatagatagttcggataggaacatatctgttgataagataagatagagtttagtttgtttcttgtttttctgttgtgaagatgtaatctgtaaactcctatgtacacgccacgccaggggctgtttctggctatataacacggaccgtggaaccgagagaggcaatccacgtt

SEQ ID NO: 8756 - DNA, 1300 bp, Oryza sativa
  ref <308>: DATABASE ACCESSION NUMBER: AK106104
  ref <309>: DATABASE ENTRY DATE: 2002-08-28
agcaaaaaaaacattccagacctcatcccattttcttccgtacacgctttcacttcctcccaatccacccatggactcgccgccgccgccgtctctcccgccggcgagcccgctccccctcccgccgtggcggcccgatccgtcgccggccgtcctcccctggccggacctcctcgccggcgcggccgccgccacccgccgcctcatcgccgcccactcccgccacttcctcgccctctcgtccctcctcctcctcccgctctccctcctcctcctctccctcccggctcccttcctcccgcccgtctccccctccgtctcgctccgctctactacgacgccgcagccggcgctccccctcccgctcctcgccctggttgccgccgccgcgctcctttacctcgccgccttcgccgccgccgccgccagcgcgcacgcggggttcttcggccgccccgtcaagctgctcgcctcgctgctctccgtgcccgcgtccctcctccgcctcctcctgacggcgctccccgcagcgccgctgctgcttctcccgctcctcccgctcccgttcccgcttaccgccgccctcgccgttcttggcctcctcctgttagtcccattctggtctctcgccggcgccgccgccgtcgtcgagtccagcgcctgtgtgtccccgctgcggcagagctgccggctgctcaatggcgcgcgcctcgccgcgctctctgcgttcttggtgttcggcgccgggataggggtcacgctatggggatttggtggggtggccgcggagacctatgatgccagtgctgggtgggccggcatggcgccggtggtggtgaaggcggtggtcggaacggcggtgctggtggttctgatgctttatggaatggtgatcaacgttgtgctctatatgcattgccgcgcgcttcacggggagctcacgggggagatctacaacgaattcgccaactcgtatgtcttcctgccctttgacgagggcaaggatcggcatgtagtgtcagtggtcacggtgtggccatgattgactatcgccgcggtggtgagtttgcgaatccaaagaacagttttgaccacatcatgtataactgtgtgcgcatctctgttcttctgttcataggtgtctcttcaattgtgcaaacgtttggatcaaatactcttctattagccttaggcctttacagccttagccctggaatatataattttgttcaggtaacgtatctttcatatgtacaatattgtttcaatatgcactgaataataaaatagttcttgtgct

SEQ ID NO: 8757 - DNA, 1562 bp, Oryza sativa
  ref <308>: DATABASE ACCESSION NUMBER: AK106105
  ref <309>: DATABASE ENTRY DATE: 2002-08-28
gttgctttactacacgacacgacgcgcattaccagctcagctcggctcaggtcctccaacaacaaaacaaactactctgggctgggcttctcccgatcgatatcccccgttcgtccgtccgctctcctccttcccaaccggcaatccgccgatccgtccgacctctagcttgtacgctgccgctgccgccatgagctggtggtgggcgggcgccataggcgcagtgaagaagcggcaggaagagaacgcggcggccaccgagccgtccttccagagcgtcgccctcgtcgtcggctccacgggcatcgtcggcacctccctcctcgacatcctcccgctccaggacaccccgggcgggccctggaaggtctacgccgtctcccgccgcccgctccctccctggtccccgccggcctcccccgccgtcacccacctccacctcgacctcgccgactccgccgccgttgccgaggtcctcacgcccctcaccgacatcacccacgtcttctacgtcgcctggtccgcccaccccacggaggcccagaaccgcgaggtgaactccgccatgctccgcaacatcctctccgtcgtcgtccccaactgccccgctctcgtccacgtctgcctccagaccggccgcaagcactacatcggaccattcgaggtcatcggcaagatcgccgccccggacccgcccttcaccgaggacatgctccgcctcgattgccccaacttctactacgacctggaggacgtcctcttcaacgaggtctcccgccgcgacggcgccgtcagctggtccgtgcaccgccccaccgtcgtcttcggattctctccccgaagcgccatgaatgtcgtcggcagcctgtgcgtttatgccgccatctgccgcaaggagggcgctgtgctgcgatggcctggatccagggtcgcctgggagggattcagtgacgcgtccgatgcggatctcatcgctgaacacgagatctgggccgccgttgagccattcgccaagaatgaggcatttaattgcagcaacggggatctctacaagtggaaacttctctggccgatgctggcagaccaattcggcgtcgaatggtctggctacgagggagaagagagcagcttcaagcttgcagatgccatgtcggggaaggaggcagtgtgggcagagattgtcaaagagaatgatctcatggacaccgagcttgaagagatcaccaattggtggtttgttgatgccgtgttcggcgtccgcagcgagcatttggatagcatgaacaagagcaaggaacatggattccttggcttccggaacacggtgaattccttcaacacatggatagaaaagatgaaggttttcaagattgtcccatgatgcgttcaattgttttttatattattgcacatcttgttttctatgccattcatccaaattgctcccgaatttagttccattataaacattgctttcaaggttacatgttgtaaaatgctgtattctacaaaaaactagaaccgaataaaattaatcaagtggagaatgaattttatggatc

SEQ ID NO: 8758 - DNA, 1876 bp, Oryza sativa
  ref <308>: DATABASE ACCESSION NUMBER: AK106106
  ref <309>: DATABASE ENTRY DATE: 2002-08-28
aactaacgctaaaaaagtaacagtttctgtactttattgacgacccttcgccgtcgccactgtgcattgtgagaagttgcgccatacatacactttgccttccctcgttttaccccccatttctctgcctcggatggaatcgataaaatctcctccgctcagttcgaagcacattggttcggtccttgacgacccctcgagcctcctgaacgtgctgcagcttctcgacgcccgcatccgtgagctaaagcgggagatcgaattcaaagacgtgaaggacgacggacaaacgacgtcccaccgcgccgagagcccgccgcatacggctccacttgacgctttcgacgacgaccctgacttctcggacctcccccgccacgaccaccacgcccttcgaagctcctaccgtgccgtgtcggatagcgctgccccgggtgaatctgagcagctcgacagctatgatcgagtgggtgacaccctcgcagatgccgataaggctggcgtaaaaattcaggacgaagaacccggtctgacgtctccgcgcccgccgacgacaggaacggcgcgctacccgcctcacatttttgtccttgtggggctgccggcacgagggaagtcgtacgtgtcgcgccgcatcacacggtactggcggtggaggggcgtgccgtgtcagactttccactacgctgccacgcgccgccgcttgttcggccccttcgaccgcactaaggagagccgcaccgaagagttggaaagcacatcacgcgccatcgcggctgaagctgtcaagttcgccaacgaggccggcggcatcgcggttattgacggcacaaacaccacaagccagcgtcgcaagcttctcctcgacatgctggtcgaggagggaatggccacctcgcgagtcatcttcattgagattgtgcgagacgacccaggcattattcaagcgaatgttgcgcggagctacgaagcgaaggttgcgagcggtgcgctcgagaactcgcctgaagcgcgtgcgcgatacatcgatgaatacaacagtgtgatcaaacagtacgagcggcacgcgacgagtctttgcgaagtccatgaccccgacatgagtttcattcgcatcaagaaccatttccacgtcacgctgcaccgcatcgaaggcgtcatcgccacgcggctcgtcagcctcctccacaacatgtggtttgaaccgcacgtactctacttgacgcgttgcggcgagtgggacgacctcgttgaggggcgcctcggggggaactccaagctcactgccaacggcgaggccttcgcgacggcgctcgccaactacattgagtcggagcgcaaaaagcgaaatgactctacgccgctgcttgtcatgtcgtcggcacaactgcgcgcgcgacaaacttgcgctaagctggctggccttcccaacgttgcgatccgctacttgcccacgttggacgatctcaactacggcgactgcgacgggcaaacgctcaacgaagtgatgctcacgctgccgaacacactccgaacactgctcgaacacccatacaagaacgcatggccgaacggggaatcgatcgaacagctcttcgaatcacgactggaacaacacatccttgaattgcaggcaactgaccgtgacgtgttagttgtcgcccatgagcacatcatccaaggcttgcggctcttctttgacgactcgctggatcaaaatccggaggaagcgttgaagatcaagattccgttgcaccatgtgttcaagcttgctccgtcagggtcgacgcgcaaactcgaggtgatcgagctgatgaacgtgcagccgcagcattagcggcgcctattcaaaacgagaccgaatcggtcgacagac

SEQ ID NO: 8759 - DNA, 1141 bp, Oryza sativa
  ref <308>: DATABASE ACCESSION NUMBER: AK106107
  ref <309>: DATABASE ENTRY DATE: 2002-08-28
cctaagcctctcacggttcgggttctccctcacacactgaacaccatggcggcggcggcggcggctccggctctatccttggccgaggcggcgccggtgacagcagttctggcaccgtgtcccacgccctcgaggacgttccgccgccgcagctgggtcgcggctatctgccggcccgccctgaaatgccaccacagtcgtcccctgaccgccgtggtcgccgcggctgcggctgccgctgcggcgggggactcgacgtcggccggcgtattccacggcgagtgcttcgtcgtgggggataacatcgacaccgaccagatcatcccggccgagcacctgaccctggtcccgtccaagcccgacgagtaccgcaagctcggctcgttcgccttcgtcggcctccccaccgcggcctacccgacgccgttcgtcgcccccggcgaggagaccacccgctacgccgtcatcatcggcggcgccaacttcggctgcggctcctcccgcgagcacgcgcccgtcgccctgggcgccgccggcgcccgcgccgtcgtggccgagggctacgcgcgcatcttcttccgcaactccgtggccaccggtgaggtctacccgttggagctagcggacactggagcctggaaggagtgcaagaccggggatgtggtcacggtggaacttgataattgcgtcatgatcaaccacacatccggcaagcagtacaagctgaagcctatcggcgatgccgggccggttattgaggcaggcgggatctttgcctatgcccggaagaccggaatgatcgcatccaagtctgcgtgagggaaaggcgagtttggtctgctgtcaagatagtcgaggcctctgcagatagcaagtaagactgggttgtggatttgaacctattgcacctctatgcgattgtccatcagttgtactgctgtttttacctaggttgtgtgtcatcagtggtgtttttggaataagttaaaagttacagagtactgaactatgatgtattagtccatgtgatcttatgtaacaccttatgtaatacactcgtttatacctgccgatttgcctatctcgtttcgataatattgtttcttataccaaagaaattatcattatataatggcaattc

SEQ ID NO: 8760 - DNA, 1379 bp, Oryza sativa
  ref <308>: DATABASE ACCESSION NUMBER: AK106108
  ref <309>: DATABASE ENTRY DATE: 2002-08-28
gtgccgctccaggggcaggggcgacacgggcggcgaccaccgccgccttcctccctcctccacctcgccgccgcccgagcagaccgccggaaaccgcgtggctgcgaggaaggcggcggcggggccttccttctccctcgagggcgcgggtcggtgcccacgaccccgaccagttgggggcggcgacggtgcggcggcatcggcgtcggcgtcagggcgttgggctgggcgcgcggaggcgacagggtgcggaacagctgggcggaggcggcttggtgcggaacggcggcggcggcgccggatttggcgtccctcgccagatccggcggtccggtctcctcccgggacgatggtggcacccaaggaggcggggaagggagatgcaggcggcgggaaaggtggagcagcggcaacgcgcgtcgcctctccagatccgggctgggggagtggtcggcgccgaggaggtgcggagaccggcaggcagaggcagcgtcacggtggtcaggcgacaacagcggcggctcgctcccgccgtggtcgcggcgccgccgtcggtgtctgtcaagcgttggtgttggcttcggtaatgctgcggcggcgcgctctagctggtcatcccctgtacctggctggatctggccgtccgcggccggatccatcgcctccacgccgaatggcagctggtcggcgggacggctgcgtgtggacggcaagcgcggcggcggctcgctggcggccagcctcctgctcggcagggggcttctgccggtggtgggtcttgtcgttgttgatgggcggcgatgtgcggatgtggaaatggcaggacgacggcttgtgctggcgtgaagcaggaatggggcttgatgtccgtgacggtgacttcctcattgtcggccgagtgttctccctctcttcggtttccccccttggccggacccttttctagtcatggggaatgctagggggagggcggaggctccggcttgctgtagaagtttgtggcggatagatggcgtttcgagggtggccaagggcccgtcttgccattggttacaatcaaggtatgattgcttctaagacgtcatgaactattctgcggccatcgatgtgggggtgcttgtatgggtgatgtgaagatgctggcgaaagccttgccgtgcttttggcgggttcgacaacgacggcgcccgtgggtgtcgtttccctccttggaggcgttgtcatggcactctttcatatcctcacaaatctctccaggtgaaaaccttgttccgattttcggacgagtggcggcggcgtcacgcgtcgtatcctccttgggggcgtcgcttcggagaagttccaatgcatcgatgactattgatggtccttttcggttc

SEQ ID NO: 8761 - DNA, 1270 bp, Oryza sativa; identical to SEQ ID NO: 3250
  ref <308>: DATABASE ACCESSION NUMBER: AK106109
  ref <309>: DATABASE ENTRY DATE: 2002-08-28

SEQ ID NO: 8762 - DNA, 1708 bp, Oryza sativa
  ref <308>: DATABASE ACCESSION NUMBER: AK106110
  ref <309>: DATABASE ENTRY DATE: 2002-08-28
atcgccattaacccattaccacctccacctcgcgcactcagtctgtactacctgtacgtacgtggccgccgctagctaagctaggaattgaaatggggatggagaggccgcaagagaaggtggccaccaccaccaccgccgccttcaacctcgccgagtccggctacgccgaccgccccgacctcgacgacgacggccgcgagaagcgcacagggacgctggtgacggcgagcgcgcacataataacggcggtgatcggctccggcgtgctgtcgctggcgtgggcgatagcgcagctggggtgggtgatcgggccggccgtgctggtggcgttctcggtcataacctggttctgctccagcctcctcgccgactgctaccgatctcccgaccccgtccatggcaagcgcaactacacctacggccaagccgtcagggccaacctaggtgtggccaagtacaggctctgctcggtggcacagtacgtcaatctcgtcggcgtcaccattggctacaccatcactacggccatcagcatgggtgcgatcaaacggtccaactggttccatcgcaacggccacgacgcagcctgcttggcatctgacacgaccaacatgatcatatttgctggcatccaaatcctcctctcgcagctgccgaattttcacaaaatttggtggctctccattgtcgctgctgtcatgtcactggcctactcaaccattggccttggcctctccattgcaaaaattgcaggtggggcccaccccgaggcaaccctcacaggggtgactgttggagtggatgtgtctgcaagtgagaaaatctggagaacttttcagtcacttggtgacattgcctttgcatactcctactccaatgtcctcatagaaattcaggacacgctgcggtcgagcccggcggagaacgaggtgatgaagaaggcgtcgttcatcggagtctcgacgacgacgacgttctacatgctgtgcggcgtgctcggctacgcggcgttcggcaaccgcgcgccggggaacttcctcaccggcttcggcttctacgagcccttctggctcgtcgacgtcggcaacgtctgcatcgtcgtccacctcgtcggcgcctaccaggtcttctgccagcccatctaccagttcgccgaggcctgggcgcgctcgcggtggccggacagcgccttcgtcaacggcgagcgcgtgctccggctgccgctcggcgccggcgacttccccgtcagcgcgctccgcctcgtctggcgcacggcctacgtcgtgctcaccgccgtcgccgccatggcgttccccttcttcaacgacttcctcggcctcatcggcgccgtctccttctggccgctcaccgtctacttccccgtccagatgtacatgtctcaggccaaggtccggcgattctcgccgacgtggacgtggatgaacgtgctcagcctcgcctgcctcgtcgtctccctcctcgccgccgccggctccatccagggcctcatcaaatccgtcgcacattacaagccattcagcgtctcctcatgatcaaattaataattatttgttaatactgatgatgatgatgatatgatccatcgatcgatgaagaacaaatatatatatatagcgagatcgatcgatcgatcaagatcgtgaatgatatatataatacatagttaatcaatcagatgttaatt

SEQ ID NO: 8763 - DNA, 1701 bp, Oryza sativa
  ref <308>: DATABASE ACCESSION NUMBER: AK106111
  ref <309>: DATABASE ENTRY DATE: 2002-08-28
agctagcgcgcggtacggtaggcaccagctatacagcgcgccacacacaacaatggccggcgctaccgctgccgccgtctcctcctccttcctcgcgctcgcgttgctctcgctctgcgccgcggccgctggcggctcgcctcagctggacgcggaggccgcgcggcagcaggaggccgaccgcgtgacgaggctgccggggcaacccgccgtgcggttcgcgcagtacgccgggtacgtgacggtgaacgagacgcacggccgcgcgctcttctactggttcttcgaggccaccgccgccgccgacaagaagcccctcgtcctctggctcaacggcgggcctgggtgttcgtctgttgggtatggagaagcggaggagctcggtccattcttggtgcagaagggcaagccggagctaaaatggaacaagtactcgtggaacaaagaggccaatctgatgttcctggagtcccctgtgggtgtcggcttctcatacactaacacaagctccgatctgcagcagcttggcgacaagatcaccgctgatgatgcttacatcttcctgctcaactggttcaagcgcttccctcagtacaaatctcacgacttctacatcgctggagagagctacgctgggcattacgttccacagctttcggagaagattttcgacggcaacaagcaaggccccaaggagaactacatcaacttcaagggtttcatgatagggaatgccctgatggacgacgagacggaccagacgggcatgatcgactacgcctgggaccacgccgtcatctcggaccgggtgtacgccgacgtcaagaagtactgcaacttcagcatggagaacgtgaccgacgcgtgcgacagcgcgctcaccgagtacttcgccgtgtaccgcctcatcgacatgtacagcctctacacccccgtctgcaccgaggtctcgtcgtcggcggcgttcggccagcgccaggtcgccgtccacggcgccgccccaaaaatcttctccaaataccatgggtggtacatgaggccggcggggtacgatccgtgcacgtcggatcacgccgaggtgtacttcaaccgggctgacgtgcaggaggcgctgcacgccaacgtgaccaatatcggctacaactggacgcactgcagcgacgtgatcggcaagtggagagatgctcccttctcgactctccccatcatccgtaagctcgtcgccggcggcatcagggtctgggttttcagcggtgacaccgatggaaggatccccgtgacgtcgacgaggctcaccctgaacaagcttgggctgaagacggtgcaggagtggacgccgtggtacgaccatcagcaggttggaggatggacgatcctctacgagggcctgacgttcgtgacgatccgcggcgccgggcacgaggttcccctgcacgcgccgaggcaggcgctcagcctcttcagccacttcttggctgacaagaagatgcctccgacggcgttcccctagtcgctcgcatgcagtctgccttcttcaacgatggcgaggaacgggcgtcgtgcgcccactaggttgttttccagcgataccaactgatcaggaaattttcttttctttggtccaagactccaagtcatgtaacacagtggaaattcgattggaacaatcgataacaataaaatcatatatagtgttgattg

SEQ ID NO: 8764 - DNA, 1105 bp, Oryza sativa; identical to SEQ ID NO: 4009
  ref <308>: DATABASE ACCESSION NUMBER: AK106112
  ref <309>: DATABASE ENTRY DATE: 2002-08-28

SEQ ID NO: 8765 - DNA, 1033 bp, Oryza sativa
  ref <308>: DATABASE ACCESSION NUMBER: AK106113
  ref <309>: DATABASE ENTRY DATE: 2002-08-28
agcgcagcgcactctgtcaaatccgtgcaatctccgccatctccctctcaccatcttcctcctctctccccttatcccaaatttccccatcaatcgccacccgcgcccaattcccccactcgattcgattcgactcggtcgggatccccccatggcgagcggcgcctcgtagcgacgaaatcgagccagcgagtggatgcggcgcgcgccatggcggccctcggtggcggtggcggtggcggtggcggaggcgagggcggatcggcgtcgagggtcggggactggggtgttgacttgggggaggggtgggactggaggagcatcccgaagctcctctcctccgcctgcctcttcatctgctccggaggctgttttggatgctgtgataaggctgtgagacatgtaggacagctttcaaagagtttaattactccggaccaaaattacaccattggggacgaactctggagcacaaccaccatcgaggtcgaacagtcatgggctcttgatcagcaaggagtggggagcagtcagggccctactgaatttgtcaatcatggtcttgttctttggaaggagattaggaaggactggactgcgaaaacaaggcaaatacctgagacgaaacagattcgcgaaccaatattgagttggaatgcagcctatgagagtttgcttggatccaataagccgtttcatcagcccatccctctacatgagatggttgattttcttgtggacatctgggaacaagaggggctgtatgactagcacaaatgtttttaataatagtaacatagttgtaggcttgatgatgatgaggtaactttgaggtaacttggagggttcggcctgccatacttgtttttgaatggcggccagttgtacttgcttaatacaaggttgtggttgttgtaatgtgagaaaggtcgagatttagacgctttgtcgaattgtcaaagaaagcaaagccagagagaaatttgtaacactaactcatggacattaatgtgatgtgtgtcgatagagaagt

SEQ ID NO: 8766 - DNA, 1722 bp, Oryza sativa
  ref <308>: DATABASE ACCESSION NUMBER: AK106114
  ref <309>: DATABASE ENTRY DATE: 2002-08-28
attcccccaattcattccttcgccgaaccaccagagtggtggagagtagctagcagagtagcagagcggtgggagcagcagcagccgtagccgcatccggagagattcgggcaggagaagccgccgcagcgatgggcgcgccggtgcgcggcgccctcgtcttcttgcttcttctcgccggcgcggccgcggagacggcgccggaggaacccacattgccctccgccgccgccgatggggcggctagtagcgggacaacatctggcgctggtgctggaacgggaatcaactcgaactcggtgctggtggcgctgctggactcgcattacacggagctggcggagctggtggagaaggccctgctgctccagacgctggaggacgccgtcggcaagcacaacgtcaccatcttcgcgccgcggaacgaggcgctggagcgtgacctcgacccggagttcaagcgcttcctgctcgagccgaggaacctcaagtcgctccagtcgctgctcctcttccacgtcctccccgcccgcctcccctccgggtcctggtccgccgtctcccaccccacgctctccggcgaggaggttgagctcgccgccgccgccaacgacggcgcgatgcgcgtcgcccacgccgccgtcacccgcccggacgccgtgctcaggccggacggtgtcatccacgggatcgagcgcctcctcgtgccgcgctctgtccaggaggacttcaaccgccgccgcagcctcgccgacatctccgccgtgctgccaactggcgcgcccgaggttgacccgaggacgcaccgcctcaagaagccggcgccgcccgtgccacccggcgcgcccccggtgcttccgatctgggacgccatggcccccggcccatccatcgcgccggcgcctgcccctggaccgggctccgggaagcaccacttcgacggccacagccaggtgaaggacttcatccagaccctcctcctgtacggcggctacaacgagctcgccgacatcctcgtcaacctcacctcgctcgccaccgagatgggccggctcgtctccgaggggtacgtgctcaccgtgctcgcgcccaacgacgaggccatggcgcgcctcaccaccgaccagctcagcgagcccggctcgccggagaacatcctgtactaccacatgatcccggagtaccagaccgaggagagcatgtacaacgcggtgcggcggttcggcaaggtgcgctacgacacgctgcggctgccgcacaaggtggtggcgcgcgaggccgacggctcagtcaagttcggccatggcgagggctcggcgtatctcttcgacccggacatctacacggatggcaggatcgcagtgcagggcattgacgccgtgctgttcccgccggatgacaccaagacggcgccggacacggcgccggtcaggagggcgcccgccgtcaccggcactcgcaagaagaacaaactccggagaggcaagttgttagaagcaacgtgccaaatggctggcatccttggtcagcgattgcgattcgcaagctgccagtagacggcgaaagattgatctcatgataccgaaacacgaactagaatgaggtgatggactgtgctggagccgtccacattaccatttgtttttttttatttttatttttgtttattattacgaataataaatcaggtggggaatgtaatctggtggctgttggtgtctg

SEQ ID NO: 8767 - DNA, 1198 bp, Oryza sativa
  ref <308>: DATABASE ACCESSION NUMBER: AK106115
  ref <309>: DATABASE ENTRY DATE: 2002-08-28
aacgcgcgggccgcgatcgtgcgaggggcacttgcatttccccgcgagatttttacgatgaagaccgcatcgtcgtcgtcgtcgtcgtcgcacgggttcccggccaccgcctcgctctgcaccccgtatctcctgctggtgccgctcggcctcctcgccgtggtgctcgtcgtccccagcctcggctcctcccacgtccgctccgacggcctcggcgtcctctgccacgccggcccatccaccgccgacggctacctcgtcacgccgggtggagatgcagcttccgctgctgctgctgctgctgagacgaaggccgtcgtgcggccggagctccgtctgctggtgggggtgctgacgacgccgaagcggtacgagcgtcgcaacatcgtgcgcctggcgtacgcgctgcagccggcggtgccccccggcgtcgcgcaggtggacgtccgcttcgtgttctgccgcgtggccgacccggtggacgcgcagctggtggtgctggaggccgcgcggcacggcgacatcctggtgctcaactgcacggagaacatgaacgacggcaagacgcacgagtacctctcctccgtgccgcggatgttcgcgtcgtcgccctacgactacgtgatgaagaccgacgacgacacgtacctccgcgtggccgcgctggtcgacgagctccggcacaagccccgcgacgacgtctacctcggctacggcttcgccgtcggcgacgacccgatgcagttcatgcacgggatgggctacgtcgtgtcctgggacgtcgcgacgtgggtgtcgaccaacgaggacatcctgcggtacaacgacacgcacggccccgaggacctcctcgtcgggaaatggctcaacatcggccgccggggcaagaaccggtacagcctcaggccgcggatgtacgacctcaactgggacatggacaacttccggccggacaccgtcctcgtgcacatgctcaaggacaaccgccggtgggcggcggcgttcaggtacttcaacgtcaccgccgggctccagccgtccaacctgtaccacttcccatgatcgatcaatttttgttttgtatattctgattgtttttatttaatgttgttgaggcgacgttggttgattccgccatggtagcgtacgccattcacattctttctctggaatttgttatttagcaattggttacatt

SEQ ID NO: 8768 - DNA, 1194 bp, Oryza sativa
  ref <308>: DATABASE ACCESSION NUMBER: AK106116
  ref <309>: DATABASE ENTRY DATE: 2002-08-28
gtgtacacgacgcgacgccggcggcggcggcagccatggagcccgcggcgatggaccgcatcgccggccgcctcgccgccgtagacggcctctactacccgaccaccttcctcctcgccgacccgccgccgtccgccccggaccgcaaggccgccctcctcgcgctcctctcccgcgacgccccgctcttcctcgagcgctacggcgggtcgctgtcccgcgacgagctcgccgccttcgacgcgctcgccggcgactacgaggtcggctggcacctccgccgcctccgcgcggcctccgaggggggcccctccgcgtcccgcgtccgcaaccgccgccgcgcctacctcgaccgcctggtgcgcgagggggagtacttctccgaggaggctatgcgggagcgggagccatacctgcaccacgagtaccttggcaggttccaggatcccacgggacgggccatggcgaggccgggggagcggtggtccgagacgctgatgcggcgggctgaggaggccgtgatcgttgagaagattcgaggggagcagattaggagaggggttgatcccagcgagtgggtaggtggtggcgctgaggaggccatggaggagcaggaagaggaggaagaagaagaagaggaggaggaggaggaggaggaagagagcgaggaggagcaaggcatggacatggaggagaaaggaagaggtgccgataattcttccgagaatccgagtgtgactgaggtggttgactccaacaaaactgcaggggcttccaagcaaacattatctgctgaagatatggaggatcaacttgaacagtttaccagcttgatgcaacagaagttcctgtccggtgaagactctgagcatatggactactctcggatcgataacgacgagatgctggatgaccattggtcaaaagaagccaactatgatgcggaggagaagtatttcgaagaggattagttcaaagttcaaactaggctgctgttatagcatcagttatgtagtgcatcatcgcatctcgttttttttttgttcatgttcagcacttacttagtctatcatgtacatatatctatatatgcagttgttgcccctctaatccgaataagttgagtaacttgcttatgaaaactaccgtatgtgttggaacatcaatcagaaaatagggtcctgtcttgtggag

SEQ ID NO: 8769 - DNA, 1195 bp, Oryza sativa
  ref <308>: DATABASE ACCESSION NUMBER: AK106117
  ref <309>: DATABASE ENTRY DATE: 2002-08-28
aatccaacaaaatccaacggcgccaactcaaatccaacaaaatccaaccatgcggtcgtggggaactattctcgctgtggcggccatcgcctcgacggcggcggccgagaacgtgctgagcgatctcttctacacgacagcgacgccctgcgcagcgctgcgggcgctcccaacgtaccaggatctgcgcgcgcagctactctcccacgacgagccgttccagggctcggtcacgctctccaagtctgatacaaagacgggctgtgcgctccatctcgctgtgcggggagagttggacacgagcgataaagcccacgacgcgtttgcgctggcgcgtcacgtggacgcgtcgttcggcgagcttctggacgcgcatgcgccgctgcgtggcgccagcaagcagctgaacgatctcacgttccagcgggttcgcgtgaagctcggcaaccgcgacttttccgtggatgcggccgcggtgggcggtggtgcaacgggcgacgtcacgctcaatggcgacgaatgtggcgattttgccagcaaagaattgctcaaggatctgctggtggcgggcacgggcgacgtggcggtcgtcacggggcaagtcgacgtggccaagtgtgcgattggattggacattaccggtcgcgcgcccacggtcggctcgacccatgaagcggtggcgtttctcaagaccgtggacaagagtctggacgagtggtttggcgcgtcagcgaccaagcaatccacggcgaccctgcgcaatgcccgcatggcgttttcaccgtccaagtcggcggtgcttaaagctgcaaagcccgctgaattggctacctatacgcagatcaacgcaccgacaaagcagaccacgatgggcattctcatggggctcgtgatgctcacggccatgctcgtggggatcgcctaccaaaagaagcgccacgagcagagccagcagcagcgccatgacaatgcgagtcgagccgcgcagttccgtcgcgtgtcgtaccgcttgggctacggcccggtgcccaacaaggagacggagctgagcccgacagaggaggaaaagagtggtctcttgtgagcaaagaaccacacacgcacgggctggcgagatgcctttcgtctgctaggaatcgataggttgtgcaaatgggaccgaaacgaaaatggatgtttgtcgttcaattatacc

SEQ ID NO: 8770 - DNA, 1635 bp, Oryza sativa
  ref <308>: DATABASE ACCESSION NUMBER: AK106118
  ref <309>: DATABASE ENTRY DATE: 2002-08-28
gaccctcaccacgcctccccatacggatcgcctcatggaggccgccgttgctgctgcggctgcggccgccggggcggtgacgacggcggtcgcgcctccgcccggcgcggcggtcagcaacggggtggcgaccgcgccgccgccgttcctgatgaagacgtacgagatggtggacgacccggccaccgatgccgtcgtctcatggggccccgggaacaacagcttcgttgtgtggaacacccccgagttcgcgcgcgacctcctccccaagtacttcaagcacagcaacttctcctccttcgtcaggcagctcaacacctacggatttaggaaagttgatccagataggtgggagtttgcaaacgaaggttttcttagaggacaaaagcatctactgaagaccatcaacagaaggaaaccaactcatggaaacaaccaagttcagcagcctcagttgccagctgctcctgtacctgcttgcgtagaagtggggaagtttgggatggaagaagagattgagatgctcaaaagggataaaaatgttttaatgcaggaacttgtcaggctgagacaacaacagcagacaacagatcatcagctgcagactttgggcaagcgtcttcaaggaatggagcaacggcaacaacaaatgatgtctttcctggctaaggcaatgcatagtcctggcttcctagcacaatttgtacagcaaaacgaaaacagcagaagaagaatagttgctagtaacaaaaagaggaggctaccaaagcaggatggttcgttggactctgaaagtgcttcattggatggacaaatagtaaaatatcaacctatgatcaatgaagcagccaaagcgatgctaaggaagatcctaaagctagattcttcacatagatttgaatccatgggcaattcagataatttccttcttgagaattatatgccaaatggtcaaggtcttgacagctcttcatcaactcggaattctggtgttacccttgcagaggtcccagctaactcaggtttgccatatgtagctacaagctctggactttcagctatttgttcaacttcgactcctcagattcagtgcccagttgttttggacaacggcatacccaaagaagttccaaacatgagtgcggtgccttctgttccgaaggctgtggctccaggcccaactgatatcaatattctggaattcccagatttgcaagatatagtagctgaagaaaatgttgatattcctggagggggctttgaaatgcctggtcctgagggtgtattctctttgcctgaagaaggtgatgatagtgttcccattgagactgatgagattttgtacaacgatgacacccagaaacttcctgctatcattgattctttctgggaacagttcctggtggctagccctctatctgttgataatgatgaagtcgattcaggtgtactagaccaaaaggaaacacaacaggggaatggatggaccaaagctgaaaacatggctaaccttacagaacagatgggcctcctgtcatcacaccatacaggatgatgaggtacaataggacatacttagccaccatttgtcaaggtaccctgggatctcggtaataaactcccacatcatcacct

SEQ ID NO: 8771 - DNA, 1818 bp, Oryza sativa
  ref <308>: DATABASE ACCESSION NUMBER: AK106119
  ref <309>: DATABASE ENTRY DATE: 2002-08-28
atgaacatgaggaccatcatatccctcatcccagatacatgatctgtactgtctcctcctctctagcttctctcctctccctgctgtgccccttgctttgttgcttggtcaattagagctaagcagcaagctagcttcctggaagcaaggccggcgcctggctgggacaagaaccacaggaaccacagctgactgattgatcaatcaatcaatcttctgctgccctgctgcctcacagcctcagcaagacagtacgtacagatcaattttggccctcttgaggctccggccggtcgccgactcgccgtcgtcgaaggtgctctccggccggcggagttaacattgagcttgatttcaagccgcgctccgatccgaccggcaaagcgccgaagctgccttccgtttgtttcactctggtctctgggggctcgccatcagccatccgtaccgagctgtagtgtgcgcggttttgtcgcgtcgtcgtacgtcgagaatccgtgagccagacagacaagccagtggtttggtgattcttgcggcggcgcggcgatggagaccttcggctgggccggcggcgggcagctgatgcaccacgacgacatctacttgccgcgctcggtggggtgcgggcggccgttcgagctggacgacgcgttcctgggcgcgtgcttcggcgcccagctccagtgcgacggtggcgtcggcggcggcgacggcggcgggtgtctgcagggtacctcgggatttggcgccgtggctggagacccgttggggttgctgtgctcgggggacgtgtttgcgtctgtcgccgagggcgccggcggcgcgcacgacgacggcctcctcgacgcggcgctcgccttctcccggaatcagctcgggggcgccgcctgcgacgggagcgacggcggggccgtgtcgaacggcgccatgctgtccagctacagcggcaccaccggcggcaacatctcctccggcgagtcgaataactacagcggcggcggcggtggctacgacgccgaggtggtgtcgccgacgtccaccatgtccgcagccacacagtcgctccaccccaagcgaaagctatacgacgaccaccaccaccccgccggcatagcagccgcagccgcagcgccaccgctggcgccgtgcccacgccccaccaccggcgccgtcgccgcgaagcggagggcttccacgtcagcaacaagcatcaccttcggccaccagccgcaccaccaccacgcgggcgccaccaccgccgggtacgagcctgacatggaagccatggcgcaggtgaaggagatgatctaccgggcggcggccatgcgccccgtccacctcggcacggaggccgccgccgacaagccccgccgcaagaacgtgcgcatctcgagcgacccgcagacggtggcggcgcgtctccggcgggagcgcgtcagcgaccgcctccgcgtcctgcagaagctggtccccggcggcaacaagatggacacggcgtccatgctcgacgaggcggccagctacctcaagttcctcaagtcccaggtccaaaagctggaaaccctaggcaccaccaccaccacgtccaagttaccgcagcagtattacagcggcaacatcaacagcagcaataatcaccatggattcctcggattcgcagcaaataacaacaccatttcagctggctacgcaaattctaatgctggaaatgcaacgaaactgttgtagcactgtggctagcacaagtacttgatacgcacaacgtacgcgtggtctcgtcgtctatatacatgtagtaacatgctgctgttttct

SEQ ID NO: 8772 - DNA, 1182 bp, Oryza sativa; identical to SEQ ID NO: 2212
  ref <308>: DATABASE ACCESSION NUMBER: AK106120
  ref <309>: DATABASE ENTRY DATE: 2002-08-28

SEQ ID NO: 8773 - DNA, 1231 bp, Oryza sativa
  ref <308>: DATABASE ACCESSION NUMBER: AK106121
  ref <309>: DATABASE ENTRY DATE: 2002-08-28
atccaccacaccacttgcctccaaacaaaaatctgacctgacctgacctcctcctcggctcctcctcctcacccacaactcttcccaatgtcgcctcccctcgagccgcacgactacatcggcctctccgctgcggcggcgtccccgacgccgagctcgtcgtcctgctcgtcctcgccgaacccaggcggcgaggcccgcggcccacgcctcacgctccgcctcggcctcccggggtcggagtcccccgagcgggaggtcgtcgccgcggggctcaccctcgggcctctgcccccgaccaccaccaaggcggcctccaagcgcgccttccccgactcctccccgcggcacggcgccagctccggctccgtcgccgccgccgcagcttgccaggacaaggcggcccccgccgccgctccgccggctgcaaaggcgcaggtggtgggatggccgcccgtgcggaactaccgaaagaacacgctggcggcgagcgcctccaagggcaaaggggaggacaagggcacggctgaagggggccctctctatgtcaaggtgagcatggatggagccccctacctcaggaaggtcgacctcaagatgtattctagctatgaggacctctccatggctctcgagaagatgttcagctgcttcatcactggtcaaagcggtttgcgtaaatcatcaaacagagataggcttactaatggttcaaaggctgatgccctccaagaccaagagtatgtccttacatatgaagataaggatgctgactggatgcttgttggtgatcttccttgggatttgtttaccactatctgccggaaattgaaaatcatgagaggatctgatgctgctggaatagctccaagatcaatagagcagtcagggcagagcagataagattaaccttcgtccggacgagaaaggcaactgatctagcagctttggaattgttcatcgcaagtatcccaaatatctcaatgtctgtgtagtttaatgtgttcatcagacctgtgcattgtatgtctgtaatttgttcctttcagatcgtgcaattgtgcgttgccccctcttttctttgcattgaaggtcaagtcgggctcttgtccgcttatttctctaaatcctagtcagttcaaaaattatccatcatgacacatgaactgatggtggataatatggcaagaagcttttctaatcattcaagcttgaacctcttgtgtgttct

SEQ ID NO: 8774 - DNA, 1870 bp, Oryza sativa
  ref <308>: DATABASE ACCESSION NUMBER: AK106122
  ref <309>: DATABASE ENTRY DATE: 2002-08-28
acgcggcatctcttcctcctccgtctctgcatctcacagggcaggagcagcgttgaactaaccggcggcgagagatggcggcgggagcaggggcatataggtcccgaaccctagatcggaaacccgacagcggcccagatcggcgatgggtggcgggaggaccgggatagctgcaagctgcgtcgggagcttgatgatggttgcggcgacgattcatcggcgacgacggccgcggcgatggttgcggcggtgatttgtcggaagctcgatgtgacggtggccgcggcgaacttgatgcgacgccggcacggggatgcggcaaagagaagagaggggaagagggtaaggccggcgatggttgcaacggccattcatcgggagcttgacgatggttacggcggcgattcgtcggaagctcgacgcgatggctgccgcagcggactcgatgcgacgcggcggcggccgcggcggactcgatgcgatgcaacggcggcagcagcggactcgatgcgacgcgacggtggccgcggcggactcgatgcgacgtgacggcggcagcggcggactcgatgcgacgcgacggcggcagcggcggactcgctggcacggagatgtggcaaagctttggagaatacgagagattcattcattcatggcacgtcgccgacgagtatcttgtcgccctcgtcgtcacgagcgtgtactcgccggacgccgctgccgctgtcgaggagcccggcaatcgcctcctcgcctcctcccgtgcagctcttgccgccggcggcggcggacatggttgggtccctttgagccaccacgagcaagcaagcaaaacgccatcaagagggtgagggattagcgccaccctaaatttgtttagcccgatcatacccctcctaaatcaacggttagattaaattggtacctcatggtacctcgtacctcatagtacctcgtatctcatggtacctcgtagtacctcctcaaggatgggaaagatgctcttagactttagttagcttgtacccaatccagttgcgtaaaatttgtgtgagaagccctggtgttaattcctctaagctttacactgtgctacactacatatgcattccttgaatacaaaaatagtctcctatagcaaggcttagatgttgaattctaagtccctaattgtgaccgtcatctttcaccctgacagctatgttgttcatgctgaggttaatgctattttaaatacaaaccatgcttcagcggctggacaggtttggacttctaatctcctacaaacttaaagcatctcattaatttgcctttataagctaagaataatcttgtgttatcttctctttgcagaaattatatgttaccatgttcccctgcaatgagtgtgctaagattattatccagtcaggtgtatctgaagtcatatattttgtagagaaaaggattgacaactctgattatgtttacgtagcctcgcacaagttgttatcaatggctggtgtaaaggttaggaaacaccaaccacagatgtcacaaataccaatcaagtttcaggagcctcgaaacggtgagccttcaatgaacgcagcaagtatatttagctgatcttatctttgtttgttgtctccttatctacatatacctttactgtgcggttatgtgtaagatttctgttgatcatggcatcaaagaacaaatgcttgtcagtcattcaacgtcatcgattgccatatcctccggggtgctgttgaccgtcttgttgtaaacttgtaatccgtgagactactagatcatcaaaacaaattatggctgtgtttagttcagcgcaaaatttagattttggttgaaattgaagatgatgtgactg

SEQ ID NO: 8775 - DNA, 1651 bp, Oryza sativa
  ref <308>: DATABASE ACCESSION NUMBER: AK106123
  ref <309>: DATABASE ENTRY DATE: 2002-08-28
atagagttgcttgtacttacggagccgagatgggaaaggaagcaagcgcgatggttgcgaggagaagcaccagccgccgtgattggaggaggtggtggtggtggctgctgcctctcgcctgctgcttcgtttgttgggttgcctcgtcggcggcgacggtggcgccggcggccggtgtcgccgtgacgagccttcctggattcgacggcccactgccattctccctcgagaccggatacgtggaggtgaacgagagtacgggcgtgcgtctcttctactactttgtccagtcagagaaggatcctgatgtagacccacttttattgtggctatcaggtgggcctggctgttctagtctctctggcctaacccacgagataggaccattccaattcgccgcaaaacggtattacagtggaggattgccgaaaattatctatcaaccagagacttggactaaggtgagcaacataatttttgtggattctcccgtaggggcaggattctcatacgcggcaacacaggaaggctccaagactagcgataccaagacagtgaaacagcttgttattttcctcagaaagtggcttcatgatcatccccagttcttgctgaatccgctgtatattggaggtgactcatatagtggttatattgtacctacacttgcgctagcgattgatgaaagcaatgattcaggagataaaccaattttgaatctcatggggtacgttgctggcaatccaaggaccgaacgccaatttgatgaaggtggtaaaattccatttctccatggcatgggacttatatccaatgaactttatgagcatgctaaggaaacctgcagagggaaatacaatgccccagggaacgctcgatgtgagcagtctatgaaagttatacacgattgcacaaaggacatcaacatgctacatgttcttgagccattttgtgaagacgtcgggagccccgggatccataacaatgaagcgacagatggaatgattaggctcatgctggagtctgcttctgctgctaatgatgacattattgaattcaagtgtagaaaagcttcttatgtggttttacaaatatgggcaaatgataaaactgtaagggagagtcttggtgtgcacaagggaacagttggagagtggataagatgcaatttcgatgtagattacattgcagatgtgtatagtacagtggagtatcatttgacgctaatgagaaaaggataccgagcattgatatacagcggtgatcatgattgtcaagttcccttcactggtacacaagcatggattagatttctgaacctttctgtaattgatgattggcgaccatggtatgctgctggacaagttgccggattcacgagaagctatgcgaataataacctgatatatgcaactgtgaagggtgctgggcacactgctccagagtataaacctaaggagtgtctcgagatgtttgctagatggatttcaggcaatactctctgatgtatattcctcaatcagatcaagtcaactatgaaaacatgagtaaatgataacatcagagatatgaagaaaaacatttgctgcatgtaatattttggaaaaccttaagaactctcactagtacatagatatctatgacggagacc

SEQ ID NO: 8776 - DNA, 1586 bp, Oryza sativa
  ref <308>: DATABASE ACCESSION NUMBER: AK106124
  ref <309>: DATABASE ENTRY DATE: 2002-08-28
atagacgattttatcgatgaacctgaaatagacatggcttgccacttgagattatttccctttactcaactactagtattggttctgtacaaaatcgccgccgtaggggcagatcctgcaaacgcagaactatccacaaagatcacccaacactctccattgtacaacccacagcctcaagactttccaaacgaggagctctaccgcaactatctagtcatccagcggttcaagaagacaatcacttccgaccccaagaacatcaccgccacctggaccggccatgacatctgcggcaacacgacctacctcggtttctactgtgcagcattgcctgggcgtactaagaagcccacggtcactgtggtgatctttaacggttatggcctgcgtgcaccgaagctggaaggatttattgaccatctccccgatcttgcacttttccatgctgcctccaacgacttcggtggtgacatcccctacctcacaggcctcgcctacaactacaagatcaatgtcgacagcaatctccaaatacaggatgattttagtcgtgacatggtcgggtcgcatgtaacaactaaagttcatggttattgcgttaatttagatctagatatcacatttcacctccggcccggaaaagacgacaagaaaggacgaagcatccccggtgccacagattctaaggcgctcctcctcaactacaatcacctgtccgggccattaccggtgaacatcggtttctccaagttaagctacctggccctcgccaacaacaggctcaccggcgcaatcccgccatcaatcttgcatttgcaagactccctcctcgaggtgctcctcctgaacaaccagctctccggctgcctcccccacgagctcggcatgctcaccaaggccgcagtgttcgacgccggcatgaaccagctcaccgggccgatcccctcctctttctcatgcctcaccagcgtcgagcagctcaacctgggcggcaaccgcctctacggagagatccccgacgcgctctgcaagctcgccgccgtcccagccggccgcctcgccaacctcacgctgtcgagcaactacttcacgtcggtcggaccggcgtgcttgtcgctgatcaaggacggcgtcctcaacgtcaggaacaactgcattccgggcttcgccaaccagcggcggccggcggagtgcgcgtcgttccacagccagccgaaggcgtgcccggcggcgagcgccacccacgtggcgtgccccgccggagctgccaacgctgcggcggcgccggcggacagggtggtcaaggactactccagctacgtgacgtacgccaccctgcacgagtgagcccggcgccacggcacgggcgcacgacgtgcgtgcatgcatgcagtaggggacagctagaagctagcgtctcggggtggtatttgctcttgtattcttgtgttcgtttgttgtgctcgtgagtcgtcattgtggtttgttttctctgcacgtgtggctagctatggctgtcacgtctagatctcacctcctgtactcttgtgtactgtactatgtgaaaatcattggtgattact

SEQ ID NO: 8777 - DNA, 1305 bp, Oryza sativa
  ref <308>: DATABASE ACCESSION NUMBER: AK106125
  ref <309>: DATABASE ENTRY DATE: 2002-08-28
atgatttgcctccgagccgccttccccttgacctcctcccctctccgccgcctcgccctcaagccctcctcctcccgcgccgccgccgccgccatgtcgtccgccatcgccgcgccggtcgagcacatcgtgctcatcaaggtccgcccggaggcggcgtcgtcgggcgccgccgcggcgatggtgtcatcgctgcaggcgctgtccacggcggtgcccgggctgtcgtacatccacgtcggccccgtgctccgcctccggtcgccggcggcggaggcgctgggtccgacccacgtcctccactcccgctacgccaccaagcccgacctggcggcgtacgcggcgcacccggcgcacgtcgccgccgtgcaggggcacgtcctccccaacgcgctcgactccaccgccatcgactgggtcaacgccgccctggtgccgtccccggtgaacccgggctccgccgtgcggctctccctggcgaagttgaaggagggtgtggaggcgcaccagctcgcggagaagctcgccgcggcgacggcggcggccggggaggcgaagggcgccaaggtgagcttcggggagaacttctcccccgcgcgggccaaggggtaccagttcgggatggtggcggtgttcgacagcgtggaggggctcgacgcggtggacggggacgggaaggtggaggcggccaaggccatagtcaggccgctgctcgacgacgtgctcgagctggaattcgtcgtcggacctgccgccgcggaggctccggcgccggccaacctctgagaggtttgcctttggttcgaaaactctagttgccttgtttgatcggttgagaataatacaatccttgtgattgggtgtgctgtggcctgtggttagcaatggcaattgattttgaaatgaataagaattgtacctgactacctgaactaggaattaggatggccgctcttgcttggacgtctaccgaacaagagcttgctgtcttcagtgttcatcttttcttctcgctctgcaactgcaaatttgtatgtcagataattttaagactcgcaactcggtgctatgcctctcatgcctcccttcccccattaagcatggaggaaccactgacatgccactgcacaatcttttaggatttgatattcttttgacttagtattatgcacccatagaagtattttagtcttgctccaattctgtatttctgtctcgcagaatcctcgtaggcatgatctatggactatggaacatgtgcctttgtgattgtagagtattatatgcagtaatcgctgttgtcgg

SEQ ID NO: 8778 - DNA, 1274 bp, Oryza sativa
  ref <308>: DATABASE ACCESSION NUMBER: AK106126
  ref <309>: DATABASE ENTRY DATE: 2002-08-28
attagccgctcttgcaagtgtgaagtgtccaggtagccattttgcatgcattttccggcttgtgtacagtgcttgcagcagaataccatggcccgctgcttcgtcctcaacaccggcgccaagatcccgtcggtcgggctcggcacatggcaggccgagccgggcgtcgtcggcaatgccgtctacgccgccgtcaaggctggttatcggcacatcgattgtgctcaagcctacttcaacgaaaaggagattggggtcgctctcaagaaagtgttcgacgagggcatagtcaagcgcgaagatatattcatcacctccaaactctggtgcactaaccatgctccggaggatgtcccggttgcactggacagcacgcttcaggatttgcagaccgactatgtggatctttaccttatccactggccagtgaggatgaagaagggcgccggctttggcgggcaaaacgtcctcccgaccgatatcccggcgacgtgggcggcgatggagaagctccacgactccggcaaggctcgcgccatcggcgtcagcaacttctcgagcaagaagctggaggacctgctcgccgtcgcacgcgtgccgccggccgtcgaccaggtggagtgccacccggtgtggcagcagaccaagctccgcaagttctgcacctccaaaggaatccacctctcagcgtactcgccgttgggctcgccggggacagcgtcggtgaaagcggtgggcaatgtgctcgcgcacccggtggtcgtctccacggcggagaagctggggaagacgccggcgcaggtggctctacggtgggggattcagatggggcacagcgtgctcccgaagagcacccacgaggagaggatcaaggagaacattgacgtctatgactggtccatcccggaggacctgttcatcaagctctctgaaatcgagcagatgaagctgatccgtggagaattctggactcacccggaaggcgtctacaaatcaatcgaagagctttgggatggcgaaatctaatgatcgacttggctggactgaagtttgctttcttcgtgtgggtgaaaaactggaaactgccattgctgcaaataaagtggggaaatgttaatcaatgaatgaataaaaggagtttaagtctacagctaccattttgctggtactggcgtgtatttttacaagaaccggaatccagaatctttaccggcaaaattatcagtaatttggacatttgtttaaaagaaggctttatcacagattttggatgt

SEQ ID NO: 8779 - DNA, 1500 bp, Oryza sativa
  ref <308>: DATABASE ACCESSION NUMBER: AK106127
  ref <309>: DATABASE ENTRY DATE: 2002-08-28
acacatgcagttgtagtagcacttaagccttcctctctagctagcatctcttgtgtcaggaagttggaagggatttctggctagtttctagctggtgtctcctctcctcttcctaaccttctcactgattaacaccttagagttagttaataaccttcatcaccagtagcaatggcaggaggtttcttgtccatggctaacccggcggtcaccctctccggtgttgcaggaaacatcatctccttcctggtgttccttgcaccagtggcgacgttcttgcaggtgtacaagaagaagtcgacgggagggtacagctcggtgccgtacgtggtggcgctcttcagctcggtgctgtggatcttctacgcgctggtgaagaccaactcgaggccgctgctgaccatcaacgccttcggctgcggcgtcgaggccgcctacatcgtcctctacctcgtctacgcgccgcgccgcgccaggctccgcaccctcgccttcttcctcctcctcgacgtcgccgccttcgccctcatcgtcgtcaccaccctctacctcgtccccaagccccaccaggtcaagttcctcggcagcgtctgcctcgccttctccatggccgtcttcgtcgcccctctctccatcatcttcaaggtgatcaagaccaagagcgtcgagttcatgccgatcgggctctccgtctgcctcacgctcagcgccgtcgcgtggttctgctacggcctcttcaccaaggacccctacgtcatgtacccgaacgtgggcggcttcttcttcagctgcgtgcagatggggctctacttctggtaccggaagccgaggaacacggccgtgctgccgacgacgtccgactccatgtccccgatctccgccgccgccgccgccacgcagagggtgatcgagctccccgccggcacgcacgccttcaccatcctgtccgtgagccccatcccgatcctcggcgtgcacaaggtcgaggtggtggccgccgagcaggcggccgacggcgtcgccgccgccgccgccgccgacaaggagctgctgcagaacaagccggaggtgatcgagatcaccgccgccgtgtgacgacgactgatctcgacgacgacagattctcgctactgatgaagaagacgacgacgatggccggatcgatgacggacagaatttagcagtgtggattactaccgaactttaattagttggttaattattggattacaatgtggtaagagtgtgtcattagcagctagttaacttacttaaattaattatcttgttcagtcagtcagtcagtcagtcagtcagtcagctttgagtgagtgagtgagtgatctcgacgtagtttgctggttggtgtaataagaaaaaggcgatctactagtagtctactagctagtacgcatgcatgtgtgtgtgctctacttaccgtgttgcaatctcatctctttgtacttacaactcagaaatcaatggaagattgtgacaggt

SEQ ID NO: 8780 - DNA, 914 bp, Oryza sativa
  ref <308>: DATABASE ACCESSION NUMBER: AK106128
  ref <309>: DATABASE ENTRY DATE: 2002-08-28
aaatcctctcctcgatctctcctgcaatcctcatcacacagcaaacccaaaccgcgagcggaatcctcagcctgctgagagagcctgagaccaagagggggattcttttttggttattgacgatggcgcagcgcgacaagaaggatcaggagccgacggagctcagggcgccggagatcacgctgtgcgccaacagctgcggattcccgggcaacccggccacgcagaacctctgccagaactgcttcttggcggccacggcgtccacctcgtcgccgtcttctttgtcgtcaccggtgctcgacaagcagccgccgaggccggcggcgccgctggttgagcctcaggctcctctcccaccgcctgtggaggagatggcctccgcgctcgcgacggcgccggcgccggtcgccaagacgtcggcggtgaaccggtgctccaggtgccggaagcgtgtcggcctcaccgggttccggtgccggtgcggccacctgttctgcggcgagcaccggtactccgaccgccacggctgcagctacgactacaagtcggcggcgagggacgccatcgccagggacaacccggtggtgcgcgcggccaagatcgttaggttctgagaggcaaacaaaattaaaaaaaaaatctactgttttagcaagaaatggagaaaaaaattgggaattgaaggtgtggatgttattattatgctgttctcttctcgcaattgtttttccctttttattctttttaattgcaaacgggaggataagtggtggaaaaggaatagtgtaacaataatggtgatgtgaggtggttgagggaaaaagaatcgaagaacaaatggattgggtgtgtatttgtctcgcactttctgctccatttttacaaaattattcggcatatggttattgctc

SEQ ID NO: 8781 - DNA, 1810 bp, Oryza sativa; identical to SEQ ID NO: 3164
  ref <308>: DATABASE ACCESSION NUMBER: AK106129
  ref <309>: DATABASE ENTRY DATE: 2002-08-28

SEQ ID NO: 8782 - DNA, 1306 bp, Oryza sativa
  ref <308>: DATABASE ACCESSION NUMBER: AK106130
  ref <309>: DATABASE ENTRY DATE: 2002-08-28
agctgcaaagcaagtgttcactttgattccatctccccatccaacccaagcatatctaggaagtgccatccacccgcgtgcaccgccaaattaactccctcctctccaccttaatttcctctctctttctgttaattgagtaaattggtgttgctgcttcttcctcctccgatcaatcgatcatctcccatcggcggtggcagcagacccgatctttctgttaattcagaagatggaggggtacgacgagcgtgagttctggcagttcagcgaccagctccgcctccacaacttctccagcctctccatcgccgactccatctggtcctccccctcgcctgccgccgtcgatcatagcagcaacaagctcgccctcgccaacaacagcaacaacaacgccaccgccaagacctacttcaacaagtccgtcggcaggccggccaacaacaacttcaacttcaactacaacagcaacagcgtcgtcgtagatgcgttcaacgggaagaagaaggccgctgtcgacgctcctgctggaggaggaggaggaggcaggaacaacaacaagaagaacagcagcagcaacgacaacaagatgagcagcaggttgaagaagagccagctgccggcgtcggagtcggtgccaaaggaggaggcgatcgggggatacatattcgtgtgcaacaacgagacgatggaggagaatctcaagaggcagctgttcggcctgccatccaggtacagggactcggtgagggccatcaggcccggcctcccgctcttcctctacaactactccacccaccagcttcacggcatcttcgaggccaccagcttcggcggatccaacatcgatcccggcgcttgggaggacagcaagtgccccggcggcgagtccaggttcccagcgcaggttcgggtggccacgcgcaagatctgtgagccgctggaggaggacgccttcaggcccgtgctgcaccactacgacggccccaagttccgcctcgagctcaccgtcgccgaggccctatcccttcttgacatcttcgccgagaagctcttcgcctgaccatccatcctacctcttccatctcaattatactactgtaacacaccatccatccatcgcccttgttaaatttatagtactagtaactggagtactacttacaacttacttactgctatatggagtagctaatagaggacggaacagaagcttattgctgtttcttacgcatagtacgctcctatggctgtaagaacaagttacataatataggcgaggaaaaataatatggcttttgtt

SEQ ID NO: 8783 - DNA, 1200 bp, Oryza sativa
  ref <308>: DATABASE ACCESSION NUMBER: AK106131
  ref <309>: DATABASE ENTRY DATE: 2002-08-28
gagaaggcccccagcgtcgcggagccgaaggatcaggattcactccgccctcgccgacctcgtcgccggccgccgcatcaccaccgacacctccccccatcgccgccggcgagagttgggtggtggagcgagcgtggccgcgaggggacgcggaggggcggcggcggcggcgattgttcgcgggatgagcagcttcggcggcaccagctccgtcgcctccggtggtgggaagaggctcgagtacgggcggacgcatgtcgtgaggcccaagggcgcgcacaaggccaccatcgtctggctccacggcctcggggacaacggagccagctggtctcaactactggaaacccttccccttcccaatataaaatggatttgccccaccgcgcctacaaggccagtggcagtttttggtgggttcccatcaactgcatggtttgatgttgctgatctttcagaagacgctcctgatgatgttgaggggttggatgcctcagctgcacatgttgcaaacttattatcaactgagccagctgacatcaaacttggtgttggtggctttagcatgggcgcagctaccgccctttactctgcaacctgctatgctcatggaaaatacggaaatggcaatccatatcctgtgaacttaagtgtgtctgttggtctcagtggctggcttccttgtgccaggtctttgaagaacaaaattgaaagctcacaggaggctgcacaaaaggcttcatccatacctcttttgctttgtcatggaaaagctgatgatgtagttctctacaagcatggtgagaaatctgctgacgcactgaagacaactggattttcaaatgtggtgttcaagtcctacaacagacttggacactacactgttccaaacaaaattgagaggtaaatggttgaatgaatagcgaagaacttggggcttgggtatacggccatggggtagtctggcgtgtcatcatgcggacatgcctcacggcatcttaactagaactcttataatttccacagtttgggtctttgttttgtttgtttcccttccctcttaaagcaggggacggcatcgtggtgtattatttgttttggttagcacggatgtttttgtttggtacgccgtgtgttcttccgattgggtcagttgtatgtttcctttatgagttatgagatgcattgggattttgggtt

SEQ ID NO: 8784 - DNA, 1174 bp, Oryza sativa
  ref <308>: DATABASE ACCESSION NUMBER: AK106132
  ref <309>: DATABASE ENTRY DATE: 2002-08-28
acccacatccgccgccgccgccgcagaatcggaagcaatccgccgcgagtcgcgaccatttcttgcgagtagtagtagaggggagagtgagtgaggggcgtgctgcaatggcgactgaggaggttgtccctgaggttccggtgaccgaggtggaggctgccgcggcggaggaggccgtcgaggagacgacggcggcggaggagaaggccgccaagccggcgaaggagaagaagaaggccggcaggccgccgaaggagaagaaggaggccaagccggcgaaggagaagaaggtgaaggaggccaaggccaagaagccccgcgtcgccgccgcccacccgccgtacgccgagatgatcatggaggcgatcgtggcgctgaaggagaggactggatcgagctcccaggccatcggcaagcacatccatgccaaccatggcgccaacctgccgcccaacttccgcaagctcctctccggcaacctcaagaagctcaccgccgccggcaagctggccaaggtcaagaactccttcaagctctcctccacccgccctgccgctccggccgccgccgacgccaagcccaaggccgcccccgccacgaagcccaaggtcaagaccaccaaggccgcgaagccggctgccaaggcgaaggctcctgctaccaccaaggccgcgaagccggcgaccaagaccaagatcaaggtcgccgccgcgccggcggcgaagcccaaggcgtctcccaaggcgaaggccaagaccgccacctcgccggtgaagccccgcggccgccctgccaagtccgccaagacctctgccaaggactcgcctgccaagaaggcggcgccggtggctgccaagaagaaggcggcggcgaccaagaagaaggcgtcggtggctgcggcgccggctgctcgcaagggtgcggcgaggaagagcatgaagtagaggtcgccggcgatgatgccacctggattggattgcccaccttttgatctccacaggcgacagcgccattagcatcatcatcagcaagtagtagcagaaattgtgttctgtaaatgcttgttcgtcttagttcgtttcacctccctctaggcggtatcatcatcttctcgcctgtaatgataggatcccatcatcctcaaaaaccataatacaaatatctatttcgtctt

SEQ ID NO: 8785 - DNA, 1279 bp, Oryza sativa; identical to SEQ ID NO: 3177
  ref <308>: DATABASE ACCESSION NUMBER: AK106133
  ref <309>: DATABASE ENTRY DATE: 2002-08-28

SEQ ID NO: 8786 - DNA, 1341 bp, Oryza sativa
  ref <308>: DATABASE ACCESSION NUMBER: AK106134
  ref <309>: DATABASE ENTRY DATE: 2002-08-28
gcttgatgcttcgcacgcgcgtgacggcgccgccgttcctcgcctctctcctctctcctctctccgccactccgcctctcccccatcccatcgtccacccggcccgagctgcggaggcgcagacctccgccgctgcgcccgcatcggcacagctacagaccaacgcggccgccggcgctgggagctcgggacgcgaggacagcggtacagccggacccccggctgactgacgcagtgccgcctgcctctgcccgtcgcggcgtcgccgttagcctcttctcttgctctctgccctctgcgctacggctgccggctcgtgtgactcagtggctgtgaagtccttcccagcgggcgagacggcgacccggctcctgcagttgagttgccatggatattgagcgacaagttcaagagacatttagtaaccactataaaagcgtggtgctaatcagaaggggatcagatggcatcggcactggctttattattggtaaaacaaggaaaagttatgttgcgatgacatgctaccatgtcatctcaggtaacccctctctgctttaaaggtcagactacctagggacacaaaggattatgttgctgagctgctatatgagcatcagggttatgatcttgcaattattaaagttaatggagtgagtggagaatgcccaattcttcaatttggtgatttagaaggtgtggcgcatagggccaatgtcgttcagcttggatatatccttgggtcacagtttgctttaaacttggacccctcagtatctcctggatcagtcataccggcaaaccaaaatggaatgatgggcagccaggatgttgtctacagtgccgctgcaagacatggcgcctcaggatctgcagtgatgtttgatgataaagttattggagtactatattcaatgtctacaaatagccaagttgcgtatgctcgatcaagtactactgttcacatggccttgaagaattggttgcatccaaatgatgctgcaataaccactgagaagatgatagaacttgtagtaaaacctctaaatgattcagagttagacgattgattggactggctatggattgcaagggcatgtggactcaatgggtgtagactctattaatgtaatcgcccatggttgtttgttatttttattgatgtcctctttccatgggaatatgttgtctatgtaatttttaatgtttgaaattatcaatagttagctagctattagatcttgttcttttcagctgatggacagcttacggatagttattgcatgcttttaaagctagaattcctttcaaaaaaaaatgttatcgttgacaactttttct

SEQ ID NO: 8787 - DNA, 1250 bp, Oryza sativa
  ref <308>: DATABASE ACCESSION NUMBER: AK106135
  ref <309>: DATABASE ENTRY DATE: 2002-08-28
gatgctgatgcaggttgagtcggggagcgaggcggcggcggcgacggcggcggcggtgctgacggcgccgctgtccctggagggcggcctcgcggcggagctccggccggcgaacctcgtgcagcgcgtgctcagcctcttccgcaacgtccgacccggctccgatctctctcactttcagctgcctgctacgttcaacctgccgaagtcgcagctccagttatacggcgagggagtgtactgcgtcggaaaagactacctgcggcggtgcgcgaaggggagcgacgccgtcgagcggttcgcggcggtcgtcggctggagcatctcgacgacgaggcctcccatcttcggcttcgcgccgtacaaccccgttcttggagagacccaccatgtctccagcggatcactccatgttcttctcgagcaggtgtctcatcgtcctccggtctctgcactgcatgccactgacgatgacggtgagatcgagctcgtctggtgccaaaacccaatcccgaaattccacggcacaagcgtggaagcgacagtgaaaggcatgaggcacgtcaagcttctgaaattcagcgagaattacgagatcgactgcccaaacctgctcatcaggttgctgcctgctccatcagcggagtggtctgggacagtcaggatcgtctgcaaggagtccgagctcgaagcagagttgatctactacaggagcaacgctttcctgggactaggtggcgatccaagatgtgttaagggtaagatattcagctcaagatcaggagagatcatctgcgagattgatggacattgggatcggatcgtgtcggcgaaggatgcgaagaccgggaaggtgtcggttctgtacgatgctgaatccgccattgctgacctcaagacacctgtggtcagaaaccaagagggcgtgtcaccttcagaatctgtggtggtttggggcgaggtgagcgatgccatcctgaagaaagactgggagagatctagtcaggcgaagcgacgagtggaggacacggcgaggaggctagacagagagaggaacgacaagggagaggtctggattcccaagcatttctcgctgtctcaggacaagaacggcagctgggaatgctcgccgctggagaaatctgtgcctccagctccgatcattgtcccctcatgactgtagattacatgtaacagatgatcctatatatactatataaatctataacatagctgatgatttgattttt

SEQ ID NO: 8788 - DNA, 1173 bp, Oryza sativa
  ref <308>: DATABASE ACCESSION NUMBER: AK106136
  ref <309>: DATABASE ENTRY DATE: 2002-08-28
aatgcactagctatcgttgacatattctctcaaaacaacacaaccaataacattgccaaacctgcggatccctttggtgttaattctagctctactcttcctggatcacagccatacaatgctccaacccagcatcctctgcaagcacagcagcagcctcagcaggtgggcctctatcctaatgggggagctgtgaaccctggaacatcataccccacaagttctgggtggaatggtcaaattgcgaacaatgcgacgcctccagcgcagcaaacagtgaattatgatgagcaaagtggagcccttcccccacctccttgggaagctcagtcagcgccaagcggcgacatgtcaaatggcggtatgcagtctcacccggtgtcaaacggccaatttggaggtatgccatctctcccaacaccatcaaaccagatgggtgggatgcagcccttgcacccgcagatgaaccagatgggaggtccacaagcccaccaaatgtacaacaaccaacaaccgggagccatgcaacccagccaacctgctgtaacccagatgcaatcaggctttgcgaaccaattcggttcgatgccaccacactccatgccaggaatgcaattccccgggatgcaaccttcgccgatgccaggagcgcagccagtcatgatgtatgcgcaaccgatgatgatgccgggtatgcagtttgcagccatgccgcaaccacgaatgtatggcccccagatgtcccagtaccggcttgtgcagcagcaagcggcacaatactacagcaacagccaagggaggccaacatactacgctggtatgaatgacctctcccagaaaatgtatggcctctccatgcaagacagctcttacatggggatgaacagctcgccctactctacaacaccttcatcatcatcttccatggggcaaccatcgaagcctgaggacaagctgtttggagatcttcttagcattgccaaaacaaagcagaacaaggcttaatgagaaacaatcaaatggagtattaaaaaaaaagtgtgaagaggtctaatatctcttgtgtaattgttacacatttttttccccacgtggcttgatcatacgctgttgtagcatttgaatgtataatcttgttccggttttgtacgatgcccggccccgattgatttc

SEQ ID NO: 8789 - DNA, 1410 bp, Oryza sativa
  ref <308>: DATABASE ACCESSION NUMBER: AK106137
  ref <309>: DATABASE ENTRY DATE: 2002-08-28
ttgatgcgaggacgggagctgcgcgacgtggtgggcgggagcggcgggctcggcaccggcggcggcggcctcccttccccgacctcccatgcgtggcggcggcatcccttccccgacggcggcgggcacggcgacgacgacggcggcgggtggcggtctgcggccgtccccttgtccccctgccgctaccgccggagggctgggacagtgggactgagccatggctgccatcgcctgtgtgcacgcgtgcaagtcatctctgaaatcacgcttgcagcagccatatcgatgcacgggtaacatctgatttcgatacatcggttggtgaagtcagcttttactgttgattaggacaaactctttgttggagatggcagagagtaaccggaaatgtacacagtttggcaaagaagggagaaaagaagaggaagagtatgtattgctagagttggatgattgtctttattctgacataaaaccaaatactccatatgtgatctctgtaagttggtcctccattttttaaatcagtggcttaagggtacggatgagcacgctttgagtgtacaaaatctgtttctctgaatgttagattttagttgtgcaatgtagtacccagaagtagctctatgatttcctttgcagcagaacgaccaacattaataatgccatatgcgcatagaaatatagcagtgagctctgtgctgattatctaggagagctcttgccatcagcatttaaaatcgcctaatagaattacaaaaggacaaagacatatatgttccatttatttgaaaataggaactgaacttagctcagttggttgacttgaacttggatgcctatttcttgtctataaattgatactgagtttctccttgtcatccatcaccttttttatatatattttgagcagcctttgttgctacaaagtgctaccagtgtgtgttatgtggtagctttggggagaaaatatataatctaccatgtgatgtgagaaaatggtatgccagcacatattctgcttattaatctgtttggtgccatgatttatggacgtgaaaataacaaagttaagtttttctcccacatccttcgatcacggagacgttggctcatatctgtttcaaaaagtttgttaactgtctttatcttatactgaacactactgagtttttcttgtcatgttttccagggtatctgattccttctggtcgtcgtcgtcttgatccagaacaagcgtgatcccgacctacgcgcttactttctcggcttggattgattgattgattgattgtgtgtgtgtttctcaggaagccatgctttgggccgcctcctgtaattaggttgaatctgagatgaactattgtttgaattctgttgtattctgattgtatctattattagttg

SEQ ID NO: 8790 - DNA, 1325 bp, Oryza sativa
  ref <308>: DATABASE ACCESSION NUMBER: AK106138
  ref <309>: DATABASE ENTRY DATE: 2002-08-28
gtgtgcatcccggcttcctctagctccgccctcgacgccaaccccaccaatccgccgcctccatgccctccccttcctccccggcctgagattagcttcgccgccgcgcccaatcgccccgccctgctgctccccgccgccgattccgtcccccgtccaccgccatggatcgcagcagcagcagcagcagcaacagcaacccgcatctcggggtcaacaagctcggccgcaacatccgcaaggccacgccaccgccgccgcagccgcagccgccgtcacgcccgccgcagccgcagccgcaggtctacaacatcagcaagaaccagttccgcgacatagtccagcagctcaccgcggggaccccctccccgcctccgccgccgcagccacagcaccagcaccacccgcaccgcccgctgccgccgcagcaccagcagcccaagcccccatccatgcgccttcagaagatccgcccgcctcccatctccacccccgtcgcgcggccccctcccgtccacaaccaccagatccccaaccctaaccacaaccccgccttccaccgcccaccgccgccgcagcccatgcccatgcctatgcctggtccccccgtctgggctgactcaccggtcaccgcctacatgcgcatcctcgagaactccctcttcagcgccaccccgccaggcgccgccgccgccgctgccgctgccgccgctgctgctacgggacaacaggcccctccgcaccaccctcatcccccacccccgccgccggtgccgtcgccagggatactcccctcgccgagcggctttctcaacctgctctcgcccacgcccaggtcgccctacccgctgctatcgccgggcttccagcacccggggccactcacgcccaacttccccgcgctgtcgccgctgccgggcactgggatcctgggtccagggcccatggctccgccgtcgcctggcctctggttcccgcagtcgccgtcagggctgctctcgccctccgggttcttgccaattctgagcccaaggtggagagagatgtagtgcacatcgctcgccgcagcgcagcacaaagctcccgtgaaggccacagccgggtaacatttgacgctagggttgtagctactgtgaggtgaattggtcgctgccccggagatgggcgcaggtgggttgcagcttcggacaccactatttgttgctctcacttactgcttgtgtgattagtcagtcattatatcagtcagtctataaggtggttgctcatatatttgtaattgtataactgggaaagtttttaattcattcacttctcttagctgc

SEQ ID NO: 8791 - DNA, 1005 bp, Oryza sativa
  ref <308>: DATABASE ACCESSION NUMBER: AK106139
  ref <309>: DATABASE ENTRY DATE: 2002-08-28
aaagagagagagaaaaaaaaaaaaactctccgcagccaaatcgagatctctttcccgtcctccaagccggcgactccctccccgtccggcggcggcgtcggcgtcggcgtcggcggcgaagagatcgatcgatggcgtcggcgttgtcctccctgcgctacggcgacagcctctcggtggtggcgatctcgggcgccacggccgtgctctgcgaggccatctcctggctcctcatctaccgcaccgccacctacaactccctccgcgccaccatcgagtgccactcccgcaagctcgacgccatgaaggccggcgcctccaactcctcgtcctcctcctccgccggcgccggcgcctccgggtcctcccagcccgcgggctcctcctcgtcgcgggccaagaagatggaccgcgtcgagaccagcctcaaggacgccgcgcgggagctgtcgctctccaagctcaagtccggcgccgtcgtggccgccgtgctcttcgtcgtcttcggcctgctcaactccctcttcgagggccgcgccgtcgccaagctgcccttcgccccggtgccgctcgtccagcgcatgagccaccgtggcgtccccgggaacgaccccaccgactgctccatggtcttcctctacttcctctgctccatcagcatccgcaccaacctgcagaagctgctcggcttcgcgccgccccgcgccgcggccgccgccggcgggggcctcttccccatgcccgatccgaaagtaaattgagctttcatgcacacccccatgaccgtgacggtgttgatttcggcatggacttccgtctccgagaagagtgattacgatggaaacggggagaaatgccatgagattctgtactcatacgcctgtttacaaattcgtttcccataacttgctagccaggtattcgcacacatgacctgcaaactgatggaagctagactttttatttttattattccatagagcaagcagtgaagtgaacttgacc

SEQ ID NO: 8792 - DNA, 1154 bp, Oryza sativa
  ref <308>: DATABASE ACCESSION NUMBER: AK106140
  ref <309>: DATABASE ENTRY DATE: 2002-08-28
ccgaccagtcccctcctttcccctcctcttgctactgtagctttccaatctctccccctccggcccctcttccccttcgattccggcggcttgccgccggcgagggttggaggaggggtccggccacctccccctagtagtattgtgtcaggtttgtcctgtagttagggtctgtcctgtgtctcttttgccggtgaggttctatggttgccggagttattgatggcgttggcgttggtcgatggcgagctgtggatgtttcctggcagcggcgtggtctcgtcgtcgtcgttgttggtgtcttgcagctagtggaagtggaggatatgctggatttgaagcttgaggtgatggggcggtgtctggtcttgccgccgccgtggtcattgctgctgcgcatggaggtgctgttggtgctctacgagaaggtttattgcttgtggtctctttccctctgtgccggctgtggtctgggatggtggtggtgctttgtgcctcttgctagtgtccgggatgatggcgtcgtcgccggagtcggtgatgtcgttgtccctgccaccgagctggccgaagcccttctccgacctcctccctcctcgggttcccagttggtgcttctgcttcaccttctgctagtccgctctttcccaacgttgtgcgtcgttccctctagagaacagttcattcgtcaatggttgtgctcttcactgcttcagggtggctggatctggggtccttctccctcttcgtttctgggcagttgtatccacgctgggtgggccattcgggttgagctcatgctcctcagattcaaaggcgaactccgtggtgaagtttggttaagtccggtgaagcttacaccaaaatctacggctcaacagcaaatctccaatttgtgcagactctgtgaaggcgtccgaagaggattaccggttcgtcaagcggtctgcatgtcaaaggagacccaaggttctaatcgtcgtggcttcgccgcagctcctgtcgattcgcgccttctacgctgcctagtttcaggaggttgtttgtactcttagtctagttttctctgatgtgcatcttgttggttctttctgttggcgatgtacggggcttgcccccttgatctgttgctctaatatatatgtttaagtttc

SEQ ID NO: 8793 - DNA, 1786 bp, Oryza sativa; identical to SEQ ID NO: 3189
  ref <308>: DATABASE ACCESSION NUMBER: AK106141
  ref <309>: DATABASE ENTRY DATE: 2002-08-28

SEQ ID NO: 8794 - DNA, 1199 bp, Oryza sativa
  ref <308>: DATABASE ACCESSION NUMBER: AK106142
  ref <309>: DATABASE ENTRY DATE: 2002-08-28
agctagttagataagcatattgagcttcgttcgcagccaagcaaacgctcgcgcgcgcagccggcaatggcgtcgttgtctgacccgaactcgccgccgccgcacgtcgtcgaggactgccgcggcgcgctgcagctgctcagcgacggcacggttgtccgcgccgccgcgccgccgccgccgttctacgtacgcttggacatcgacgacggccgcgtcgagtggaaggacgtcgtgtacgacgccgcccacggcctcggcgtccgcatgtacaggccggcggcgacggggggagcggaggagaagctgccggtggtggtgtacttccatggcggcggcttctgcatcggctcctgcacctggcccaacttccacgccggctgcctccgcctcgccgccgagctccccgccgtggtgctctccttcgactaccgcctcgcgccggagcaccgcctgcccgccgcgcacgaggacgcggcggcggcgctcatctggctccgcgaccagctcctctccgacccgtggctcgccgacgcggccgacgcgcgcaaggtgttcgtctcgggggaatccgccggcggcaacttcgcgcaccacctcgccgtgcggttcggcgcggcggggctggacccggtgagggtcgccgggtacgtcctcctcatgccggcgttcatctcggagaggccgacgccgtcggagctggcggcgccggccaccgcgttcctgacgcgcgacatgtgcgaccgctactgccgcctcgcgctgcccgccggcgccgacaaggaccacccgctcgtcaacccgttcgggccggcgagccggagcctggaggcggtggacgtcggccgcgtgctggtggtcgccgccgacggcgacctcctcagggacaagaacgtcgagtacgcggagcggatgaaggcgatggggaaggacgtggagctggtggtgttcgccggcgaggagcacgcgttcttcggcgtgaagccaatgtcggcggccaccggcgagctcgtcgaggtcatcaggcggttcatcgccggcgccgccgcgtaagtgatcgtgatcgagcgaacgccggcgacggcgaggtggtttgcctcgtgcgccacgtgttcgtaggcttattccacagatgcgacatggtggcaggcactgtgtccttgcaacaataattgagacaagcttaattacttcgtact

SEQ ID NO: 8795 - DNA, 1949 bp, Oryza sativa; identical to SEQ ID NO: 3173
  ref <308>: DATABASE ACCESSION NUMBER: AK106143
  ref <309>: DATABASE ENTRY DATE: 2002-08-28

SEQ ID NO: 8796 - DNA, 1279 bp, Oryza sativa
  ref <308>: DATABASE ACCESSION NUMBER: AK106144
  ref <309>: DATABASE ENTRY DATE: 2002-08-28
gtgcgagctaagcgcaattgggcgaacgccgcgagccgccaccaagccaaaccagagcactccgccgccgcgccatggcttccccgtccccgtcctcctcacctctccacccgcagcatcaacaccagcacccgcttcccccgcacccgcagccccagtaccaatccccaccgcctccgatgccgccgccgccccccgcggcgccactcaaagctatcgatctggaggtgaccgtcgtctcgggcaagcacctgaagaacgtcaactggcgccgcggcgacctccgcgcctacgtcgtcgcctacctcgacccttcccgccgcgccgccacccgccccgacgacgtcggcggctgcaagccggcatggaacgagcgcgtcgtcctccctctcccgccccacctctccccgcacgatccgtcgctgctcctctccctcgatgtcttccactccaagccctccgattcgcccaagccgctcgtcggctccgcccgctcccctctccgtgacctcctcttctcaaccaaccctaaccctagccccgattcccccgcctccgcgctgatcaccctcccgctcctccgcccctccggccgcccacaggggaagctccgcatccgcctcgcccttcgcgagcgctccccgcctcctcccgagccgcagtatccgcctccttcctcctccccctactatttcccaccccctccgcctcccgcatactcggccccgcctccgcctcaatacggctcggagcagtactaccgttccggtgggtactactctgcaccaccgccaccgcctcagtatgagtacaccgcagggccctctgccccggtggaatacaacaggcaatatgatcctagagcggggagtgggagtggaaatgggaggtatggagtaggcactgggattgcagtgggaacggtgacgggggcccttggagggcttgcaattgatgaaggtgtgaaatacaaagaggagaagtcggcagatcgggttgaagataaggtagtgcctgctggaagagatgacgactcaagggggtaccgtgagtattgattataggagttcatgtgggtgaggatgcactgtgagttggtccttctccatccctgccaatgtgggaataaaattgcagtgtggtattatgcttcgctctcttgtatatattttcttcagtgttgtgaattatcatgttacttatgcttatggcttgcgtcttatgacaaatttggtgtgtgttatgaatgttctattatcatatttaaaactgtacatgt

SEQ ID NO: 8797 - DNA, 1599 bp, Oryza sativa; identical to SEQ ID NO: 4321
  ref <308>: DATABASE ACCESSION NUMBER: AK106145
  ref <309>: DATABASE ENTRY DATE: 2002-08-28

SEQ ID NO: 8798 - DNA, 1283 bp, Oryza sativa
  ref <308>: DATABASE ACCESSION NUMBER: AK106146
  ref <309>: DATABASE ENTRY DATE: 2002-08-28
aaaaaaaaatgtttttttgctagccgccgtcctccccgaaaccctaatccccaaatcgaaggatcgggagccgccggattggtcctcaaatcgaccccaaatcgaaggattgagccagggacgccgccggatccgtcctctaatcgaccgccatggcgatcgcccgcaccggcgtgtacgtcgacgactacctcgagtattcgagcacgctggccggcgacctgcagaggattctctccaccatgcgcgagctcgacgagagggctcatggcattatgggacagaccaaagaacagataaagtatctactcggagtgccatcccatgggttcgacaggtcaaacatggatgatgatgaatctgcctcagagagaatgaaaaaggacatcgaagctagtcaggacaatgcgttgagtctctgcaccgagaaagtgttgcttgcacgccaagcttatgacctgatagagagtcatatcaaacgtctggatgaagacttaggccagtttgcagaagacttgaagcaagaaggaaagatacctccagatgaaccatcaatccttcctgcaatttcagcatttagcagggatgacaaacggaggcctggtttcagtacacctcaagcaacaaagaagttcagagagagggaatgggacagggaaaggggtatggacttcgacttaatgccccctccaggtagcaacaagaaaacaactgcacctatggatgtggatcaaacaattgatccaaatgaaccaacatactgtatatgccaccagatttcatatggtgatatgattgcttgtgacaatgataactgcgaaggaggtgaatggttccattacacttgtgttggtctgacaccagaaacgagattcaaggggaaatggttttgcccaacatgcaggaatctttaatgagaggttctccaaagttgtgcgaagcaggacagtggctccactgctcatgtgttagttcggcgctcggagcggtttcagaagatgcatgagggaatcctcagtaatgagttggtccaaagttggtaggatgcaaaatggtgacaactttggaattgtagggtgcgcattacttgacagttaacagtgggttaaggttgttggttcaccaggtttactttagtttgtccatgtatatgcaaggggcaacagtaagactatatatataaacttgttcaaaaatctctccctgtgagacagttgttcttatagtggtgaaatgctttactgctcagtgcagctgctgtagtctcccaaatgttggctacc

SEQ ID NO: 8799 - DNA, 1249 bp, Oryza sativa; identical to SEQ ID NO: 4323
  ref <308>: DATABASE ACCESSION NUMBER: AK106147
  ref <309>: DATABASE ENTRY DATE: 2002-08-28

SEQ ID NO: 8800 - DNA, 1128 bp, Oryza sativa; identical to SEQ ID NO: 2215
  ref <308>: DATABASE ACCESSION NUMBER: AK106148
  ref <309>: DATABASE ENTRY DATE: 2002-08-28

SEQ ID NO: 8801 - DNA, 1377 bp, Oryza sativa
  ref <308>: DATABASE ACCESSION NUMBER: AK106149
  ref <309>: DATABASE ENTRY DATE: 2002-08-28
cgcttgaagggaaagtaagaaagaaagaaaagaaaaaaaaaaggaaaatcgtgtctcgtctcgtctcgtcttcgtctcccccgattcccgagcagcttctcgaaaccctcgcggcctcgattccggcgatggcggagcccaacccgcaagtggagagggaggtggaggtggaggaggtgaggaggccgaagctgaggtacttggagttcgtgcaggtggcggcagcgcaggcgacgatctgcctcgcggggctctacgcgcttgccaaggaccacgccggcccgctccgccccggcgtcgacgccgtcgagtccgccgtcaagggcgtcgtcggccccgtctacggccgcttccatggcgtccccctcgacgtcctcgccttcgtcgaccgcaaggtggatgacacggtgcaagagctggaccgacacctcccgccgacgctgaaggccgcctccgccaaggcttgcgcggtggcccgcggcgtgccggacgtggcgagggagctcaccgcggaggtgcagcagtcgggcgtcaccggcgccgcgcgcgtcgcgtacgccaaggtcgagcccgtggccaagggcgtgtacggcaggatccagccggcggccaaggacctctacgtgcgctacgagccggcggcggagcacctcgccgtctccacctggcgctcgctcaacaacctgccgctgttcccgcaggtggcgcagatcgccgtgcccaccgccgcctactgggccgagaagtacaacaaggtgatcgccgccgcggccgacaagggttacaccggagcacagtacctccccgccatccccaccgagcgcatcgccaaggttttcggcgagttatcgccggaggcccagccgtcgaagagcgagtcggcgaagacccagtaggtgaggtcaccgcgcctgaaggtgagaggtagccttcgcctgaagtcctgaactgaataagtaagagtggggcgcttatggcagcagaaaaatggtgttttagatgtatgcatgtgacgacattttcgtggatgatgatgttctacttagctcttttactttgtgttgtggcgtacgtttaatcctcctggttttgtataaaagctgtggttgatgtcgcaatcttttagctaatccagtgcaattaggcttgaactttctgttgctatctcggttgctgtcgatgcaggtaagcaggttctattggctactagcttagaatcctttggcgattcctgcccattgtatctgctagactactgccactgctagtctgtttaagctgtagaggctactagagcgctctgttgtggtgtcgttttgctccgacgtcgcaggtgtcgtattagttccgataaaattatccgcgatttgtgtcctg

SEQ ID NO: 8802 - DNA, 1892 bp, Oryza sativa; identical to SEQ ID NO: 4318
  ref <308>: DATABASE ACCESSION NUMBER: AK106150
  ref <309>: DATABASE ENTRY DATE: 2002-08-28

SEQ ID NO: 8803 - DNA, 1489 bp, Oryza sativa
  ref <308>: DATABASE ACCESSION NUMBER: AK106151
  ref <309>: DATABASE ENTRY DATE: 2002-08-28
attccgcgccccctagccaagcagcacgagcacacgagaaaacaagagaaaaaaagcagcagcggccatggagggatacgaccgcgagttctaccagttcagcgaccagctgcggctgcagacggcgagcttctccggcctctccctcggcgactccatctggtcctccccctccgaccgccgcaacgagccggccttcgacggcgagtaccaccacttctcctccccctcccccgccaagaacgccatcgccaacatcaacggcgtcgccggaaacctggatggcccgggcctcatcggctccggcaagctcgccttcggcgccaccaaggccgaccgctacaacagcgtcaacctccccgtcgacaacaacaacaacaacaagtcctacggcggcgccgccaagattaacaacaacaacgtcaacgccttcgggttcaacaagatggggggttacaacaacagcagcaacggcggcggcaactacggcggcaacggcggcgacgtgaagagctacttcaacaagtcggtcgggaggccggcgagcaacaacaacaacaacaatagtaacggcggtggcgggtactacggcaagaagggcggcgacggcgccggcgggaagaagaagcacgccaagaacagcgacagcggcgcgcaggcgtcggacaagaggttcaagacgctgccggcgtcggaggcgctcccccgggacgaggccatcggcggctacatcttcgtctgcaacaacgacaccatggaggaaaacctcaagaggcagctcttcgggcttccatcgagatacagggattcagtgagggcgatcaggccagggctgcccctcttcctctacaactactccacccaccagctccacggcatcttcgaggctgcgagctttggcggaacaaacatcgatccgacggcgtgggaggacaagaagtgccccggcgagtcgcgcttccctgcacaggtgaaggttgcgacgaggaagatctatgacccgctggaggaggacgccttccggccgatcctccaccactacgacggccccaagttcaggctggagctcagcgtcgccgaggcgctctcccttcttgacatctttgcagacaaggatgacgcctgaggctactgcttccctgctgctgcttgctgaagaatatcaggggactgccggtgaaggacacaagtaataaagattcgacgtgtatccgttgtgagatatacatacataaatacataaatacaagtagtaagtaattaacggtgtgtgctgatgaatttggaacgattagtacaatttctgagggggtttcccatctcgcgggctaagagatgatgcgtcccattgtattttttttaatcatgtgcgatgatgatgacttcagtctgcagaggattagcccctttgttgttgtaatatttatacacacgttatttgcttctggacggccagccatgtataatactttgagacctctttctgttt

SEQ ID NO: 8804 - DNA, 1668 bp, Oryza sativa; identical to SEQ ID NO: 4315
  ref <308>: DATABASE ACCESSION NUMBER: AK106152
  ref <309>: DATABASE ENTRY DATE: 2002-08-28

SEQ ID NO: 8805 - DNA, 1007 bp, Oryza sativa
  ref <308>: DATABASE ACCESSION NUMBER: AK106153
  ref <309>: DATABASE ENTRY DATE: 2002-08-28
atgcatcgcctccattattcatgcttcgattctccatgctttcctctactgctcattggtaacattcggcaaatttgacagatgggtatattggtcatcttggtggacctgcaatgctgccgctgcgatgccaagatcaggaaggtcctgggctgccttgaagaggagtactgcatcgagaaggtggagtacgacgtgaagaacaacagggtgatcgtgcgcgggaagttcgacccggagaagctgtgcaagaagatctggtgcaaggccggcaagatcatcaaggagatcctcatcgtcgacgtctggccgccgccgctgccgcagccgccgccgccgtgcaagccgccgccgtgcgagaagcctccggaggactgcaagcccaagccctgccattgctgcagctgcgagaagcccaagcccaagcccaagccctgccactgcgagaagcccaagccctgtcactgcgagaagcccaagccatgcgagaagccgccgccgtgcaagccggaggagccgccgaagccgccgccggagaagccgccgccgaagccggagtgcaagctggtgccgtacccttacccggtgccgtacccgtacgccgggcagtggtgctgcccaaagcctgagccgccgaagccgccgccgcccgtctgcccgccgccgccgtggtgctacaccgaggacaacgccaacgcctgctccatcatgtgatggccggccggcggtcggcgtcgatcacgatcatctctgctgcttaatttccttgcttgctactacctctgctcctttccttgcctcggaaatcggaataaattaaacacgaggctgatcgatgtgtttgtaattaatccatggtgtttgtgttgtgtgctgtgtgggctgtataataattaattacagtatgttcatgtaaatttgtttgtttgtttgtttatgttgttcgatatgtataattatgtacaataattaatcgtggagaggctcactaaactcataaactgtag

SEQ ID NO: 8806 - DNA, 1910 bp, Oryza sativa; identical to SEQ ID NO: 4473
  ref <308>: DATABASE ACCESSION NUMBER: AK106154
  ref <309>: DATABASE ENTRY DATE: 2002-08-28

SEQ ID NO: 8807 - DNA, 1116 bp, Oryza sativa
  ref <308>: DATABASE ACCESSION NUMBER: AK106155
  ref <309>: DATABASE ENTRY DATE: 2002-08-28
gaaacctcgcccttcgtctccgcctccgtcgcctccatctcgccgcgatccctctccccggcgatggccgccgccctccgctcctcctgcgccgccgcgcgccgtctgctccggatctccccggccgcgctgtccaccctcaccgccgcctcctcccgccccgccgcggtggcgcccctcgcgcgcccgatcgccgccgccgccgtctcaggtggcaacaatgccttttcatggaacttgaggcgcttgttcagctcaaatgaaaagcatctgccggcgatatctgacccagaagttgaatctgcgtttaaggatttgatggctgctagctggactggacttccagattctcttgtaattgaagcaaagaaagctgcatccaaagctacggatgataaggctgggaaagaggctttgctaaatgtatttcgtgcagctgaggcatgtgaagaatttggtggagttctagtcaccctaagaatggctctagatgatctttgtggtataactggtgagaatgtgggccccttgcctggttatatagaagatgctgttaaatctgcatataagcgttacatgaaatatctggaatcatttggcccggaggaaaattatctacgtaagaaagtggagaatgagttggggactaaaatgatacacctgaaaatgcggtgcagtggtgtagggtccgagtggggaaagatcaccctgattggcacctcaggcatctcaggatcctatgtcgagctaagggcatgaggaaagtctgcagatcataaccatggcagaacatcgttttctgagggaaggatgcatatcagaacaaggtgttccgtttctcttttcttcttactgtgtagctaccttgccaataacaaggagatcatcaaacagatgtgcacttaaagtaattcagtgtgctccagaccttcctgctgtaataagaacgtgtttctggggttcacgtcgatttgtttttgctccagtcatggtggtgcgtgaagcatgtagattcagttgattccttgcatgagccgtgaattgtttgttcaagctcctactctgtatggctctattgaactcagaagtagcttaatcggtgttcagattccttgc

SEQ ID NO: 8808 - DNA, 1411 bp, Oryza sativa
  ref <308>: DATABASE ACCESSION NUMBER: AK106156
  ref <309>: DATABASE ENTRY DATE: 2002-08-28
gaacccaaacaaatctgccggttctcccacttcgtacgccgcctcgccggaaggcgaagaggaacaaaccgcggcgggggaggcagaggagcatcagctgcgagccggcgacggcgaggcccctgccatggttgtccacgtggtgtacaggaggagggagagctcttggagagggggcgagacgtccgcgaggctccaccagggcgccgccgccatgagcaacccggccggcggcaagcacctcgtccgcctcgccggctcctcctcgctccgcggtggcgccgccctgtctcccgccgtctccatctccagcgggagccgccctgccacgcgagccggggcccgtgccctgcgcgccgcctcgcctcccccggcctgctccatcgcctccgtcgggtgctgggagtcccgcgcgctccgccttgatggcgatgaggactgggaggtggtcgtcgcccagggcgatgacgccgtcggggcggattctggggcgttcgacgctgtccaggaggcggcggatgagcacgcggaggcgttcggggccccgcccaccgaccaggaagtccgcgccgccgttgctagcatccaagaggtatttgaaaaccatcctggattggattctgatgcacctgcccaagcacttgcattgtcccccatctcaggacttcctccatctggaatgtttgttaattatttttctgaaggttctacaccatctgatattaagattgaggattctactccatctgatgttaagattgaccaattagccagcttagaacactctacaccagacactgcatcagaggaatgtattgaacctgctatgcttgtccttaactcaactgctcttttgacaagggaacatcggaatgtgctggatgcattccacctattgcaagtagattcttctgtccagaaaatggttatggccttgtcaactgataagtctgtatgggatgccgtgatgaaaaatgaggtggtgcaagaattcaggaagtcctttcaggatgctaaggaggctgatcccaatggaagttcttctgcttctcctggagtgatgaagtgggtcatggaaaccacccaagcaaagatcaaggaattccttgagagcatacttaagcttgtgaacatgctctttcaagctcagagtgaggactatgatttgtatgacgatacagtgagaatgtccttcatgctcgcagtgttcgtcttcattgtggtgactgtggctcgcattaagtgatgccaaaaattcgtcgacttcacatttggtggtctgttagctgtgtacaggatatgttctagccttttaaattcttgtcgaatgggttaagatcatggatggtatcattcttagttgtcagttcaagaactttcattttaaaattgccaagacatcaagattctc

SEQ ID NO: 8809 - DNA, 1573 bp, Oryza sativa
  ref <308>: DATABASE ACCESSION NUMBER: AK106157
  ref <309>: DATABASE ENTRY DATE: 2002-08-28
aaatccgagcaaatcaacaacacacgatcaatcgatcgattaatcctctcgagtaatcgccttgaaatcatcggttgatttcttgcagagattaagtagcagcaggtgttcgtcgagccgagcggcgatgtctccctcccctgatctcgcccggatcctcccccgcgtgctcatcgtctcccgccgcaccgtccgcaagaacaagttcgtcgacttcgtcggggagtaccacctcgacctcatcgtgggatacggcgcagtgccggtgatcgtgccgcgggtcgccggcgtgcacacgctgctcgactcgttcgagcccatccatggcgtgctgctgtgcgagggcgaggacgtcgacccgtcgctgtacggcggcggcggtgcggggtcaggggggctctcggcggagcagctcgacgctgtgcggagcctccacccgagcgacgccgccatcgaccacgagaaggactccatcgagctccgcctcgcgcgccgctgcctcgagcgcaacatccccttcctcggcatctgccgcggctcgcaggtgctcaacgtcgcccgcggcggcacgctctaccaggacgtcgaccacgagctccccgccgccgccgccgccgttcgccacatcaactacgacaactacgacgggcaccgccacccggtgcgcgtcctccccggcacgccgctgcacgagtggttcgcggagtcgctcgacggcgaggacagccggctgacggtgaacagctaccaccaccagggcgtgcggcggctggcggagcggttcgtgcccatggcgttcgcgccggacggcctcgtcgaggggttctacgaccccgacgcgtacaaccccggcgagggcaagttcatcatggggctccagttccacccggagcgcatgcggaaggccggctccgacgagttcgactacccgggctgccccatggcctaccaggcgttcgtccgcgccgtcgtcgcgtaccaggagaagctggccgccgccgccgccgccatgcccgcctcgccgaagctgaaccaggagatggagaagcagcgcaaggtgctcgtccggagcttctcgctcgccaagaacctgtacgtctccggcgccgaagctggcacgccgcggccggccgagcagcgcgacctcgacgccggcgccgagttcctcgagcagtcgaacacggcggcgctgagcgtgcagcaggagaagcggctgaagcagatgggcgcgacggtgaggaacgcgtcggggtacatcaaccggctgaagctgaacgaggagcgggaggcggcggcgagggcgctcatggcgaagatgtccatcgaccagctctccgacctcgcctccttctaccacatcatggggaccatctgctccgaggtgctcgacaggaagctgcactccgctgctcccgctccatgaatctctcttgcctcgctctccatcacaccatgctgtgtgctcctgcttgtttgtttgtttgatcattctcatgacgacatgattgatattatcaaatgttaatgcaaatgtttacgagataatattatcgtgtttctgttcaaaacaaac

SEQ ID NO: 8810 - DNA, 1201 bp, Oryza sativa
  ref <308>: DATABASE ACCESSION NUMBER: AK106158
  ref <309>: DATABASE ENTRY DATE: 2002-08-28
aaaccacgcaggaaacctcagaaaatcaccgtacgcgacgcgggcccaagaaaaccccgacagaaaccgcgcagcagcaacaccaccaccggcgtcggagatggcgttccggctgagcaacagcctgctcgggatcctgaacgcggtgacgttcctcctgtcggtgcccgtgctgggcggcggcatctggctggcgacgcgcgccgacggcacggagtgcgagcgctacttctcggcgccggtgatcgcgttcggggtgttcctcctcctcgtctccctcgcgggcctcgtcggcgcctgctgccgcgtcaactgcctcctctggttctacctcgtcgccatgttcgtcctcatcgtcgtcctcttctgcttcaccgtcttcgccttcgtcgtcaccaacaagggcgccggcgaggccgtctccggcagagggtacaaggagtacaggctcggcgactactccaactggctgcagaagcggatggagaacagcaagaactggaacaggatcaggagctgcctccaggactccaaggtctgcaagaaactgcaggacaagaactgggatcggacccagttcttcaaagccgacctctccccgctcgagtccggatgctgcaagccacccagcagctgcaacttcctctacgtcagcggcacgaactggacgaaggtgcccaccaactcgtcggacccggactgcaacacgtgggtcgacgacggcacgcagctgtgctacaactgccagtcgtgcaaggccggcgcggtggcgaccctgaagcgggactggaagcgcgtcgccgtcgtctgcatcgtcttcctcgtcttcatcgtcatcgtctactccctcggctgctgcgcgttcaggaacaaccggagggacaaccgcggcgcctatcgcggtgccgcgtggaagggcggatacgcctgatttcattcgatcgatcgatcgatttgcacggcgtaattgattggcatgttcatgcgatcatgtcagatatctgttcataggcttagctctgatattctagccctgtacaggcgagattattctgggttctgatcatctgcttgttactctttgatcaggagtagtaggtttctgtatgcagttctttgatgcaacttagttgcaccctacatcatatttgtactcgatcggatttatttcatatatgtaatatagtattcctttttattt

SEQ ID NO: 8811 - DNA, 1265 bp, Oryza sativa
  ref <308>: DATABASE ACCESSION NUMBER: AK106159
  ref <309>: DATABASE ENTRY DATE: 2002-08-28
aatctctcgtggcctcctgcgagcgagccgcgacgacgacgacgacctcgcgagtccgcaagaacgccgcggcgactgacctgctctgctcggctgctcgccattgattttctctgtctgctcggctgctcgcttgcttgcgctgtccagtttagctctgtctagctaggtagactgcggccatggcggcggcggtggcgtcgtcttgctgcgcctcgaccagcgctcgcccactggttcgccgcgccgggagcaggaacgggaagctgtggtgggcgggtggtgtcaggaaggcgcggctgctgtccatctccgccacggccgcggcgccgtcgggcgtggactacgcggcgggcaccggcgccgccgccgacgacgacgccgtggctgcgctcaaagtcaagcttctgagcgcggtgtccgggctgaaccgcggcctcgcggcgagccaggaggatcttgaccgcgccgacgcggcggcgcgggagctcgaggcggcggcgggcggcggccccgtcgacctggagagggacgtggacaagctgcaggggcggtggaggctggtgtacagcagcgcgttctcgtcgcggacgctcggcggcagccgccccggcccgcccaccggccgcctcctccccatcaccctcgggcaggtgtttcagaggatcgatgttgtcagcaaggacttcgacaacatcgtcgatgtcgagctcggcgcgccatggccgctgccgccggtggagctgacggcgacgctggctcacaagtttgagatcatcggcacctcgagcataaagatcacattcgacaagacgacggtgaagacgaaggggaacctgtcccagctgccgccgctggaggtccctcgcatcccggacaacctccggccgccgtccaacaccggcagcggcgagttcgaggtgacctacctcgacggcgacacccgcatcacccgcggggacagaggggagctcagggtgttcgtcatctcgtgatcggacggacgcgttcgcgacataggtatgcggcttgcgattctgaaactgaaactgaagcgcacacacggttttgtgttctttctctgctactagtagatcctcactctcttgatctgaccatctttgtactatacttcagtattgttcgtgcgttctgtattgttatagattttgcagatattcaacaagtagagggaaatatgtcaaaatgagaaatcgaggaaaatatatttccaaaagaaaaatataggtgcattcgtaatgttc

SEQ ID NO: 8812 - DNA, 1130 bp, Oryza sativa
  ref <308>: DATABASE ACCESSION NUMBER: AK106160
  ref <309>: DATABASE ENTRY DATE: 2002-08-28
attctcgcatttgccagcttccaccaactgtcaaccgcctccgcgatgttctctccctccaagctcctcgccgcgaccgtcggcctcgccttgctggccctctcgtccaccacctcggaggtctcggcgcagtgtgcgcttcccaacacgtacaggtggacgccctcacccaacgcggcgttggcgcagcccaagaacgggtggatctcgctcaaggacttcactcacgtcccgtacaacggcaagcacctcgtctacgcctccaccgttgtgggctcaggctacaagtcgatgaactttggcctcttctccaactggaatgaaatgggcagcgtgagccagaacctcatgcccttcaacgcggtcgcgcccacactcttcctcttccgccccaagaacatttgggtgctagcctaccagtggggggcctcctcgttcagctaccgaacgtcaagcgacccgaccaacgtcaacagctggtcgggcgagcagcctctcttctcgggcaagatcactggcgccgactatggaccgatcgaccagacagtcattggcgacagcaagaacatgtacctcttctttgcaggtgacaacggcaagatctatcgtgccagcatgcccattggcaacttccctggtaactttggcaccgcttcgaccatcattatgagcgacacgcgcgacaatctgtttgaagctgtccaagtctacacccttaagggccagaacaagtacctcatgattgtcgaggcgatggcgaacggcggcgtccgctacttccgatccttcactgccacggacctgggtggatcatggacgccgcaggccacgagcctgaacgcgccgttcgccagcaagggcaacagcggtgtcacgtggtcggacgacgtgagccatggtgacttgatccgcagcgaccccgacgaaaagatgaccgttgatccctgcaacttgcagctgctcttccagggcctgcagccaaggtggaatggcgattacgacaagaagccgtaccgtccaggtctcctcacccttcagaagtgaagtagttgagggcgtgacccttcatcgtcagctccatgtcttccacattggatatccctttgaattcagtattgtcaacttggtac

SEQ ID NO: 8813 - DNA, 1988 bp, Oryza sativa; identical to SEQ ID NO: 4347
  ref <308>: DATABASE ACCESSION NUMBER: AK106161
  ref <309>: DATABASE ENTRY DATE: 2002-08-28

SEQ ID NO: 8814 - DNA, 1815 bp, Oryza sativa
  ref <308>: DATABASE ACCESSION NUMBER: AK106162
  ref <309>: DATABASE ENTRY DATE: 2002-08-28
gcgtttaccctagcaatccattttagattgattccgtgtagatcgatggagtttggggcggctggtagttccaggccgggagactaattctgatgcgattcgacagcggacggatatttggagagtctgtctctttttgccgccgcctatgattcggagcagcaagcgccgccgcctgacgcccatccccagcgacgccggcaagatgtcgccggattgggcttcgcttgaccaggatctggtggggctgatcggggggcgggtgcttgccggcgacgacatgcgggactacgtccggttccgcgccgtctgctctcactggagcgcaagcaccgtccgcccactcggccgcggcgtcaccgaccggcgtttccacccgcggcggtggatgatgctaccggagggccacggcctctaccccggccatcccgacctccgcggctacgtccgcttcttcaacctctccaccgccgccttggtccgtgtccatctaccgctcctacgcgaccacgtcatcatcgactcggtcgacggcctcctgctcctgcaccgcgaccacgacacagccatccgcctcctccaccccttcaccggcgatgtcgccgacctcccgccgctggcttccctcctgccacagatggaatccgagagccgcgaccgcagccagcgaagcaagcacagcagactaatgaaagtttgcgcatctgttaccgtcacctccactggcaccatcaccgtcatgctggcccttgaaatcctgcaccgcgtagcctacgccactcccggtgaccaacggtggactctctctgcctggacgctcaaaccttttgtcaaacccgtatctttccaaggcaaactctatgctttgcagctctcatcttacgacatacataaggtatacatctaccagtttaatccaccatgccaagataacgacaagggattgcttcatctgccattgccagtgaagattgctgaatgcccaatggacaaatttctatacctgctcaactttgctgaatgtggttcagagctcttgctggttgcctataatggtgtttctcgttcaaagctgctagtatacagacttgctgaccttgtcagtggaaggattgagccagtaacgaccattggagaccacgccttgttccttgatgaacgttgtctctgtgtctcactctcaaataacaaggaggggagtaagatccttccctccgatttgtctaactctatcatttgcatgcatagtttgcaggtcgatcctagttcactagatatatttcgttttgagcaatatgacctaggtactggtacctgggctccagctagtgacggagacattttccataaaccaccaccgagtccccatacacttatccatcatatctttacttgctgcaatcgcagatattggaataaaggaatcatgtattgcagtaaaagacagcctatttggttggtgaagcaagaactgcggtttggggcttgatgggctcttgtttccgctgaggtcttttcctccagaatatctagaggagcaaataaactatgggtgtgttcggagggggcattttacagcagcggctgcggctgcagcagttcaaaactgctgcggcagcgatgccgccgaacagagtcgatgtgttctctattgaaagtccctggatcaatcgtccaattagtgtatggacctttgatgccttcttccctggattaatcgtccaattagtgcatggacctttgatgccttcttcttggctgtttgacggacctttgttgccccatctttaacagtatgctacacatctattatag

SEQ ID NO: 8815 - DNA, 1193 bp, Oryza sativa
  ref <308>: DATABASE ACCESSION NUMBER: AK106163
  ref <309>: DATABASE ENTRY DATE: 2002-08-28
atcatcacaagctcacaagttcacaacccaacacccaaaagcaaaagaaaagcagcaaccaaagatgtgcggcggagcgatccttgcggagctcataccgagcgcgccggcggcgaggcgcgtcacggcgggccacgtctggccgggcgacgccaacaaggccaagaagaagggcgcgcgcgccgacgacttcgaggccgcgttccgcgacttcgacaacgactccgatgacgaggagatgatggtggaggaggcggaggaggaggaggcgacctccgagcacaagccgttcgtcttccgcgccaagaaggcggcggcggcggcgtcgagcaggcgcaggaagccggcgcagtacaggggcgtgcggcgccggccgtgggggaagtgggcggcggagatccgcgaccccgtcaagggcatccgcgtctggctcggcaccttcaccaacgccgaggccgccgcgctcgcctacgacgacgccgcgcgcgccatccgcggggacagggccaagctcaacttcccttccgctaccacccctgacacccgcaagcgcggccgcgccaccgccgccgccgccccggccgtcaaggcgaccccggtcatcaacctcgtcgaggaggaggacgaggaggaggtcgccgccgccatggcgtccatcaagtacgagcccgagaccagcgagagctccgagtcgaacgccctcccggacttctcctggcagggcatgtcggcctccgacgagttcgccgtcgccgcggcggcgctgtcgctcgacagcgacgacgacctcgccaagaagcgtccgaggaccgagccggaggacaccaccgactccggctccggcgacgacaccgacgcgctgttcgacgcgctgctgttcgccgaccagtacaaccacttcaacggcggcgcctacgagtccctggacagcctgttcagcgccgacgccgtgcagaccaccgccgccgccgccgccgccgaccagggcatggggctctggagcttcgacgacggctgctgcctcgtcgacgtcgaggccagcttgtccttctaggctctagccgtcgtctccggcgaccctgtgactcgatcttgtaccatgtcatgtacatagaagagtggttttgccaagcaagcatgtgttcgtcctggttcctttcggtaatgaaaaattatgtgaggcttctcgttct

SEQ ID NO: 8816 - DNA, 1257 bp, Oryza sativa
  ref <308>: DATABASE ACCESSION NUMBER: AK106164
  ref <309>: DATABASE ENTRY DATE: 2002-08-28
tagatatggcagtgatgcggactactttatgaggtgtctcctgccatttttttttagagtagattcgtcagtaatggcggatcttgccatggagtagtagtagtagtagtagtagtagtagtagcagggggttccttcggtgatagcgaagggtgcttagccattaagcggcggcgatgtctctgaagagcattgtgcgggagctgagggagatgagggacggcatcggcagcatgtcgaggcgagccgctgacgggcgcgccggcggcgggcgcggcggctcgcggcattcttggccggtcctgtggtcggagcagcagcagccgccgcagcagcagcagctgcagcgtcaggagcatcagcagcagcaggggcggtgggcgaacctgccgccggagctgctgctggacgtgatccagagggtggaggccagcgaggcgacgtggccggcgcggcggcaggtggtggcgtgcgccgccgtctgccgctcgtggcgcgaggtcaccaaggaggtggtgaagacgctcgaggagtgcggcaggattaccttccccatctccctcaagcagccggggcctcgtgagcatccagtgcagtgctttgtgaggagggacagggcgacttccacctatctcctctacctggggctcagcccatctctacatggagaaaacgacaagtttttgcttgcagcacgcaagattaggcgtgcgaccaggacttcttttgtgatctcactggtctccaatgacttctctctatccagtagcacctatgttggtaaactgaaaccaaacttccttggcacaaagtttacaatctttgacagccagcctccttgcgatgctgtagtgttgccaaacaaccgaccaagcaaacgacatttcaagcaagtatcaccgcgattgccactaggcaattacaatgttgctacggtctcatatgagctcactgtcctacgtaatcgaggaccaaggagaatgcaatgcaccatgcactctataccggcattgtgtattcaggaaggtgggaaggccccaacccctaccggcatcatccactcacttgacgaacaagttcccgccttatcaactagcaaaggaaaggaaccagccatagaatttttgctattgtactattgttcttggaatgtttagcggtgaaatatcactgcgctatggataatatggacgctgttcatcgtgccctacctccttccttgatgctatttacagtgaggttggcgattatgatgct

SEQ ID NO: 8817 - DNA, 1155 bp, Oryza sativa
  ref <308>: DATABASE ACCESSION NUMBER: AK106165
  ref <309>: DATABASE ENTRY DATE: 2002-08-28
cgccaagcgcgcgcccccggtcctctgcgtcgccgcctgcgagctcctcggcgcgccgcgcgaggccgcgctccccgccgctgtggccctcgagatgctccacgcggcgtcgctcgtgcacgacgacctcccatgcttcgacgccgcgcccacccgccgcgggcgcccctccacccacgccgcctacggcaccgacatggccgtcctcgccggggacgcgctcttccccctcgcctacacccacgtcatcgcccacactccgtcgcccgaccccgtaccccacgccgtcctcctccgcgtcctcggggagctagcgcgcgccgtgggatccacaggcatggcggccggccaattcctcgacctcgccggcgccaccgccctcggcgaggccgaggtcatgaaggttctgacgaagaagttcggcgagatggcggagtgctccgccgcctgcggcgccatgctgggaggcgcggggcccgacgaggaggccgcgctgcggcgctacggccgcaccatcggcgtcctgtaccagctcgtcgacgacatccggagcgcgtcgggcaacggcaagatgaggagcaatgccagcgtcctgcgcgcgctgggcatggatcgagcgctcggcatcgtagaggagctcaaagcgcaggccaagatggaggccgacaggttcggtgacaagtatggcgaaagggtgcttcccttgtacagcttcgtggactatgcggtggagaggggattcgagctgcaggatgcagctacaacgccgtaggcacggaccgcgcagaccaaccttgatgctaccggatatttgaagttctgagcaagtggttatatatggagttatatgctgctgagatttggtgagcaattcatctctgaaattataagtttcaatgagaaatataaagattacgccattgccatctagggcagatgtctggatacttatgctgcggttctgatctttagttagttgctgaaataagacgatgtgactaaatgaagaattcttaggataaactaccacaattgctatgccttggtgttacatgtgcttaatatatataatctgatcacaatttcaaagcctgtattgagcttcccaattgtatcaattgttcatttggaatcatcaaagcataatttcgatcc

SEQ ID NO: 8818 - DNA, 1465 bp, Oryza sativa
  ref <308>: DATABASE ACCESSION NUMBER: AK106166
  ref <309>: DATABASE ENTRY DATE: 2002-08-28
gcgcggtagatctcctcctcctccacctccaccgtctcctgctcttcctctctctcttctcggaggaaacccccaatttattccttccccgcaaacccgcagccttcctaaaacgaattaaatctccctcccttatccgccgctgcaatccctccccacaaaatctcgctgcgccgcgcgctgttttagggtttgagctcatggcggtggaggaggcgagcagcagcagtggcggcggtcgtggtgggggtggcggtgggggtggggaggaggggttgtccggttgcggcggtgggtggacgcgcgagcaggagaaggcgttcgagaacgcgctggcgacggtgggggatgacgaggaggaaggggacgggttgtgggagaagctagcggaggccgtggaggggaagacggccgacgaggtgaggcggcactacgagctgctggtggaggacgtcgacggcatcgaggccgggcgggtgccgctcctggtgtacgccggcgacgggggcgtcgaggagggctctgcgggaggtgggaagaaggggggtggtgggggaggaggtggaggtggaggggggcatggggagaaggggtcggctaagtcctctgagcaggagcgccggaaggggatcgcctggacggaggacgagcacaggctgttccttcttggacttgagaagtacggcaaaggcgactggaggagtatctcaagaaactttgtgatctcaaggacacccacccaagtagctagtcatgcacagaagtattttattcgcctgaactcaatgaacagagagaggcggcgatcaagtatacatgacataaccagcgtgaacaatggagatacatctgctgctcaggggccaatcacaggtcagccaaatggcccatcagcaaatcctggaaaatcctctaagcagtctctacagccagcaaatgcgcctccaggcgtcgatgcttatggtacgacaattggacagccagttggtggtcctcttgtgtccgcagttggcactcctgttacacttcctgttcctgctgcacctcatatagcctatggcatgcatgcccctgtccctggagctgtagtccctggtgccccagtaaacatgcctccaatgccctaccccatgccgccaccaacatctcatggatgagggctttgaatactacagttcttctagacaaactcataatatctgtcttgtttagagtttcaatgcatgctgttatgtctcaataaagcaatatcaataaactcttgtacattacaaatggttattgaatgtagcattttgaggacatcctggactgtatttatcatctttgttacgcctgcacttcgttccatcttcaatgtacgcctgccaccctgccccagtcgtaaaatggttggaatgctgaatctccttcagcccagatgtagtggtttattatctgaaaagtaaatatcgagtcaatacgt

SEQ ID NO: 8819 - DNA, 1177 bp, Oryza sativa
  ref <308>: DATABASE ACCESSION NUMBER: AK106167
  ref <309>: DATABASE ENTRY DATE: 2002-08-28
aactaccagtacaagatccgggtgacaagccaagaaaacgcggccgcgcgggaggaggaggatggaggagaagaggcagcggctggtgatctctctctcggcgctctgcctcgccgtcgccgtgatgtccggcgcgctgctgccgccgcgggcgtcggcggcgggaggggtcgggaggaagcggcggtgggccgggttcgactactacgtgctggcgctgcagtggccgggcaccgtctgccgccagaccagccactgctgcagctccaatggctgctgccgctcacatccgctcaaattcttcacgatccatgggctgtggccgcagtacagctatgggggatggccatcctgctgcaggccaaccacattcgacggcaacaagatctcgaggttgaagacgatactcgaggagtactggccgtccttgtactgcggctctttctcaacctgctttggtgggaaaaggccattttgggtgcatgagtgggaaactcatggaacatgtggttaccctgaaatacaggatgaatacgactacttctctacagcactgtacctttacagcaaatataatgtgacgaaagctctgaagaaagcacatatttatcctagaggaggcaggaaatacttagttggtcatatcgtctctgctattgaattttcctttggggcaatgccatctattgtgtgtaaaaacggctcagttcaagaactgaggctctgcttccacaaggattatcagcctcgcgattgcttagttgagggtgagaactctgttagaagaaaccattgccctcgatacgtcactttaccatcatataaaccacacgcatttggcaattctacagaaggaatcagtaaccaagtcaacgttgagcaccaatcatatcagtagatctcacatctcactgtgagtattctacaatataaacacggctctgatgactcaggaatgagatgtacagcaagaaacccactaggcacacatacagtaacgtctgcatctgtaattctataatgcaattcaattgattataaagcaactgaaaatcccatgctgagttatgcagaacttttactgcatctcagtttctgtaaatctgtaattctgaattgtctgcaaatttgcagcatcccgtcatttccaaattcaagcgcgccgttaacaattgcc

SEQ ID NO: 8820 - DNA, 1205 bp, Oryza sativa
  ref <308>: DATABASE ACCESSION NUMBER: AK106168
  ref <309>: DATABASE ENTRY DATE: 2002-08-28
atagtagcgggagtaatgagggtgggcaggaggaggtgtctgaggcggcggcggccatggcggcggcggtggggaggggtggggggaggaggctgtgggtgaaggagagggactcggagtggtgggacatggtgagtagcccggattacccggactcggagttcaggaaggcgttccgcatgtccaaggccacgttcgaggtggtctgcgacgagctcgccgccgccgtcgccaaggaggacaccatgctccgcgccgccatcccggtgcgcaagcgcgtcgccgtctgcgtctggcgcctcgccacgggggagcccctgaggctggtgtccaagcgcttcggcctcgggatctccacctgccacaagctcgtgctcgaggtctgcgccgcgctcaaggccatggtgatgcccaaggtggtgcgctggcccgaggccggcgacgcggcggccatcgccgcgcacttcgaggccatctccgggatctccggcgtcgtcggcgcgatctacaccacccacatccccatcatcgcgcccaagtccaacgtcgcctcctactacaaccgccgccacacggagcgcaaccagaagacctcctactccatgaccgtccagtgcgtcgtcgactccaccggcgccttcaccgacgtctgcatcggctggccggggtccaactccgacgaggaggtgctcgagaagtcggcgctgtacctgcaccgcggcgttcccggcctgatccagggccagtgggtggtcggcggcgggagcttcccgctcatggactggatgctcgtgccctacacccaccagaacctgacgtgggcgcagcacatgctcaacgagaaggtcgccgccgtgcgcggcgtggcgcgcgacgcgttcgagcgcctcaagcgccggtggggctgcctccagaagcgcaccgaggtgaagctgctcgacctccccaccgtgctcggcgcctgctgcgtcctccacaacatctgcgagcgcagcggcgacgccgtcgtcgacgccgacgactgcgccttcgacctcttcgacgacgacatggtcgccgagaacgccgtccgctcctccgccgccgcgcaggcccgcgacgccatcgcccacaacctcctccacagcggcggcggcgcatccttcttctgatcaagcatcatcgccgttcttggtccgatcaacagcgataccaaacaaaccaac

SEQ ID NO: 8821 - DNA, 1030 bp, Oryza sativa
  ref <308>: DATABASE ACCESSION NUMBER: AK106169
  ref <309>: DATABASE ENTRY DATE: 2002-08-28
caagaaaggatcaaaaagtgaggttgatgagatgttaagggctgagaaatcagagaatcctatgagaatagtgtattgtttcggcatatctcatgagcatccaggcacatttattttatcttacattaggagtacaaatccacatcacgagtatattgggttatacccaaagggctttagatttcgtaagagggactttgacaatattgatcgcctagtgtcctatttccagaagcatattgacaaaccaccacctgatgctggtccatcaatgcgaaatgttgctgcaatggtgcctatgaaaagttcaggttggggtaatggtggtggcactggtggtggaaatgatggatggagaggagatggtaacaacgacagggatagacctttctctggaagatcaggaggcaggtttgattcaaggaacagctctggtggtcgtggacgtgggcgcgggcgtggtagaggtaactttggcagtgatgatggtggcggcggaggttggagtggtggcggtggcggtggcggcaacagtgggggatggactgacaatattggaagtggcggaggtggatggggcacaggtggtggttcctcgtgggctggtggtggcgacggaggttctggaggtggtgatagtaaccgtggtggtggtggaggctggggaacacccgctggtggttctgatggcggcggcggtggctggggagcagcacccggtggatccaacgatgccccaggatggggcagcggcaaaaaggcggtcccagcacaggatggtggtagcgggtggggagcttccgccggcggcggcagcggtggctggaactagtcaaagaactgctagatgaaatattttttttttttttgttttctggaccctcttctatatctggtaattgcgctccacgggagaaaaattgtcactgttcggggaccctagtaatctgctactgaatgccgctggttttatacattttggacggccttattttgaatgcatgtacagcttaagcaccaaaaaaaaaac

SEQ ID NO: 8822 - DNA, 922 bp, Oryza sativa
  ref <308>: DATABASE ACCESSION NUMBER: AK106170
  ref <309>: DATABASE ENTRY DATE: 2002-08-28
acgcacgcccacccgctgcatccacacggcccaccgagccacaccaccgccgccgcggccgcgaggccaccacactccgacgacggcgagagagagagagagagagagagagagagagagagagagggagaggcagccatggaggcggcggtgcccagccgtgtggcgctctccgcgagccggctctccaaccaccaccaccacgcggtgggaggagaaagatatgcgatttacaggggaaggtgcccgaatcctgccattcctatggctctggcagcagcagctgcaccagggaaaggtggtggcgtgcttgatcggccaatagagaaagttactcctggtcgccagtctgaattcgatgttagaaaatcccgcaaaatgacgcctccgtatcgagtcctcctccacaacgacaactacaacaggcgtgagtacgtcgtccaagtcctgatgaaagttatccccgggatgaccgtcgacaatgccgtcaacatcatgcaggaggctcatgtaaacgggctgtcagtggtgatcatctgctctcagtcggaggcagaggagcactgcacgtcgctcaggggcaatggcctccggagctcgattgaacctgcgagtggtggctgctgaagaagaggctctgctgtttcgatgcttatagcttgtagatagcccccatcaaatctagataaaccgcaacgaattaattacagtaaaaaaaaattgctgtcatgcatcaggatgaacacggtataccgcttttgaagatgtaaatcatgtaagtcacgtagactaaacgtagcatttttcagtatgaaacattggtcacatacttgtacatttggagctttatcacagctagcatcttgcaattgtttgaggtagtaaactgctacttctagctaattggtttttgtgttcctct

SEQ ID NO: 8823 - DNA, 1188 bp, Oryza sativa
  ref <308>: DATABASE ACCESSION NUMBER: AK106171
  ref <309>: DATABASE ENTRY DATE: 2002-08-28
cttctttctagctctagtggatccaatatcgagtggggtgggggtagtaatttctccatttctttctgtgcatcgcaaacactttccaatgcaacacagctaagctagtagtactacgccaggagcattctgcagtgcgagcatgccaggccaagaagcagcagcaggcaatggcatcagcaatggcgtcgtcccagtcccatctggatctggtacagctgctaatcgttgtggtgatgactatgacgatgctggtgggtggcggcgaggcgctgagcctggactactacgccaagagctgccccaaggcggaggcggcggtggcggcggcggtgaagcaggccatggccaaagaccgcacggtgccggccggcctgctccgcctgcatttccacgactgcttcgtcagggggtgcgacggttccgtgcttttggactcgtcggggaacatgtcggcggagaaggacggcccacccaacgcgtcgctgcacgccttctacgtcatcgacaacgccaaggccgccgtcgaagccctctgccccggcgtcgtctcctgcgctgacatcctcgcgctggccgccagggacgcagtcgccatgtccggtggtccttcttggcaagtgccggtgggtcgtcgtgacgggcgcgtgtcgctggcgagcgagacgacgacggcgctaccggggccgacggcgagcttcgaccagctgaagcaggcgttccacgggcgcgggatgtcgaccaaggacctggtggtgctgtcggggggtcacacgcttggcttcgcacactgctcctccctcgaccccacctcctccgccttcgacaacttctactatcggatgctgctctccggccgtggccttctctcctccgacgaggcgctgctcacccaccccaagacgcgcgcccaggtcacgctctacgccgcgtcgcagcccgccttcttccgtgacttcgtcgactccatgctacggatgagctccctcaacaacgtcgccggcgaggtccgagccaactgcaggcgcgtcaactagctagctatttccactagcatcatatcgatcacactatcttatcttatccaccacaccatccctgcactgcatgtatggcctcaactcaactcaacttatgtacaacaacaatataacgtcgaatggctatagcatcttttaatttgttact

SEQ ID NO: 8824 - DNA, 963 bp, Oryza sativa
  ref <308>: DATABASE ACCESSION NUMBER: AK106172
  ref <309>: DATABASE ENTRY DATE: 2002-08-28
agaaacgagccggccggattgctctccaagccaaacacggcccagagaggcgagagcccccacaccgccaaacccgacccggaaatcaactgcacacgctccgatcccctctctccagatcgattcggaccccatgggttggcgttggcacgacgacggcgatgacggcggccgcggcctgggcgacatccccgacctcgccggcggcggcggaggcggagatggggagcgctgcgccacgcgccgggtggtgcagtctcggtgccacacggaggaggtggagcccggccgcttcgtccgcaagtgcgagaagaccgagcagctcctccgcgactgcgtcggcaggccctctgaactggtggaatcaaaaactgaaaatactgaagaagacgtcacagatgaaatgaaaagcgggtcactatctcttggttttccgaccaatgagccctttgcatttcctggacttcgcagtgacatagaagctcttgagaaaggccttttcgggagcattggtagctttctggatgatgctgagaggatgaccaatgatttcttgaagtcttttggtgtcccttccatcaatgaaagggagtcgagctcatttgatggacaacctacaggcaggcacattggtggacaacctgcaggcaggcacattgaggaaggtactgcaaaggacactaaacagaacgactacgcagaattcagcagcaagattacagatgtgtaaggatctacagttagctgacgcacctttgggagcagcttgccaattttgtattttgaacatctccatggttgtaattggaaggggaaggatcagtttgactgttttataagcagagtcgtctgaagtctgaagtgttgcgcttataagaacaattgtgtatattactgttttagataagcctgtttgtgttcctcaacaatgagatcaattatggatggtttttttctctgctt

SEQ ID NO: 8825 - DNA, 1122 bp, Oryza sativa
  ref <308>: DATABASE ACCESSION NUMBER: AK106173
  ref <309>: DATABASE ENTRY DATE: 2002-08-28
gtaggtggttaggagcgtagctatatcgatagaaaggcgccgcgcgtgctcctcctcctcctccgattccaatccaatccaatccgattcagaagtagagcgagcggcggctgcggcgatggcggtggcggcggtgcgggcggcggcggcggacgcggcggtgacgttcctgtgggtgctgtgcgtgtcgacgctgggggcgtcgacggcggcggtgacgtcgtacctccgcatccacgaggggatccactacgcgctcctcgtcaccgtctccctcctctccgtgctcctcttcgccttcaacctcctctgcgacgccctcgccgccttccacgccgccggcctctcctccccccgccactcctccctcttccccctcgccctccgcttccccgcccaggccgcgggtgcggtgggtggggcgatggcgatctcggagctgatgccggagcagtacaagcacatgctcggggggccatcgctcaaggtggatctccacacgggtgccgccgccgagctggtgctcaccttcgtcatcaccttggccgtgctctggatcatcgtcaaggggccccgtaatcccatcgtcaagacctggatgctctccatctccaccgtttgcctcgtcctcaccggcgctgcctacactggcccatccatgaaccctgccaatgcgtttggctgggcatatgtgaacaatcgccacaacacatgggagcaattctacgtctactggatatgcccttttgttggcgctgttcttgctgcctgggtcttcagggccgtgttcccaccaccggcacctaaacctaaggccaagaaagcatgaggaaatcaagcacaaacttcaactcaggagttggtacagatgttgggtttgaagaacccaacattatttattagctagaatggtacaaggaataatcctttccaccatatttaattcaaagtaatttaggtaattagcttcggaacactgacaaacccaagagcatgcacattaatttgattggacgacctgaatgtaatttcaatcattcattggtcttgtttgctcttgaactggtggatggtatgaatggatattataaatttatcagtaattagtttgtgtgttcttgt

SEQ ID NO: 8826 - DNA, 1696 bp, Oryza sativa; identical to SEQ ID NO: 4350
  ref <308>: DATABASE ACCESSION NUMBER: AK106174
  ref <309>: DATABASE ENTRY DATE: 2002-08-28

SEQ ID NO: 8827 - DNA, 985 bp, Oryza sativa
  ref <308>: DATABASE ACCESSION NUMBER: AK106175
  ref <309>: DATABASE ENTRY DATE: 2002-08-28
aaagcaaccaccgtaccgcaaccgcaaccgcgagagccgagagagaagcctttttccccgatcgattcccttctctccgctccgcatcgccatggcctcctcagcaccgacgccgccgccgctcctcccggtgaccaacccggcagccgcggggtcgtccccggccgccaccgccgtgggatctgacgcgccgatcgcaaccccggcgttccggctcttcctgagcaagctctccgactcggcgcggcgctcgctgtccgaccggcggccgtggacggagctggtcgaccgctcggcgttctcgcggccggactccctctccgacgccacctcccgcttccgccgcaacctcgcctacttccgcgtcaactacgccgccgtggtggccttcgcgctcggggcgtccctcctcgcgcaccccttctcgctcctcgtcctcctcggcctcctcgccgcctggtgcttcctctacctcttccgcggctccgaccagcccgtcgtcctcttcggtcgcaccttctccgaccgcgagacgctgctcggcctcgtcgtcgcgtcgttcgtggccttcttcttcacctccgtcgcgtcgctcatcatctccgggctgctcgtcggcggggccatcgtcgccgtccacggcgcgtgccgcatgcccgaggacctcttcctcgacgacgctgacgccgccagcggcaacagcgcggcccagggtctcctgtccttcctcggggcgcccggatctagggtttgaggcggcggcgggcgacgagatctggtaggcttctttggctcgagtgtttcgcgttactctgtaattgatctggatctgatctcgttggatctatatcacatttgttctctaattcatcattctgcaatccgtagctacagatctactacttgtttacctatattttggatcgatgtatcactttgcgaagttgtgctgaatatattgagtctcttgacgagatttagtgtt

SEQ ID NO: 8828 - DNA, 1352 bp, Oryza sativa
  ref <308>: DATABASE ACCESSION NUMBER: AK106176
  ref <309>: DATABASE ENTRY DATE: 2002-08-28
agacacgaccaaacccctcgtctcgtctcgtcgcctcgcctcgcgagttcgcccgccgcctgcgccgagcagccgccgatctccgccacgcgagcagcggcgccggcgtcctgctacttccgccgcgtcctcgccgaaggaaggatgagtaggcgctggagcaggacaatttatgtcgggaacctcccgggcgacatcagggagagggaggtagaggatctgttctacaagtatggacgcattgttgatattgacttgaagatccccccaaggccgcctggttttgcttttgttgagttcgaagatccccgtgatgctgaagatgcaatccgtggacgggatggctataattttgatgggaaccgtttgagggtggaacttgcacatggtgggagaggtaactcttcctcctttaacaattctggtggagggggacgtcgtgggggtgtatctaggcatacagagtatcgcgttctggttactggactaccttcttcagcatcatggcaagacctaaaggaccatatgcgaaatgctggtgatgtttgttactctgaagtgtaccgtgagggtggtggtactataggaattgtagactacacaaactatgatgacatgaagtatgctatcaggaaacttgatgattctgaatttaagaatgccttctcaaaggcctatataagggtgaaggagtatgatggaaagcgcagccgttcatactcacgaagccgaagccgaagtcgaggtcgcagctacagcagaagcaggagtccaagcaagtctcccaagggaaagtcatcacgccgttcagcatctagatctcgatcgagatcagcttcttcccgttcaagatcagagtcaaaggggcgctctccatcaagatcaccagcaagatctcagtctccaaatacttctcctgccaatggtgatgcagcaagccccaagaaacgcagcccaagcaggagcccccccaagaaacgtagcccaagcaggagcccatcacgttcccgatctcctgatgccaagtccgaatgatgctgatgtgcttctggggacggagtgtcgaggaatcatggtcctgaaacgttttgacatctgtcgccctcgactacttctgaatcgcttccaaagtactatttcatacgttcagtgctctttcagattactggatgatactgtacgcctatttatagatttgaacttgggatttgtcttttgttcattttgacactgtacttgacttaggtatattattgtggtactggtaagaaagttgaacagagtcattccgtcgtttgtttgcttaatgcacttcctagctcaagttgcaggtaataaatacatttatatcc

SEQ ID NO: 8829 - DNA, 1095 bp, Oryza sativa
  ref <308>: DATABASE ACCESSION NUMBER: AK106177
  ref <309>: DATABASE ENTRY DATE: 2002-08-28
aagccgagaccactacaagcagcaactagcttagctagctagctactggtgatcaggcacgagctagccggccatggcgaggcgtcgccatgcttgctttcttctcctgctgcctctgctggtgctgcagcttcttcttgctgggggaagcttggttgatgatcttcctgctgcaactcatcaggtgccgaggttagtagggccacagcgcaagttacagcagcttccaaacccaaggccacagccgcaaccattgccccagccaaacccaaatccacagccacaaccactcccacagccacagccacagccacaaccacaaccacaacctctgccacaaccgcagccgcaaccacagcctttaccgctaccaggcccacaaccattaccgcaacccggcccgcagccgaacccaaacccccaaccgttaccacagccaaacccaaatccccagcctttacctcagccagacccgaacgctccgccgttgcctctgccgcagcctaacccaaacaacccgcaacctctgccgcagccagaccctaacgcgccatcactacctctgccgcagccagacccaaacgcgccaccactgcctctgccacaacctgatccgaacgcgccaccacaacctttgccgcaaccagacccaaacaaccctcaacctttaccgcaacctgaccctaacgcaccaccacagcctttgccgcaaccagaccctaactcgccgccacagcctttgccgcaaccagacccgaacacgcctcctggccaacaaattaatgcaaagatatcatcacagccggattctattggtggagccagaactttatatccatacggtgtaatatacaatctcatgccattgtttagcctattcttctatatgttttgatagtaaggagaggcttattgttgtaaataagcgtgctgagttaccatttttagattgcatgtatatacacattgccatgttgataggtttgctatgttatcttttttttttgtttgagatggaggtttgctatgtactgcactggcttgtaccctgatatttttgtgtatgttaatacacacctatttacctctttgtgt

SEQ ID NO: 8830 - DNA, 1187 bp, Oryza sativa
  ref <308>: DATABASE ACCESSION NUMBER: AK106178
  ref <309>: DATABASE ENTRY DATE: 2002-08-28
gtgcaagacggagctagaaatggctcccaggctctgctgctcttctcaattcttgctcgccgtctccttcctggccgccttcgcggccgtctccaacgccggcaaggtggccgtctactgggggcagggggcgggcaacggcgacggcaccctcgccgagacatgcgccaccggcctgtacgacttcgtcaacatcgccttcctcaacgtctacggcagcggccttaccccggtgctcaacctcgccgcccactgcaatccggacgcggggacctgcaagtcgctcagctccgagatcagctcctgccagcagagcggcgtgaaggtgctcctctccctcggcggcgagagaggtcagtactccctctcctccgccgacgacgcgcgtggcgtcgccgactacctctggaacaccttcctcggcggcagctcggactcgcgccccctcggcgacgcggtgctcgacggcatcgacttcgacatagagaaggacggtgaccactacgacgagctggcgatggccctctcgtcgaaatgcaacggcgcgtgcgtgctcacggcggcgccgcagtgcccgtacccggacgcccacctcgacgcggcgatcaagaccggggtgttcagccacgtttgggtgcagttctacaacaaccggcagtgccagtacgccagcggcgacgcgagcgcgctgcaggccgcgtgggcgcagtggacgagcggcgtgccggcgcccgcggacgtcttcctgggcctgccgacggcgccggccgctgcaccgagcggaggctacatcgacgcggacacgctgctgtcgcaggtgctaccggcggtggagggcgcggcggcgaactacggcggagtcatgctgtggaatcgctggagagacgtgaccgctggttatggcgccaagttgaaggggaaagtttgaaacaaattaagctacgcctacgaaccattcatattcacaggcgtttgaaataagcatagcctttttaaatagttttatggatgttttccgtgctccggcctccctccggtagggatagaatgtacaccgaccggaccttgttgatttaattttgcaagttgcatttaaactatgtgtctatgtctgtaatgaactatgtccaaattgcatctaaactgtctgtaatgaaccatgtccatcagtccatgttacatctaac

SEQ ID NO: 8831 - DNA, 1362 bp, Oryza sativa
  ref <308>: DATABASE ACCESSION NUMBER: AK106179
  ref <309>: DATABASE ENTRY DATE: 2002-08-28
atcggatcacaccactgacgcgcagagacattacgaagagagcgcgtgcaatggcggatcaggctaacacaatagaggttcccactgacgctgagctgctgcaagcgcaggccgatctgtggcgccacagcctctactacctcacctccacgggactccgctgcgccatcaagctgggcatccccaccgccatccaccgcctcggcggcgccgcgtccgtgcccggtctcatgaccaagctgtccctcccggcgagtaagcagccgttcctccgccgcctcatgcgcgtcctcgtcacgaacggcgtgttcgccgcagagcacaacgacggcgaggtcgagcggtactgcctcaccccgctgtcccgcatcctcgtcgatggcgtcgtcgccgacgagcaccacagccagacgtccttcgtgctcgccgcgacgtcgcggcactacctcgaggcggcgctggggctggacgagtggttcaggaaggacgtggcgccgccgctcccgtccccgttcgaggacgtgcacggcgcgtcgctgttcgacgagagcactgcgctgctggacccggagctcgacgccgtcgtcaacgaaggcctggcggcgcacgacaacctcggcatcggcaccatcctgagggagtgccgcgacctcttccgggggctccgttcgctgaccgactgctgcggcggcgacggcacgacggcgagggccatcgccaaggcctaccctcatgtcaagtgcactgtgctggaccttcccaaggtgatcgacaaggcgcccaatgatggtgtcgttaactatgttgcaggtgacttgttccacaccgtgccaccggctcaagccgtgatgctcaagcttgtattgcaccactggagcgatgatgattgcgtgaagatcttgactcagtgcagaaaggccattccatcacgagaggagggagggaaggtcatcatcatagagatactggttggaccttcactaggaccagtaatgtttgaagcccagctgatgatggatatgctgatgttggtcaatacaagaggccggcagcgagatgaaagggattggcgagatctgttcttgaaagcaggattcaatgactataagattgtgaagatgcttggagctcgaggagttttcgaggtctatccctaagattgagctacctagctcctaaatgatcttatgtgtaatgtgtgcttcgtgttgggatgtgtgccgtaagaaggtaaataaagagagtgccctactatctgtaaggaagttccatgcccgacataaaattacctaaagtttttgactttgggtactatacaatgtttggtcaacatctattgcagaaaatactgaattgcgctcc

SEQ ID NO: 8832 - DNA, 1216 bp, Oryza sativa
  ref <308>: DATABASE ACCESSION NUMBER: AK106180
  ref <309>: DATABASE ENTRY DATE: 2002-08-28
ctctctctctccaccctcagccgccacactaccatccattctcctctactctcctctcctctcctctcctctcctctccggcttactccccccctcaccgcttaccgcgccgcctccgtctctgccgctgccaggctcgggagcggcggatctgccgccgacagcgccggcatccgtctccgcctcttcacggcggcgtctgagccggggcaggtatccctcccattccctcacctcccctctcacctctcctctctcggcgcggattccggccggagcagctgccggagggcggtggcggcggcggctccaggcggttcctgcgcggaaggtggaggcggcggcggtggcggctcccctccctcctcccagatccggtggaggcggcggcggctcccctcccgcccgtgtacctcccgcgccagcccgccgcgcccctgctcctcgcgctcgacatcggctcgcgggttttcctcgctctctcacgcgcgaagtagttcggtcgtggtggagggatggactcgtgggttttttttctttttgttcgcagggactctgataaagctggtgtacacggcgagctgcggtggcggaggcgcggagctgcggtttgccaagttcgagaggcggaggctgcaggagtgttttgacttcgtcagggcgcagggtctcgtcccccctcaccgcttccccagtgtagcatcaccaccatggcgacgcagcggaggcacgcggctgtggcatagacacctactaccgccgccacctctccgggcagcagccgggagtacatgaaggccaaatgcagcatgtaatgcgctgatttaaacacattataaaagctgttctgtaggaggaaaatcattcttgaagattgagtatcatgaattcctacatctagacagtctcgatgttatataaagaactgtataatttgatgaatcggaagcaacaaggaagcatatgcccttttgtcgtttgattggccgcaacactcaggtcaatgtgtgaacggctatttggcatttggctggatttggtggtcagtgacttgtactagtgatgtattatatctggtcagtgaacctgtgatgtaattgaacatgctttggatagtgatttgtggatgtaattagctgacttgtcatgtaactgatttacggataacctgtgatctttttttttttctgaatttatgatagcctgttttgtgatt

SEQ ID NO: 8833 - DNA, 1261 bp, Oryza sativa
  ref <308>: DATABASE ACCESSION NUMBER: AK106181
  ref <309>: DATABASE ENTRY DATE: 2002-08-28
acttctccctttaagctctctcctccccttctccaagagaagaacaaaaagacattcgctttcgcctcttctccccctctcctctcctctcctctcctctctgcgtgtgcatctctcgattccgatgccgccgccgctcgaagcgcgagactacatcgggctcgcggcgtccccggcctcgtcctcctcctcctgctgcgcgtcgacccccgtcgccgaggtcgtcggggcgcacctcgcgctccgcctcggcctcccggggtcggagtcgcccgcccgcgctgaggcggaggctgtcgtcgtcgacgccgcgctcacgctcggccctgctcctcctcccaggggcggcgccaagcgcgggttcgtcgactccctcgaccgatccgagggccgtcgtgctgctgccaccgccggtgatgatgagaggggcgtgagggaggaggaggaggaggagaaggggttgggggaagctgctgctggagctccgcgagctgccaaggcacaagttgttggatggccacctgtgcgaagctaccggaagaatacattggccgccagtgccacaaagacaaagggggaagaccaaggcaaaagtgaggtaggatgttgctatgttaaggttagcatggatggagccccataccttaggaaggttgacctcaagacctattcaagctatgaagatctttcacttgctcttgagaagatgttcagctgctttatcactggtaggagcagttcacataaaacatcaaaaagagacaggctgactgatggttctagggctgatgcccttaaggaccaagagtatgttcttacctatgaagacaaggatgctgactggatgcttgttggtgatcttccttgggacttgtttactactagttgtcggaaactgcggatcatgagaggttcagatgctgctggaatggctccgagatcactggaacagacaggtcagaacaaatagttgcccgagctttcatcatctggacagcaaatgtgtggaccaagtttgctgtagcaagtttccgctgaggggtgcagtgttttacctgaagtatctccgctattagtttatttacgtgtgtagtgaaatctgtggcgtattgtaaaacagccattttgcctacgaggttgtcttgtgtcaatctgtagatggtcgattttgtctttgaaagatcaagtcaggctgcttaatgcttcctgtgtgatactttcatcaattctctcatatatatattatctggagttgcacttg

SEQ ID NO: 8834 - DNA, 1013 bp, Oryza sativa
  ref <308>: DATABASE ACCESSION NUMBER: AK106182
  ref <309>: DATABASE ENTRY DATE: 2002-08-28
acatcatccctccgcgcaaaagcctatcaacagctaagccaaacagggtcaggagccggagccgtccgggagagggaacactcgagcgatccgtccgtccgcccgcccgtcgtcgtcgcgcgccatggctgaggaggaggccaagaaggtggaggtggaggtcaccgaggcgccacccgccgctgccgctgccgcggagacggagccggctgccaaggacgtcgccgaggagaaggccgtcatccccgcccccgcgccgccggccgaggaggagaagcctcccgtcgacgactccaaggcgctggccatcgtcgagaaggttgcagatgaacctcctgccgagaaacctgctcaagggggctctaatgacagagatgttgctcttgcaagggtggaaactgagaagaggaactcattgatcaaagcatgggaggaaaatgagaagacaaaagctgagaacaaggcttcgaagaagctatctgctattctttcctgggagaacacaaagaaagcaaacatagaagctcaactgaagaagattgaggagcaactggaaaagaagaaggctgaatatgcagagaagatgaagaacaaagtcgcgatcgtccacaaggaagctgaggagaagagagcaatggtcgaggcaaagcgcggcgaggaagtcctaaaggccgaggagatggcagccaagtaccgtgccaccggccatgctcccaagaaactcatcgggtgctttggggcctaaagaaattttcgattcacaacgagcaaacgtgaaagtgttcatcagtggttgctttgcttctttcaccctcccaagtgcgtagtgtgtttgttggtgcaagaaaggtcgtgcctggtgtgtaaagtctggtgttgctgtatataacatattactcccaagacagatatgtttggtgctgtacatgtttgatgcttgacaggcaacattcttatgtgtagttaagaagccacattgttattgttattgacagtaagctgtttgttctttt

SEQ ID NO: 8835 - DNA, 924 bp, Oryza sativa
  ref <308>: DATABASE ACCESSION NUMBER: AK106183
  ref <309>: DATABASE ENTRY DATE: 2002-08-28
aaaaagtgcttaagttgagttcaatttcatttccaatcacacagatttgctctcttcttcttcttcctccattcaatctctcggaatccgaaccctagcctggtagggtgggggcacgatggggtgggcggcgcggttcctcacggcagtgtccttcctcgccgccggcgtgctcttcgcgccggacgctctcctcggtggctccggccgctccggcgccggggtcgcggcggcgaggctggcgcacgtcctctgcttcgccaccgcctggggcgccgcgctctgggtcaccttcatcggcggcatcgtcatgttcaagtatttgccaaggcaccagtttgggagtctacaagggaaaatgttcccagcctacttcatgttgatatcagtatgctcggctatatcagtggcagcttttgcgtatctacatccttggaagacggcatctaccattgagcgctatcagcttggattcttgatctccgcccttggttttgacctttccaaccttctggttttcacgcccatgaccactgagatgatgatgaggcggcacaagatcgagaaagacctcggcatcggcagcgaggtcgggttttcgaagaacgcggaggtggcgaggacgaacccaacgctggcggccatgaacaagaagttcgggatgatccatggcctgtcgtctctggccaacatcatggcgttcggtagccttgcaatgcactcctggtacctcgccagcaagctccagatctgacggcatcatcaccactgcttctcccatgtctccatgttctgtgcctctgagttctgaagcttgttgccgtaagctgctgatcaaaagttgtatactaggtttatgtaacagataaactgatgaaggaacttgtgatagaaactttgcaataatttggagaaatgatgtac

SEQ ID NO: 8836 - DNA, 1291 bp, Oryza sativa
  ref <308>: DATABASE ACCESSION NUMBER: AK106184
  ref <309>: DATABASE ENTRY DATE: 2002-08-28
cgttttttgtgcgagtcaacgatgtatgtctcgcaactaataaccacgggtttcagacttagtgggctcgcacgatccgaaagtgaaaatgttctgactcgagtgattcatgaacaaaaaacccaaatattagttggtacttactacaagttattcttctgaacatatgcgtagatggcgggtgcttgctgaccgatatcagttagtaaatagtttctgttgtgtaagctttaaaattggttaaatggttgtgtttgtctaagctttcttgtatttccgttgtcagggagcaagagaagcgccaattaaccatcttctacggtgggaaggtcctggtgtttgatgacttcccagctgagaaggccaaggacctgatgcagatggccagcaagagttcctccacagcgcagaactgtgtccttcttccatcttccgctactgcaaccgttgtcgacaacactaaggtgtctgctgtaccagccccagcaagtgcacttcctgttgctcaggccaatgccccgaaacctgttcgtccaaatgctgctggtaactactctaacctcggctgttattgcttgctctgaatgatggaatatacttgtagcatgtgaatccattttattgtactaactgttcttcaaatcctgcagatctgcctcaggctaggaaggcgtcgcttcaccggttcctcgagaaaagaaaggatcggtaggttatgcttgctatcatggcagcacaaagtatagtcaaattctacaattcacaattctagattttggatctaacttttgctgctcctttatttcagccttcaggctaaagcaccctaccagggttccccttcagatgcttctccggtcaagaaggagctgcaggagagtcagccatggcttgggttaggacctcaggttgccgctcccgacctgagcttgcggcaggaatcgagccaatgaatcaatgctcaattctgagatgcccctctcatcagatgattcagtcatagaggttatcacaactcttgaattgggtgttttgtgttaggagatgatccgatgacaaggcgatgttcttctgatatatatactaggattgaatgtaaagaaagtagctgatgattatgaccagtaatctgaatcaaattgctatgatagaaagcagaagattctgtaatcagtacaacccaagaaacctcatttgtaccaattcaatatcgttttgctttggcattgccatgtagaagcaaagcaaatgtactgctaatatatacacatcacaagattgattgttattc

SEQ ID NO: 8837 - DNA, 1087 bp, Oryza sativa
  ref <308>: DATABASE ACCESSION NUMBER: AK106185
  ref <309>: DATABASE ENTRY DATE: 2002-08-28
ctccgattccaatccaatccaatccgattcagaagtagagcgagcggcggctgcggcgatggcggtggcggcggtgcgggcggcggcggcggacgcggcggtgacgttcctgtgggtgctgtgcgtgtcgacgctgggggcgtcgacggcggcggtgacgtcgtacctccgcatccacgaggggatccactacgcgctcctcgtcaccgtctccctcctctccgtgctcctcttcgccttcaacctcctctgcgacgccctcggcggcgccagcttcaaccccaccgccctcgccgccttccacgccgccggcctctcctccccccgccactcctccctcttccccctcgccctccgcttccccgcccaggccgcgggtgcggtgggtggggcgatggcgatctcggagctgatgccggagcagtacaagcacatgctcggggggccatcgctcaaggtggatctccacacgggtgccgccgccgagctggtgctcaccttcgtcatcaccttggccgtgctctggatcatcgtcaaggggccccgtaatcccatcgtcaagacctggatgctctccatctccaccgtttgcctcgtcctcaccggcgctgcctacactggcccatccatgaaccctgccaatgcgtttggctgggcatatgtgaacaatcgccacaacacatgggagcaattctacgtctactggatatgcccttttgttggcgctgttcttgctgcctgggtcttcagggccgtgttcccaccaccggcacctaaacctaaggccaagaaagcatgaggaaatcaagcacaaacttcaactcaggagttggtacagatgttgggtttgaagaacccaacattatttattagctagaatggtacaaggaataatcctttccaccatatttaattcaaagtaatttaggtaattagcttcggaacactgacaaacccaagagcatgcacattaatttgattggacgacctgaatgtaatttcaatcattcattggtcttgtttgctcttgaactggtggatggtatgaatggatattataaatttatcagtaattagtttgtgtgtt

SEQ ID NO: 8838 - DNA, 1300 bp, Oryza sativa
  ref <308>: DATABASE ACCESSION NUMBER: AK106186
  ref <309>: DATABASE ENTRY DATE: 2002-08-28
gagctaagcgcaattgggcgaacgccgcgagccgccaccaagccaaaccagagcactccgccgccgcgccatggcttccccgtccccgtcctcctcacctctccacccgcagcatcaacaccagcacccgcttcccccgcacccgcagccccagtaccaatccccaccgcctccgatgccgccgccgccccccgcggcgccactcaaagctatcgatctggaggtgaccgtcgtctcgggcaagcacctgaagaacgtcaactggcgccgcggcgacctccgcgcctacgtcgtcgcctacctcgacccttcccgccgcgccgccacccgccccgacgacgtcggcggctgcaagccggcatggaacgagcgcgtcgtcctccctctcccgccccacctctccccgcacgatccgtcgctgctcctctccctcgatgtcttccactccaagccctccgattcgcccaagccgctcgtcggctccgcccgctcccctctccgtgacctcctcttctcaaccaaccctaaccctagccccgattcccccgcctccgcgctgatcaccctcccgctcctccgcccctccggccgcccacaggggaagctccgcatccgcctcgcccttcgcgagcgctccccgcctcctcccgagccgcagtatccgcctccttcctcctccccctactatttcccaccccctccgcctcccgcatactcggccccgcctccgcctcaatacggctcggagcagtactaccgttccggtgggtactactctgcaccaccgccaccgcctcagtatgagtacaccgcagggccctctgccccggtggaatacaacaggcaatatgatcctagagcggggagtgggagtggaaatgggaggtatggagtaggcactgggattgcagtgggaacggtgacgggggcccttggagggcttgcaattgatgaaggtgtgaaatacaaagaggagaagtcggcagatcgggttgaagataaggtagtgcctgctggaagagatgacgactcaagggggtaccgtgagtattgattataggagttcatgtgggtgaggatgcactgtgagttggtccttctccatccctgccaatgtgggaataaaattgcagtgtggtattatgcttcgctctcttgtatatattttcttcagtgttgtgaattatcatgttacttatgcttatggcttgcgtcttatgacaaatttggtgtgtgttatgaatgttctattatcatatttaaaactgtacatgtaacttaatgtcttgttctatagttt

SEQ ID NO: 8839 - DNA, 1187 bp, Oryza sativa; identical to SEQ ID NO: 3690
  ref <308>: DATABASE ACCESSION NUMBER: AK106187
  ref <309>: DATABASE ENTRY DATE: 2002-08-28

SEQ ID NO: 8840 - DNA, 1173 bp, Oryza sativa
  ref <308>: DATABASE ACCESSION NUMBER: AK106188
  ref <309>: DATABASE ENTRY DATE: 2002-08-28
aaaagctcccttcccagtttcccccaaagctcctttcccagagaccccaaaccaaagcagcttgcttgcttgcttgattgtttgttgcttcttgagcccctctcctccttgcccaagtctgtgtttttgtggcagacttcagcataagggtgaagcaaagcatagggtctggttttgggttcttgacagaagtcatgtttcatggtggcaggcctttgtccctcaggggctctctcaaggcgcttgaagctgatatccaccatgccaacaccctggcgcatgctatacacagggcctatgggggtgcctgtgtgcagatgaggctgtcttacagctccatggctccaatcatccttaacctcatccagtggatggattgcagctgctccctttcatataccctccctagttacctaggtctccttgaggttcttgtgtacaaggtatatgttgatgaggatgcctctatatccaccaacattgaaaggagagcaagcctcaaggaattctatgctgtaatatatccattcttgcaacaactcgaggggaatttgatggagaaagactgcaacgagaaaggatggtgcaaggaggcggcctccggtggcggcggccggaagctttacgccgacgataaggacgacgagagggaagatgagtgcggcatttgcttggagacttgcaccaagatggtccttccaaattgcaaccatgccatgtgcatcaactgttatcgagactggtacacaagatctcagtcatgcccgttctgccgcgggagcctgaagagagtccgatcaagggacctctgggtgctcaccggagacgacgacgtgatcgacaccgtgacgctggagaaggagaatgtgaggcacttccacagcttcatcgacagcctgcccctcatagtccctgacaacctcttgctggtgtactacgactacctagtctgacgaagctcagctctcctcttctgaaagatattgagattcagagttcagtacgtgttccgggcagccgaccatcctctgcagattgagtctggctagcgaaatgccatgccgtcaatggtgaagacgacgacaccattgctccttattagggctgggctctgcgtaatcgcattgtttgttgtaataagtgtatatacagaattaaaaagagatattgggg

SEQ ID NO: 8841 - DNA, 1396 bp, Oryza sativa
  ref <308>: DATABASE ACCESSION NUMBER: AK106189
  ref <309>: DATABASE ENTRY DATE: 2002-08-28
acacatccctctcctccctccgttcgtgaacgggttcctgagcgtgttcatgcacgtggggctaacgctggtgctgctcgtctacctccccatcgccttcgcctgccgcgccctgggcaggctgctcgtcaggcccttcgtctccggcgaggacctccgcggcaaggtcgtgctcgtcaccggcgcctcctccggcatcggcgagcatctagtgtacgagtacgcgaagaagggggcgtgcgtggcgctgacggcgaggacggagatcgccctgcgcgcagtggcgaagacggcgcgcgacctcggcgcgccggacgtgctcgtcgtgccggcggacatcaccaaggtcgacgacgccaagcgcgccgtcgaggagaccgtcgcccacttcggcaaattgaatcacctggtggccaacgcagggatctggtccagttgcttcttcgaagaaattaccaacataaccgccttccacaacgtgattgatctcaacttctggggcgccgtgtacccgacctacttcgcgttgccgtacctgaaagccagccgtggcaacatcgtcgtcacctcctctgtcgccggcagggtcccgacggccaggatgagcttctacaacgcgagtaagggcgcggtgatcaggttctacgaaaccctaagggctgagctgggctcacatgtccgtgtcaccattctcaccccgggctatgtcgtctccaacctcaccatgggcaaaggcatccagaaggacggccatgtcggcattgacgaggaggctcgcgacatcaatgtggggccgctgccggtggggaagacggagacgctggcgaaggtggtggtggcggcggtgcggcggggcgactactacgtgacatggcccgggtggtactggccgttccacatggtgatgtgcacggcgccggagctcgtcgactggttctcccggaccttctacgtctccaagtccagcgaccacgatggcgacgccctcagcaagaagatcctcgaggccgtcggcggcaagaagttcctctaccccaagaccatccgcagccatgccatcgccgctagctaatataatgctcatatatcacactgattgatcgatccatccaagctatagttgcaacctacctatatatatataaactttttttatacatgatgatatcatgatcttttgataatgatgattggtttgttttagcataagaaatacttcagttaaagaggattgggagatgaaatgggtgtgtgggtggatatatagtgtacttgttcttttactacccctttttttttttgcatttgggcttttttttagtttctttttttcttttttctctttaaaaaatcaatgtaagcaatgtgatgtgaatctattcggatatatatgtct

SEQ ID NO: 8842 - DNA, 1272 bp, Oryza sativa
  ref <308>: DATABASE ACCESSION NUMBER: AK106190
  ref <309>: DATABASE ENTRY DATE: 2002-08-28
aacccaccccaccaccgacactctctcttctccgctcctcctccgccgatcacgcgctccgcatccgcatcgccggcgacgatgaggacgtcgcgtgcggcggcggcggcggcatctctgccgctgctgctgctggtggcgctactcgtggcggcggaggggaggaggcacaaggacggcagcggcgacgaggaggcgaaggcgtgcgacaaggggtgggagtgcagcgggagccggttctgctgcaacgacaccatcaccgactacttcaaggcgtaccagttcgaggagctcttcgcccaccgcaacgaccgctcgctcgcccacgccgccgggttctgggactaccacgccttcatcaccgccgccgcgctcttcgagccccgcgggttcggcaccacgggagggaaggaggttgggatgaaggaggtcgccgccttcctcggccacgtcggcgccaagacctcctgtggatatagtgtcgcaactggtggtccattggcttgggggctttgctacaaccatgaattgagcccaagccaaagctattgtgacaacagcaacgaattgtatccttgtgttgaaggagtcgagtattatggtcgaggcgctcttcctgtttactggaactacaactatggtattatcggtcagggtatcaaacaggatctgttgaaccacccagagttattggaacagaatgcgaccctagcatttgaagcagcaatctggaggtggatgactccaatgaagaggaagcaaccatcagcccatgatgtattcgttggcaactggaaaccaaccaagaatgacactttgtccaagaggtatcctggctttggtgctacaatgaacatcctgtatggcgatctcatctgtggtcaaggctccatcgataagatgaacgtcattgtatcccactaccaacattatctcgacctgatgggtgttggtagtgacaaagctggagataacttggattgtgctgaccaggtggcgttcaatccatcctcaaagaatttggactcctaagcaatctgtgttatatagacggataattccctgtaaatttgaggcacagacagctagcttcccaaacaaagaaaagcgtatacatggtacttttaatagctcccaagtaccacctgtgtttgtttgcgaaatttgtagcctatttatgtaagtgtccactatgttctctcatttatatgtgacaatacatattacacactgaagcagataattcacattcaaacatgcaatgactgttgt

SEQ ID NO: 8843 - DNA, 1182 bp, Oryza sativa; identical to SEQ ID NO: 2212
  ref <308>: DATABASE ACCESSION NUMBER: AK106191
  ref <309>: DATABASE ENTRY DATE: 2002-08-28

SEQ ID NO: 8844 - DNA, 1249 bp, Oryza sativa
  ref <308>: DATABASE ACCESSION NUMBER: AK106192
  ref <309>: DATABASE ENTRY DATE: 2002-08-28
acacacacacactctcttctcttgtctcgctgtggctcgctggacacaacacacacccacacccactcccccactctctctccggttcatgtcctgctgctccccatgtcgcccccactcgagctcgactacataggcctctcgccgccggtgcccgccgccgccgatgccgccgccgacaacgacctgaagggcaccgagctccgcctcggcctgcccggctcccactcgccggaccgctccccgcccgccgccacgctcgaccttctccccgctgccaagggcgccaagcgcgggttctccgacgaggcgcgtccgctgccggcgtccgccgccgccgccgccgccgccgggaagggcaagaaggcggcggccggcgaggaggatgaggatgcggaggaggaggacaagaaggtcgccgccgcgccgcaggcgcctgctgccaaggctcaggtggttggatggccaccaattcgcagctaccgcaagaacacgatggctactaaccagctgaagagcagcaaggaggatgctgaagcgaagcagggccaggggttcctgtacgtcaaggtcagcatggatggtgccccctacctcaggaaggtggacctcaagacctacaagaactacaaggacctgtcaactgcgcttgagaagatgttcattggcttcacaactggcaaggatggcttatctgagagccgcaaggatggtgaatatgtgctgacttatgaagacaaggatggagactggatgcttgttggcgatgttccatgggagatgtttgccaactcttgtcgcagactcaggatcatgaaaggttcagatgcaattggacttgctccaagggcagttgataagtccaaaaaccgcaactagaatggtttctgccccacagtcaaaagcaagatggagatcaaatgactgtagggaattttctgaaaaccaagaagtctaacagttttaagatggagtctgccttatggtctgtactacatggtttgctattgtgaaagttaaaaaaaaaggtgtcttgttatgttagcttcgccaaatctcctagggacataaactctatttgattgtgcccaagtctttgtacgtgtgttaatgctattcgtgtaaatggtttggacaccatgtgctactgctatgattgagcacccctacctactttgcaaaatgttgtcaatgaactgtttgttcgctacataaatgttcaatgaagcttgcaaatgtattgtccacc

SEQ ID NO: 8845 - DNA, 1034 bp, Oryza sativa
  ref <308>: DATABASE ACCESSION NUMBER: AK106193
  ref <309>: DATABASE ENTRY DATE: 2002-08-28
atctccctcgacttgctgctaagctttcctctcgtctttgacgcccccatctttccctagctcgcttgtcctaatcctcctctctttctgcaacaagaggaaagtgagagctcctcttggctcgctcgctgcacgaatcagtagtccaagttggattaattaagggaggtacgtaaattagttcgaatccatccatggcgtccataatcctcgtggtggtcgtgttcgtcctcgacgccctcgccttcgtcctcgccatcggcgccgagaagcgccggagcacggccacctttagcgaggacacgagcggcaggcagtactgcgtgtacagctccgacgcggcgacggggtacggcatcggggcgctgctgctgctgctcgccgggcaggccgtcgtcatggtggtcacccgctgcttctgctgcggccgcgcgctgtcccccggccggtggcgcgccttctccggattctgcttcatcgtctgctggttcacgttcgtgatcgcggagctgtgcctgctggcggggtcggtgcggaacgcgtaccacaccaagtacagcacgctggtgattagcgggccaccgcgctgcgcgatgctgcgcaagggcgtgttcgccgccggcgccgccttcaccttcctcaccgcgctcttcgccgagctccactacctcttcttcgccaaggcccgccacgccgccgccgtgcccccgcccattgtcggcggcatcggcatgacccgcatgtagacagagtgacagacagcaccttggttctcaatccatttgccatttgcatcccccctgacttcgacgcccgcgttgatacctcgattgctctactctgtacatttcattctcattgctcagtatctgtagtatatggagtatatctgtaactgcgtggctcatgtctctgtattttggtattctagttgagtgcgttcatggtcattaattgatcggccacctgacctgaagtttctgtgtgagatcggccacattgacatgaagtttttctgtgtaatttggggatcg

SEQ ID NO: 8846 - DNA, 1567 bp, Oryza sativa
  ref <308>: DATABASE ACCESSION NUMBER: AK106194
  ref <309>: DATABASE ENTRY DATE: 2002-08-28
attttttctttgatggccgcgttgcatgggcatggcttcgcggtcaccgtgctactggtggtgttgttggtgcaatgtgacgcggcggaggcgacgacgtgcgccggtgcggtgccggcgaggccacggccggagacggtgtccatcgccgagttcggcggcgtgggcgacggccggacggtgaacacgtgggcgttccacaaggcagtgtaccgcatccagcaccagcgccgccgcggcggcaccacgctgctcgtgccggccggaacgtggctcaccggcagcttcaacctcaccagccacatgaccctcttcctcgccaggggcgccgtcctcaaggccacacgggagacgaggagctggccgctggcggagccgctgccgtcgtacggaagggggagggagctgccgggggcgaggtacaccagcttcatccacggcgacggcctccgcgacatcgtgattacaggtgacaagggaatcatcgatggacaaggtgatgtatggtggaacatgtggaggcaaaggacacttcagcataccaggcccaaccttctggaattcatgcattccagtggcattcacatctccaacattgttctcaagaattcacccttctggaacatccatcctgtttattgcgacaatgtggtcataaccaacatgatgatcatcgcaccacatgactcgcccaacaccgatggagttgatccagattctagcaccaacgtatgcatcgaggactcctacatctcaaccggcgacgatctcgtggccatcaagagcggctgggacgagtacggcatcgcctacgggcggccgagctcgggcatcaccatcaggcgcgtcaggggctcgtcccccttcagcggcatcgccatcggcagcgaggcatcgggaggcgtcagcaacgtgctggtggaggactgcagcatcttcaacagcggctacggcatccacatcaagaccaacattgggaggggcggcttcatcaggaacatcaccgttgacaacgtccgcatgaacagcgtccgcaacgggctgcgcatcgccggcgatgtcggtgaccacccagatgagcacttcagccagctcgcgctgcccaccgtggatgctgtcagcatcaagaacgtgtggggtgtcaatgtgcagcagcccgggtcgatcgaggggatcaggaactcgccgttcacgaggatatgcctcgccaacgtgaagctgtttgggtggaggaataatgcagcttggaagtgcagggacgtccatggcgcggcgctgggtgtgcagccggggccgtgtgcagagctcacgaccagcctttcttcagggttctgcagctattagtgtgatccagttgtataatgttttttgattagaaaggttgtgcttgctttttttttaggtttgactgctccctaattgtggttgggattgatcaatatgttaggcttgtgctaatcagttaaggagttttaggtgtctttttgttagagaaaggtttggcttctaagttgtcagtctgagtgcaaatatgttctaatctgaataataaatcccagcttgtgtg

SEQ ID NO: 8847 - DNA, 1206 bp, Oryza sativa
  ref <308>: DATABASE ACCESSION NUMBER: AK106195
  ref <309>: DATABASE ENTRY DATE: 2002-08-28
atttaccccgaatctcaccctccacccccaactccggcgaccacctcgccgccatggccgcccgccggagccccgccgcggcccaccaccgcctcttcctcctcctcctcctcttctcggccctcctcgcccccctcgcgtccgcctaccgccccggcgacatcgtccccatgctccgctccggccagtaccacggctcgaggtcggtgtggttcgatgtggtgggacgccactgcccgtccttcgcggtcaaccatgaggttatgatgccgatccccaagccgactgggttcaccggtgcagatccttacaagataacatttcaaattggtcacgaaaagttccaccttccttggctttatgtcataaatcgcaaaagctctgaagttccaatgattgatttccatttgaaatactctggaaatgatttacttggtgtcacagctaaagtagtggacatgcctcacatttatgttgaacatcatcctgacataaggaagaatttctgggatcaacagaattggccaaaatatgttctggtcagatatacatgggaggagcaatcggagatagatgttcctggaggtttctatgtgttgtttggatctgggcttgttctatccttcatccttgcaatctacgtcctgcaatcatctcaggaaaagttgacaagatttgtgcgagaagcagttaatgacagtagtctaccggaaggagggtttgcaaaggttgagtgatctttctacaaggagctggaaaattatacactagtctgtccattgatcagaaaactgtcagtagataccgagttgtcagtcaaatttcatgggcgagctttcaacttcaaacaagagccagtggattgtcttgtataaatacatacattgcaaacgatttagctattatgacatgaaaagaggaaagagaaatggacattaggttttcccttggcagaatggtatttttagcaaactattgtccgactgtcactaactcacttcagttgatgtattgcgtgatgattttgtctgatgcattttttttgtgtgtgtttttatgcttcttgtggaaatcttcatccttgaaaaaaccaacaacttctcggtttttctaggatggaggaggtatgtattaaactgctatggcgcattgctttctgcttgtaagaatcactatgtcaagttaatcaagtttggtcatcctgat

SEQ ID NO: 8848 - DNA, 1175 bp, Oryza sativa
  ref <308>: DATABASE ACCESSION NUMBER: AK106196
  ref <309>: DATABASE ENTRY DATE: 2002-08-28
tcgatgagaaatcaagattgccagatccacaccgcatgatcagggcatactcacagtctgcagcaacactgaatttgctgcgggcttttgctactggaggttatgctgccatgcagagggtaacacaatggaaccttgacttcacagagcatagtgaacagggtgacaggtacatggagctggctcaccgagttgatgaggctttggggttcatggcagctgctggtctcactatggaccatcctattatgacaacaacagaattctggacatcacatgagtgccttcttcttccctatgagcaagcacttactcgcgaggattccacatctggcctctattacgactgttctgctcacttcctttgggttggagagcgtacacgtcagcttgattgtgcccatgtggagtttctccgaggaattgcgaaccctctgggtatcaaggtcagtgacaagatggacccaaaagaacttgtgaagttgattgatatcttgaatccccagaacaaaccagggagaattactatcattacaagaatgggacctgaaaacatgagagtgaaactccctcacctaatacgtgctgtccgtggtgctggccagatagtaacatgggttactgatccgatgcatggtaacacaatgaaggctccttgtggcctcaagactcgctcctttgatagaatcttggctgaggtgcgcgcattctttgatgtgcacgaacaagaaggcagccacccaggaggggtgcatctggagatgactggacaaaatgtgacagaatgcatcggcgggtcacgcacggtgacattcgacgatctgggctcacgataccacacacactgcgacccgaggctcaacgcatcgcagtctctggagttggcgttcatcatcgccgagcggctcagaaagaggaggatcgcctcatggcagttgaacaagaacagtcatctgggcaacatcccatctttggggctctgaaagtcatatatatacagaaacagtgataagaaaagatcaaataccataggcaagctgtgagctatccaattgtcttgtactagctgttatgtcaagttgtcaagtttcgtttcatgttactcatgtactgctaaacaagtcaccctcttgatttaccctgtcatatataaataagaaatgcaagttcacctt

SEQ ID NO: 8849 - DNA, 1255 bp, Oryza sativa
  ref <308>: DATABASE ACCESSION NUMBER: AK106197
  ref <309>: DATABASE ENTRY DATE: 2002-08-28
acccccgcgacaccaaccgatttcgcagcgccagcccactgattcctcaccgaattttttcattttttttctctctttccattctccccggcgatcgagtagccggcttctgctcgccgcccgcgcgccggagggaggcgaggtccaaagccggcgaggcgccatgcaccacgaccccaaccccttcgacgagggcgccgacgataaccccttctccaatggaggaggtggtggagcacgtcgtggtggtggtggcggcggtggtggtggcggtggcggaggcaagtctcagttctcgttcgggttcggcggcctcggcggcggcagcaagggcggtgccactgtcgacatccccctcgacaacatgagcgattcgaagggcaaggggaaggagctgttgcaatgggaggcagatctcaagagacgagaggcggatatcaggagaagggaggaagctctcaagagtgccggggtgcccatggaggagaagaactggccaccattcttcccaattatccaccacgacattgccaacgagatacctgccaatgcacagaagttgcagtaccttgcatttgcaagctggcttgggattgtactttgtctcttctggaattttattgctgtcattgtctgttggatcagaggaggagattccaagctctttttcctggctactatctacggtatgcttggaatgcctctgtcatacttgatgtggtataggcctctgtaccgcgcaatgagaactgatagcgcattcagctttggatggtttttcctttgctacatgcttcacattgccttctgtgtatttgctgccatcgctccaccagttatatttcgtggaaaatcattaactggtatattggctgcaattgacaccttctctgatcatgcaatagtcgggatcttttactttgtcggatttgccttgttttgcttggagacacttgtgagcatttgggttcttcagaaagtatacatgtatttcagagggcacaagtgaagtgggccgtggaagaaatattacaaaagcccaccaaatactatctgattgagctgcagttctgtgcatacatatatgtacatgtcgatcttgtatgttatgtagtgatggagatgttctaagtacatgtcaatctatagtgttattttttttaacaggaatactattttatagtgttgttttctgggctgatcggtctgttgtgttgaacctcaattctttacctatacaaattgcactttgttc

SEQ ID NO: 8850 - DNA, 1128 bp, Oryza sativa; identical to SEQ ID NO: 2215
  ref <308>: DATABASE ACCESSION NUMBER: AK106198
  ref <309>: DATABASE ENTRY DATE: 2002-08-28

SEQ ID NO: 8851 - DNA, 1417 bp, Oryza sativa
  ref <308>: DATABASE ACCESSION NUMBER: AK106199
  ref <309>: DATABASE ENTRY DATE: 2002-08-28
cgatttaatagatgttccaaacaacaccatgtacaataatttatcaacctccgattatgcaactccaagtgcagtgcaaccagattcttccgcacacatttatctgcaagaacatcgacaattgcaaaacatttcccctctctctagctttatgcaaggaaatatcccgaatggactattgccaccagcacttccacctttgcgtgactttgatcctgctttctcattattacttactaacccaccattggctacgatggttcatggcacaacatcatcgtccatgggcaatgcaactactgtttctacacaaccacaagagattgtgaatccaggtgcttcatccaaccctcaattgaatcaatctcagccaagcaccagcaccagcattgcttctggtcctccactccctcagcatctcacgcttcacccttatgctcaagcaactcttcctcttgggtatgcaagcatgattggctacccatctctagccccaagttatacatatctcccgcctcctgcctttcagcaaccatacatgaacagtggcctattccaccaagcagcagctgcagttcccaattccagtgtaaaatatcctttgccacagtacaaaggcaatgtttcccttgcgagcttaccccagcaagcctcactgctctcaagctatgttgggggctttggagctgcaagcagcatgccaggaaattttgccctgaaccaaagcacaccatcagcaaccgctgctcctgggtttgatggaacagtgcccgcgcaatacaaagaagggaatcaatttgtatctcttcagcagagcgagaacgctgcgatgtggatgcatggtgccagttcgcgaacaatgccacctcttgcagcaaatgccttgtattatcaagggcagcagggtcaccagggcggccttcggcaggggcagctgccttcacagtttggtgctccacttgcaccgacacagcccggcctgggccatgagcaccggaaccctagtgacggcaacttaagctctgctgccgctgccgctcaggctaaccaaatgtggccaaatagttactgacccagcctttgaaacccttttgagtgtgtggtcctgttgtggtgcgtgctacgtcagagatgccatgcaatgcttttggcctgattcaggcgcctgaatagcaactgtgtatatgagttgctatgtcgacattttggagaggcagaggagatgtatgtttgatcatcatgttctactacccttagcattttctaggatggcctaaaactgtagctctatttatttatattctgatagaaaggaccgttctttctcagtttgttttgttcttccgtttacatatcatgtaaacaataaaactgagatatctaacaaagcagcaccatgaatgaatttcaaggaagc

SEQ ID NO: 8852 - DNA, 1383 bp, Oryza sativa
  ref <308>: DATABASE ACCESSION NUMBER: AK106200
  ref <309>: DATABASE ENTRY DATE: 2002-08-28
agccatttcactagacagcttagctagcaggtagctgagagagttccttcgatctcgatctctgcacggcgacgataagataagcaatggcagtctcgtcgccggcgccgtcgtctctgcatgtgccgatggccgctgcggcactattagggatgctgatgatgatgtcgtcggcgccggagatgaaggtggaggcggccggcgggttgtccgtcgggttctacgccgaatcgtgccccaaggcggaggcgatcgtccgggacacggtgaccaaggcgttcgagaaggcgcccggcacgccggccgacctcatccgcctcttcttccacgactgcttcgtccgcggatgtgacgcatcggtgttgctggagtcgacaccagggaacaaggcggagagggacaacaaggcgaacaaccctagcttggatgggtttgacgtcgtcgatgatgccaaggacctcctcgagaaggagtgtccacacaccgtctcttgcgccgacatcctctctctcgtggctcgtgatagcgcctaccttgctggtgggctcgacttcgagatcccaacaggtcgtcgtgatggcttcgtctctaaggaggatgaggtcctctccaacgtccctcacccggagttcggtgccaaagacctcctcaaaaacttcaccgctaaaggttttacggcggaggagatggtgacgctgtcgggggcgcactctatcggcacgtctcactgctcatcgttcacaaaccggctgtacaagtactacggcacgtacggcacggacccgtcgatgccggcggcgtacgcggcggacatgaagagcaagtgcccgccggagacggcggcgcagcaggacgcgacgatggtgcagctcgacgacgtgacgccgttcaagatggacaaccagtactacaggaacgtgctcgccgggaacgtcacgttcgcctccgacgtggccctcctcgacacgccggagacggcggcgctcgtcaggctctacgccgccggcgaccccgcagcctggctcgcccgcttcgccgccgcgctggtcaaggtcagcaagctcgacgtgctcaccggcggcgagggggagatcaggctcaactgctccaggatcaactaattaactcaaattaaattcgcgtgaagtttgtgattctcatatatacaaacactactgccctgttgccatgcatgcatgaggctcatttgatttatttttccttatatgtttgtgcatgattcaatgtactactactactacaacaacttttgtttatttttattttcagtttcattttttaccttttgatgctgagtgtgccaattgggcaaaaataaattgtgcttctgaccatatatatgggtgaatttattcaaggagt

SEQ ID NO: 8853 - DNA, 1132 bp, Oryza sativa
  ref <308>: DATABASE ACCESSION NUMBER: AK106201
  ref <309>: DATABASE ENTRY DATE: 2002-08-28
gtggccgcgccgcctgccaccggcggcaagcgaccggtgcttctgctgcgccgcatcaacgaccgtctcgcggcggagcttcgctcgcgcttccgcgtcctcaacttctacgaatcaagcgctcccctcctcgccttcctcgccgccgccgccgcggggcccgaccccccgctcgccgccgtcgtcgtcgccggcggagccatccaggtcaacgccgcgttccttgacgcggtgccctcccttggctgcgtcgtcaccaccggcgcaggcgtcgaccacatcgacctcgccgagtgcgcgcgccgcggggtcgcggtggccggcgcaggcacggtcttctccaccgacgtggcggaccacgccgtcggtctcctcgtcgacgtgctccggcgcatctcggcgtccgaccggtacgtccgccgcgggctctgggcggcgcgtggggactacccgcttggatccaagctaagtggcaagcatgtaggtatcatcggcttgggcagcattggatcactgattgcaaagaggctccaagcattcggctgcaccatttcctacaactccaggagaccaaaggattctgtctcctacaactacttccccgatgtcaccgacctcgccgctgcatccgacgtgctcatcgtcgcgtgcgcgctgaacgatgagacgcggcacatcgtcgacagtagtgtgctagaagcccttggaaaagacggcgtcgttgtgaacatcgctcgcggcgggattgttgatgaggcagagctgatcagggcactgaaggaagggagaattgcaggtgcagggcttgatgtgtttgagaaggagcctgatgtgccggcagagctcctgtccatggacaatgtggtgctcacggcgcatgaagctgtcttcaccactgaatccaactgggacctggccgacctcatgattgcaaacctggaggccttcttctccggtggcccattgcttactcctgtacttcccaagtaattggatattcataaattgcatgggtattactattacaagagatccatgaactgaagtttagtgcaggatctgtaaaaaatactacttgtacttgttcctgccgaaggcagcaagtgattgctatttgatcggtgtttgttcc

SEQ ID NO: 8854 - DNA, 1816 bp, Oryza sativa
  ref <308>: DATABASE ACCESSION NUMBER: AK106202
  ref <309>: DATABASE ENTRY DATE: 2002-08-28
agcaaactgcacgactcgcgcgtgctctgctcgcttctctgttccgttcgctccacggttctctgctcccccctccgtcgcgtcgcgtgcaggaggatggccattggcggagcagcgccgccgcacccgccccgtggcggcggcggcggctcgccggaggacagcagcaccgcgcggcggccggacttcgagcagcccctcctccaggcccacgccgccgtgccggcccgcgggaagcaggagccggtggagcgggaccacgaggcgcagtgctcgccggaggccgacggcgacggcgccaccttcgtgcgcacctgcttcaatggcctcaacgcgctgtcaggcgttgggctgctgtcgattccgtacgccttgtcggagggagggtggctgagcctggtgctcctgctcgccgtcgccatggtctgctgctacaccggcctcctcctgcggcggtgcatggccgcgtcgccggccgttcggggttacccggacatcggcgcgctggcgttcggggccaagggccggctcgccgtgtcggcgttcctctacgccgagctctacctcgtcgccatcgggttcctgatactggagggggacaacctggacaagctgttcccgggcaccagcctcgccgtcggcgggctcgtggtgtccgggaagcagctgttcgtcgtggtcgtcgccgtcgtcatcctgccgacgacgtggctgaggagcctcgccgtgctcgcctacgtgtcggccagcggcgtgctcgcgtccgtcgtcgtggtgttctgcgtgctgtgggcggcggtgttcgacggcgtcgggttccacgggaaggggaggatgctgaatgtcagtggcctgcctactgctcttggcctgtacaccttctgctactgcggtcatgccatattccccacgctctgcaactccatgcaggaaaaggacaagttctccagggtactggtcatatgcttcgtggcgtgcactgtcaactacggatccatggccatactcggctacctcatgtacggcgacgacgtcaaatctcaggtgacactgaacctcccggagggaaagatcagctcgaagctggcgatctacacgacgctgatcaacccgttctccaagtacgccctgatggtgaccccggtcgcgacggcgatcgaggagaagctgctcgccggcaacaagaggtccgtcaacgtgctgatcaggaccctcatcgtcgtcagcacggtggtgatcgccctcacggtgcccttcttcggccacctcatggcgctcgtcggctcgctgctcagcgtcatggcctccatgctgctcccctgcatctgctacctcaagatcttcggcctgacgcgatgcggcaggggcgagaccctgctgatcgccgcgatcatcgtgctcggttcgttggttgccgcgacgggtacgtactcttctctgaagaagattttctatgagttttgaagtcaagagatgcacattaggcatggaaacaccgatgtccgaatttgtgtacgtttttgtagcaacgcaattccgtaatgtacctcaatgtcagcagtcagcagagtaatctgattaaatcctgagattctgtagtggaggcaaggtagtacagataacgaggattagagtgctttaattcgggatcgtaagtatgtttgagctatgggagctattggccttgtatctgtatctctgttgtcagaaatagtacagttagtcaaaatgccaaatgatatttgtaggatatcagcactccatctgaatctgttgtatcttgtaagaacttgaatgtattgaagcattttattgc

SEQ ID NO: 8855 - DNA, 1541 bp, Oryza sativa
  ref <308>: DATABASE ACCESSION NUMBER: AK106203
  ref <309>: DATABASE ENTRY DATE: 2002-08-28
aagcaggattagataagcaaaacagccacctaagcccacgccgcgaagtcgccgccaccgccatgatctccgcgacggccaccgccgccttcctcgccgcggcgccggcctcctcctcctcctgcaccacccaccgccggcgcagcggccttcccgccatctccgcgtccctcgcaaccgcctcctccactgaggagccgctgctggtgcgggcggcgaggggcgaggacgggctgccgcggccgccggcgtggatgatgcggcaggccgggcggtacatggcggagtaccaggcgctcgccaagcgccacccctcgttccgggagcggtccgagacgaccgaactcatcgtcgagatcacgctgcaaccgtggcgcgccttcgcgcccgacggcgtcatcctgttctcggacatactcacgccgctgccggccattggggtgccattcgatatctccgactccaaggggcctgtgatccagtctcccgtgaggtccgaggagcaggtgagggagctcacccccattgacttcgagaagctccggttcgtcggtgagtcgctcaagattctacgcactgagattgatggacaagctgctttgctaggatttgtgggggccccatggacaattgcaacttatgttgttgaaggggggatgaccaacacttacacaaatataaagagcatgtgccacacagcaccaaatgtgttaaggggacttttgtctcaccttgcagacgccatatctgaatacattatttaccaagtaaactctggggctcaatgtatacaaatatttgattcatggggtggacaacttccacctcatgtgtgggagcagtggtcaaaaccatatatcaagcagattgtgaataagattaagattgaatgccccaatgtaccacttgttctctatataaatggaaatggaggcttgcttgagcgaatgacggacacaggagtcgatgttattggtcttgactggacagtggatatggcagatggaaggagacgccttggtaacaaaattagtgtacaggggaatgttgacccagcatttctattttctccattaccagtactgaccgatgaaattcatagggttgtcaaatcagctggtccaaaaggtcatatactaaacttgggccatggtgttcttgtaaaaacaccagaagaagctgtagctcatttctttgatgtcacgaggagcttgagatatgacacacttttccaaggttgtgttactgaagttttggagcctgttgcttaacaatggccaattgtcagatattttttttaatcagctgatccatggtgtaccatcgtagttttgtctgcaagctatgttgctccttttgttggccatgtctttgtaggaatatcacgattcgtgaccaggtcaattcaattttattcattactcttaatagctgtattccttcatccatccacaaaacaaaaacaaaaaggcatgccacctggttttacaagaaaagccagagtaggttcaaggtgttttgtccatttgtctttcttgagt

SEQ ID NO: 8856 - DNA, 1589 bp, Oryza sativa
  ref <308>: DATABASE ACCESSION NUMBER: AK106204
  ref <309>: DATABASE ENTRY DATE: 2002-08-28
atcatagacgattttatcgatgaacctgaaatagacatggcttgccacttgagattatttccctttactcaactactagtattggttctgtacaaaatcgccgccgtaggggcagatcctgcaaacgcagaactatccacaaagatcacccaacactctccattgtacaacctacagcctcaagactttccaaacgaggagctctaccgcaactatctagtcatccagcggttcaagaagacaatcacttccgaccccaagaacatcaccgccacctggaccggccatgacatctgcggcaacacgacctacctcggtttctactgtgcagcattgcctgggcgtactaagaagcccacggtcactgtggtgatctttaacggttatggcctgcgtgcaccgaagctggaaggatttattgaccatctccccgatcttgcacttttccatgctgcctccaacgacttcggtggtgacatcccctacctcacaggcctcgcctacaactacaagatcaatgtcgacagcaatctccaaatacaggatgattttagtcgtgacatggtcgggtcgcatgtaacaactaaagttcatggttattgcgttaatttagatctagatatcacatttcacctccggcccggaaaagacgacaagaaaggacgaagcatccccggtgccacagattctaaggcgctcctcctcaactacaatcacctgtccgggccattaccggtgaacatcggtttctccaagttaagctacctggccctcgccaacaacaggctcaccggcgcaatcccgccatcaatcttgcatttgcaagactccctcctcgaggtgctcctcctgaacaaccagctctccggctgcctcccccacgagctcggcatgctcaccaaggccgcagtgttcgacgccggcatgaaccagctcaccgggccgatcccctcctctttctcatgcctcaccagcgtcgagcagctcaacctgggcggcaaccgcctctacggagagatccccgacgcgctctgcaagctcgccgccgtcccagccggccgcctcgccaacctcacgctgtcgagcaactacttcacgtcggtcggaccggcgtgcttgtcgctgatcaaggacggcgtcctcaacgtcaggaacaactgcattccgggcttcgccaaccagcggcggccggcggagtgcgcgtcgttccacagccagccgaaggcgtgcccggcggcgagcgccacccacgtggcgtgccccgccggagctgccaacgctgcggcggcgccggcggacagggtggtcaaggactactccagctacgtgacgtacgccaccctgcacgagtgagcccggcgccacggcacgggcgcacgacgtgcgtgcatgcatgcagtaggggacagctagaagctagcgtctcggggtggtatttgctcttgtattcttgtgttcgtttgttgtgctcgtgagtcgtcattgtggtttgttttctctgcacgtgtggctagctatggctgtcacgtctagatctcacctcctgtactcttgtgtactgtactatgtgaaaatcattggtgattact

SEQ ID NO: 8857 - DNA, 1182 bp, Oryza sativa; identical to SEQ ID NO: 2212
  ref <308>: DATABASE ACCESSION NUMBER: AK106205
  ref <309>: DATABASE ENTRY DATE: 2002-08-28

SEQ ID NO: 8858 - DNA, 1044 bp, Oryza sativa
  ref <308>: DATABASE ACCESSION NUMBER: AK106206
  ref <309>: DATABASE ENTRY DATE: 2002-08-28
aaaaaaccttctattcctcctcctcgccaagccagcggaattttcccccaaatccaccgcgtcgccatggccgccgccgccgcccgcctcctcctcctcgccgtcgtcgccgcggtgttcctcctctcccccgcggcagccgggcgcccctgcggccacgcccagacgctcctcatctccttctcctccgtctccaggcccaaccccgaccccaacaaccccactcccctcaccaccaccgtcgtcaccgtcctccgcgtccgccgcctcggcccccaccaccccctccagatcccccgccccgatcccctccccgccgcctccgacgccgcctcgtccgtccaggagcgcgccaaggacatcctcgtcgtcgtctccggcctcctcttcggcttcggctgcggcgccctcaccgccgcgaccatgtacctcgtctggtccctcctcgcctccacctgcgctccttcctacgacgaggtctacggcgaagacgacgacgacgagctgtccgactccgagagccccaagaaggccggatacgtcatcatccacgacgccgaacagtacgtcggcggtaagaactaggggtggggaattgggctatctcgccgatggccaatttaagaatttgtgataaatgatcgcgtggatttgcggggtatatatactactattagcacctatatatgtgttgcgtctgtctgactcagtatgtgtgtgtgatttcgaaaagaaacaaattatgaatacggtcttgatgttttcttacataatttaaagtgaaactgaagtgtccttatttattgatcatgaaacatggaacatatttggttcttctgctcagcaaaattgcaatatgttgtgtacaacttctggtaaattatggagtactagctagtttttctactcatgttttgtgcagttgtggtcagtgaatgtgtagaattttctaccatgaaagggctaatatattttggtaggccatccattttggatggaggatcacgatataggccattctggagcaaactgattattattttc

SEQ ID NO: 8859 - DNA, 1172 bp, Oryza sativa
  ref <308>: DATABASE ACCESSION NUMBER: AK106207
  ref <309>: DATABASE ENTRY DATE: 2002-08-28
atcctctccctctccaatctccctcttcctctcctcagatcggggcgccggctgagaccgagcggcggctgctcgttgcgatcggggcaggaccccgcttctcccgtccaatccggcggtggctcggtgacgagagtaggggcggcgagagctcggctcctccctcgcctcttctcccctccaatcccggtggcagcggcggcggcggctccgcgacaaggaagggcggcgggagcttggttcctccctcccctcttctccccttcaatcccggcggcggctcggcgacaagtgcgggacaagggcggcggctcggcaacggcggctcagcggcgacgacgacgacagcgacatgggaggggccttggcgactttgacgacgaccgtgacgacggagggcctcgtcgacatcgacggcgcgcggtggacggcgacgagcggatccggcaccacctcctccatccaccgcgccacctccatctccgcccccagccacctcgtcgcccttccccgcctcgctcccccagccagggaagggacggtggcgcgcggatctgccgcctcccggcctcgggagcgacggcggcgcatgaatccagcggcctccgtcctcgggagcgccctggcgtgagcgggagtgccggcagcacgcagattcgcaacgacggtgacggtggctgcaacgacgacgacagcggcgatggtagctgcgacgacgacgacggcgatgacagcggctgtgatgaaaacgacaacgctgtgatgcaagtagcggcggtgctctcttcctctgtcctccgccatcagcagcaccagtataccctgatcataagagccgtagtactatggctgatcctgcacttgctagtgatccagagttacacgggctgtcttatatctatgagaggaatggtcgtcattattgtttaaccatggcaactcctactgtagtacctaatcctccagccaaattttcagaaagtgcttagaccttgtattagggatcttcgaaaaattgtaattctcttttaagggcacacagtagtatctcgatataaactctctggtagtccaattttgtaacaccatgtcttgtacttagtctagaatggctaccatctatctttatgtatgactaccatatatatcaatgagaaaccatgtgatccatc

SEQ ID NO: 8860 - DNA, 1086 bp, Oryza sativa
  ref <308>: DATABASE ACCESSION NUMBER: AK106208
  ref <309>: DATABASE ENTRY DATE: 2002-08-28
gcgacgcgactgctgcttgggatttgattagttgtgttgagagatggccacaccgcaactgctgctacgccgcgccttctcctcctccttcctctcctccccattccgccgcccgccactccaccccgcccgctccttcgttcccccccgcgccgccatggcatcctccgccgcgccgttccacatggtccagatccagcgcgacgacacgacttttgatgcctatgttgttggaaaagagaatgctcctggaattgttgttttgcaagagtggtggggggttgactatgagatcaagaatcatgctgtccacatttcccaaattggtgaaggatacagagctctcattccagatttgtatcgtggtaaggttgctcttgatgtagcggaagctcagcatctgatggaaggtctagactggccgggtgcggtcaaggatattcaggcttcagttaaatggctcaaggcaaatggatcacccaaggttggtgttactggatattgcatgggaggcgctttgtcaattgcaagtggagtttcagtcccagaggttgatgctgttgtggctttctatgggacaccaccttctgagcttgccgatgcttccaaggcccaggctcccatccaggctcattttggggagcttgacagttttgttggatttgcagatgtcacggcagccaagtcgctggaggagaagctcaagtcatctggcgtgccacatgaagtccacatctaccctggctgctcgcatgcttttatgaacacatcacctgaggccgtcaagaggaggaaggagatgggtctgactgatgagaaccaggcagcaattgacctggcctggtctcgcttctcgacttggatgggtcgtttccttggatcggcgtgagccatttacgcatatatgttgtcaacctgtcaggttgtatgaataaaatcattcaggccagatgcagagtaattaagtatacccaaaccaaataattgtgctgtgttggactatgtgaacatgccatgctttggtttgcgaattatctgtggttttactgtgctttcgagattgcatatatattctgcgttggcctc

SEQ ID NO: 8861 - DNA, 1411 bp, Oryza sativa
  ref <308>: DATABASE ACCESSION NUMBER: AK106209
  ref <309>: DATABASE ENTRY DATE: 2002-08-28
acgagcgcgagcggtgctctggtggaggagaggagagggaggcgtggtcggagtcggagtaggaggaagaggagatggtggtgctggtggtggcgacggcgtcggacccggcgtctatcggcccagccgccgccttcctcgccatgcccggctggtctcccggcccgcccatccccgaggggatggagagctttacaaacggggacgttcgactattgaagcatgaacgcagcatcattgcggaggatgatcttgacaaccggtggaaggcagccactggagaggctgtttctgaggtcatattcctcagcaaacacactgctgtctccaaccgtcctgcgcttactgtccatccaatcggtgtgccacatctaagagaagatgagacgccacctcaaggagggagaccaggatgggcagctctgcccaatcctcgaattggtccatggctccgtttgatgcaaaagattgcggtagaccaaggtcttgttccagagtttgagattacactggaagctactcaccatggaccagtcaccaatacaccaacgatgtttgttgagataggaagtactgaagaatattggtgtcggcattatgctgctcaggcgattgccctagttctttggaaaggtctagggcttgatgaaggaaatactgttggaagttggcagggtaatagtgaaaaagttctacttggtataggaggtggtcactatgctcctcgccatatggatattgtcatcaaagatggcatatgggtgggtcatctgctctctggttactcattgcctatggaagtgtcacctcaaggaaatggaaaaagttatagtgatgttggtggaatgtggaagcattccatcaaaagagcttcaagggctggcaaaagaatgctatcatgagctacttgcaggagctgaacataaggataggaaaacctaatgatttcatctaatatgctgcagcaggtgtccacataaaatttttctgcgtcgtatatcagggacaaatggtaaaggtgcagcctgtgccagggaggcaaaggagaatgcagcctcgtgagttgatgatgttaatgttcctggatgctacacatgagaagtgagaagcaagcaatagtcatccttaatattgcaagggaagccaggatcgatgctgctctgaagaaacggtctagagtcatgtcaggaaaggtggcagcaaaccatccagctagcacgttatctaggctttcatatactagctgtctagtaggagtatttctcaggtttgtgcatatggtggccaaataaaaattagtacaaaagagacccatataaaaagggacacattttagtattataaatctggacaatagtgatactaggttactatattatgaaacaaatagagtactttgttttggggatgc

SEQ ID NO: 8862 - DNA, 976 bp, Oryza sativa
  ref <308>: DATABASE ACCESSION NUMBER: AK106210
  ref <309>: DATABASE ENTRY DATE: 2002-08-28
gtgctctgcctccctctcccttcccacgccgtctcgccgcaatcgctcgctcggtcgcctcctcttccgccgcgagacacgaagagcagcagctcacaggtaggcctgcgcgtcggcggccatgggagacagccagtactccttctccctcaccaccttcagcccgtcggggaagctggtgcagatcgagcacgcgctcaccgcggtcggatccggccagacgtccctcgggatcaaagctgctaatggtgtagttatcgccactgagaagaaattgccttctattttagtcgatgaaacatctgtgcaaaagattcagtcattgactccgaacattggagttgtctacagtgggatgggtcccgatttccgtgttcttgtgagaaaaagtcggaaacaagcacagcagtattatcggttgtacaaggaaactatccctgttactcagcttgtccgagaaactgctgctgttatgcaggagttcacacagtctggtggtgtaagaccatttggagtatcattattgattgccgggtacgatgacaatggcccacagctgtatcaggttgatccctcaggatcatacttctcctggaaagcatcagctatggggaaaaatgtctccaatgcaaagacatttcttgaaaaaagatacacagaagacatggagcttgatgatgccatccatactgccattttgactctgaaagaaggatatgagggtcaaatctcagccaacaatattgaaattggagttattcgatctgaccgtgaattcaaagttctaaccccggcagagatcaaggatttcttggaagaggtggagtaaattgtctgttgacatttgatagtttactgttctaagtgacactcttgagccgtagtcatgaggcttcttgtctcttaccatttgtcacttaaacctattgtaaactgatttgcttcagtgatatgcatgagatgaagtggtggacct

SEQ ID NO: 8863 - DNA, 979 bp, Oryza sativa
  ref <308>: DATABASE ACCESSION NUMBER: AK106211
  ref <309>: DATABASE ENTRY DATE: 2002-08-28
ccaaccacacatctcgccagcgcgttcgacgtcacctttccgtctcgccccccctccccctccccccaccatctcgtcgctgttctttctcccccgcggcgatgtcgtcgacgccggcgacgaaggagtcgatgccacactccgttttgtccacaccgcactctgattggacaccggcggcggcggacgttttgtccacggcggcgatggcgtatacgccgcacactgattgtacaccggcggcggcagatggaattgggtggagatcctcatcgccatcatgagtgtggagatcctccacggcaagacggtccagagcttcgtggaggatgagggcgccttcaactcctccatcgacggccgctttgcagcgcttgacactaacagcgagtccgcgacgtcctgctctcctacgtcgagatggccaacgagctgatgagccttcgtatgctggacaagcacttcggcgacgacgaggccgtcatgagcgccgacgagctcgtgaagctgtaccgcggcctgtttgcgtggttcgaccgtgatggcagtggcgccgttgaactggaggagtttcgggctgagatgaaggaagtgttgctcgctgttgctagtgggcttggattcttgctagtgcagatggtggtcgaggatggtcggagtgtggcgaaacacctaggcgggcgtttgtagagattcaaacaattggaaagacaaagggaaaggttccaggctcttcctgcaaactaattgatttttcgaaaaacaaatgtttgcactgtctttttttttttgctactttttgtcctctgtgagtgataatgtgatatggtgtgattgaaggtaggaagggtgatctgcttctgctcatgatccgctaagagcctcagatagagagagagagagagagagagagagttcttccatagagagaagagagaaagaggaaagaacaaagagagtagatctgagatgttctttt

SEQ ID NO: 8864 - DNA, 989 bp, Oryza sativa
  ref <308>: DATABASE ACCESSION NUMBER: AK106212
  ref <309>: DATABASE ENTRY DATE: 2002-08-28
agcaaaacaaaatacaaaccagaacagtctcaaagcttcgcccaagcagagaagaatggccgccggaggaggaggaggagacgagctgaagctgctcggattgtgggcgagcccgtacgtcctgcgagcgaaattcgcgctcagcttcaagggcctgagctacgagaacgtcgaggaggacctccacaacaagagtgagctgctcctgagctccaacccggtgcacaagaaggtgcccgtgctcatccacaacggcaagcccatctgcgagtcgcagatcatcgtggagtacgtcgacgaggcgttccctgacgccggcgagtcccttctcccctccgacccttacgaccgcgccgtcgctcgcttctgggccgcctacatcaatgacaagttcatgccggcgtggcagaaggcgtcgttgggcctcacggaggaggagaaggcggaggcggtgaagcagatgctcgccgcgatcgagaacctggagacggcgttcaaggagttgtccaaggggaagcccttcttcggcggcgacaccgccgggtacctcgacgtcacgctcggcgccgtggtcggctgggcgcgcgccggcgaggtcctgttcgggaggaagctcttcgacgccactaggagccctctcctggcggcgtggatggagcggttcgtcgcgctggacgctgtcaaggcggtgttgccggacaatgccgagctgatcgagtatggcaagatgaggatggcgcactacgccaagcttgctgccgccttggctgctgcgaacaagaagtgagccggcgaagcaaacctgtagttggtgtgtgtccgttctcgttgctcgtggtctcgtggaggatgaaagctggtgcaccatagtccttccacaccgtgaggttgagttgtgactttttttttcttccagtgatccgttcgatcggatcgtcatgtgattctggcgcatttaactcaataaaagaaaggaagaagttcaaatt

SEQ ID NO: 8865 - DNA, 1346 bp, Oryza sativa
  ref <308>: DATABASE ACCESSION NUMBER: AK106213
  ref <309>: DATABASE ENTRY DATE: 2002-08-28
actacaatcctctcctctcctctcctctcctctccttcctttgtcgcgagtcacaggcacacagacatggccgccgtgaacacagtgtcgtcgctgccctgtagcaaagctggcgccgccgtagccgggggagctccgaggccgtcgacctgctccgtattctaccctcctcgttgctggtccaagcgaagcagcggtaatggcgtgcgggcgcaggcgtcgacgacggagacgaccgcagcgccggctgcggaggtgactactaaggtggagaaggtgtcgaagaagcaggtggatggcgtggtgacgaacaagtacaggcccaaggagccgtacacggggcggtgcctcctgaacacgaggatcaccggcgacgacgcccccggtgagacgtggcacatggtgttcagcaccgacggcgagatcccctaccgcgaggggcagtccatcggcgtcatccccgacggcatcgacaagaacggcaagccccacaagctccgcctctactccatcgccagcagcgccatcggggacttcgccgactccaagacggtatcgctgtgcgtgaagaggctggtgtacaccaacgatcagggagagatcgtcaaaggagtctgctccaacttcctctgtgacctgaagcctggttcggacgtgaagatcacggggccagtggggaaggagatgctgatgcccaaggaccccaacgccaccatcatcatgctgggcaccggcaccggcatcgcgcccttcaggtccttcctgtggaagatgttcttcgaggagcacgacgactacaagttcaacggcctggcgtggctcttcctcggggtgcccaccagcagcacgctgctgtacagggaggagttcgagcggatgaaggagacgaacgcggcgggggagaagatgtacatccagacgcggatggcggagtacaaggacgagctgtgggagctgctcaagaaggacaacacctacgtctacatgtgcggcctcaagggcatggagaaaggcatcgacgacatcatgatcgacctcgctgcaaaagacggcatcgactggcttgactacaagaagcagctgaagaagtcggagcaatggaatgtggaagtctactgatggatatatatatgttaataattaattaatccctttttatctcgattttcatgcatgcatgcgcaacctgcatacgccatcttgttgtactcgatctgatctcatctgatgagatgcatgtagatattatactgacgattcgtcgactataaagtggtttcccattttctgctgtattttgacaactttagtgtcccatttatttattatatatgcgcatgtgaatt

SEQ ID NO: 8866 - DNA, 1071 bp, Oryza sativa; identical to SEQ ID NO: 8570
  ref <308>: DATABASE ACCESSION NUMBER: AK106214
  ref <309>: DATABASE ENTRY DATE: 2002-08-28

SEQ ID NO: 8867 - DNA, 1063 bp, Oryza sativa
  ref <308>: DATABASE ACCESSION NUMBER: AK106215
  ref <309>: DATABASE ENTRY DATE: 2002-08-28
atattcctccgtcttctccccgccgggtgtcgctctcctcctcgtcgccgtcgccggtcgtcgccggtcgcgggtggcgcgcaacccggagtctctgccggctgcttactcgccgcgggcttcagcttcctcctcgatctccggcgcgcctccaagctgcagatcggccgacccccccagtgtgttgaagcctgcccttgacacttagcaactgcagagtcctgctggagagagatggggttcatcggcgacacgatagagtcaatccgctcgatgcaggtccgccaggtgctggcgcaaatcatcagcttaggtatgattgttacctctgcattgatcatatggaagggtttaatagttgtaacaggtagtgaatctccagtggtggtggttctttctggtagcatggaacctggatttaaaagaggtgacatcctgtttttgcacatgagcaaagaccctatccgcactggagaaatagttgtttttaatgttgatggccgtgaaattccaattgttcaccgtgtgatcaaggttcatgaacgccaggagagtgcagaagttgacatcctcacaaaaggtgataacaattttggggatgaccgacttctgtatgcacatgggcagctttggcttcagcaacatcatattatggggcgagctgttggttttctgccatatgttggatgggttacaattatcatgactgagaagccaattattaagtaccttctgatcggcgcgctgggcctactggttataacatcaaaggagtaataaagatgcggcttttcagtagagtagtggcctctctagtcgcatggaagaagctggtatttgtttcaccatgtttccaatggaagatgcgaggggtttatttttaggataactgtgcgacaattggcattgtattttccagcggtttatcatgtggcatccatctttcagtggtttacagttaattgcgcaagaaaatttaacgtgacttttggttcggcaactggttattggatgctgactttgatacaatataagatgaattcataaagcaatcctttgaggc

SEQ ID NO: 8868 - DNA, 1567 bp, Oryza sativa; identical to SEQ ID NO: 4419
  ref <308>: DATABASE ACCESSION NUMBER: AK106216
  ref <309>: DATABASE ENTRY DATE: 2002-08-28

SEQ ID NO: 8869 - DNA, 1653 bp, Oryza sativa; identical to SEQ ID NO: 4422
  ref <308>: DATABASE ACCESSION NUMBER: AK106217
  ref <309>: DATABASE ENTRY DATE: 2002-08-28

SEQ ID NO: 8870 - DNA, 1017 bp, Oryza sativa
  ref <308>: DATABASE ACCESSION NUMBER: AK106218
  ref <309>: DATABASE ENTRY DATE: 2002-08-28
acggtgcaaagtgtgcagcgaactcgataaacattaaacaagctgtgtgaacttcttttttcgtgacaagtttaattctttctcgatcgatcgtcgtgatggctgacgagtacggccgcggcggctacggcaggtccggcgccggcgccggcgacgactacgagagcggcggctacaacaggtccagctccggcggcgccgacgagtacggccgccggccgggaggcggtgccggtggctacaacaagcccggtggcaccgacgactacgacagcggctacaacaagtccgccggcggcgacgacgacgactacggccgcaccggcggcggcgggtacaacaagtccggcaccgacgacgactacgacagcggctacaacaacaggtcaggggctaacgagaagtacggccgcaacaagtccggcgacgacgagtacagcggcggcggcggcgccgaagccgacgaggagtacgtcgacgggttgtcgtcccgggacgacccggagaagtacaggaaggaggagaaggagcacaagaacaaggagcgcctcggcgaggtgggcgccctcgccgccggcgccttcgccatgtacgagaggcaccaggcgaagaaggaggccaagcaggcggcgaaggacgccgaggaggaggcggaggaggagtccggctccggcgcccgcggcggcgaggggaagaagaagcaccacctcttcggctgatgatccatcgatcgatcgcgccatgcatgcggcggcggcggcgccatggccggcgtccgcgcgcacgcgtaaggtgtggccatgggcgtgtgcagctgaataagagccggggtttttgtacgtatgggctcagtatgtgtacacctcgtatatggtatggatgtacgtataagcgtatagtgtgtactataccaataaagctatctgttgctctgtgcctctgtgtaattaagtccatggtctgccatgcttgtgtagttgtgtacaccttgacttcatgactagtgagtagtgacgt

SEQ ID NO: 8871 - DNA, 1626 bp, Oryza sativa
  ref <308>: DATABASE ACCESSION NUMBER: AK106219
  ref <309>: DATABASE ENTRY DATE: 2002-08-28
gtgccacttctttggtttcatgccaaaaggtttttgaaggcccccttgtgaattccctgttgtccatcagacaaggaggcctcaagatgtacatcatagaggacaaagggggtgccattgccctcatgctggcctccctcttcttcctggggacatggcctgcggtcctcaccctcctcgagcgccgaggccggctcccgcagcacacctacctcgactactcgatcacgaacctcctcgctgcggtcctcatcgcgctcaccttcggtcagctcggcgatagcaagcccaacatgcccaatttcttcacccagctcagtcaggataattggccttcagtgctgtttgcaatggcagggggtgttgtgctcagtatagggaacctctctactcagtatgcatgggcatatgtaggtctctcagtgactgaggtcatcagctcaagtatggttgttgtaataggcacaacactgaattatttcctggacaaccgcatcaacagagcagagattcttttccctggagtggcctgcttccttgttgcagtcattcttggctctgctgtacatgcctccaatgcagctgataatgaagaaaaactaaatggctccacaaatatctataaacttggggaaaatggaagtgtggaaccaaacaaagaagtcatagaaaaagatgctcccaaggacttggagaatggagcttctgcaaccaaatatgttgccaaagctgaagcaggaactgcggaatacttgattgagctcgaagaacggcgttcgatcaaggtgttcggatcaagcaccttcatagggcttgggatagtgttcttctcaggagtctgcttctcactcttctccccggcattcaacctcgccaccaatgaccaatggcacaccctgaaacaaggtgtaccacacctggtggtgtacaccgccttcttctacttctcgatctcgtgcttcgtcatcggcatcggcctgaacatcctgttcctctaccgtccaatggccggtgtgccgaaatcatccttcaaggcttacctgaatgactgggaaggcaggcagtgggctctcctggctggcttcctatgtggctttggcaatgggtttcagttcatgggtggtcaggctgctggctatgctgctgctgatgctgtccaggcattgccacttgtgagcacattctggggaatactcctgtttggggagtaccggaaatcgtcgcgaaagacgtatatcctgctcgggttcatgctgttcatgttcatcgtcgcggtcgcggtgctcatggcttcatcaggtcacaggagcaccaagtgattgattcaaatcctttcatctcttgccttaatttggtgtttgcaagcgcaaaccactcttgctgtcagaaaacaaagaagttcaggcagcaatgcagggggggacttcagtccaggtctccaggaagcagatcatgccaacatggaatgaaactccattcatgaaatttccatttggatggagctgtacataaggggaaaaaaggaacaaactaagatagtttgtggatttgtgattttaagtttgtgtcagattatataaatgtaatgttatccctttctctgaattctaaaagacccatttgcag

SEQ ID NO: 8872 - DNA, 1146 bp, Oryza sativa
  ref <308>: DATABASE ACCESSION NUMBER: AK106220
  ref <309>: DATABASE ENTRY DATE: 2002-08-28
acgaacacgtgtacacgacgcgacgccggcggcggcggcagccatggagcccgcggcgatggaccgcatcgccggccgcctcgccgccgtagacggcctctactacccgaccaccttcctcctcgccgacccgccgccgtccgccccggaccgcaaggccgccctcctcgcgctcctctcccgcgacgccccgctcttcctcgagcgctacggcgggtcgctgtcccgcgacgagctcgccgccttcgacgcgctcgccggcgactacgaggtcggctggcacctccgccgcctccgcgcggcctccgaggggggcccctccgcgtcccgcgtccgcaaccgccgccgcgcctacctcgaccgcctggtgcgcgagggggagtacttctccgaggaggctatgcgggagcgggagccatacctgcaccacgagtaccttggcaggttccaggatcccacgggacgggccatggcgaggccgggggagcggtggtccgagacgctgatgcggcgggctgaggaggccgtgatcgttgagaagattcgaggggagcagattaggagaggggttgatcccagcgagtgggtaggtggtggcgctgaggaggccatggaggagcaggaagaggaggaagaagaagaagaggaggaggaggaggaggaggaagagagcgaggaggagcaaggcatggacatggaggagaaaggaagaggtgccgataattcttccgagaatccgagtgtgactgaggtggttgactccaacaaaactgcaggggcttccaagcaaacattatctgctgaagatatggaggatcaacttgaacagtttaccagcttgatgcaacagaagttcctgtccggtgaagactctgagcatatggactactctcggatcgataacgacgagatgctggatgaccattggtcaaaagaagccaactatgatgcggaggagaagtatttcgaagaggattagttcaaagttcaaactaggctgctgttatagcatcagttatgtagtgcatcatcgcatctcgttttttttttgttcatgttcagcacttacttagtctatcatgtacatatatctatatatgcagttgttgcccctctaatccgaataagttgagtaacttgcttatg

SEQ ID NO: 8873 - DNA, 1057 bp, Oryza sativa
  ref <308>: DATABASE ACCESSION NUMBER: AK106221
  ref <309>: DATABASE ENTRY DATE: 2002-08-28
gtgctcgctcgcacacagtccccaatggcctcccggaacgccgacccgccgcgtcaccacccctcgacgccgcctctcctcctcgccatgcgccacctccccttcccgggcgtccaccggccgcgcgcgctccccgccccggacctcgcgcccctcgccgcccgcctcgaagagctcgctgccgccgcggccgcgcacccgctcctgaagccgctcttcgccttccactcccacctcgccgccttctcccagagcaggaggcgggcgatggcgacgatgcgccggcggcggacgacgggcgagtgcccgctgtccggcgagcactgcttcgcggcggtgctgggtgactccgtggccggtgtggtggtgtccagcggcatcaacaacttcctcagcctgtacaacaccgtcctcgtcgtcaggctcgtgctcacctggttccccaacacgccgcccgccatcgtcgcgcccctcagcacgatatgtgatccgtatctgaacattttccggggaatcatcccgccgctggggggaacgctcgacctgtcgcccatcctcgcgttcctggtcctcaacgccttgtccagcaccgccgccgcgctcccggccgagctcccggacccagcaccgccgacgtctcgcggcgcaacctcgtcaagctccgtgctcaccgcaaaccggaggaaatggatgcggagaatccgcccggtaaaatcgcaggaaggagaggaggaaatgtgatgctctatctaggtgggacttcgtttgaaccagtttggacagatggaatcgctgtctcactgacatggtggccatcagactaagagtctgggcatgttcagacgcgaacgatcatcaattaagcaggcggaattgttttggttgtgttgcttcagaagatttttgcttgtacgctgtagaatccatcccattgaggcttcgtgttttctgcatgtatgcagaggaacaacctgcttgactagtttgacatgttccagtcttttggatgagtttgttactttgttgatgaatcgcatgctcactgtttatactaaac

SEQ ID NO: 8874 - DNA, 1077 bp, Oryza sativa
  ref <308>: DATABASE ACCESSION NUMBER: AK106222
  ref <309>: DATABASE ENTRY DATE: 2002-08-28
actgctgcagttcggtgatgagcgtattggggcagcgccgcccctctgctgctccgctggccccttggagctcgagtccgcacggatcccttcgtctctccgcccccctcgcgcggatccgccgtcggcgcctggattccaccgtctctccacccttctctcgggctgatccgacgggaggggtggatccggtagcctcccctacggtgacgacgacgatgggtggacgctacctccatcgctccatctgccagcgacggacatccttgattcgccgtcaaccccagccactgccgcccagtatcctgagggaaggcttcatatttgctaagtgagttgcgtttttttatgtgtgctattgaattgaagtgagcaaatattgctgtcgcacatacaggttgagtacaatgataacctggaatcgacattgattggaggtggcttggcaccctagaggaaaaaccttgtgatttgtattttttttgtgtgcttctattatttctatatgtatgtcttgcctgagaaatctgtaaaatcgtgatcgggtgagcgctaaaaatagtggaagaaagaagaaaaggaaaacggaatagcaagagcaggactcctggtcgcagttggggcaaaccggagtaggagtgggggtgcacctgggcttgtgggcttgtggtgcacctggacttgtggctctatgggcttgtggcttggacctggacttgtgggtttgtggaacacctggacttgtggctctatgggcttgtggcttggacctggacttgtgggtttgtggaacacctggacttgtggaggtgcacctggacttgtggctctatgggcttgtggcttggacctggacttgtgggtttgtggaacacctggacttgtgggcgcacctggacttgtagctttatgggcttgtggcttggacttctggcctggcctactgggctggcgctagagaaaagtgaaaaaccgaacaaaatcggatccgtgaaaaaagcatgtacgggcgaaaaaaattacgcacggacgaaaaaattggtgactaaaggaaaaatccgaatatttatattagtt

SEQ ID NO: 8875 - DNA, 526 bp, Oryza sativa
  ref <308>: DATABASE ACCESSION NUMBER: AK106223
  ref <309>: DATABASE ENTRY DATE: 2002-08-28
aaaaaaaaaaaaaaatcccaatccccatctttccctagtttttgtcaccagtgacggagagagtcgcggccggccaggctagagggagcggcggcggcggcggcggcggcggcggccacgtgccgtgggagtggtagcggcggccgcgaggagggagggagcagcggcgttggcgctcggaggaagcagtggcgtcggtgcgcggagcagcggtggcgtcggctgcagctgtgaggaaaggcggctgcgtcggttgctgccgcatggaaagagggaaggaggaggagggattgcagcgccggctgctgcctgcgcggaggagcgccgctagcttctgctgcgcggaggggcggtgacgccagctgctggcgcatggagaggggagggaggaggaggggtagcagccggagggggggcggcgcctggcgccgcgtggattgttggtcagaggagaattttttgttggatttggatgcgaatttgtcattggattcagatctgaaattcgttgttggactatgctgtc

SEQ ID NO: 8876 - DNA, 1446 bp, Oryza sativa
  ref <308>: DATABASE ACCESSION NUMBER: AK106224
  ref <309>: DATABASE ENTRY DATE: 2002-08-28
atgcacacagtgttgtttagatagagagagagagagggagagatatgcgttcttgcagcatcagaggtgtcattcgccaccatctggcgtggctggtgctaattttgtgctcatggcgggttgcagctgctcaggatcaacaagcaccaaaaactgatccagtcgaaggtaattaagaatgcacgcgtacgtatatgtagcctgccaatgggttggattggaatgggtctaatggattggttttcaatttggattcacttggtatgggtgtaaacgggttgagataactaatggattggagcagcttggatgagggatggttgggttggattggattggtttttagtcataatttttgggtctaaaatggatggagtccatggatttcaattggattcatccccaaatagcagatgatgtcgtctcagacacagaggcactccatcaccaccgccctcggccgcctcgacctcgccgcgcagccgcgtttggatgtccggccgccgcactaggttcgccgtcggagagcttccgccgccgccgcccgccgccttctggaaggtggagaagacgcgggcgcgggggaggaagcggagggaactcctgctgcacggcgcgcatggcgccgacgagctcgccgtccacgccgtcgccgaaccacgtggccaagttgagcgcgaacagtgcggcgtacaggcagcacgacgagcagagcggcgccaagaaggcggcgtgggtggtgtcgcccaacggccaagtgaagcgagaaaaggcggtggaagcggcgcgcggcgagggagctgcagccggagccggagaagaagaagaaaagcggatcgacttggccgtgctccgttgccctatctgcctccttcctagctgttcatccaatccatctgacattcttcttcttgttgttgttctttcattcgattcgtgagggctcggctagtggcaatttcttggcgtgcagtccgcggcggggcacttggcgtgcagcagctgccatggcgacgtcccggcaagcagtgccacgcgtgcggcggcgccgccaagatcctgtgccccaacgacctgttcggctgctggagctacgtcgcctattacgacgtcgccggccaccagcgcgcctgcccgcacgcgccctgctcctgctcggagtcgcgctgcgacttcctcggctcgccgccgatgctcctcgcccacctcgtcgccgacatgtggttggtgtcgatttggaatggggtgaaatggactggaaaagtgaactgaatccatatagatgaaatgggttgggttgatttgggttgaaatatgatatgggttggattggtttggattctaagagaagacaaatgaattagagtggtttggacttgtgtagcttactgctttggtttgggctggttgtggattggatttcaaaccattggcaggcttccacgc

SEQ ID NO: 8877 - DNA, 1569 bp, Oryza sativa
  ref <308>: DATABASE ACCESSION NUMBER: AK106225
  ref <309>: DATABASE ENTRY DATE: 2002-08-28
ctcctccctagtagtcgaccactgtgtaaatgcagccgcaacacaagggaattccaaggtttcccccaactcaactcccctccccttcgcttcccttcccttctctcctctcctctcctctcctcttctcccccccaaattcgccgccgcctcctctccccctctcctcctacccttccccgcggcggcggcgagaggcggcgcggtgcgtcccctcccctcccccgcactctgctggtgctggtgctgggctgccgttgggggaggcgggagatccgcccgggcccggggttccgtttcctcctcctgctcggtctcaacctgttgtaatactatccatcaccagcaatgaataccccagaaaagaaaccactgtgctatacttctagaagagcactgcaacagaggacagaatcctcttcggaattgatctctgtatcaaaaagagcaacccgccagaatactccacgcaagccggattctcctcccaaacgaacaacaagaagtagcgctaacctggcgaaatgtatagagaacaaacaccaaagcagtcctctgaagcggcggcggggttcagatgcggctaccggaaagtctgcaacagggccaacaaggaggaagcataaacagaaaaggaaaaatgatgagagtgatgaggtcagtcgcatggaaaaaagagcaagatatttacttatcaaaataaaacaggagcagaatttgctggatgcatactctggagatggttggaatgggcacagtcgagagaaaataaagccagagaaggagctacagcgtgctaagaaacagatcatgaaatacaaaatcgctatccgtgacgtcattcaccaacttgatttgtgtagttccagtgggagcaaggatgactctgtgattccaccagatgggtgtcacgagtctgtcaatcctgaacatacaatatgttcaaggtgcaaatcccacgagtcatttcctgacaataacattatattctgtgaggggggctgcaaactggcgtgtcatcagaaatgtttggagcctccttttgataaaattcttccaactacccgccatgggcggctttgcaaacactgttcttccaagatgaaaattttagacgccattaatgcccatctggggacaagttttacagtgaagtgtccctccagtgatattttcaaggaagcagctgaacatttcaactctgatgatggactgggccaagattggctatctgagtattcaggtgatgaggactatgaccctgaagaaaatgaggccagcagcagtggtgaagagaataaatctgccgattccaattgttcagggagtccactttattctccaaatgatgatattccagacttcatatcagcagatttcaatgatgctgaaggattctgtcgtgaaagttcaaatctaggaatcgattttggtgaagatggtttggctgagattcttacccaccaaaggccaagaagagatgttgactatacacaacttaatgagcaaatgtttggagagcctattggcaatgacgaacagagtgaagatgaagattggggtcttaac

SEQ ID NO: 8878 - DNA, 1394 bp, Oryza sativa
  ref <308>: DATABASE ACCESSION NUMBER: AK106226
  ref <309>: DATABASE ENTRY DATE: 2002-08-28
aaaaaaaaacaaaacaaaccaagagagaccatcatctgctagcttagaactcctatatatacattttctctgaatctctctgcacccaaaagcctccttcttcttcacttgtccttgtttctcccaaatcaagaagcacacacgtacgagagagagagagcaagaaaaggggaggaggaagagatcatcagatcgatcagcgtgtggccaggagaaagagaaagaggaagaggaagaggaagaggagaagaggagatggcaatggagccgctgccactcggattcggagacggcctggacgccacgctgctctcctccctctgggccttccaggatgatctgcagccgcaagagagcatggaggagctgaagcagagcttgatggcgacaacgctggagctggacgcggcgaaggaggagctcaagaagaaggagcagagcatcgccaagctcgccgacctcgtccgccatgtcgccaaggagcgcgacgacgcgcgcgaccagctgcagcgtctcctcgccgccgcggccgccaagccgccgccgctcgtcacctccagcgtcaccgactccgacggcggcagcctcgtctcctcccccgccgccgacaaccccttcttcgaccccgtcacctcctccgacaagcgctgctgcgccatcgccagcccgccccccgccgccaagcagcagcacgccgccgccgcgggcgccgacgcggtgctcgacatgctcgccatgaagaagccgctgccgcagaggggcaggctgctccagtccgtcatggaggccgggccgctcctgcagaacctgctcgtcgccggccttctcccgcggtggcgcaacccgccgccggtcgcgctcgacacgctccccgtcggcgtccgggccggtggcgctgtctaccccggcgcgtcactctcgcccgggatcacctcctccgcggcggtgatcggctacggcggcggcgccaatgcctgcgggaagaggcccatggcggcggcggcggcggcggtggcggccagctgctcgccggcggcgttcagcgccaagcggcatcggctgcactgaccgtccgatccgatgctgtcgtgtgcacgggatcggacggctgtcgtgcgtccagcttacgaccggttggttcgttaggtggtggtcgtgtggcccacctgtcagtgacaagggattgccattgagggcccacttgtcagtgacatgtgattaccattgagggcgagcgaatatttgcatgaaccaaaaacattagtagatgctaactgcttagtgttaagagtcgtcatgatagaattattatagagttgatcctgcttaattatgatgtaaataggaagttagtatcaaattttaattaaacctgttccttgctctcttttttt

SEQ ID NO: 8879 - DNA, 2144 bp, Oryza sativa
  ref <308>: DATABASE ACCESSION NUMBER: AK106227
  ref <309>: DATABASE ENTRY DATE: 2002-08-28
attttttttttctttgccaaccgatctgcccgtctcccgccgccgccgccgccgtcgccgcctccggcaggaggcccaatccccggatccgcccgcgccggatgctcctccgccgcgccgtcgccgccgtagcggagcgctcctcccgattatcgcactcgcgacccctcctccggcgcgcgggctctgcctgctctagcctcaccaccaccaccacctcccaacatcgtcacggccgccgtcgcgcgccgccggctgagagcaacgccctcacaaccaccgccgcgccacgcccgttcccggactactccccgccccgcccggactcgccggccgacgacgacctcgcgcgccgcctcgccgccgccgtcctctcctcccctaacccgggctctctccctcccctccccttcctccctctcctccgcccacttcacctcctcctcgcgctccccctgctcgcctcgcacccgcacctccccaccatcctcctgccgctcctcctcctcttcccctccgggcctcgcccgcaccctcacctgctccagtccttcgcggtcgctgcccacctcgccgccgttcgcgatcccggcgccgcgcgggccatcctcgttcgcgcccttcgcttcccgtcccctcatcggcatttcgtcgagcagttcatctccacctacaaggccttctcctccgaccctgtctcattcgacctcctcctcctgtgcctcccctccgcgcctctcctcctccgcctccgccagtacggcatctctccctccccggagtcctgtaacgcggtgctctgccgcctcccgcttgatgaagccgttcagttgtttcaggaactcccggagaagaacacctgctcgtacaatatactactcaaggcgctgtgcaccgctggccgcatcaaggatgcgcaccaactgtttgatgaaatggcatcgccgccagatgttgtaacatatggcattatggtgcatgggtattgtactcttagtgagctggagactgcgattaagctgttaagtgaaatggcagcaagggggttggaactcaacccagtagcctatactagtgttattgcattgttgtgcgacgaagggcaggtttcagatgctgtgagggtggtagaggatatggtgatgcatggagtggtgttggatgcagcggtgttcacaacggtaatgagtgggttctgtaggaaaggtgatttggcagctgcaaggaattggtttgatgagatgcagaagagagggttggcagctgatggagtggcgtatactgcgctgatcaatggcctttgtcgggctggagagttgaaagaggcagagagagtgcttcaggagatggaggacaagggattggatgttgatgcggtcacatatacagttctcattgatgggtactgcaaggttgggaagatgacggaggcctttctggtgcataacaaaatggtgcagaaacgagtgacaccaaatgtagtgacatacacggctctgtcagatggactctgcaagcagggggatgtgtgtgctgctaatgaactattgcatgagatgtgcagcaaggggttagagctgaatattttcacatacaactccctgatcaatggcttgtgcaaggctggcaatttggagcaagctatgaggaccatgatagacatggatgaagcaggtcttaaaccagacgtttacacatatacaactattattggtgctctttgccagtccaaagagcttgacagggctcacagccttttgcaagagatgttagataaaggaattaagcctactattgtgacttataatgttctaatgaatggcttttgcatgtcaggtagggtagaaggaggtaagaggctgcttgaatggatgctggagaagaacatccacccaaataccacaacatacaattctcttatgaagcagtattgcattgaaaagaacatgaaatcaaccaccgagatctacaagggaatgctttcacaggaggtggtaccaaatgaaaacacatataatattttgatcaagggacattgtaaggcaagaaatatgaaagaggctctgtatttccatagtgaaatgatagaaaagggattcaggcttactgcaagctcatacaatgctcttataagattgttgaat

SEQ ID NO: 8880 - DNA, 460 bp, Oryza sativa
  ref <308>: DATABASE ACCESSION NUMBER: AK106228
  ref <309>: DATABASE ENTRY DATE: 2002-08-28
aagacttagagagagaggtagccctaacaaacacaaacacccgcttcccccttcgccggcgatgcggtccaccgccgccgccgccgatgtgatcgatctctccagcgacgacgacgacgaggtgcgcgctggtgcgcgccatgtccgggcggtcagcggagcacgcggcgggggcgctggtggcggtggtgggcggatcggagccgctccaggtggaggcggtccgcgcgggcgccatgagccagctcctcctcatggtgcagggcgggtgctcggagcgggcgaagcggaaggcgcagcacctgctcaagctgctccggtcggcgtggcccgccgccgactccatcgccaactccgacgacttcctccaaccatactaacaaccgccattgcggccggcggcagcggcggcggtagtagcaaccaagcatcgacgacggagaaaaaaaaaagaaaagct

SEQ ID NO: 8881 - DNA, 1679 bp, Oryza sativa
  ref <308>: DATABASE ACCESSION NUMBER: AK106229
  ref <309>: DATABASE ENTRY DATE: 2002-08-28
aaaacgcaggctccgacactcacgccgaacgcaaacagagtgaattaaccgccgcagaaatggggcacgaactctgggtgctatgggcaacgcttgccgtctcgctcctctgctacctctacctgaccagccaccgcctgggctcccgacggcgccggtggccgcctggcccccggccgctcccactcctcggcaacctcctggacctgcgtggcggcaacctccaccacacgctcgcgcgcctcgcccgcgcccatggcgcccccgtcatgcgcctccagctgggcctctccccggccgtggtcatctcctcgccgggcgccgcaagggaggcgttcaccgcgcacgaccggcgcctcgccgcccgcgccgtgccggacgccaaccacgcgctgggcttctgcgaccggtccatgatctggctccccagcgcggacccgatgtggcggaccctgcgcggcgtcgtggcggcgcacgccttctcgccgcgcgcgctcgccgcggcgcgcgccgtccacgagcgcaaggtgagggacctcgtggcgtacctccgcgggcgcgccgggcgggaggtggacgtcaaggacgccgtgtacggcggcgtgctgaacctggtgtccagcgcgctcttctccgccgacgtggtggacgtgggcggcgagtcggcgcaggggttccgggagctcgtggaggagctgatcgagtccatagccaagcccaacgtgtccgacctcttcccgttcctccgtcggttcgacctgcaagggtggcgtcgctggacatccgggcacctggccaaaatctacaaggtcctggacgacataatcgaccgccggacggccgaggacgacgccgccatggacaagcgcggagacttcctcgacgtgctgctggagctcatgtccacgggcaagatcgcgcgggagtacctgacgaacatcctgttcgacgtcttcaccgccgggagcgacaccatgtcgctgacggtggtgtgggcgatggccgagctgctccgcaacccgggcgtcatggcgaaggcacgggcggagatcgacgccgcactcggcggcagggaagcggtcgaggaggccgacgtggcgcggatgccgtacgtccaggccgtgctgaaggaggcgatgcggctgcacccggtggcccccgtgatgctgccgcgcaaggccgcggaggacggcgtcgagatcggcggattcgaggtgcccaggggctgcgccgtgatcttcaacacgtgggcgatcatgcgcgacccggcggcatgggagcggcccgacgagttcgtgccggagcggttcgtgggccgcagccgcgctacggaggagatggacttcagggggaaggacttcgggttcctcccgttcgggtcggggcggaggctgtgccccggcgtgccgatggcggagcgggtgctgcccctcatcatggcgtcgctgctgcacgcgttcgagtggcggctgccggacggcatgtcggcggagcagctcgacgtgagcgagaagttcaccaccgccaacgtcctggccgtccctctcaaagccgttccggtcgtgatcgcctgctagctatttttttctatatgcactctctgtgattgtagccctaattaatgatctagccacttcactgtacttctcatctaaatttaaaaccagtaattcaaacat

SEQ ID NO: 8882 - DNA, 2034 bp, Oryza sativa
  ref <308>: DATABASE ACCESSION NUMBER: AK106230
  ref <309>: DATABASE ENTRY DATE: 2002-08-28
ctctccctcccgcgccgccgccgccgccgccaccgccgcatcgccgctgccgacggctgcgctccgaagaattctgtgaggatttaagctgagaagatggtgctgaagacagagctttgccgttttagtggccagaagatatatccagggaagggcattcgctttattcgtgctgattcacaggtcttcctttttgcaaactcaaaatgcaagcgctacttccacaaccgcctgaagcctgcaaagcttacctggacagccatgtacaggaagcagcacaagaaggatatccaaaccaccgaccttccaccgcccaagcccctcccgccggccccgctccgtcaactcttcagcttcgtgaagggcgggcgggcgatgcaggcggtgttcgaggcgatggaccggaggacagagatcgagccggacgacgtggacgcggcggcggtgccggagcggccccggggggaggttgagctgaagcacgtggacttcgcgtacccgtcgcggccggaggtgcaggtgttccgggacctgagcctgagggcgcgggcggggcggacgctggcgctggtgggggcgagcgggtgcggcaagagctcggtgctggcgctggtgcagcgcttctacgagcccaactccgggcgggtgctcctggacggccgggacctgcgcaagttcaacctgcggtccctgcgtcgcgccatggcgctggtgccgcaggagcccttccttttcgcggccaccatccacggctgctccctcccggtcttcctccgcttcttcgccgacctcgtcgactccttcggctcccacgccgcccacccggacaccatgctccgcctcgtcgtcaagtacgccttctacttcctcgtcgtcggcgccgccatctgggcctcctcctgggccgagatctcctgctggatgtggaccggcgagcggcagtccacccggatgcgcatccgctacctccacgccgccctccaccaggacgtctccttcttcgacaccgacgtccgcacctccgacgtcatccacgccatcaacgccgacgctgtcgtcgtccaggacgccatcagcgagaagctcggcaacctcatccactacctcgccaccttcgtctccggcttcgtcgtcggattcaccgccgcctggcagctcgccctcgtcaccctcgccgtcgtcccgctcatcgccgtcatcggcggcctcagcgccgccgcgctcgccaagctctcttccaggagccaggacgcgctgtccgacgccagcggcatcgcggagcaggcgctggcgcagatacgcatcgtgcagtcgttcgtgggcgaggagcgggtgatgcgggcctactcggcggcgctggccgtggcgcagcggatcggctaccgctccggcttcgccaagggcatcggactgggcggcacctacttcaccgtcttctgctgctacgcgctgctcctctggtacgggggtcacctcgtccgacgcgcccacaccaacggaggcctcgccatcgccaccatgttctcagtaatgataggcggcctggctcttgggcagtcggctccgagcatggcggcgttcgccaaggcgcgggtggcggcggcgaagatattccggatgatggagcacaagccgagcatggagcgggagggcggggtggagctggaggcggtgacggggcgggtggagctgcgggatgtggagttctcgtacccgtcgcggccagacgtggggatcctgcgggggttgtcgctgagcgtgccggcggggaagacgatcgcgctggtggggagctccgggtcagggaagagcacggtggtgtcgctgatcgagaggttctacgagcccaacgccgggaccatcctgctggacggccacgacctgagggacctcaacctgcggtggctgcgccgccagattggtctggtgagccaggagccggcgctgttcgccaccaccatccgggagaacctgctgctgctagatgttctaagaatgaattaatgaaatgaattactatactgctagctagct

SEQ ID NO: 8883 - DNA, 2027 bp, Oryza sativa
  ref <308>: DATABASE ACCESSION NUMBER: AK106231
  ref <309>: DATABASE ENTRY DATE: 2002-08-28
agatgtaaagggcgctgtcaatgaattgaggttgaagagatgcatgacgagctttggggattcctcaaaggcagcagacaagaaatcgaaagcagaaaagggagatacatcaacaccattagctgagtatgatgatactgatgcactggaagtagctcgtctggttgctattgaggtagagcgggaagtcattgactacaggggaccattttgtggttcccctgatattaattccagacggtctgatagtcccgacttagaagcacgccggcagcctgaaccgcccatggatgaaccggataatgataataaatcctccactacaggggaggattcaggaagttcctcatctatgaaggaggatggttcaggcatcacggatgacagtggtactttcagtagaaaacatacgcgaagcatgaagctgggaggcattgatcttaatgaaaaccagtgcactgaggaagttgattgtcatacgaagtccacgcttagtaattcaattaatttatcaacacctatagctgtggctgcctcaagaacctcatctgtattcccagctcgattgcactttgaaggtgaactgggatggaaaggttctgcagccaccagtgcttttcgaccggcttctcctcggtgtactcccgatggagagaaatcagtatctgcctcttcacagagaacaggcaatgctctgtttgacttgaatgtttctgaaagtgacaatgctactgctggtgaaccactttcagcagccatccttccgctttcttctgacatagtgcgaaaggatgcctctgcaactgttggcctgaatagccttgaacttgaccttaattgtccatgtgacgatgaggaagctgcaatcaccacaagtaatgtaccatcattttggaatcgacaacaatgtaatggcgattggagtcacccttcttcctcttcatcttcaaggcaacctgcagtaaggaactttgacttgaatgacaacacaccaatcgtggatggctttttacgaggtgcagatgagtcctctgtcaagacttctgggagggatgtgtcagaccattctgcagtgacaattctgggcaagagaatagttcttggacagaaggaacatagccatcaaaatgagcataactttcttgggccaagtgtggaatcaagagatcctgcaaggtctatgcaatcttacgggcatacaccccctgattatagtgttgtcagctattcgtctcattctgctttgtctttcccgtcacctttctatgcaccagggactgttccttatatggttgatgcaaagggcacgccagttatacctccattgccaggtttcggtgtaccaacggtgccaaacttaggagtgggcacatctcatccatctctcggcagcagagcaatcccaccctctagtgaattgagcttttttcatcccagcatggatctcaactatggaaggtcatatgaaggtgcacgtagggaaggtgcaagctattggcctgtgtctttccaaggtcagaccatgtttgtggacgagcgcatgggtaacatgtcacagggtggcagctctggggtgccagtattgaagcgaaaagagccagacttaggttgggatctgtacccacgtcgctaggtatgatgtttgtcgcaattgtaatcgatttttgttgttttatttatttggtttgttcaatgtaccgcttgctgtggtaccttggacattctggagtatttttggcacctaaaaataggtcccagttctattaggttggaagacataccacagagaactgaataaggccagctactagttagatttcagagatgttgacttgccatggacattgttggcagctgaataccttgtgcagatttggttctttgtgaacgtagcttcttttagtagtcttcatatagccaaaccactgtacggaaagctgaatttatgtatatcattgtagaacttataattaatagatgaaatgcttccagtttgtccaaaaaaaaaaaaaaaaaaaaaaaaaaag

SEQ ID NO: 8884 - DNA, 1404 bp, Oryza sativa
  ref <308>: DATABASE ACCESSION NUMBER: AK106232
  ref <309>: DATABASE ENTRY DATE: 2002-08-28
aaaccacaggccacacacgcctgaactgacggggtgtcatcaaacggactacggagttgacactgtagactcctctcccccgcgtcgccccgatcatggcgtcgtcggcggagccgccgccgaagaagcggaggctcgtcgaggtccatgtcccgtccccggccccgagcccctcctcctcctccgctcccgcgccggcctcgccacggtccccggtcccgccccctccgggcgtgccgccgccgccgccgcctcccccacaaaccctagccgccgccgcctccccgcggccggaggaggccgtacgcaagcgccgcaacagggaggagctgcggggcctcttcgagtgctaccgccgcatccgcctctgcgtggagcgcaaggacgcgcgcctcctgcccgagctcgagcaggtgtacctctcgctcatcgccagctctcgaggttgtacaagcgttcaacgtattttagctgacttgattcctcaatatgcctcatactgccctactgcacttgaggcagctaccaaagtttccatcaacatgtataaatggaacctggccattgtaacaagaggggaagatgtggatggtgtggcataccagactgctagggcttgtattcttggcttaactgacatatgctccacagcatcctgtgaagcacccaaatcatctgttttaacaggaatctgctctgcagtttatattactgtcctcacattcttcatttcaacatttgatgggaaggatatctatcacataggctcaagaaaacttctaaatcttcaggaccctgtggagctgttagacattctaaagcaggattcagggggtgacaaccaacaggcagacgactgtttagttgaactgagagcactttcattgctatgcatatttcttttatttccagagaacatactagatgcctgttttgcgctgattgcttctgcagaagatgtaaacggagaaggattgtactttctaaagcagctaacctgccatctgaacagtggtatcataactgatgctctcgatgttcagggggatggaatctcccagtgtacaggaatggacgtagatcatcctagcaccaaagaatctgttgattccaatctatcttctcatagtgttggtgtttcaggaagttctatgttgcagccaaatgagtgttacatgacaatggccatctctaggcatccatctttgaaaggctggatattattgaggtacaaaaagctgtgtgattcctgtagaactgatgtggtttcagaggtatcatcgtgtttaaatgttttgggctctttaacacaacttgaagacaataaaagtcacatgggcagtgaatcatcagtgctggacaagattgatgaaaattcaggggggtattttcttctagtggatt

SEQ ID NO: 8885 - DNA, 1667 bp, Oryza sativa
  ref <308>: DATABASE ACCESSION NUMBER: AK106233
  ref <309>: DATABASE ENTRY DATE: 2002-08-28
tgtacgtgctctcgcgtcgatccaaacaagctccaaaaacatcaaaaaccccacgtacatttctttactcgcccggagaagctaccgcgcgcttgctacctctcgcgtctccgtctctgcgttgcattgcattgcattgctcgttctgtcatcggatccgagtctgggatggcggcaatggcgggagggagtaagccgctgaggctcaaggacctcctggagctggactgcgagtcctgcagcgccgctggcttccgctgctaccctcgccgcctctgcgtcgccggcggcgcggctgaggcggcggcgccgccaatgcggcaccgcctcgtcgccgaccggtcgtcgtccgcaatgcggcggcccaagctgtccagcctctcgaagagcctgtcccggcggctcaggggaggcttctggaggcggcgcgaggaagaagacgaggaagccgccgccgccgccgcggcgccgccggcgacggcgagctccaccgcccccgccgtggccagctgctgcagctccagctccgactccgagacgtccgagtccagcaattccacaggcgggaggaagtcgcgctcccactccgactactcagaaatctcgtcagccagctccgacgacagcctccacgccgccggcgagccctccaccaccggagccgaccacgaggtgatgaagagggggtccaaggaggaggatgaggaggaggaggctgacgacaaggagcagctcagtccggtgggcgtcatggacttccccttcgacgaagacgacgacgacgccgccgccgtcgacgaggacgagagggtcgccgccggcgcgtgctcgttctctttcagcgacagcctcgcccagctccagaggagaaagatgcaactgcagcccaagatccgacggctcgggagcatggcggagctcagcggcgtggatctcgaggcacgcttcgccgcctcggagtccgaccgccttgccggcatcgtcccagtacagcaccagtgcattaccgacgacgtagcggcggcgccgccacgacacgacgatcatcggaacgacggcgtctcccaaaaagatcccgacgacgacgaggacagcctcctagacctactggcggacaccgtgtcggtcggcgtggtggatgacgtcaccgagaggctcctcctcgacttcttcgtcgaggcgaagtgcagctccagaaatattgagttgcatgcaccgaccagtctgttacgagagaggagacggcgagagaacggcgaaacgatgagacttgccaaggcctggcttgagggcacgggaacaccgtggacgttgaacgacgtgctgtaccacggcgaggatggcatggcggagatggagcggagccggcggtggcggccatggcgatggacgagctgttgcacgagctggtgagtgacctgattgcgttgccgaagtagttctttgtttggatgtcaaagttgtcaaatcgagtgtaatgtaaacgtgagatagaacagattcagtgaaggttgatataggggggtagtgagttaggggcagtggaataaagcagatgcatctgtatatagttttgtcagagtggcaatggaaacaagaagattactgttctgtttggatgtaaatgtacactctacaggtcatcaacctaaggccaattagactgc

SEQ ID NO: 8886 - DNA, 1834 bp, Oryza sativa
  ref <308>: DATABASE ACCESSION NUMBER: AK106234
  ref <309>: DATABASE ENTRY DATE: 2002-08-28
gagtttgtgttctgttgctgccgatgcctttcctcacaggcgatggcggatgcgcgcgccgccgccgccgccatcgccgcccgtcgcggcgttggacaaaacccgatccgccgttgggcgtcggcacgtcgcagagcgccgctgttggggcctccactgcttctctgctgccgcggcgacaggatgagctctgttcttactcgcacacgaggtgttcgttgaaatgcttcggagtcggttcgcttgctaatcaggttgcttcttgatgtcacagggaaagcacacatatcgagcatggcattcacgggcgcggtggtcgtggacgacgacgccggccgcgccgtggtgagcgcgtgcgtggcgtgtggtgcaggtgcagcagctagctctcgttgcttccggcgaaacgggcatgacgtcatccagcatgtgggaccagcgggcccacctgtcagaggagccggaactgcggccccacctgtcagcgaagggggacaactcctttaaattgcggccgccttggcgctgacgctgagagccccgagccgtaacaaactcctctcctctcgccggagagcgcaagaaaccaagcggcgcgccgcctccgcctccgcctccgctgctcgccgaccggagaggcaagacatcaagagccccgccgccgccgcctctgccgctcgccggagggaggcaatggagcagttccacgacgggcaccacgtgtggctgcggagccgcgcccagggcacgtacctccgcgccgacgacgacgggagaggcgtctccatgggccagggccgcgcgtccgtgcacgcggcgtggacggtgcacacgcaccacctcaacgccggcgacgtcgacatcctcatgctccacagcgccgcgaacgggcggtacctggcgacggggctcgggtggacgcggcggcgcctcctcagcggcaaccgcgccagcatcatcctccgcgatctcgaccaggaggtgttcccccccgcctgctggttcgctatcaggtcggggtggggggacgacgtcctgctgcgtcactgcagctggcgcttcctccgagctgacgacaggaaatggaattggaatcggaatggcaccggcgtcatcgccgacatgatcgacggccgccgcctggcgaggtggcagtgggtggtggaggccatccccccgaggaactccatacctaggcctccgaatccttcgccctcattcggtttctttgcgcgtcgcatcattttccggcgattaacacataatgatttacaatgggtttggatctggttcactgggaggtctgcgctccatctatggaaccagctgtcgagacgaatgggcttcgaaccagaccccaactccactatgtgtgttagagcaggaacctacggacggctgactcctctggtgaccgatctgcctcgcaacaatgcgacaatggtgatattcgttctcccacctgagtcattagctggtttggggttgacgtgccccaatgttcatgccgcctagaggaagacagaagaactacaggagcagaacccctgacagtcacttgttcattcgtcccttcagaaaattacgctgcttcagatcgaatgacagagaactgaatgtcttctctctctctctctctttggtatcaactcttctgtttcccggtcattagatattactggccattgtgctctgaagttcacgaactgcattaagcaactaaggagaatgtgtacctggcaattgtgtgttctgacatttgctgtagtttctccatcgttatctgtgattctgtatgacacgagtgatgatcatccatacatttgcagaagtg

SEQ ID NO: 8887 - DNA, 1370 bp, Oryza sativa
  ref <308>: DATABASE ACCESSION NUMBER: AK106235
  ref <309>: DATABASE ENTRY DATE: 2002-08-28
aagtcaactcgtgacggcacgcctcgccacgacacgacacgacacgacacgagagagatctcggcgccggcgggcggcgccggcgaggcgtacggcaatgcctccttccgccgtgcccttctcccgtcgcccatccgacggtccacgcggcgcccgccccatcctggttgtgatcctcatcgccgccgccgccaccctactcgccctcgcctactcgtccttcccctccgcttcgcgggctaccaccgcatcatcttccatggctgtggcgccgacggatgacggctgctgcaggggccccgaggggctcgagctgtggggtccggcggtcaagtggggctccgaccaccgcctgctctccgccgccgcgtgctgcgaatcctgcaaggccatgtgcaaggccaacgactgccgctgcgattcctgggtcttctgcggggacaagaaaagatgcggccaaaggttcggggagtgctggctgaagaaacaaaaggatgtgatggcaccctctgttgttgcaaagggagatgatgttatgtggacttctggtctagtcttcgcaaaaggagagggcattgtgggcctggaaacaaaccttgggaccattcgtattcaattgctgcctggctgtgcaccccattctgtggactatttcattgaggttctgggcttgcggaactgcgctggatgcagattttatcgagctgaaggccgtgggaatttgtgggatgcaaaaggcgaccacataaaaaatgctgcatatggtccaccgtatgccttgcttcaagggacactggaagtcgatggtttaccctttaaggagagagcgaaagaagcctgcccagcactgagaagaggatcggttgcatgggttggatcagggccggagttcttgatcagcttagcaaaccatggggagtggaaaggagcctacactgtgtttgggtctgttgtgcccgaggacatggcgattgctgaggaaatggcactgctgtcgaccagcacagacgtgtggagcaatgtaaccgtgaaggtgctgcgagaccctgtgtatttcaaggtgaagagaagcaccagcagtggtgttccttaggtatcactcattcgctcactcactttcagtcggttggtcggttcttgtgctcattgccgattcctttctggactatctttgtttcttatagaggacataaaagaaagggaaactagattagaatcaggcatgttatagcccctgacatgtagtagtattaccctaaagaaaaggggattactgtgtaaagaaagaaactaaagttgccatgttcaactgtttacctgctcatctttatgtggtctgataagtgatgatgatgtttcagaggtttaac

SEQ ID NO: 8888 - DNA, 1810 bp, Oryza sativa
  ref <308>: DATABASE ACCESSION NUMBER: AK106236
  ref <309>: DATABASE ENTRY DATE: 2002-08-28
ggagaggagcaatgtggtcgagctcgacggggagcccgttggccggcgacggcagcgggtccctgacgaaggtgttctcctcccccccgcagcagagcctccacctgaagtgcctcaccaggtagtgcatcgtcaccagcgtctccaccctcgcgagctccatcccggggcagatcctcggcccgccgccgaacgccacgaacgagtacggcggcggcgccgacgccgccgcctgggcgtcgaaccgcgacgggtcgaacttgtccgggtcgtggtagatggccgggtccatgtgcgtcacgcacggcgcccagaacacctgccaccctttcgggatgacgtagccgccgtcgagctcgacgtcctcgagggccctcctgaagctgccgaacaccgggggcaccacgcggagcgtctcctgcgcgacgcgccatgtcagcttcatcctcgccacgtcctcccatgtcagcgcctcgccgtctcgcttgctcctcgcgatctcctcgtgctctggccatggcgttgtcagagggattcgatcttggcaaatggaaatggtgatgtgatgtgtgagttacttgccttggaccatggcggcgaggatggcagggtcgtcggcgaggtggcggaccatgaaggtcaagaggatggcggaggtgtcgtggccggcggtgaggcagacgatggagttgtcgatgatctcctcctcggtgagcagcggccggccgccgccgccgtcgccgtctcggaggctgacgaggtagctgatgaggtcgtccgatggagacgactcgccctgctccaggttggccttcttctccctcaccgtcgccgcgagcagccggcgagccctcgcgctcgccctgaggctccggcggaacgcggtgaacggcaggtcgagcggcaccgcccacaggccctccagcatgtcggcgaacgcggcggcgagccgctcccggacggcgccgcgcgcgagcccgaacagcagggtggcgatgacgtcgagcgtcagcagcttcatcagcggcagcaccgcgacggtgcggcgcccggcccaccgcccggcgaggtggcgcctgacctcgccgtcgatcctgcccacgtaccgccgcagcatctccggcctcaggaactgcgccagcgcgccgcgcacgcggcggtggtcgtcgccgacgagctccagcatgttcctcctcccgatgatcgccgcgaggctccgcggctgcttgggcgccagcgcctcgctgaggaacaccgccttgttcgccgccgggccggcgaggagcaccgtcggcgcgccgaacagcgacagcttcgacacgggcccgtacctgtcgatcctgccctgcagccaccgctcggcggtgttgcgacgcatggcacgcagcagggacaggctctggccgaccagcggcaggccgagggatcccggcggcaggttgcgccgcggcggcggcttcgtcctcgtcgatcttccggccaggtagacggccagcggcgtgaggaaggcgacgaggagcgcgacgacgacgacggcgagtgccattgcagcgatggctaactgggacgatgagtgtgaaagggtttatgtgttgagacttgagagagaccgacagaatggcatccgcatacttctttcgtaacggggtgacaggaatctgatttaagccgctttcatatgtaattaacaactatgtcaaagtagaattgtttgcagtttttttatttgacattcatattttagcagctggacccaagctaataggaaccgtgttacgacgtcccattggcatggtgggagatgctagcc

SEQ ID NO: 8889 - DNA, 1457 bp, Oryza sativa
  ref <308>: DATABASE ACCESSION NUMBER: AK106237
  ref <309>: DATABASE ENTRY DATE: 2002-08-28
atcaagccgtccacttcccccacgaccaccagcgtccgagcgggtcgaggaggccatgtccggcgaagcagagtcccgcgaggcgtcgcggcagcggcggcggcgggagcgggctgcggcggtcgagcgattcgtcggggtgccgctcgccgacgtggtcagggagaactcgctcgtgcacctcccgccggcggcggcggcgcgcctccgcgtcgtgcacccgtcgtgggcgagccacatgtcgtccccgctcttcgccgtcgcgcacgcggccgccccgaggcgggtctccggggtgttcgtcccatcagcggggttcctccccttcgacggcgacgacgacgccgtgccgtccccgtcgctctcgttcgtgccggcctcgtcggagctcgtcgtgctgtcgtcgtcgcgcggggtcgcctgctgcatctcccccgccgacgacgcgtacgccgtgtgcaacccggctacggcgtcgtggacggccgtcccgtccccgccgtggcggtcctggccgcgcccggcgatcgtcgtcctcttcgacacgagcgcctacaacttccgcggcgacttcacgctcgtctgccccttcgagtcggagccgggttcttccggcgcctactgcttccaggtgttcacgtccgggaccggcgcgtggtgggtcaccgacgcgatgtcgccagccgaagggctcgtcgccgcgtcgggcgtggcggccggcgccacggcgtggtggcggacgagcatcggcaccgcggtggggtacacccctgtcacggggcgcgtcgacctcgtgacctgccccggcgacagtgaccagtgggagatcggattggccgcgggcatgctccactgcgccgtgatcgacggcggcgacgtggtggtgttccggctgcacgagcacggaatctgggaggtgaccaccagggtcgccgtcgcagagatactgcaaccatctcagccgccgccgccggcaagggcgacgacgtccacggagatcgtggcgtcccagcagcacgacgagtccggcgcggaggaggaggagggctcgcgcgctgttgtcgccgcggcgaatgcaccactccggctggacgacggggtgcggctgctgggtttccagggcgcggaggtggaggtggtggtgctggcagggaggcgcctggtggcgttcgacgcgcggacgcggcggcggcgcgaggtcgccgtgccggacgaggtcgacgcggcatgggacggcgcggagcacgctgcgcacatcaacaccctcgcgctgatcgcgcccgccgctctcgcggccgagccgccgctcgcgaagccgccggctgatccatgaagtggcaatggcatcgtcatcttagcgaatcttactgcaatgcatggcgatcaatcactcgatctaagagtaagtttgtggatgtgaagttccattttgagaaatttaactcgcaagctgtaat

SEQ ID NO: 8890 - DNA, 1922 bp, Oryza sativa
  ref <308>: DATABASE ACCESSION NUMBER: AK106238
  ref <309>: DATABASE ENTRY DATE: 2002-08-28
gctccattgcaaatgacctcactcttttgaggacgaactaacaatggcttatgggcttgatcactctgagtggctggaagttaaatatatcaacaaccatgctctgtttgtagggtacctgtcgatggccgtcaaaggggtgggcttcttggtgggtttatggaccaccgttgttcttcttggtggcttcgtctctatgcttgagaagaaggatttctggagtctcaccatcatcacactcgtccaaacagcaggggtgttcgatgttctcctgaacgaaaagctgcgccatgctgtgaattcagtcgatggcttcttggttactatggacatggtgttcaggtgcgaagacgaggagttcgactcgggcatccagttgtggcgttcacgagcaggacgtcttgtgacgttcatccaggcggtggtgttcgccatcatactgtgccctctggctgtgctctacctgtctgggctggtcatcagcactagtctatcgctgtggcgcctcatacagcacgactacggcgacggcgacggcagcgccaacctgactccggcgctcaatgtgctctactcactggcactcttccagggcgtcctcttcttctaccagtgggtgtcctacttcgccgggaaaaggttgatcgaaaaggtggccagtaaatattggcaaaacagtaaggaggctggcggggcgggggcgcgggcgggggcgtggcgcaaattggtgaaggtgtacatgaagaagaccaagatccggtgcgagaaggatccatccttcctagaagagtggaacctggtgacgtttgccgtggagctgatgaagccggagtccaagtccagcgactacgtgtccggggcgatgatcctggacacgatcctcgggcagaaggacctgacggcgcagcacgcgctgatcaggaagctggtcggctcggcgtcctccaggaaggtgatgaagaagctgctgcggtcgcttcggtccgcgagccagtacaaccggaacatccgggtgcacgccgcccggatcgtgtcgcgtctcgccggcgagatcagcctcgccagcttcccggaggcgctctcgtgcatatcgtcgctgctcgacaccaccaccacggagacagtgcgccgtccgctcactacagggatctcatggtgctgggccgcgtcatccttcagaagctcgccgccgccgacgagcacaacctttttctcatcggcaaaaagcagagcactatctccaaggccatgctgcccgtcagaaaagacctgctccacatccacaacaacggccatgtcgacgcatggaaggacatcgtgaccgagtcactgcagctcatgtcccagcttgtcagcgcccctgggaagaccggcgacgatctgcgctcccacatcttgacgattcacaaagacgacatcagagtgaataacattatcatctgtaagcaatgccaaagcaacaagaagctccacatgcaggccattaacatcttcacacagcaacagcatcctatggaagcactttcgacgacgtcttcgaatatagacacaacacatagcgaaacgaacatcaggctgctcgtagacatcttcttgactaacaaggacgcctccacaagaaaaatggcagttggcatactggcaatactgctgtccgaccaaaataaaagcaatgccaatgccaatgccaccattatcttcaaggcaagtgacaccgttgtccgtgatctcaagacagtgcttttagatgatgaggaaacagaatacagaatatgcgcagcagaaatactcgagcatctacacaggacaaaggaagcctcctatctcaagaaactgatggaagccatgcaaaatgtgctaccgaagattctcaacgaaatatttatctctctctctccacctaagcaaggagaaaagcaagc

SEQ ID NO: 8891 - DNA, 1998 bp, Oryza sativa
  ref <308>: DATABASE ACCESSION NUMBER: AK106239
  ref <309>: DATABASE ENTRY DATE: 2002-08-28
aagagagagagaaatcaaactccaccacccaccacgacatcgagctcgcaagcaagaacaagattgcaggaagaagaagttgttgttggtcgaggcgaggaggaggaggaggaagaaggagtttgtgtgttggtgttatgaggtgttggattagatgagaggaatgccctttggtgggaccgcgcccgccgcgttcgggccgttcgcgccgccgccggccatggaggacacgaagcccgtggtgccgttcgcggcggggcaccccccgccgaacttcctcctccaacaccaccaccaccacccgcagccgcacgcggcgttcttcggcgcccaccacccgtcgttcgacgcggcgccgccgccttccaagcggcaccacccgatggccgccgcgcctgcgccgaagctgcctccgttcccggcgggcgggttcgtccccgccctgaagccgaaggcggaggcggcgaacgacgaggccgccgctgcggtcgaatagctagccgaggcggcgaagctggccgaggccggcgacgccttcggcgcccgcgagatattggcgcggctcaattaccggctccccgccgcccccacggccgggacgccactgctccgctcagccttctacttcaaggaggctctgcgcctaacgctctcccccaccggcgacgccccagcgccatcggcgtcgacgccgtacgacgtggtcgtcaagctcggcgcctacaaggccttctcggaggtgtccccggtgctccagttcgcgcacctcacctgcgtccaggcggtgctcgacgagctcgccggcgccggatgcatccacgtgctggacttcgacatcggcatgggcgagcagtgggcgtcgctgatgcaggagctcgcgcagctccgcccggccgccgcgctcaaggtgaccgcattggtgtccccggcgtcgcaccacccgctcgagctgcagctcatccacgagaacctctccggcttcgccgccgagctcggcgtcttcttccacttcaccgtcttcaacatcgacaccctggaccccgccgagctcctcgccaacgccaccgcgggcgacgccgtggccgtgcacctccccgtcggccccgcccacgccgccgcgacgccggccgtgctccgcctcgtgaagcgcctcggcgccaaggtggtggtctccgtcgaccgcggctgcgaccgctccgacctccccttcgcggcgcacctcttccactccttccactccgccgtctacctcctcgagtccatcgacgccgtgggcacggacccggacaccgcgtccaagatcgagcggtacctcatccaccccgccatcgagcagtgcgtcgtggccagccaccgcgccgcctccgccatggacaaggcgccgccgccgccgtggcgcgcggcgttcgcggcggcggggttcgcgccggtgcaggcgacgacgttcgcggagtcgcaggcggagtcgctgctgagcaaggtgcacgtcagggggttccgcgtcgagaagcgcgccggctcgctctgcctctactggcagcgcggcgagctcgtgtccgtctcggcgtggaggtgctagaaagccctcgccgccgtcgccgtctccggcgagcggcgcagccgtggagccgacgtatcaaggagccgcggattttagttagggactaatgatcctgctacttcttcctctccaagtgaaagtcaagtgtttttttaccctttttgtgtaacttttttttactccttttttcttcttcttctttgtgttgctgtaatgatctcagctgagctgatcagtgagctgagtgtcctaagattgtcgtgtcaccttgcagcttggctctgcttctgcttctgcttgtgcagatgcagagtgccatgtcgcaatggtgttgtactggtacagtagctggcgcattctacttcaccatcatccatccatccatccccctgtgttactactcgattccccgtgaaaatcaatggctatggcatttg

SEQ ID NO: 8892 - DNA, 1447 bp, Oryza sativa
  ref <308>: DATABASE ACCESSION NUMBER: AK106240
  ref <309>: DATABASE ENTRY DATE: 2002-08-28
ctaggcacttcttcccctcggctctcgccgcttaactcctccctcctcaagcggcgactcgcggcggccggcggcggcgcaggcgcaggcgcggccatgaacccgatccgatcggccctcgcgagggcgctcctctccccgaagccccgcccgccgcgcgcccgccactacgcaacctcctccaccggcggcgcgacgcagccggagagcgtggcggcggagatggtccgctacgccctcggcggagccaggcccggtagctcgccagatgaggcgatgcggatactggagcagggggcctcgaacctgcagggaggcggcgaggggtgcggtgaggccgtcgggatgctcatgctcgcgatgtctacgctgctctatcggagtggaagacgccaagaagcaatggaaaaactcaaggcaaccaaccaagttgcttctgcagctttcagagttgcagcatgggaagcaacaatggggctgtgcatggaagcgggccaggttatcaacacctcagtgtccccagatgatttggtcgatctatcaatcaaggatgataatatcaaatggtcagatcagggccatctgaaatgtcgggttaatgctatcaaagggcttattgcacttctaaatggagagacggaatcagcccagctgttcttcgacgggtgcaaggacctatgtgctggagtaggcaataaacaaactgaaaatgctgtactttcatattgtgaatatctgcactgtgttggggattttcctttggctactcaaatgtatgaaagggttctggaggcattaaccatggaagacatgtctggaaattttttagccacatgtaacatggttcctgaggaggtttctcttggggccacctgttcatatggccagcttttatcacattcagggaagttcagtgaggcagaggattatctcacaagggcgctaaagaaggctgaagatcaatttggggcaaatcacccaaaggttggcattgtattgacttgtgtagctagaatgtacaaactgaaagcaaaagcagaaggttctagctcaataatggttcaggaggggttatacaggaaggccctagaagtattaagagcccctgccattaactctgagggtgtgagcaagcagatggattggagggacatcatctcccttgctagaggagagtatgcagaattgttgcttattcagtcaaatagaagagccgaaggtgaacggatgaaagaatgggcagaacatgcttggaggaatagtagattaacattagctgaagccttggaattttcaggaccttcaaaaccaacagttgttgatacccggatcggcagggtcatgtagcctccacaatctaacgaatggtactatgcaataatctgcggttgtaagcctgtaaatgcaccaatatatatatgaatttctccttcagaattttgcgcct

SEQ ID NO: 8893 - DNA, 2771 bp, Oryza sativa
  ref <308>: DATABASE ACCESSION NUMBER: AK106241
  ref <309>: DATABASE ENTRY DATE: 2002-08-28
tgatgaattgcttgatgaattatcaggagcaaggtggttcactaaattggatttaagggttggctgtcatcaaattcggatgcaggctatggatgaacataaaacagcatttaagactcaccatgggcattttgagtttagagtaatgccttttggccttacaagtgcaccagcaacttttcaaggctgcatgaatagtatactgtcgcccttattaaggaagtttgtgcttgtttttgtcaatgatatattgatctacaacagaaccttatctgaccacgttcagcatctgcaatctgtgtttcagatcttaacagaacatcacctgaaggttaagagaagtaaatgttcatttgcacaacaaaggttggcctatctaggtcatgttattagtccaaatggggcgtcaacagatgaagataagatattggtggtcaagaattggccaactcccaccaatgtgaaggaattgcgtggatttttgggattaactggttattaccgcaaatttgttcgatactatggtgtgttgagtaaacctttgacaaatctgttgaggaagggacaatcttacatttggactgcaactactgaacaagcttttcagtctcttaaacaagctttaatgacaaccccagtgctggcgatgccagattttaccgaaccatttgtggtggaaaccgatgcttcagataagggaattggtgccattttaatgcagaaacaacatcccattgcatttttgagtcgagccctaggtcctcgtcatcaaggattatcgacatatgaaaaggaaagtttggctattatcctggcaattgatcattggcatccttaccttcaacactctgagtttttcattcatactgatcatcggagcttatgttttctggatgaccaacgtttgactactccttggcaacacaaggctttaacaaaactgcttggacttcgttacaagattatttataagaagggcagtgagaatggtgcaaccgatgctctatcacgatttccttctgtttcagagttaacagcgatatcttctatggttccagattggattcaggaaatcattgcaggatatgccaatgattctgatgctttgagtaaacttcaaaccttgtgcattagtgcaaatgttgtgcctgattttactctgaaggaatgtgttctttattttaagggcagaatgtggattggtactaattcttttgttcaacagaaaattttagcaaatcttcactcttcaccagttggggggcattctggcattactataacctatcagcgcgtaaaatccttatttgcttcgccccatttgcgcacaatagtggttcagtttgccaatgcctgttcaatctgtcagcgagctaagtctgaacatgtcaaatatccaggattattacagactttgccagttcctgagcatgcctggcaatttgtatcattgaatttcattgaagggttgcccaaatctgctactttcaattgtattttggtggttatcgataagttctctaaatatagtcattttgtgcctcttgctcatccctttactgccttcgatgtggctgaagcttatatgcagaacatccataagctacatggattgcctcaatcccttatttccaaccgtgacagaatctttacaagcactctttggactaccttgtttcgactggctggcactcaattgcgtatgagttcatcgtatcatccgatgggcaaacggaaagggtaaatcaatgtttggaaacattccttcgttgctttgtgcatgcttgcccttctcatggagtagatggttggctttggctgagtattggtacaacacatcctttcactcagccttgggaactactccttttgaagtgctatatggtcgcaaacccaaatattttggtttatctgttaatgctctctgtcagtcaccagagttgtcggattggctacaggaacgagataagatgcagaatttgattcgtgatcatttgttaagggctcaagctcgcatgaaggtcccagctgataaacaccgttctgaacgatcttttgtagttggtgattgggtttatctcaagttgcagccattcacacagcagtcggtggttactcgggctaattgcaaattggcatttcgcttttatggaccctatcagattctggatcgtattggagctgtggcttacaaattggccttacctgctaccagtttgatccacccagttatttatgtatctcaacttaagaaggccttagcacctactgaatttgttcaatcacagttgccaattttgcagtctaaagatgagggtctgacagctgttccttctcaagtgttggatcgccgttttgtgcggaaaggatccaaggtggtggagcagttgcaagttcgatggtctggtaatgatccacaggtcatcacttgggaaaatggccaggaattgcgtcgacgttttccgcattctgaagcttggggacaagcttcgtctcaaggtggggggaatgtcacggtggcgacctcacctgacgacaatgcaggacaagcaacagaggctcagttgggaagtcggtccaggtgcacaagatgaccgaacacgcgattcccggagagtgagtggacccagtagtcataggctgggccactgtcagagagagagaggctgaatagtaaattgctatataagccgacagggtaacaagttggggaattcgaagattgtattacaaacaaactcaaatctaattccaactctcccctgttcttc

SEQ ID NO: 8894 - DNA, 1701 bp, Oryza sativa
  ref <308>: DATABASE ACCESSION NUMBER: AK106242
  ref <309>: DATABASE ENTRY DATE: 2002-08-28
ctggaatagacaccttacctactttcatcaaaagaaataaaaaacaacactaataaataatgaacatgattttagatgtagtaggtattattctggaatactcctcgtcggaaacatatggaacgcatttcccccaaaacgcaaaaaccggggccccgagccctcgacaccaaccccgtcggatgtgaagccgacggcccagatggaggccagcggtgccaatgcgtaggccacgcgtgcctctgcgcaaatcttatctcccgggaggctccgctccacttcccttcccgagtcactcaaaccatccaatccctccaccttcccttcccttgcccccatttcccaccgctgccgcgccttgcccccattccccaccgccgcggtgcggccgccgacgacctccacacctcgagcacgcgtgccgccgacgaggtgcccttctctctctcactctcgtctcccccattcctcccctcttcccgtgtcccgtcgtccacagctccccgaccaaatccctagccctattattccccacccaccaggcctccctcgcgcggtcacgccgcacgatcgggcccgacagtgccgccgcttcttgccctactgccgcggttctttaagaggttgtcctgatttgctgcagcccagtaggtattgtatatttttctcgttggtaaatttggcagcaaaaaaaaaagtgtttaataccgaatgttataaacccgagcatctcatggtgtctatatatcagcatatatgatatgttaggtttggtaaggatgcatatcacacgattacatttaccaactccacctcgaagataataagcccagtagtctaaccctaaaatccctccctacctgtccgttccttttctcaacgattcccagaagcgccgcttatcctcgagccgagtggccgacagcgccgcccaggagtcgaggagtcgtagctcgtagcgccacccttccttgtgcgcgcggttgtgccctttctcgccgccggtctccccgcttcacctcgcatcctcaacgtcaacagctgccatccgctcctcacgctggctatcgggaaggtcagtaggtcacgccgtctccttccctacttgcctccggccaccctaagaccccaactcgcctcttcctcgcgcgaatcgcctagttacccggcgggcgacacccctactcccgtgtggccgcgcgtcctcgtcgtcttgcttgccctgctttctttggctcacgagccaaacgagcccgctcgagctagacaactagccgagcctagcttggttttctagctcgttaggataataagccgagcctagctagaccgagccgagctggctcgacatccaccccctacacgcgtgcctttgcccaaatcttatctcccgggaggctcacttccctccccgagtggctgcgacgacctccgcagctcgagacgaggtgccacttcttcttctctctctccatcccccattcctcccctctcttcccgtgtcccgtcgtccacagctccccgaccaaatccctagccctactattcccgcgcccgcccctccctcgcgtggtcacgcccgacagcgccgtgccgccaccgcttcttgcccttttgccgcagttcttcaagaggcttttgtcctaatttgctgcagcccggtaggtattatgtatttttgtggttggtaaattcggcagc

SEQ ID NO: 8895 - DNA, 1423 bp, Oryza sativa
  ref <308>: DATABASE ACCESSION NUMBER: AK106243
  ref <309>: DATABASE ENTRY DATE: 2002-08-28
aagtcccaaccacgacgatggcggcggtgcagctccttccccttcctcccgccgcccctcctcagccgcgccgcggcaaacctggttgctggaacacgccgccagcgccgccgaaggtttgccactactggaagtccggcaggtgcagccggaacccctgccgattcctccacaccgacgcgcctgatccggcgccgccgatcgccgccgtcaacacgcgcagcaacacgtgggtcaacccgtcctgcgtcgccgcgaattcggatggcaagggtagggctcctccggttcagccggcgaagcggcaggttgaggcgccgccggaaacgcctgccaagcgccgatgcggcggcggcgcgtggtgcgtcggcgacggcttctgcggcgtcgcgcggctcaagggtcacgccaaggcggtcaccggcttcgcgctgccggaagggtcggacaagctgttctccggcagcctggacagcacggtgcgcgcctgggactgcagcaccgggcagtgcgtccgcgtcgaggagatgcaagaaggggaggtgcacaagctgatcgccatgggcccgtgggtcctcgccggcgtgcgcggcgccgtcaaggcgatccacacggggaccggcaaggagctccggctgcgagggcccgcgtcgcagatcaccgccatgctagccgaggacgaggaccacctcttcgccggcgcggaggacggtgccgtgttcatgtggaggatgaaccaagaacagcaatcgttcgacgaggtcgccgcgctcaccggccactacaaggccgtcgtgtcgctcgcgcagggcaagggcgcgctctactccggctcaacagacggcagcatcagggtctgggacctcgacacccaccgctgcatctacagcttcgccggccactcgtcgacggtcaccgcattgctctgctgggagcggttcttgctctcctcgtccgacgatggcaccgtgaaggtctggcagtggaagcctgatcacgacgacctcgacctcgaggtgcactacacccacaaggaagacgaacgggtcgtttccatggacggaacgtacgacgccgacgagaagcccgtgctgcttgtctcccgcggcgatggcgttgtccgtgtctacgatctcccgtcgctgaagaagagaggggatattatctgcgacgacgaggtcaggacgatatccgtcaggtcgcgcggcgtcgtcttcaccggagatgcgtccggcgaggtcagagtggtgaagtggacatcactgagtgatgcagcagagtcttatttagctatggcctgaattagttttgatttaagagaaccatcagccaatttttgctttgtggtcttgtgattcagtactccgatgtatgtagtgtacacaacgttgtaaacagtggaaccgctacgcggcttgtgaat

SEQ ID NO: 8896 - DNA, 1833 bp, Oryza sativa
  ref <308>: DATABASE ACCESSION NUMBER: AK106244
  ref <309>: DATABASE ENTRY DATE: 2002-08-28
ccacctcccccaccgccatcgccattgccgccgacgaggaagaggagaagcttcgagtggagcgatctcgatggacccgtgcccgttcgtgcgggtgctggtcggcaacctctcgctgaagatgccggtggcgccgcgccccgccggagccggggccggggtgcacccatccacctcgccgtgctactgcaagatccgcctcaacaagctgccgtaccagaccgccgacgcgccgctgctgctgccgccctcgccggaggcatcggcggcgccggcgccagcgccggcgacgggcgcgctcgccgccgcgttccacctctccaaggccgacctcgaccgcctcaccgcgaagccgtcgctgttcgggtcgcgcacggcgaggctgaagatcgtggtgtacgctggccggaggggcaccacgtgcggcgtcggcggcggctccgggaggctgctcgggaaggtggtcatcccgctcgacctcaagggcgcctcggcgaagccggtggtgtaccacagcagctggatctgcatcgggaagcgcgggcgcaagccctcgtcggtgtcggcggcgaacgcgcagctcaacatcacggtgcgcgccgagcccgacccgaggttcgtgttcgagttcgacggcgagccggagtgcagcccgcaggtgctccaggtgcaggggagcatgaagcagcccatgttcacctgcaagttctcctgccgcagcaacagcgacctccgctcccggtcaatgccggccgatatggggagcggcgggcgcaactggctgacggcgttcggctccgacagggagcgggcggggaaggagaggaaggggtggtcggtgacggtgcacgacctgtcaggctccccggtggcgctggcatcaatggtgacgccgttcgtggcgtcgccggggacggacagggtgagcaaatccaacccgggggcgtggctggtgctccgcccgggcgacggcacgtggaagccatggggtcgcctggaatgctggcgcgagcgcggcgcgggcgccgccgccggcgacagcctcgggtaccggttcgagctcgtcctccccgacccaaccggcatgggcgtgggcgtgtccgtggcggagtccaccatcccggcgtcgaagggcggccggttcgcgatcgacctgacggcaacgcaacagttcgggcggagcgggtcgccggcgtgcagcccgtgcgggagcggcgactacgggatgtggccgttcggcagctgccgcgggttcgtgatgtcggcggcggtgcagggggaggggaaatgcagccggccggcggtggaggtgggcgtgcagaacgtcgggtgcgcggaggacgcggcggcgttcgtggcgctcgccgccgccgtcgacctgagcatggacgcgtgccggctcttctcccaccgcctccgccgcgagctctcggcgtcgcgctccgacctgctccggtgaggcacacgaggcggcggtgaatcgatcgatcgatcggaatcgggaacaacattgtacagctagcgctagcgttcgtcgtcgtcgttttctggtctctgtcgtttttgttgggtgatcagattgtgttgtgttttttattttgtttttgaaatcactactcgtgatttttttgtggtttttttgggtggtgaaatggtgatgagggggtttgtaattttggtagacttctaggtgctttttaaagtctagaagcagaggaggaagcagaagaagaagaagagcaagttcgggatcatgatgaatgaatgaacaagttataaaaacttttcgtgtctattatgttttaaatttcaaattcggagtttattttggcc

SEQ ID NO: 8897 - DNA, 2383 bp, Oryza sativa
  ref <308>: DATABASE ACCESSION NUMBER: AK106245
  ref <309>: DATABASE ENTRY DATE: 2002-08-28
acgccccgtccactcttgtccacgctgcgccgcgcagtgtcgcgcacaccccaaaaccccaaccaaccaaacaacccgacccgcggccatggatgcggcggcgggcggcggcggcgagccttcgccggcgccgggagtgggcggccggaagcacctctcctccatcgccaaccacgtgctccgccaatgctccctgacattggacagaagtgttgatgaattagttgcagactttgagctcggtttgaagactgctgcggtggataactattcaagaagacttgtcgagttctgtatccttcaggcgctgcaagttgttacatctgttgatctaggagacaagatccatgatggatcgcttagtcggttcacatttgatatgatgctggcttgggagacacccactccttcagatcaacaagttaccatggagagcatagctaaagaaagagaggataagaaggagccgctcggagcaaatgaagctgtcatgggcgatgagacctcactgttctattcagatatcatgcctcttctcgtgaatgaagaaccaacagttggagaagatgcatatgtgtggtttggatctgtatttcctttggcgtgcgatgttatcaatgctcgattcacctttgaagccctgactgctacaaccgctaataggcttcattatcctgcttacgacaaattcctgaaagaaatggacaagtcttccgaattcttgcagaaggtgtcaactccaaccggaactgaacttgctgaagatgaattcatcttgcacatcgagggaacagcaggaacacaaagggtggtgcggcacattggaaccactagttggccaggcaggctgactctgacaaacaaggcattgtattttgaggcttctgggaaaatttcatacgaacctgctttcaaagtcgaacttacaggcagtgaaataggaaaacaagttaaaactacttcaactggtccttttggtgcaccattgtttgacaaaggcatcgaatttgaactaccagaacctttggttttggagtttcctgagatgaccagctcaacaaggcgcaatatgtggcttaccctgataagggaagtaatattccttcaccgattcatatcaatgtacagcatagactcccccattcacaaatgggaggtgcattcgagaatcatattgggggtgataaggcttcatgctgcaagagagatgctaaggatgtcgccaccgcctccttctagcttcctagtattctcgctttacgatgagcttcctaaaggtgattttgtgcttgaacaactagcaaataatctgaaagagacgtcaacgataactccgctcagtgcatcccatgtgttcaagggtttgagcaagtcgcatcgggtagctttaagtgcggagatagcaaaagagcatgacaaggactcaaatagccatgaacagcccttggcatcacttgaaaacactatcggtcaagtaagagacgaggctcgggaagtcaccgtcgctaacgttgctatcgaaggaatgaaggaggaaggtatcactgatagccttcttgtactggtggggttagtaagccccatgagcaaattgtttccagtgatccaaaagataatctcatgggagaaaccacttgtgactatcagtgtccttgccatgatggtgttaaccatatacagagagtgggtcggttttgcgttagcggcatccttgatactggcagcaggattcatggtttgggctagacaaagaaaaatcggtgcactatgctcagaggtgatcatcgacacttcatcggacaagacgacgatggaaagcctagtggaagcacagcaaagcctgaaaagagtgcacgagtacatcaagacagcaaatgtcgtgatcctccgagtatcgtcgatcgcgttagcgaggtcaccaaagcatacagaaacggtgatatggatgctgacagggttggcgctggcgctggccgtgatcccgttcaaatacgtcctgatcggggtgatggccggcggcttcatgtcgaacacgaggatcgcgagagccatgtcgaacccgcagggaagccggcggtggagggagtggtgggagagcatacctgccgtcccagttcgggcggttgacgggggtggtctgtgaagtgttcgacgaaatgccggcagaaaaatcctcggtattgttcagctataagcttaagtgttcatgtatgttttttgctcagagatgtgccatactgccatcatctttatcacctgtcagctggtgtataccagaaaagaaaaatggcagagcacttaacacggaacactttgttggatgtactaacggttaaataactgtcaatgtgtgttgataaataaaggaatacgtcatatattc

SEQ ID NO: 8898 - DNA, 1499 bp, Oryza sativa
  ref <308>: DATABASE ACCESSION NUMBER: AK106246
  ref <309>: DATABASE ENTRY DATE: 2002-08-28
catggagctcgcggaggccgtccgggacgagacagccatggccatgcgcctgctcggccacctcgcgcgcgccccacgcggcggcggcggcgacaaaaacctggccgtctccccgctctcgctccacgcggcgctggcgctcctcggcgcgggggcccgcggcgaaacgctcgaccagatcatcgccttcctcggccccgcgggtggccccgcccacgcggcgctcgcgtcccacgtcgcgctgtgctccctcgccgacgacagcggccccggcgatgaccgcggcgggcccaaggtgcggttcgccaacggcgtctgggtcgacgccgcgctccgcctcaaggccgcgtacgcgcgcgtcgtcgccgacaagtaccgcgcggaggcgcgcccggtgtccttccgagacaagctagaggaagcgaggcgagagatcaacgagtggttcgagagcgcgacggccggccggatcaaggacttcctgcccaaagatgccgtggaccgcgcgacgccggccgtcctcggcaacgcgctctacttcaagggcgactggaaaagcaagttcgacgcccggtccacgagcgacgacgtcttctacctccccgacggcggccatgtctccgcgccgttcatgtcgagcggcaagtggcagtacatcgcctgccgcgccggctacaaggtcctcaggctcccgtacgcgcgcggcggccgcggccgcggccgcgacaccggccgcctcttctcgatgtacatctacctccccgacgagcgccacggcctgcctgacatgctgcgcaagctgtgctccgacccggcggcgctgatcgagagctccgccgccctgacggagaaggtccccgtgggcgccttcatggtgccgaggttcaccctgtcgtacaagacgaacgcggcggagacgctgcgacagctcgggctgcgcctgccgttcgagtaccccggcgccgacctgtcggagatggtggagtcatcgccggaggcggagaagatcgtcgtgtcggccgtctaccacgagtccttcgtcgaggtgaacgaggaaggcaccgaggcggcggcggcgaccgccgtcgtcatgacccttggctgcgcggcgccatcggcgccggttcacgtcgtggacttcgtcgccgaccaccccttcatgttcctgatcaaggagggcctcaccggcgtggtggtcttcgccgggcaagtcaccaatccttcgtcctcgacctagattccgatgtggtgaagtaagcagcgaagagaacacggagcggttcgtcagatcatgtccctgtagtgatctttgcgtgtaaaaattccggatcaccggtcaattctgtgatattgtagcaactatatatcagttatgcagcaaaaggaataagtacagtattggtgtctcgtcaaaagaaaacatgaaaatttgttaactgtgcacgaaactggaagcatattattcataagcagctgtaggaacttagtatcattcatgc

SEQ ID NO: 8899 - DNA, 3003 bp, Oryza sativa
  ref <308>: DATABASE ACCESSION NUMBER: AK106247
  ref <309>: DATABASE ENTRY DATE: 2002-08-28
atcgttgctcgaatatttccccgtccgctgtgcgtcgactccgactgctcgtgtgttcgcccgccgccgccgattcctatccatctcgcgagcgagcaggggcgccgtcgttcgtcctgctgcttccgccgcatccatcctgtgctaaagtttgtaccttgccttggaacattagtcatggagagtcagagaatgacctggctctacgatcgtcaccactccttgaaacataataaagctgaaagacaagccattctatcaacttatagattagcaaaacgtccaaatctctcttcagaaggtatgattggcgaaagttgcattgtgaggacaaattgtttcagtgttcatctggagtctttggatgatcagactatctatgaatatgatgtatgtgtcactcctgaggttggaatcaatcgtgctgttattagagagttggtaaaacagcagaaagattctggtttgggtggccgtcttcctgcctatgatggaaggaagaggctatacacatctggtccattgccatttgattcacatagatttcttgttctgctggatagtattgaagacagtcctgaagagtcaaggcacttgagagtgagagattttgtggtcactttaaaatttgctgcaaaaatttccttatggactttacgcaagttccgtggtgggaagccaaaccgagaaagtcgagcggccctgcgagcacttgacgttgttctaaaggaattacccactgcaaggtatacccaatttgctggttcattttactcacctaacttaggagaatgccgacaattgtgtaaggtcttggaaagctggcgtggttttcaccaaagaatacaagctactcagatgggacttcaactgaatatcgacgtgtcatcatcagtgttcatcaagcctgtacctgtggttgactatgttgcacagcttcttaacgaggacatcttattagacagaccattatgtagcactgagttcttgaagattaaggaggctctagaaggtctgaaggttcagattaatggcattttgttcaacacatatcatgtacaagaccttgtccatcaagcagcaagttttccagttaactttagtattcagtacccatctttgccttgcttgaaagtggctcattttggggagacaatatttctgccattggaggtctgtaaaattgctgagggacaatgtcaccagaaacagctcaatgcaaaacatatggctgctcttcttcaggtagctcgacagccccctaatgagcgtgactacaacattctgcagactgtgcatcagaacaaataccaggaggacccacatgctaaagagtttggcattaaaattgaggaaaaacttgtatcaattaaatctcgcatcctacctgctccttggcttaaattccatgacagtggcgagacgacagaattcttgccacaacttggcatatggaatatgatgcataagaaaatgatcaatggtgggagagtgaaaagctgggcatgtgttaacttttgctggagtgtacgggagtatgctgctaggaatttctgttatgaccttggctttatgtgccgagaatctgggatggtcttttcagttaaacctgtgcttcctctagtgattgctaaacctggatgtgtagaatctgcactcaggacacttcatgacgatgtcatggacatacttagaccacagggcagaaaacttgacctgctgattgtaatattgcctaacaacaatggatctctttatggtgatgtcaaaagaatatgtgagacagatattggactgatctctcaatgttgtcttgcaaaacatgttcttaagatgaacaagtggtatcttgcaagcgttgcccttaaaatcaatgctaagatgggcggaagaaatactgtactggttgatgctttagaaatgagactcccccatgttagggatacaccaactattgtatttggtgctcatgtcacccatccacatccaggaaaagctaatagttcttccattgctgctgttgttgcttctcaagactggcccgaggttaccaagtatgctggtttaatcagtgtgcaagcgtgccaccaggagtcaatacaaggtctttttaaagtccaggatgatccggaaagaggaaccacaactagcggaatgatcaaagagcatctcatgtctttctatcgagccactaaacggaagcccggaaggattatattttacagggatggtgtgagcaaaggacagctccctcaggctttgatgcacgaacttggtgccatcaaaatggcgtgtgcatctatgggacccgattataatccattagttacatacgtggtgctccagaagtgtcgccatacacgtctgtttgctgactactataatgcgaatactcatgattcaactgcaaacatacgggctggtactgtggttgattcaaatatttgccaaccaaatcagtttgatttctacttgtgtagccaccgcagcacgcagggaactaagcggcccaggtattatcatgttctgtgggacgagaacgacttcttggctggttctttccaagagctcacaaactacctctgctacacctccgcaacttgcacccaatccatatcagttgtggcccctgtgcactacgctcgtcttctgtcatcacgagctcgatgttacattaaaccacgctcgattggcgattcaacgagccacacctccttgccttctgaagaagatagcagcgcagcctcagagactggcagtcttcttcctataaaggataatttgaaaggggccatgtttttctgctagaactgctgccagcaagatctgctgtcattttgtacgtggtctgtacagtcccacagttcttggtagatttgactgagcagtcaaaactcattatcgttcagcgagattcaggtgtagcagctgtaggattactgataaacattgttcctgtaccgatactttagaagaaatgaattaattatatcttagaacagc

SEQ ID NO: 8900 - DNA, 3248 bp, Oryza sativa
  ref <308>: DATABASE ACCESSION NUMBER: AK106248
  ref <309>: DATABASE ENTRY DATE: 2002-08-28
aaacacaagggcctctccacaaaaagaggtttccgccgccatcgtcggcgtcggcgtcggcggcgatggacaagttaccggcggcgtcgtccgccatgcaatggagcatcgacctcgacagggctctccgctcccgccaccccgccacgcgcctccgcgccgtcgacgccgtcgccccgcgtctccgggagctcggagcctcgccgccggccgccgtcccccccgcggtcgcctccgccttgggcgtcctcccctccgaaccgcgcctcttcgcccacaccatcctcctccgcctcgccacccacttcgccaccgccgacaacgccgtccgggcccgcatcctgcgcgccctcctcctcctcggcctcgacggctcgctgcccatgaccatggcatgcgtggcggcggaaccccaacatcaggtggcggtgctcgcgagggtcaaggccgcctacgacgctggctgcccgcgggccagggctctcgcgctgcggatgttcggatgcctcgcccacctcgcccaccacagcctccacctccgctctctcatcctctccaccttctcttcctccaatgcgctacaggtcaaagcggctttgtttgcagctgcctgtttttctaggctatcagtggatttctcatacattacacttgaatcacttcgaagattaatttcttcaccaacatcacaacctcaaattatcatggcagcgattaagattttccccaagcttgactgtacgttggctgttatccatagagttcatgaggtgttcatggatatacgtgtttcttgcttaacttcgttttttaatctttttttatttactcttaagttgcccaacatttacattgctttctcactcttacggattcattgctttaacaatactccatatgcctaccaatcatgtgcacatactccaaggaatcatcaaggaaagaaaatttaaaactacacattgctctgatttacaacaatagtaatctagtccttgaacacctaagttgttagttattactccctccattccaaattgatcatcatataatttttttgaaaatattcctaaatgatcatcgtatttgtgttcattcattaagtctattcgttatttgtgcattggggtaaatgagcattgattcatgcatccatacacacaagtgttttgatttgctattggctaaaaaatagtggggattgtgcatgcatcaagtttattgctaaagtaaatgtagcatgagagagttattatattttcttggtcttggtgcactcatgtaatatgatgatcaattaggaatggagggagtacaaatgtaagttagtttttgcattacgggttaatgtgaagaccaaagctctgaaaacatccaatgaaaaaataagtctatgaaataggtaaatatgtgatgatagtctcgatgctatctgtcgactttatcttgtgaaattggacctaccaataaaactggctagttttctgaaatggagtagtagaacataaaagactaatgatatattttgctttatacaccaatcttaggtgggatctctgattttttttcttgcagttgttttcatcacattttaaagaagcattttcactcttgatgtcacaggttggaaagcagatcgttctgggcacgttggaagataatttcaaagctgacatgctcttgtcactttcaagattggcatccaaatcagttgttctgttttgcaatcaggtagtgtaatccactagttggtagcatatgtatttgacttaatttgttctaactcatcgctgcaattatgttctgtgttacatcatttagttcactttgcaataatcatatgcatgtgttttctgtttatagaagtaaatatactctctttctttcgaatgcttggcactttataacctgattcgtgttttctcaaacatctgaagatgctattaatcgcatcccatttccttgtgtcatttcctgtgattggcatgctactaaaggacaccttagtcacattttaaaattagagatgacaatcaagaatcaggtgattcaaatttcttttagaattactagctatgtatttttaccctcttgctgagaagctgggggcattaataccaatgctctctgtttcctttgtgaattgacttaaaagtaaactttatttcgatttttctatttcaggtggaattgctgttattgttcctggagcatgaatcttctcattgcatgaagactgtgtcattgaaatgtttatgtttcatgtttcacggaagcatctgccattttcctgttttaaagactgtttttgggacgttattacagctaattgatgatgatgatttcccacttgattgtaagagagatgcatttatggttcttcaaaagatagtctgtggcaaagctccaattgttcatttagtcaatacttgtgagctatctaagcttgttctggctgctgaaagttctttgcattcttcttcctgggagatgcaaggaaggttcatcattgacatacaatgggtgtcaagggattaccagcaacttcctgtcaacagttgaaaatgcggaggacaaattcgtgcataagattgtaacatcaatggtaaatcataatatatccctggtcaatcaaataataagcactggaaacaaggaaacaataaggaaacatacctatatgtcctctgaattcaagatgtacagatctatgttaagcagtatgctaaaacttcttgtgtgctacccttctgctgctgctgttgctcttgataaactaagatgcctgataaaagaactagcccgactagatgacagtgattgctccgaagtttctgttgccaatgttgaatcatttcaaacaaattctgcccgtgaagtacttgacacttcaaatgatattgtcaagccagtatctgctagtatgaaggcttctcacatgggaacagattttgataagttaaaattcgaccccgctgaatttagtagcaagaaggaagtatctatagtgcataatataattctttggacactcaagtttgcaaattcttgtcataatatgctttctaaaacacctagtgctagctgcaatctttatgatagcatcaaggagctgattgagtgtgtgcagcagaatacttctctgtattgtagcacatacgaatctttccatctggtaatgtgtgcttgtatttcatggtatgcttgtaaaactcgagatgtcaatcaagaatcaggggattcaaaag

SEQ ID NO: 8901 - DNA, 1674 bp, Oryza sativa
  ref <308>: DATABASE ACCESSION NUMBER: AK106249
  ref <309>: DATABASE ENTRY DATE: 2002-08-28
gtcgtaacgtactctgctttgttagctctcggagtctcggttcgtcctcgcgtggcagacagcagcagcatgagctccctagtgcgagtcctcgccgtctcccatgtcctccccgacgaggtggccgccggaggcgcatggccgccgccgccgccgcacgtcgttgagctctccttcttggacaacctccaggtctccaaggcagcgatccagcggctcttcttctacgacggcggcagcctcccgcctttcgaatccgttgaccgctctctgcagtcctccctcgccgccgtgctcgccatcttcctgcccctcgccgggaagctggcctacctccccgagcccggcgacgtcgtcatcgactactctccggatgccgtctcccccggcgtcaagttcgtcgaggccgagtactccggcagcgtcgacgacatgcgccgcctcgccagcgacgacgagcaccacaccgaggcgttcttgcagctcgtgccggagctcgaggtgagcatgctcccggcgcctcttcttgccgtgcaggtcactaggcctagagatgaccacgccggcggcggcggcggcgcggtggccgttggtgtggccattcaccatggggtcgccgacgggcagtcggtgtggcagttcatcaaggcgtgggccgcggcggcgcggggaggctctccggccggccagggtctcgtgccgccgacgtttgaccgctcgaggattcggcatccaacggccgatagccatgagctcgcccacacgatcttgcacaagatgtcacccgcgcttccaatggtgacgccacgctcgaagccggctgacatggcgcagcagaggaggagaaccttcttgctcagcgccggcgagatccagtcgctgaagcagcgcatatcggagagcgaaaccggcggcgagctgctgcacaaccggctgtccacctacgtgaccatctcctccctggcgtggacgtccatcgtgcgcgccaagtgcggcgccctggacgcggccgccgacgacgtctacttcatggtgagcgcggactgccggcgccggctgcgcccgccggccgacgagggctacttcggcaactgcatcgccatagcaatcgccagggccagcgccggcgagctgctcgacgacgacggactagccgggctcgcgcgcgccgccgcggcgatccaggcggcgatccgggacgagctggagctggaggacccggtgggcggcgcggagcgctgggccgagcgtcttgccgcgatccccagggggaggctcacggcggcggggtcgtcgcaccggttcatggcgtacgagacggacttcgggtggggcgcgccgagccgcgtcgagctggtcaccgtgtacggcaacgagctggtggcgatgctcggcggcgcggcggacggcggcgtgcaggtgtcggtggtgctcgggcgcgcgctcatggacgcgttcgcggacaacttccggcggcaggtggtggcgtgtccaaactcaacagtgtcgcggtcccgccatcattgatcagtgcaaactgtgcggaatggagactagtactggccttgaattggacacttaggtagtgtttggttacaaggatgggatgggatgagatgaacccacttttagggatgtttggttgagaggtaagtgggatgggatagtccctat

SEQ ID NO: 8902 - DNA, 1733 bp, Oryza sativa
  ref <308>: DATABASE ACCESSION NUMBER: AK106250
  ref <309>: DATABASE ENTRY DATE: 2002-08-28
agcattaagcactacgcatcaaacaacagccgaactgttgagtcccaagaagtcaagaacccaaggtgttcgaccatgtgttcggcggcaacacccaactccggcgacgtccgtgctaccccaggatcatcgcggccgcacgtcgtcctcctaccaagcgccggcatgggccacctggttcccttcacccgcctcgccgccgcgctgtgctccggccatggctgcgacgtgtccctcgtcgcggccgtgcccaccgtgtcgtcggccgaggcacgccacctcgccgcgcacttcaccgcgttccccgccgttcgacggctcgagctcgacctcgcgtccctcgacgtgtccgagttcgccggcgccgacccgttctacgtccgttacgaggccatccgccggtcggcgtcgctcctggcgccgctcctcgccggcggcgcgtcggcggcggcgtcggcgctggtcgctgacatcgccttggcctccgttgtgataccggtggccaaggacctccgcctcccgtgctacgtcttcttcaccgcctccgccacgatgttctccttcctcgcctacctgcccacctacctcaacgccaacgccggcggcgggcacgccatcggcgacgtcgacgtccccggcgtgtgccgcgttccgacgtcatccgtcccgcaggcgctgcacgacccggacgacatcttcacccggcagttcatcgcgaacgctcgcagcctcgcgaacgcagacggcctcgtcgtcaacgcgttcgacgccctggagccggaggccgtcgcggcgttgcggcagggaaccgtcgccgccgggttaccgccggtgttcgccgttgggccactcagcccggcgcccattccggcgaaagattcaggcagctacttgccgtggctcgacgcgcagccggcgcggtcggtggtttacgtcagcttcggcagccgcaaggcgttgccaagagaccagctgagcgagctcgccgccgggctagaagcaagcggccaccgtttcttgtgggtggtgaagggcgccgtcgtggacagagacgacgccggcgagctcaccgacctgctcggagaagccttcctgcagagaatccatggccgtggcctcgtgaccatggcgtgggtgcgtcaagaggaggtcctgaaccacccctccgtcggtctgttcatcagccactgcgggtggagctcggtgacggaggcggcggcgagcggcgtgccggtggtggcgtggccgaggttcgccgaccagcgggtgaacgccggcgtggtggcgcgcgcggggatcggcgtgtgggtggacacctggagctgggagggggaggatgatggggtggtgagcgcggaggacatcgccgggaaggtgaggtcggcgatggccgacgagggtgtaaggaaggcggcggcgagcgtccgtgaggccgcggcgagggcggtggccgccggagggagcagctaccggagcttggcggagttggtgcgacggtgccgtgatgggcttgtcatcacgaacggaatgtgagagaagcgaggagaagacggaatgggcaaacgtccaaacgaaatggcagcatcttcaagcattgtcagtcagtcaccacagtccacaggtggtaggctcacatcataaaaaacctttttgttccatgataagcacacatgcacgagatgtcaccaacaatttcaaccaaaattatcaacccaaatagtatttcaaccact

SEQ ID NO: 8903 - DNA, 1872 bp, Oryza sativa
  ref <308>: DATABASE ACCESSION NUMBER: AK106251
  ref <309>: DATABASE ENTRY DATE: 2002-08-28
gataaggtgcgccaagtaggaaaagatggagcagtggcacggcggtggctctccaaagttaagtccgtcgcctacgacgttgaggacgtgctggatgaattcgatgctgctcagctcatcaggaaccatcaatccaagctcaagttatacttttcctggaacaatccgctcctccagaaaatgaccatagcacgcaacatgaagaacttgagggataaaatagttgcaatagaaaaggatggcaagatgctcaatcttgtgcgtcatgaaccacatgcaaaagggagtagaagcaacgaaacttttactgtcagtgatgatatggagattggaatgctagggagggatgctgaaacagaaaaaataatcagccttctattgaaaactgaagccaaggaggatatctcaattattccaattgttgggcttggtggactagggaagacaaccttagcccaagcagtttttgcagacaaaagggtccgtgtctttgatatgaaaatctgggtttatgtttcagaggattttgatctgctcaaaattgggaaagctatcatcagaggagcaaacagaagtatcagcctagacaactgcaacttgcagtttgtacaagataatctgataaaagaacttgccaataggagatacttgattggtctagatgatctctgggaagaatatggagaaaatttggaaaagttgaagcagatgttacaacatggcggcaagggtagcaagattatagtaactacacgcaatggaagtgtagtgcaagtactacacactggttgtcttgcaaatcagcggaaaatatgccctgtgcatgaggccgatcatatcaatttggatgttttatcacctgatgactgctggaaggtgatgaagcaaagaatatttggacctgatgatgatcaaagtggcttagaggaaatcggaaggcaaattgctgggaggtgcgggggactaccactggtggctaatgctcttgggcaagtaatgtctgagcaaaggaccgttgaggcatggagagatataagagacagaaagattgttttggatttcatagtaggtaatcggcgagacactttggaacgcgtcttgttgagctattactacatgaagccaaactacaaaatgtgctttacatgtcttgcatcattctcgaagggcttcgttgtggacagtgaccgcctgatcctgcaatggagcgcccttggatacattcaagcaaggcatactggtcaaagttgtattgattatcttctggggatgtcctttcttcagatttccaagtcttcatcagttagcccagtgcatgccaaagctccacgaaagctcaccatgcatgatttagtgtatgatcttgcaaaaataattgctgctgatgaagtccttgttatggatgccaacaaaccaacaacatgggacaaagctaatgagcattactgtcgacatgcacagttggtcaactaccataagcgaactgagatttttaaacatataccctgcaagatacgaaccctctgttttagagaatgtcctgaaatgcaacttccccgaaaagcattctctcaaaccagttacatacgtatattggacctgagtggattgtccaatgaagagcaatctactccaagcaatccagtcctgccatcttccattcgtcgactgatgttgctggggtatcttgatgtctcaggctttcctattatatccctccctaaatctttccacacacttcaaaatatgcagagtctaattctctccaattgctctcttgaaatattgcctgccaacattggtagcctccaaaaactttgttatttggacctatcaaggaatagtaaccttaataaactgccgtcatcagtc

SEQ ID NO: 8904 - DNA, 1400 bp, Oryza sativa
  ref <308>: DATABASE ACCESSION NUMBER: AK106252
  ref <309>: DATABASE ENTRY DATE: 2002-08-28
gagcagctcagtcgatcacgagctctcgatcgtactttgcccagatggcgtcgagcgggcatggcctgccggcgtcgagcctgtcccatggcttccccttgctgctccagtgcaggaggctgaccgcgacggcgtgcaggccgcagtagttgtcgccgccgaggtcgtgctggttccagcggtggtcgaccgcggcgatgcggccggcgaacacgaggaggaacggcggcagcgagcccagctcgtagatgcgcacccgcttctgcagctctatccactcctcgatctacgccatgtagccggcgcggcatcaccgggacaggtcgagaaccatgacgcccgcgaacgcctcgaacagcgccagcgacgcccagaaccccggcgtgaagtaggcagtgaagttggcgccgcaatacttgggcgccgccacggccgtctcacccgggagcggcgtcacggtgagcgcggcgatgtcgtcggtgaggacgacgtcggagtcgaggtagacgacgcggcagacgcaggaggggagcgtggaggcgaggtaggagcggtcgtagttgagcgggcggtcgagcgtgccgcggatggaggtgaagatgagccccgcgacgcaggactcgtcgaacgggtacacccggaacaccagcgacgggaacgacgcccggacggtatccctcagctccctcaccgccgcctccgaagagacggcgaggaagtggaagtggactgaccccgggcaggaggcatggcggaggacggagagcaccgcggctatggtgcccctcaggtatgacgcgtccagcgtcatggccacgtgcaccgccgcgtgcggcgagcacgccatgtccgcgtccgtcgccggcagcggcggcgctgcaaagttggtgaactgcagcgcctagctccctgtactccggcacggccaccgccaccgacgcgcggctcgagcgcggcgcggtggatgacgaggaacgcgggcgtccgcgaccgcatgagcccgtggcatgcgtccacgacatcgtcggacgcggtgggccgcccgccacagcagccgctccgccactgcccgcagccgccggctcaccctagccaccacgcacagcgcccgcggtcccagttcagcgcccagaacaccaactccagcaccttctcgtccatgatccgcggcggccccaggcggcggagcgttggccgcaggcgcggtggtcacaggcggcggcgcgtcggcagcaggcgtcgtcccaagtgtcgaaacgacgggcggcgaggagtggcaggcggcctcctcctttacctatgatttaggataggattatttggagtgagggtaatttggtcattcttgtaaaaaaatttgttctaacggtgtggactaacggtgtgatggcatttctggg

SEQ ID NO: 8905 - DNA, 1386 bp, Oryza sativa
  ref <308>: DATABASE ACCESSION NUMBER: AK106253
  ref <309>: DATABASE ENTRY DATE: 2002-08-28
aaaaacccggcccgctcccacgctgtgtcacacccacctgccacctcgccgcgacgaccccctcgccgccggccgccaccgcgcgtcaactgccggcgatgccgcccccttccctcctgctcctccatccacgcacgccgctgccgcaccaccaccgctcctccttccggacgagctctccgcggccatccaggatggtctgcgccgctgccgaggggtttatctccgcggcgccgatcctcctccccgacggcccgtggaagcaggtggaaggcggcgtcacggcggcgaaggggttcaaggcggcgggtatctacggcggtctgcgcgccaagggcgagaagcccgaccttgcgctggtcgcctgcgacgtcgacgccactgtcgcgggagcttttactacgaatgttgttgctgctgcaccagttttgtactgtaagcgtgtccttaattcatcaaaaacagctcgagctgtgttaattaatgctggacaagcaaatgcagcaacaggtgatgcaggatatcaggatacagtggatagtgctgatgctgttgccaagcttcttaatgtgagcacaaatgacatactgatccagtccactggtgttattggtcagagaataaagaaggaggcacttgtaaattcacttcatagacttgtgggctcactgtcttcatccattgagggtgcaaattctgcagctgtggccattacaactacagaccttgttagcaagagcatcgctgtacagacagagattggaggagtgcctatcaaaataggaggaatggccaaaggttctgggatgattcatccaaatatggcaacaatgcttggtgttttaacaactgacgctcaagtcagcagtgatgtttggagagaaatggtccgaacatcagtgagtagaagcttcaatcaaataacagtggatggtgatacgagtaccaatgactgtgttattgctctggctagtgggttatctggtttatccagtatccttactcatgatagcactgaagctcaacagttccaagcatgcttagatgctgtaatgcaaggtcttgcaaaatccatagcatgggatggtgagggtgcaacatgtctaattgaggttactgtagctggtgccaataatgaggctgaagcagctaaaattgctcgttcagtggcatcttcctccctggttaaagtatgatactgtttagcagcaaaattttgctaattaggagaggattgacacccctctgtcattcgttagcccagaaagcctgagttgttaaattattttttatcaggccgctgtatttggaagagacccaaactggggacgtattgcttgttctgtcggttattcaggcattcagtttgatgcggaccagcttgat

SEQ ID NO: 8906 - DNA, 1629 bp, Oryza sativa
  ref <308>: DATABASE ACCESSION NUMBER: AK106254
  ref <309>: DATABASE ENTRY DATE: 2002-08-28
gaaacaaaaacgcgggaaaccgccacgctcccgcgcaaccacctcgacgatggagcaatggctgccgctgttccgctacctcctcgcctctccggcccccaacgccgccgccttctcctcctcctcctcctcctccggcgacgacgacgtgcactgccccaccgcgcctcctcctgccgcggccctcctctgcctcctcctctccccggcgcccacgctcccggcctccgatccccccgccatcctcttccagaccctgccgccgctcgcccagtcgcaggcgctctccttcctcgcctcctccgccggcctcctcgacccggcgctcgtgcgctcgctcgctacgcgcgtcctctccgagccgtctggcaggtacggcctctgggcccgtcgcggcgtccgccacctgctcgacggattgccgcagggaggtggcattgatgcacctggggaatttcttgatgggttccacgagccgccgcagtggcttaaagaagcggcggcgaggacacgtcctgcacttccatggctacctcttgatcggcacagcgtcaaggttggtgtttgtagcggtcggtatggtttcgatagagttggtttggattccttggtgttggagaaagacgaggattcggagatgcaggaggctaagtgtgttccatctccatcacaaccggctgctcttgggactctgtccgtgcagagggcgctggctctacagaaggagattttgatggcagaatcaattttggtagcccagcgtgtggcgaaagatttgcagcagctttgtgtcgagtctgggaatgctgaggctgttcttagcatagttcaaccatggaaagctgatgatgatactgtgagggttctgctttccagtttagtgctcgacggagatggaatgcatagaaaaggcccagcgcttatgctgtgttctcttttcttgccgaagttactcgaaattcaaagaccagtttcatcagttcttctttctgctgcattgatctctgcaagcgccacccagctgctgcactggaggctatccttttaccgctggttcttagaaaggaagggctaaatgttcctcagtgcgatgtgctcacacgaattgtcaaggattgcatgcatccgttgcatgtcactgccttctgccatagattgctttcaggggatgagagagagtggaggccagtttgtatgcctgagcaccggagcaacatcagtagtaatttggtttggacagaatccctctttgcactgttgtacagcatactgaatcaagacatttgcttgacatcaagcagcaccgaaaatctagtgtctgtgattgatgagatggcatcaaagctcccaagatcactgaaatttggtaattttctgctctgcttcatctcgaaatgttggcgcgtatctaagattcacagcgttttgctagagagagctgctgagaaaactgacactttcctgactaaagctatattagcaaaactgcgaacggcaaattgaaatgcttccttagaaacttcaaaggtgaacatctggtgagtgtacatttcagattatctgaaatatgtgatttcatgaatgaactgttttatttgagttttgaaatggatatgtttttatttcaag

SEQ ID NO: 8907 - DNA, 1343 bp, Oryza sativa
  ref <308>: DATABASE ACCESSION NUMBER: AK106255
  ref <309>: DATABASE ENTRY DATE: 2002-08-28
aaacaaatcactccaatccccacatcggcagcacatcccccttcgctcccctcctcgtcgccctcctctgccctcccctcccctccttccggaaccttctagatgcttctcacgcgaaggttctcctccgccctcgcgcgctccccccttctccccaggtccctccctcctccgcgggccgtgcccgccacccctccggcgccccgcccgccgccgcgccgcctcatgtcctcctcctcctccggctggcaccactcctctcgcccgcccccgccgcccccctccggcgccgacaaggatcagctgttccgggggctggaggcggcgctcggcacgacgttcagctcggagccgctcgcgccgccgccgcagccgatgatcctcgtcatcagcgggcccagcggcgtcggcaaggacgctgtcatccagaggctgcaagaagagagggaggggatgcatttcgttgtcaccgcgacaagcagagcgaagcggcccggtgaagttgatgggaaggactattacttcgtcaccaaggaggagttcctcacgatgattgaaaggaaggagttgctcgagtacgcacttgtctatggggagtataaggggatccccaagcagcagatccgtgattacatggcgaaaggttatgatattgtcttgagagtggacattcaaggagcagcaaccttgagagagattcttggcgaatcagcaatcttcatctttttggttgcagagagtgaagaggcacttgtcaaaaggctaattcaccgcaaaacagaaacatcagatatgcttcttgtcagagttgcaacggccagagaagaggtgaaacgcatgaacaattttgattatgtagttgtcaattctgaagggaatcttgagggggctgttaaacaggtggagtctatcattgatgctgagaaggctaaggtccacaaacgtacggttaatatctagtcaatgctcataagtcacatgctcttttaacggtttggaggaaaattacctggtatttttaatcaattcaagtttgaactattgtggaggaaatcgccaatgacaatctgacctgactcttacaaaaaaggccaatttgacttacattaaatttgtagctgtaagtcagaaagtgaagtgcatggcaagtcattggagttaaatactgaatatcctgattcaagtggcttataacagcaatgtacttgtgcaactctttctgggtagaagtaggtactttttattatttatatattatctgtattttatttgtttgttcgaatattacaaactactaataactgcttgggatgaatccttatgctacggatatttccttttcc

SEQ ID NO: 8908 - DNA, 1709 bp, Oryza sativa
  ref <308>: DATABASE ACCESSION NUMBER: AK106256
  ref <309>: DATABASE ENTRY DATE: 2002-08-28
gcgtgaagccccgtgcgtctcccctccggctccgcttctcccctcgccggcgccgtcgccggcgttcctcggctgcagatccaatcccgcgccccgccgagtgactctcctgattccctgacggcctattgaagagctgcctagaccaccgccgctcgcgactcgcgagcgctggggcgcccgccggcggccgccacgcccttgttggctaggctgctagctctctgcccctctcgcctgtcggcctctactccggctaaccagagctcctcctcccttgctcccttggctacacgggatttgcggtcttagaaaatttcggtatatgaagttaggcacactcaacaaaatattcctgactacaccacttttcaatgcgttggcataggactagtgggctatggcgacccgcgtcctgtcacagaacctgagaaagttggcttcgttctcactcctcaatctgtcccagggggcaccaatctcgccttcccctgaacctctcaggcctgctattgcttcatttgggaaatgcttaaatcccttttatcagtttagtcctccgtggatggttagatgggctagccatagctcagtcaatctagttctatctgatgatgggaaacccaagtttgagattgaggaggtggaaccttccaagaagcgggggtatttgacaaagaagcgattgaagcttcagaggaagagggaaaagaagaagaggaaagaggccaataaaaatgatccacggcgtatcagacccaagggaaagaagataaaacagaaatttcctacacctgaagctcgactcaaatacaagattgagaaggccaaattgaaagaagctatgttggttgagaagttaaagaagtatgagattgctaaagcacaaggccctatggctaaacaagatgatcttgatggcgaggaaagattttatttgaagaaggtttctcaaaaaaagtcaaattatgtccctgttggaaggagaggagtctttggtggtgttattctaaacatgcatttgcactggaagaaacatgagactgtaaaagtcatctgcaaaccctgcaagccagggcaaatccaggagtacgcaagtgagatagccagactgagtggtggtatccctattaatactattggaaatgacaccatagtcttctatcggggaaagaactatgttcagccagatgtcatgtcaccagtcgatacactatcaaagaaaaaggcacttgaaaaatcaaaatatgaacaatcactggagacagtgaggcgttttattgccgtgtctgaaaaagagcttgaactttattatcggcatattgcactttatggaaacccacaatcccagaatgttgatcctgtttattgtgatgatagaagagctgcttctctgaaaatggaagaaccgagtcaagggaaggacctatcgcatatggataacgatggtttctctgatatcactgatgcttcggagtctgacgaagaagctaatcctagtgaatatgatgataatgatgatgagactggagataatataggcactgttctttatgatcatggaggcttcaaggtaacagggtgataccttgtgtggcatcaactcatttgctgactacgaattgtattttgcatctgtctagacccctattctatacatttggatttcttgaacagttgaatggaaactccgtggatgatcacctgtc

SEQ ID NO: 8909 - DNA, 2085 bp, Oryza sativa
  ref <308>: DATABASE ACCESSION NUMBER: AK106257
  ref <309>: DATABASE ENTRY DATE: 2002-08-28
tgttgtagacttaagagaagagaaagtaggcggaagcctaggagggccaaccgagcgaagctctttctttttttggccgtgccgtgaagtgcaattttctcgtatgcgttttagagaggttgtcgaaaaaagacgatctatagagattccccatccatatccaatcgagaatagaagcgagtcgcttccggcgtcggcttgtagtctctgcagtcggcacacgcacgcgcccgccatcatgcctccttggttcgggacgaagccaagcgaggcatacgatagacgaaggaagcgcccacccagcaggagggctaaaacttgtagttttgaagttgcaaactccagcttcgaagctggagtgctttagccctttagttttgaagcaagaatcaccgtcttgagcgccttgcgcgctcaagaacaagcgatgagcgctttgttgcgcctgtgcggatacgttttcttgctggggaaggctagtttgatcgaggattggggaggagaggtggaataaaaagctcgggatggattttggagtctttgtgcgagccgtatgcggtgagagtcgcacgtacggtaaggaggggggttcgcgtctatacgtgtagtgtggtggttgggcctacccaccctatttgttccatgatctatgggtctactggagctacccacttcgatcaattagccaagattttgaccggatacgaaatcactggtgctcaatctagtggtatttttatggggattctttttatcgctgtaggattcctattcaagattactgcagttccttttcgggcggctgtaggacggacggccccctataggtagtagggtaggatgggtggtaccgctcagatagcggccaatcctcctaactgcgcgcgggccgggcttagagcgcgtgaaactcatcactacctcgtaagggcgttgagaccatagcatgttacacaaaagcgccgctttctcaggagtgttgtcacacagctgcccgactagaagagctactcgctctgtagtgttgtcacacaagataagcacgccgcccgcctgctggccgggcgaatcgaagttatcttccggtcaactgtccacccagtcaagtgcaaaaaacacagtggaatcacgcaacgcacgctgctggtgtgcttcctgcccacgaggaaagaagagcgacaaggttcagatttgactgtttgcagcatgggagctgattacccaaaaaatccctgggaaaaagaaaagatatctcggtaacgaaaaccataggaggctgtattggcgagatccaagggttcccagcagcccaaaagaaaaaccgcctggaagtccgaggacctttagtaccgtaccgaaccagcagccttcgcgccaagcgacgaccgcccttgtccctttcctttttccattcagcctacttcttagctttgttccgtcagtctaaggcaaagcttaagtggttcgcctaccttacccacttgatgaaagggaacgaacttcgtttccttgacggttttatggatggattcagtcagcctcactccttccttttgaaaagtgacgctttgcgtcttcgcttccgagggttagggtataggccgtttcgagcaagctttcgctttttctcccggctttctacaactttcgctttagcttcgcgacccctttccggaatttgaagtattcgtcgccctaccctaagaaagaagtcactataaaacagcttgccctcctgaagtaccaaaggtgcgcggagcccggtgaaaatgaatatgtttgctactgaaagaagcctgcctattgactaatattcgtctttagaatgaaagtagctatgaagcccaatctactgtcgattcaaaagagggcatagtcgtatgggtggggtgtttgtggggagctgccttggatatgaggaattcctcaaatctaaaaaaaatagaacaaaggcaaagtccgtgacgaagatctttcttttctatcaatagatagaaatgagtgttcgttataggggataggatccatctgctctctctctattttctttgatgcaatttagagagaaagagcagtgcgaactag

SEQ ID NO: 8910 - DNA, 1367 bp, Oryza sativa
  ref <308>: DATABASE ACCESSION NUMBER: AK106258
  ref <309>: DATABASE ENTRY DATE: 2002-08-28
aacgcgaagccaccacgacaaccgcagcaaaatctccggaagccgccccgccaccgaaccgaagagcgccgccaccgccatggggagtctcggcggcaagtccgactacgagagcgtccgcgacgcccgcatctccgagaacctggcacggatggagatgctcggcctgcgccgctgcgccggggagttcagtgccatcgcctccgcctccgcgtccgcctcggcagcagccagccgccgcgccgggatcggcggcacaaccccgaggaggaaccccaagccgccgcgtgtcctcaccccgctccgccgctccggccgattggtcgccatcgccgccgcggcgccggccggatccgcgtcgggtccccgccgttccgcccggcttaacgggcagacgacggagcacaaggcgctgcctctgaaaggatctttgagtaagtttgccgcggaggaagcagaggaggaggaggaggaggaggagcaagaagagaagaaggcgatggtggtgatcgacaaggagagggtgcggatcctgcaggagcggaggtgtgacagcaaggggaggggcgccgtgtacgaccctgttcttgggatttgctgccatttctgcaggcagaagaaattgtgcggcgaggagggctgcaagcgctgcggggaaggagacctgaaccagccttgcatagggaagacggattgctcctcttgccattcttcttatggaatactgtgccgtgcttgcctgaaagtgaggtatggggaagacatggatgaggtcaggaagaacaagaactggatgtgccctcactgtattgaggagaagggtaccaagaaattctggatatgtaacagctccatctgcttgaagaagaggaagttatcaccaactggaattgccatatacgacgcgcgggagcaaggttacgagtctgttgcgcaccttctcatggacaagctgaagtgccgagcattctgaggtcttctatgtcgttcagagacgacgatgatgtttgcctagcgcactggaaggtggaagggccccttttgttttgttgacagtaggtatgacgcactttaggagaaaaactagtgtagaaatgagtaccactattgtgctcaagattgtgaatctagtactagaaccttttgtagccgatgtttccatatgctgcttgtgtttgggggcagctgggctattgactgttcttctgaagatccaagcaagggaacatgtattgccttttcaatcagtggttgatgagtcatgaccataactgtgtctgctacttgctaatttcatggcttaatgtcatttgtaccaaacgataattttgttaaacattggtgccttggtggcatgccatttggat

SEQ ID NO: 8911 - DNA, 1622 bp, Oryza sativa
  ref <308>: DATABASE ACCESSION NUMBER: AK106259
  ref <309>: DATABASE ENTRY DATE: 2002-08-28
attctacgaacaaaaaccccagaatttttccgatgattccttcggattcgcgtttcggggctgacgaaacccaatccaccacccaaaaaagtagcgagtctccgatcgaattcgccacccagtatctcaatttcgttcgtgcgaggcatccgtgttcgatttgcgaaggtgaattttgatcggtttggtttggatttttggtttttttttttctccatcagatggatggattggcgccggcggcgatgtcggaggcgctgctggtcttcgcgagcgggagatccatcggcggcgccggtccaggacgacgacctcatcttcgccgcggcgagagccgggagttcgcgtggatctacgactacgaggatgcgccgatgagtgcgccggtgtggtgagaggggtttgggcagctccaatctcgagtcgaggcgcccgctgatggggacgaggaggtcaatggggatcgagcgtggcctcgcggctcgcgccgtccatccccaatgggaagaagggtggtggtatgaagattctagggcgaggaaggacgattccgatcagggatatcgaggaagagtaggatgtagaaggcgagggaagccgaaacctctctcaagctagaaggatgattggctctcctcagtgtttcatagatcatacatataatacttgtcggctcagggggaaaacataagttatctgcacagtttggattgaattttggaatgaagataaccaaggtctcttgccagtttgctcctgcagtgtcccgtactccagtgtggccacttgcctgccagtggcgatgaagaggaaacagtgttaaggcatgcagtgcagcaacaagctcggccggtttaagagtgatgacaagcacgcggtccctgctgcggtttgtgcccagaatgggactgtgagcatggccgggacagatagttttgttggattggatgcacactgccggccggcctgcaccatcgccgtcccgtgtgtcacgggcactcgtacgtcgccggccgtcgccgtcactggcccacccgtcagcggcacacggtggggttgttcttgttacagtgggaagctggaagagtgttggcaagagaacagtgaggctggttgttgctggctatgatgttaacctgacctattgctactgctcctgctgcacactgtggctctccagtgactctccagtgagcccatctcaacctatccggtttgtgcatgcggtgccatggccattctggagctgagtcccaggttaaagtggtgtacccatccaatgttgctgctgctgttcttgatgtgcctgtcctgaaacatcacaagtgaagtccagtcaagttctgttcagtgtccccctatcttcacgagacgagctggcgttgcattgcgagaagagagatgacaaacggtgtggctcaaactgggagctcatcccaagcaaaagctccatctcaaccgatggaagcaggcaaagcattttagctcctactacttcattgtatcacggtgaggattttggttttgttttgcatgatacaaaagattgctgttcatcgttgcagcagttgggggtaaggtagtaactcccccgtcccataatataacattttttttctatg
